United States Patent Application Publication US 2025/0305002 A1 - sequence listing, part 6

SEQ ID NO: 7347 - protein, 2087 aa, synthetic construct
MPAAKRVKLDGGDKKYSIGLDIGTNSVGWAVITDEYKVPSKKFKVLGNTDRHSIKKNLIGALLFDSGETAEATRLKRTARRRYTRRKNRICYLQEIFSNEMAKVDDSFFHRLEESFLVEEDKKHERHPIFGNIVDEVAYHEKYPTIYHLRKKLVDSTDKADLRLIYLALAHMIKFRGHFLIEGDLNPDNSDVDKLFIQLVQTYNQLFEENPINASGVDAKAILSARLSKSRRLENLIAQLPGEKKNGLFGNLIALSLGLTPNFKSNFDLAEDAKLQLSKDTYDDDLDNLLAQIGDQYADLFLAAKNLSDAILLSDILRVNTEITKAPLSASMIKRYDEHHQDLTLLKALVRQQLPEKYKEIFFDQSKNGYAGYIDGGASQEEFYKFIKPILEKMDGTEELLVKLNREDLLRKQRTFDNGSIPHQIHLGELHAILRRQEDFYPFLKDNREKIEKILTFRIPYYVGPLARGNSRFAWMTRKSEETITPWNFEEVVDKGASAQSFIERMTNFDKNLPNEKVLPKHSLLYEYFTVYNELTKVKYVTEGMRKPAFLSGEQKKAIVDLLFKTNRKVTVKQLKEDYFKKIECFDSVEISGVEDRFNASLGTYHDLLKIIKDKDFLDNEENEDILEDIVLTLTLFEDREMIEERLKTYAHLFDDKVMKQLKRRRYTGWGRLSRKLINGIRDKQSGKTILDFLKSDGFANRNFMQLIHDDSLTFKEDIQKAQVSGQGDSLHEHIANLAGSPAIKKGILQTVKVVDELVKVMGRHKPENIVIEMARENQTTQKGQKNSRERMKRIEEGIKELGSQILKEHPVENTQLQNEKLYLYYLQNGRDMYVDQELDINRLSDYDVDHIVPQSFLKDDSIDNKVLTRSDKARGKSDNVPSEEVVKKMKNYWRQLLNAKLITQRKFDNLTKAERGGLSELDKAGFIKRQLVETRQITKHVAQILDSRMNTKYDENDKLIREVKVITLKSKLVSDFRKDFQFYKVREINNYHHAHDAYLNAVVGTALIKKYPKLESEFVYGDYKVYDVRKMIAKSEQEIGKATAKYFFYSNIMNFFKTEITLANGEIRKRPLIETNGETGEIVWDKGRDFATVRKVLSMPQVNIVKKTEVQTGGFSKESILPKRNSDKLIARKKDWDPKKYGGFDSPTVAYSVLVVAKVEKGKSKKLKSVKELLGITIMERSSFEKNPIDFLEAKGYKEVKKDLIIKLPKYSLFELENGRKRMLASAGELQKGNELALPSKYVNFLYLASHYEKLKGSPEDNEQKQLFVEQHKHYLDEIIEQISEFSKRVILADANLDKVLSAYNKHRDKPIREQAENIIHLFTLTNLGAPAAFKYFDTTIDRKRYTSTKEVLDATLIHQSITGLYETRIDLSQLGGDGGEAAAKGSSGGGGGIPWLMKKPLQLTTLVPLQEYEERLLKQTMLTGSYKEKLQSLFLKYDALWQHWENQVGHRRIKPHHIATGTVNPRPQKQYPINPKAKASIQTVINDLLKQGVLIQQNSIMNTPVYPVPKPDGKWRMVLDYREVNKTIPLIAAQNQHSAGILSSIFRGKYKTTLDLSNGFWAHSITPESYWLTAFTWLGQQYCWTRLPQGFLNSPALFNADVVDLLKEVPNVQVYVDDIYISHDDPREHLEQLEKVFSLLLNAGYVVSLKKSEIAQHEVEFLGFNITKEGRGLTETFKQKLLNITPPRDLKQLQSILGKLNFARNFIPNFSELVKPLYNIIATAPGKYITWTTDNSQQLQNIISMLNSAENLEERNPEVRLIMKVNTSPSAGYIRFYNEFAKRPIMYLNYVYTKAEVKFTNTEKLLTTIHKGLIKALDLGMGQEILVYSPIVSMTKIQKTPLPERKALPIRWITWMSYLEDPRIQFHYDKTLPELQQVPTVTDDIIAKIKHPSEFSMVFYTDGSAIKHPNVNKSHNAGMGIAQVQFKPEFTVINTWSIPLGDHTAQLAEVAAVEFACKKALKIDGPVLIVTDSFYVAESVNKELPYWQSNGFFNNKKKPLKHVSKWKSIADCIQLKPDIIIIHEKGHQPTASTFHTEGNNLADKLATQGSYVVNAGKRTADGSEFEKRTADGSEFESPKKKAKVE

SEQ ID NO: 7348 - protein, 2094 aa, synthetic construct
MPAAKRVKLDGGDKKYSIGLDIGTNSVGWAVITDEYKVPSKKFKVLGNTDRHSIKKNLIGALLFDSGETAEATRLKRTARRRYTRRKNRICYLQEIFSNEMAKVDDSFFHRLEESFLVEEDKKHERHPIFGNIVDEVAYHEKYPTIYHLRKKLVDSTDKADLRLIYLALAHMIKFRGHFLIEGDLNPDNSDVDKLFIQLVQTYNQLFEENPINASGVDAKAILSARLSKSRRLENLIAQLPGEKKNGLFGNLIALSLGLTPNFKSNFDLAEDAKLQLSKDTYDDDLDNLLAQIGDQYADLFLAAKNLSDAILLSDILRVNTEITKAPLSASMIKRYDEHHQDLTLLKALVRQQLPEKYKEIFFDQSKNGYAGYIDGGASQEEFYKFIKPILEKMDGTEELLVKLNREDLLRKQRTFDNGSIPHQIHLGELHAILRRQEDFYPFLKDNREKIEKILTFRIPYYVGPLARGNSRFAWMTRKSEETITPWNFEEVVDKGASAQSFIERMTNFDKNLPNEKVLPKHSLLYEYFTVYNELTKVKYVTEGMRKPAFLSGEQKKAIVDLLFKTNRKVTVKQLKEDYFKKIECFDSVEISGVEDRFNASLGTYHDLLKIIKDKDFLDNEENEDILEDIVLTLTLFEDREMIEERLKTYAHLFDDKVMKQLKRRRYTGWGRLSRKLINGIRDKQSGKTILDFLKSDGFANRNFMQLIHDDSLTFKEDIQKAQVSGQGDSLHEHIANLAGSPAIKKGILQTVKVVDELVKVMGRHKPENIVIEMARENQTTQKGQKNSRERMKRIEEGIKELGSQILKEHPVENTQLQNEKLYLYYLQNGRDMYVDQELDINRLSDYDVDHIVPQSFLKDDSIDNKVLTRSDKARGKSDNVPSEEVVKKMKNYWRQLLNAKLITQRKFDNLTKAERGGLSELDKAGFIKRQLVETRQITKHVAQILDSRMNTKYDENDKLIREVKVITLKSKLVSDFRKDFQFYKVREINNYHHAHDAYLNAVVGTALIKKYPKLESEFVYGDYKVYDVRKMIAKSEQEIGKATAKYFFYSNIMNFFKTEITLANGEIRKRPLIETNGETGEIVWDKGRDFATVRKVLSMPQVNIVKKTEVQTGGFSKESILPKRNSDKLIARKKDWDPKKYGGFDSPTVAYSVLVVAKVEKGKSKKLKSVKELLGITIMERSSFEKNPIDFLEAKGYKEVKKDLIIKLPKYSLFELENGRKRMLASAGELQKGNELALPSKYVNFLYLASHYEKLKGSPEDNEQKQLFVEQHKHYLDEIIEQISEFSKRVILADANLDKVLSAYNKHRDKPIREQAENIIHLFTLTNLGAPAAFKYFDTTIDRKRYTSTKEVLDATLIHQSITGLYETRIDLSQLGGDGGEAAAKGSSGGGGGVLNLEEEYRLHEKPVPSSIDPSWLQLFPTVWAERAGMGLANQVPPVVVELRSGASPVAVRQYPMSKEAREGIRPHIQRFLDLGVLVPCQSPWNTPLLPVKKPGTNDYRPVQDLREINKRVQDIHPTVPNPYNLLSSLPPSHTWYSVLDLKDAFFCLKLHPNSQPLFAFEWRDPEKGNTGQLTWTRLPQGFKNSPTLFDEALHRDLAPFRALNPQVVLLQYVDDLLVAAPTYRDCKEGTQKLLQELSKLGYRVSAKKAQLCQKEVTYLGYLLKEGKRWLTPARKATVMKIPPPTTPRQVREFLGTAGFCRLWIPGFASLAAPLYPLTKESIPFIWTEEHQKAFDRIKEALLSAPALALPDLTKPFTLYVDERAGVARGVLTQTLGPWRRPVAYLSKKLDPVASGWPTCLKAVAAVALLLKDADKLTLGQNVTVIASHSLESIVRQPPDRWMTNARMTHYQSLLLNERVSFAPPAVLNPATLLPVESEATPVHRCSEILAEETGTRRDLKDQPLPGVPAWYTDGSSFIAEGKRRAGAAIVDGKRTVWASSLPEGTSAQKAELVALTQALRLAEGKDINIYTDSRYAFATAHIHGAIYKQRGLLTSAGKDIKNKEEILALLEAIHLPKRVAIIHCPGHQKGNDPVATGNRRADEAAKQAALSTRVLAETTKPAGKRTADGSEFEKRTADGSEFESPKKKAKVE

SEQ ID NO: 7349 - protein, 2094 aa, synthetic construct
MPAAKRVKLDGGDKKYSIGLDIGTNSVGWAVITDEYKVPSKKFKVLGNTDRHSIKKNLIGALLFDSGETAEATRLKRTARRRYTRRKNRICYLQEIFSNEMAKVDDSFFHRLEESFLVEEDKKHERHPIFGNIVDEVAYHEKYPTIYHLRKKLVDSTDKADLRLIYLALAHMIKFRGHFLIEGDLNPDNSDVDKLFIQLVQTYNQLFEENPINASGVDAKAILSARLSKSRRLENLIAQLPGEKKNGLFGNLIALSLGLTPNFKSNFDLAEDAKLQLSKDTYDDDLDNLLAQIGDQYADLFLAAKNLSDAILLSDILRVNTEITKAPLSASMIKRYDEHHQDLTLLKALVRQQLPEKYKEIFFDQSKNGYAGYIDGGASQEEFYKFIKPILEKMDGTEELLVKLNREDLLRKQRTFDNGSIPHQIHLGELHAILRRQEDFYPFLKDNREKIEKILTFRIPYYVGPLARGNSRFAWMTRKSEETITPWNFEEVVDKGASAQSFIERMTNFDKNLPNEKVLPKHSLLYEYFTVYNELTKVKYVTEGMRKPAFLSGEQKKAIVDLLFKTNRKVTVKQLKEDYFKKIECFDSVEISGVEDRFNASLGTYHDLLKIIKDKDFLDNEENEDILEDIVLTLTLFEDREMIEERLKTYAHLFDDKVMKQLKRRRYTGWGRLSRKLINGIRDKQSGKTILDFLKSDGFANRNFMQLIHDDSLTFKEDIQKAQVSGQGDSLHEHIANLAGSPAIKKGILQTVKVVDELVKVMGRHKPENIVIEMARENQTTQKGQKNSRERMKRIEEGIKELGSQILKEHPVENTQLQNEKLYLYYLQNGRDMYVDQELDINRLSDYDVDHIVPQSFLKDDSIDNKVLTRSDKARGKSDNVPSEEVVKKMKNYWRQLLNAKLITQRKFDNLTKAERGGLSELDKAGFIKRQLVETRQITKHVAQILDSRMNTKYDENDKLIREVKVITLKSKLVSDFRKDFQFYKVREINNYHHAHDAYLNAVVGTALIKKYPKLESEFVYGDYKVYDVRKMIAKSEQEIGKATAKYFFYSNIMNFFKTEITLANGEIRKRPLIETNGETGEIVWDKGRDFATVRKVLSMPQVNIVKKTEVQTGGFSKESILPKRNSDKLIARKKDWDPKKYGGFDSPTVAYSVLVVAKVEKGKSKKLKSVKELLGITIMERSSFEKNPIDFLEAKGYKEVKKDLIIKLPKYSLFELENGRKRMLASAGELQKGNELALPSKYVNFLYLASHYEKLKGSPEDNEQKQLFVEQHKHYLDEIIEQISEFSKRVILADANLDKVLSAYNKHRDKPIREQAENIIHLFTLTNLGAPAAFKYFDTTIDRKRYTSTKEVLDATLIHQSITGLYETRIDLSQLGGDGGEAAAKGSSGGGGGVLNLEEEYRLHEKPVPSSIDPSWLQLFPTVWAERAGMGLANQVPPVVVELRSGASPVAVRQYPMSKEAREGIRPHIQRFLDLGVLVPCQSPWNTPLLPVKKPGTNDYRPVQDLREINKRVQDIHPTVPNPYNLLSSLPPSHTWYSVLDLKDAFFCLKLHPNSQPLFAFEWRDPEKGNTGQLTWTRLPQGFKNSPTLFNEALHRDLAPFRALNPQVVLLQYVDDLLVAAPTYRDCKEGTQKLLQELSKLGYRVSAKKAQLCQKEVTYLGYLLKEGKRWLTPARKATVMKIPPPTTPRQVREFLGTAGFCRLWIPGFASLAAPLYPLTKPSIPFIWTEEHQKAFDRIKEALLSAPALALPDLTKPFTLYVDERAGVARGVLTQTLGPWRRPVAYLSKKLDPVASGWPTCLKAVAAVALLLKDADKLTLGQNVTVIASHSLESIVRQPPDRWMTNARMTHYQSLLLNERVSFAPPAVLNPATLLPVESEATPVHRCSEILAEETGTRRDLKDQPLPGVPAWYTDGSSFIAEGKRRAGAAIVDGKRTVWASSLPEGTSAQKAELVALTQALRLAEGKDINIYTDSRYAFATAHIHGAIYKQRGWLTSAGKDIKNKEEILALLEAIHLPKRVAIIHCPGHQKGNDPVATGNRRADEAAKQAALSTRVLAETTKPAGKRTADGSEFEKRTADGSEFESPKKKAKVE

SEQ ID NO: 7350 - protein, 2096 aa, synthetic construct
MPAAKRVKLDGGDKKYSIGLDIGTNSVGWAVITDEYKVPSKKFKVLGNTDRHSIKKNLIGALLFDSGETAEATRLKRTARRRYTRRKNRICYLQEIFSNEMAKVDDSFFHRLEESFLVEEDKKHERHPIFGNIVDEVAYHEKYPTIYHLRKKLVDSTDKADLRLIYLALAHMIKFRGHFLIEGDLNPDNSDVDKLFIQLVQTYNQLFEENPINASGVDAKAILSARLSKSRRLENLIAQLPGEKKNGLFGNLIALSLGLTPNFKSNFDLAEDAKLQLSKDTYDDDLDNLLAQIGDQYADLFLAAKNLSDAILLSDILRVNTEITKAPLSASMIKRYDEHHQDLTLLKALVRQQLPEKYKEIFFDQSKNGYAGYIDGGASQEEFYKFIKPILEKMDGTEELLVKLNREDLLRKQRTFDNGSIPHQIHLGELHAILRRQEDFYPFLKDNREKIEKILTFRIPYYVGPLARGNSRFAWMTRKSEETITPWNFEEVVDKGASAQSFIERMTNFDKNLPNEKVLPKHSLLYEYFTVYNELTKVKYVTEGMRKPAFLSGEQKKAIVDLLFKTNRKVTVKQLKEDYFKKIECFDSVEISGVEDRFNASLGTYHDLLKIIKDKDFLDNEENEDILEDIVLTLTLFEDREMIEERLKTYAHLFDDKVMKQLKRRRYTGWGRLSRKLINGIRDKQSGKTILDFLKSDGFANRNFMQLIHDDSLTFKEDIQKAQVSGQGDSLHEHIANLAGSPAIKKGILQTVKVVDELVKVMGRHKPENIVIEMARENQTTQKGQKNSRERMKRIEEGIKELGSQILKEHPVENTQLQNEKLYLYYLQNGRDMYVDQELDINRLSDYDVDHIVPQSFLKDDSIDNKVLTRSDKARGKSDNVPSEEVVKKMKNYWRQLLNAKLITQRKFDNLTKAERGGLSELDKAGFIKRQLVETRQITKHVAQILDSRMNTKYDENDKLIREVKVITLKSKLVSDFRKDFQFYKVREINNYHHAHDAYLNAVVGTALIKKYPKLESEFVYGDYKVYDVRKMIAKSEQEIGKATAKYFFYSNIMNFFKTEITLANGEIRKRPLIETNGETGEIVWDKGRDFATVRKVLSMPQVNIVKKTEVQTGGFSKESILPKRNSDKLIARKKDWDPKKYGGFDSPTVAYSVLVVAKVEKGKSKKLKSVKELLGITIMERSSFEKNPIDFLEAKGYKEVKKDLIIKLPKYSLFELENGRKRMLASAGELQKGNELALPSKYVNFLYLASHYEKLKGSPEDNEQKQLFVEQHKHYLDEIIEQISEFSKRVILADANLDKVLSAYNKHRDKPIREQAENIIHLFTLTNLGAPAAFKYFDTTIDRKRYTSTKEVLDATLIHQSITGLYETRIDLSQLGGDGGEAAAKGSSGGGGGTLNIEDEYRLHETSKEPDVPLGSTWLSDFPQAWAETGGMGLAVRQAPLIIPLKATSTPVSIKQYPMSQEARLGIKPHIQRLLDQGILVPCQSPWNTPLLPVKKPGTNDYRPVQDLREVNKRVEDIHPTVPNPYNLLSGLPPSHQWYTVLDLKDAFFCLRLHPTSQPLFAFEWRDPEMGISGQLTWTRLPQGFKNSPTLFNEALHRDLADFRIQHPDLILLQYVDDLLLAATSEQDCQRGTRALLQTLGNLGYRASAKKAQICQKQVKYLGYLLKEGQRWLTEARKETVMGQPTPKTPRQLREFLGTAGFCRLWIPGFAEMAAPLYPLTKPGTLFNWGPDQQKAYQEIKQALLTAPALGLPDLTKPFELFVDEKQGYAKGVLTQKLGPWRRPVAYLSKKLDPVAAGWPPCLRMVAAIAVLTKDAGKLTMGQPLVILAPHAVEALVKQPPDRWLSNARMTHYQAMLLDTDRVQFGPVVALNPATLLPLPEKEAPHDCLEILAETHGTRPDLTDQPIPDADYTWYTDGSSFLQEGQRRAGAAVTTETEVIWARALPAGTSAQRAELIALTQALKMAEGKKLNVYTDSRYAFATAHVHGEIYRRRGWLTSEGREIKNKNEILALLKALFLPKRLSIIHCPGHQKGNSAEARGNRMADQAAREAAMKAVLETSTLLAGKRTADGSEFEKRTADGSEFESPKKKAKVE

SEQ ID NO: 7351 - protein, 2096 aa, synthetic construct
MPAAKRVKLDGGDKKYSIGLDIGTNSVGWAVITDEYKVPSKKFKVLGNTDRHSIKKNLIGALLFDSGETAEATRLKRTARRRYTRRKNRICYLQEIFSNEMAKVDDSFFHRLEESFLVEEDKKHERHPIFGNIVDEVAYHEKYPTIYHLRKKLVDSTDKADLRLIYLALAHMIKFRGHFLIEGDLNPDNSDVDKLFIQLVQTYNQLFEENPINASGVDAKAILSARLSKSRRLENLIAQLPGEKKNGLFGNLIALSLGLTPNFKSNFDLAEDAKLQLSKDTYDDDLDNLLAQIGDQYADLFLAAKNLSDAILLSDILRVNTEITKAPLSASMIKRYDEHHQDLTLLKALVRQQLPEKYKEIFFDQSKNGYAGYIDGGASQEEFYKFIKPILEKMDGTEELLVKLNREDLLRKQRTFDNGSIPHQIHLGELHAILRRQEDFYPFLKDNREKIEKILTFRIPYYVGPLARGNSRFAWMTRKSEETITPWNFEEVVDKGASAQSFIERMTNFDKNLPNEKVLPKHSLLYEYFTVYNELTKVKYVTEGMRKPAFLSGEQKKAIVDLLFKTNRKVTVKQLKEDYFKKIECFDSVEISGVEDRFNASLGTYHDLLKIIKDKDFLDNEENEDILEDIVLTLTLFEDREMIEERLKTYAHLFDDKVMKQLKRRRYTGWGRLSRKLINGIRDKQSGKTILDFLKSDGFANRNFMQLIHDDSLTFKEDIQKAQVSGQGDSLHEHIANLAGSPAIKKGILQTVKVVDELVKVMGRHKPENIVIEMARENQTTQKGQKNSRERMKRIEEGIKELGSQILKEHPVENTQLQNEKLYLYYLQNGRDMYVDQELDINRLSDYDVDHIVPQSFLKDDSIDNKVLTRSDKARGKSDNVPSEEVVKKMKNYWRQLLNAKLITQRKFDNLTKAERGGLSELDKAGFIKRQLVETRQITKHVAQILDSRMNTKYDENDKLIREVKVITLKSKLVSDFRKDFQFYKVREINNYHHAHDAYLNAVVGTALIKKYPKLESEFVYGDYKVYDVRKMIAKSEQEIGKATAKYFFYSNIMNFFKTEITLANGEIRKRPLIETNGETGEIVWDKGRDFATVRKVLSMPQVNIVKKTEVQTGGFSKESILPKRNSDKLIARKKDWDPKKYGGFDSPTVAYSVLVVAKVEKGKSKKLKSVKELLGITIMERSSFEKNPIDFLEAKGYKEVKKDLIIKLPKYSLFELENGRKRMLASAGELQKGNELALPSKYVNFLYLASHYEKLKGSPEDNEQKQLFVEQHKHYLDEIIEQISEFSKRVILADANLDKVLSAYNKHRDKPIREQAENIIHLFTLTNLGAPAAFKYFDTTIDRKRYTSTKEVLDATLIHQSITGLYETRIDLSQLGGDGGGGGGSSPAPGGTAPLEEEYRLFLEAPIQNVTLLEQWKREIPKVWAEINPPGLASTQAPIHVQLLSTALPVRVRQYPITLEAKRSLRETIRKFRAAGILRPVHSPWNTPLLPVRKSGTSEYRMVQDLREVNKRVETIHPTVPNPYTLLSLLPPDRIWYSVLDLKDAFFCIPLAPESQLIFAFEWADAEEGESGQLTWTRLPQGFKNSPTLFNEALNRDLQGFRLDHPSVSLLQYVDDLLIAADTQAACLSATRDLLMTLAELGYRVSGKKAQLCQEEVTYLGFKIHKGSRSLSNSRTQAILQIPVPKTKRQVREFLGKIGYCRLFIPGFAELAQPLYAATRPGNDPLVWGEKEEEAFQSLKLALTQPPALALPSLDKPFQLFVEETSGAAKGVLTQALGPWKRPVAYLSKRLDPVAAGWPRCLRAIAAAALLTREASKLTFGQDIEITSSHNLESLLRSPPDKWLTNARITQYQVLLLDPPRVRFKQTAALNPATLLPETDDTLPIHHCLDTLDSLTSTRPDLTDQPLAQAEATLFTDGSSYIRDGKRYAGAAVVTLDSVIWAEPLPIGTSAQKAELIALTKALEWSKDKSVNIYTDSRYAFATLHVHGMIYRERGWLTAGGKAIKNAPEILALLTAVWLPKRVAVMHCKGHQKDDAPTSTGNRRADEVAREVAIRPLSTQATISAGKRTADGSEFEKRTADGSEFESPKKKAKVE

SEQ ID NO: 7352 - protein, 2093 aa, synthetic construct
MPAAKRVKLDGGDKKYSIGLDIGTNSVGWAVITDEYKVPSKKFKVLGNTDRHSIKKNLIGALLFDSGETAEATRLKRTARRRYTRRKNRICYLQEIFSNEMAKVDDSFFHRLEESFLVEEDKKHERHPIFGNIVDEVAYHEKYPTIYHLRKKLVDSTDKADLRLIYLALAHMIKFRGHFLIEGDLNPDNSDVDKLFIQLVQTYNQLFEENPINASGVDAKAILSARLSKSRRLENLIAQLPGEKKNGLFGNLIALSLGLTPNFKSNFDLAEDAKLQLSKDTYDDDLDNLLAQIGDQYADLFLAAKNLSDAILLSDILRVNTEITKAPLSASMIKRYDEHHQDLTLLKALVRQQLPEKYKEIFFDQSKNGYAGYIDGGASQEEFYKFIKPILEKMDGTEELLVKLNREDLLRKQRTFDNGSIPHQIHLGELHAILRRQEDFYPFLKDNREKIEKILTFRIPYYVGPLARGNSRFAWMTRKSEETITPWNFEEVVDKGASAQSFIERMTNFDKNLPNEKVLPKHSLLYEYFTVYNELTKVKYVTEGMRKPAFLSGEQKKAIVDLLFKTNRKVTVKQLKEDYFKKIECFDSVEISGVEDRFNASLGTYHDLLKIIKDKDFLDNEENEDILEDIVLTLTLFEDREMIEERLKTYAHLFDDKVMKQLKRRRYTGWGRLSRKLINGIRDKQSGKTILDFLKSDGFANRNFMQLIHDDSLTFKEDIQKAQVSGQGDSLHEHIANLAGSPAIKKGILQTVKVVDELVKVMGRHKPENIVIEMARENQTTQKGQKNSRERMKRIEEGIKELGSQILKEHPVENTQLQNEKLYLYYLQNGRDMYVDQELDINRLSDYDVDHIVPQSFLKDDSIDNKVLTRSDKARGKSDNVPSEEVVKKMKNYWRQLLNAKLITQRKFDNLTKAERGGLSELDKAGFIKRQLVETRQITKHVAQILDSRMNTKYDENDKLIREVKVITLKSKLVSDFRKDFQFYKVREINNYHHAHDAYLNAVVGTALIKKYPKLESEFVYGDYKVYDVRKMIAKSEQEIGKATAKYFFYSNIMNFFKTEITLANGEIRKRPLIETNGETGEIVWDKGRDFATVRKVLSMPQVNIVKKTEVQTGGFSKESILPKRNSDKLIARKKDWDPKKYGGFDSPTVAYSVLVVAKVEKGKSKKLKSVKELLGITIMERSSFEKNPIDFLEAKGYKEVKKDLIIKLPKYSLFELENGRKRMLASAGELQKGNELALPSKYVNFLYLASHYEKLKGSPEDNEQKQLFVEQHKHYLDEIIEQISEFSKRVILADANLDKVLSAYNKHRDKPIREQAENIIHLFTLTNLGAPAAFKYFDTTIDRKRYTSTKEVLDATLIHQSITGLYETRIDLSQLGGDGGGGGGSSPAPGGTLQLEEEYRLFEPESTQKQEMDIWLKNFPQAWAETGGMGTAHCQAPVLIQLKATATPISIRQYPMPHEAYQGIKPHIRRMLDQGILKPCQSPWNTPLLPVKKPGTEDYRPVQDLREVNKRVEDIHPTVPNPYNLLSTLPPSHPWYTVLDLKDAFFCLRLHSESQLLFAFEWRDPEIGLSGQLTWTRLPQGFKNSPTLFNEALHSDLADFRVRYPALVLLQYVDDLLLAAATRTECLEGTKALLETLGNKGYRASAKKAQICLQEVTYLGYSLKDGQRWLTKARKEAILSIPVPKNSRQVREFLGKAGYCRLFIPGFAELAAPLYPLTRPGTLFQWGTEQQLAFEDIKKALLSSPALGLPDITKPFELFIDENSGFAKGVLVQKLGPWKRPVAYLSKKLDTVASGWPPCLRMVAAIAILVKDAGKLTLGQPLTILTSHPVEALVRQPPNKWLSNARMTHYQAMLLDAERVHFGPTVSLNPATLLPLPSGGNHHDCLQILAETHGTRPDLTDQPLPDADLTWYTDGSSFIRNGEREAGAAVTTESEVIWAAPLPPGTSAQRAELIALTQALKMAEGKKLTVYTDSRYAFATTHVHGEIYRRRGWLTSEGKEIKNKNEILALLEALFLPKRLSIIHCPGHQKGDSPQAKGNRLADDTAKKAATETHSSLTVLPAGKRTADGSEFEKRTADGSEFESPKKKAKVE

SEQ ID NO: 7353 - protein, 2216 aa, synthetic construct
MPAAKRVKLDGGDKKYSIGLDIGTNSVGWAVITDEYKVPSKKFKVLGNTDRHSIKKNLIGALLFDSGETAEATRLKRTARRRYTRRKNRICYLQEIFSNEMAKVDDSFFHRLEESFLVEEDKKHERHPIFGNIVDEVAYHEKYPTIYHLRKKLVDSTDKADLRLIYLALAHMIKFRGHFLIEGDLNPDNSDVDKLFIQLVQTYNQLFEENPINASGVDAKAILSARLSKSRRLENLIAQLPGEKKNGLFGNLIALSLGLTPNFKSNFDLAEDAKLQLSKDTYDDDLDNLLAQIGDQYADLFLAAKNLSDAILLSDILRVNTEITKAPLSASMIKRYDEHHQDLTLLKALVRQQLPEKYKEIFFDQSKNGYAGYIDGGASQEEFYKFIKPILEKMDGTEELLVKLNREDLLRKQRTFDNGSIPHQIHLGELHAILRRQEDFYPFLKDNREKIEKILTFRIPYYVGPLARGNSRFAWMTRKSEETITPWNFEEVVDKGASAQSFIERMTNFDKNLPNEKVLPKHSLLYEYFTVYNELTKVKYVTEGMRKPAFLSGEQKKAIVDLLFKTNRKVTVKQLKEDYFKKIECFDSVEISGVEDRFNASLGTYHDLLKIIKDKDFLDNEENEDILEDIVLTLTLFEDREMIEERLKTYAHLFDDKVMKQLKRRRYTGWGRLSRKLINGIRDKQSGKTILDFLKSDGFANRNFMQLIHDDSLTFKEDIQKAQVSGQGDSLHEHIANLAGSPAIKKGILQTVKVVDELVKVMGRHKPENIVIEMARENQTTQKGQKNSRERMKRIEEGIKELGSQILKEHPVENTQLQNEKLYLYYLQNGRDMYVDQELDINRLSDYDVDHIVPQSFLKDDSIDNKVLTRSDKARGKSDNVPSEEVVKKMKNYWRQLLNAKLITQRKFDNLTKAERGGLSELDKAGFIKRQLVETRQITKHVAQILDSRMNTKYDENDKLIREVKVITLKSKLVSDFRKDFQFYKVREINNYHHAHDAYLNAVVGTALIKKYPKLESEFVYGDYKVYDVRKMIAKSEQEIGKATAKYFFYSNIMNFFKTEITLANGEIRKRPLIETNGETGEIVWDKGRDFATVRKVLSMPQVNIVKKTEVQTGGFSKESILPKRNSDKLIARKKDWDPKKYGGFDSPTVAYSVLVVAKVEKGKSKKLKSVKELLGITIMERSSFEKNPIDFLEAKGYKEVKKDLIIKLPKYSLFELENGRKRMLASAGELQKGNELALPSKYVNFLYLASHYEKLKGSPEDNEQKQLFVEQHKHYLDEIIEQISEFSKRVILADANLDKVLSAYNKHRDKPIREQAENIIHLFTLTNLGAPAAFKYFDTTIDRKRYTSTKEVLDATLIHQSITGLYETRIDLSQLGGDGGGGGGSSPAPGGTLGDQGSRGSDPLPEPRVTLTVEGIPTEFLVNTGAEHSVLTKPMGKMGSKRTVVAGATGSKVYPWTTKRLLKIGQKQVTHSFLVIPECPAPLLGRDLLTKLKAQIQFSTEGPQVTWEDRPAMCLVLNLEEEYRLHEKPVPPSIDPSWLQLFPMVWAEKAGMGLANQVPPVVVELKSDASPVAVRQYPMSKEAREGIRPHIQRFLDLGILVPCQSPWNTPLLPVKKPGTNDYRPVQDLREVNKRVQDIHPTVPNPYNLLSSLPPSHTWYSVLDLKDAFFCLKLHPNSQPLFAFEWRDPEKGNTGQLTWTRLPQGFKNSPTLFDEALHRDLASFRALNPQVVMLQYVDDLLVAAPTYRDCKEGTRRLLQELSKLGYRVSAKKAQLCREEVTYLGYLLKGGKRWLTPARKATVMKIPTPTTPRQVREFLGTAGFCRLWIPGFASLAAPLYPLTREKVPFTWTEAHQEAFGRIKEALLSAPALALPDLTKPFALYVDEKEGVARGVLTQTLGPWRRPVAYLSKKLDPVASGWPTCLKAIAAVALLLKDADKLTLGQNVLVIAPHNLESIVRQPPDRWMTNARMTHYQSLLLNERVSFAPPAILNPATLLPVESDDTPIHICSEILAEETGTRPDLRDQPLPGVPAWYTDGSSFIMDGRRQAGAAIVDNKRTVWASNLPEGTSAQKAELIALTQALRLAEGKSINIYTDSRYAFATAHVHGAIYKQRGLLTSAGKDIKNKEEILALLEAIHLPKRVAIIHCPGHQRGTDPVATGNRKADEAAKQAAQSTRILTETTKNAGKRTADGSEFEKRTADGSEFESPKKKAKVE

SEQ ID NO: 7354 - protein, 2125 aa, synthetic construct
MPAAKRVKLDGGDKKYSIGLDIGTNSVGWAVITDEYKVPSKKFKVLGNTDRHSIKKNLIGALLFDSGETAEATRLKRTARRRYTRRKNRICYLQEIFSNEMAKVDDSFFHRLEESFLVEEDKKHERHPIFGNIVDEVAYHEKYPTIYHLRKKLVDSTDKADLRLIYLALAHMIKFRGHFLIEGDLNPDNSDVDKLFIQLVQTYNQLFEENPINASGVDAKAILSARLSKSRRLENLIAQLPGEKKNGLFGNLIALSLGLTPNFKSNFDLAEDAKLQLSKDTYDDDLDNLLAQIGDQYADLFLAAKNLSDAILLSDILRVNTEITKAPLSASMIKRYDEHHQDLTLLKALVRQQLPEKYKEIFFDQSKNGYAGYIDGGASQEEFYKFIKPILEKMDGTEELLVKLNREDLLRKQRTFDNGSIPHQIHLGELHAILRRQEDFYPFLKDNREKIEKILTFRIPYYVGPLARGNSRFAWMTRKSEETITPWNFEEVVDKGASAQSFIERMTNFDKNLPNEKVLPKHSLLYEYFTVYNELTKVKYVTEGMRKPAFLSGEQKKAIVDLLFKTNRKVTVKQLKEDYFKKIECFDSVEISGVEDRFNASLGTYHDLLKIIKDKDFLDNEENEDILEDIVLTLTLFEDREMIEERLKTYAHLFDDKVMKQLKRRRYTGWGRLSRKLINGIRDKQSGKTILDFLKSDGFANRNFMQLIHDDSLTFKEDIQKAQVSGQGDSLHEHIANLAGSPAIKKGILQTVKVVDELVKVMGRHKPENIVIEMARENQTTQKGQKNSRERMKRIEEGIKELGSQILKEHPVENTQLQNEKLYLYYLQNGRDMYVDQELDINRLSDYDVDHIVPQSFLKDDSIDNKVLTRSDKARGKSDNVPSEEVVKKMKNYWRQLLNAKLITQRKFDNLTKAERGGLSELDKAGFIKRQLVETRQITKHVAQILDSRMNTKYDENDKLIREVKVITLKSKLVSDFRKDFQFYKVREINNYHHAHDAYLNAVVGTALIKKYPKLESEFVYGDYKVYDVRKMIAKSEQEIGKATAKYFFYSNIMNFFKTEITLANGEIRKRPLIETNGETGEIVWDKGRDFATVRKVLSMPQVNIVKKTEVQTGGFSKESILPKRNSDKLIARKKDWDPKKYGGFDSPTVAYSVLVVAKVEKGKSKKLKSVKELLGITIMERSSFEKNPIDFLEAKGYKEVKKDLIIKLPKYSLFELENGRKRMLASAGELQKGNELALPSKYVNFLYLASHYEKLKGSPEDNEQKQLFVEQHKHYLDEIIEQISEFSKRVILADANLDKVLSAYNKHRDKPIREQAENIIHLFTLTNLGAPAAFKYFDTTIDRKRYTSTKEVLDATLIHQSITGLYETRIDLSQLGGDGGGGGGSSPAPGGLLGRDLLTKLKAQIQFSTEGPQVTWEDRPAMCLVLNLEEEYRLHEKPVPPSIDPSWLQLFPMVWAEKAGMGLANQVPPVVVELKSDASPVAVRQYPMSKEAREGIRPHIQRFLDLGILVPCQSPWNTPLLPVKKPGTNDYRPVQDLREVNKRVQDIHPTVPNPYNLLSSLPPSHTWYSVLDLKDAFFCLKLHPNSQPLFAFEWRDPEKGNTGQLTWTRLPQGFKNSPTLFNEALHRDLASFRALNPQVVMLQYVDDLLVAAPTYRDCKEGTRRLLQELSKLGYRVSAKKAQLCREEVTYLGYLLKGGKRWLTPARKATVMKIPTPTTPRQVREFLGTAGFCRLWIPGFASLAAPLYPLTRPKVPFTWTEAHQEAFGRIKEALLSAPALALPDLTKPFALYVDEKEGVARGVLTQTLGPWRRPVAYLSKKLDPVASGWPTCLKAIAAVALLLKDADKLTLGQNVLVIAPHNLESIVRQPPDRWMTNARMTHYQSLLLNERVSFAPPAILNPATLLPVESDDTPIHICSEILAEETGTRPDLRDQPLPGVPAWYTDGSSFIMDGRRQAGAAIVDNKRTVWASNLPEGTSAQKAELIALTQALRLAEGKSINIYTDSRYAFATAHVHGAIYKQRGWLTSAGKDIKNKEEILALLEAIHLPKRVAIIHCPGHQRGTDPVATGNRKADEAAKQAAQSTRILTETTKNAGKRTADGSEFEKRTADGSEFESPKKKAKVE

SEQ ID NO: 7355 - protein, 2216 aa, synthetic construct
MPAAKRVKLDGGDKKYSIGLDIGTNSVGWAVITDEYKVPSKKFKVLGNTDRHSIKKNLIGALLFDSGETAEATRLKRTARRRYTRRKNRICYLQEIFSNEMAKVDDSFFHRLEESFLVEEDKKHERHPIFGNIVDEVAYHEKYPTIYHLRKKLVDSTDKADLRLIYLALAHMIKFRGHFLIEGDLNPDNSDVDKLFIQLVQTYNQLFEENPINASGVDAKAILSARLSKSRRLENLIAQLPGEKKNGLFGNLIALSLGLTPNFKSNFDLAEDAKLQLSKDTYDDDLDNLLAQIGDQYADLFLAAKNLSDAILLSDILRVNTEITKAPLSASMIKRYDEHHQDLTLLKALVRQQLPEKYKEIFFDQSKNGYAGYIDGGASQEEFYKFIKPILEKMDGTEELLVKLNREDLLRKQRTFDNGSIPHQIHLGELHAILRRQEDFYPFLKDNREKIEKILTFRIPYYVGPLARGNSRFAWMTRKSEETITPWNFEEVVDKGASAQSFIERMTNFDKNLPNEKVLPKHSLLYEYFTVYNELTKVKYVTEGMRKPAFLSGEQKKAIVDLLFKTNRKVTVKQLKEDYFKKIECFDSVEISGVEDRFNASLGTYHDLLKIIKDKDFLDNEENEDILEDIVLTLTLFEDREMIEERLKTYAHLFDDKVMKQLKRRRYTGWGRLSRKLINGIRDKQSGKTILDFLKSDGFANRNFMQLIHDDSLTFKEDIQKAQVSGQGDSLHEHIANLAGSPAIKKGILQTVKVVDELVKVMGRHKPENIVIEMARENQTTQKGQKNSRERMKRIEEGIKELGSQILKEHPVENTQLQNEKLYLYYLQNGRDMYVDQELDINRLSDYDVDHIVPQSFLKDDSIDNKVLTRSDKARGKSDNVPSEEVVKKMKNYWRQLLNAKLITQRKFDNLTKAERGGLSELDKAGFIKRQLVETRQITKHVAQILDSRMNTKYDENDKLIREVKVITLKSKLVSDFRKDFQFYKVREINNYHHAHDAYLNAVVGTALIKKYPKLESEFVYGDYKVYDVRKMIAKSEQEIGKATAKYFFYSNIMNFFKTEITLANGEIRKRPLIETNGETGEIVWDKGRDFATVRKVLSMPQVNIVKKTEVQTGGFSKESILPKRNSDKLIARKKDWDPKKYGGFDSPTVAYSVLVVAKVEKGKSKKLKSVKELLGITIMERSSFEKNPIDFLEAKGYKEVKKDLIIKLPKYSLFELENGRKRMLASAGELQKGNELALPSKYVNFLYLASHYEKLKGSPEDNEQKQLFVEQHKHYLDEIIEQISEFSKRVILADANLDKVLSAYNKHRDKPIREQAENIIHLFTLTNLGAPAAFKYFDTTIDRKRYTSTKEVLDATLIHQSITGLYETRIDLSQLGGDGGGGGGSSPAPGGTLGDQGSRGSDPLPEPRVTLTVEGIPTEFLVNTGAEHSVLTKPMGKMGSKRTVVAGATGSKVYPWTTKRLLKIGQKQVTHSFLVIPECPAPLLGRDLLTKLKAQIQFSTEGPQVTWEDRPAMCLVLNLEEEYRLHEKPVPPSIDPSWLQLFPMVWAEKAGMGLANQVPPVVVELKSDASPVAVRQYPMSKEAREGIRPHIQRFLDLGILVPCQSPWNTPLLPVKKPGTNDYRPVQDLREVNKRVQDIHPTVPNPYNLLSSLPPSHTWYSVLDLKDAFFCLKLHPNSQPLFAFEWRDPEKGNTGQLTWTRLPQGFKNSPTLFNEALHRDLASFRALNPQVVMLQYVDDLLVAAPTYRDCKEGTRRLLQELSKLGYRVSAKKAQLCREEVTYLGYLLKGGKRWLTPARKATVMKIPTPTTPRQVREFLGTAGFCRLWIPGFASLAAPLYPLTRPKVPFTWTEAHQEAFGRIKEALLSAPALALPDLTKPFALYVDEKEGVARGVLTQTLGPWRRPVAYLSKKLDPVASGWPTCLKAIAAVALLLKDADKLTLGQNVLVIAPHNLESIVRQPPDRWMTNARMTHYQSLLLNERVSFAPPAILNPATLLPVESDDTPIHICSEILAEETGTRPDLRDQPLPGVPAWYTDGSSFIMDGRRQAGAAIVDNKRTVWASNLPEGTSAQKAELIALTQALRLAEGKSINIYTDSRYAFATAHVHGAIYKQRGWLTSAGKDIKNKEEILALLEAIHLPKRVAIIHCPGHQRGTDPVATGNRKADEAAKQAAQSTRILTETTKNAGKRTADGSEFEKRTADGSEFESPKKKAKVE

SEQ ID NO: 7356 - protein, 2094 aa, synthetic construct
MPAAKRVKLDGGDKKYSIGLDIGTNSVGWAVITDEYKVPSKKFKVLGNTDRHSIKKNLIGALLFDSGETAEATRLKRTARRRYTRRKNRICYLQEIFSNEMAKVDDSFFHRLEESFLVEEDKKHERHPIFGNIVDEVAYHEKYPTIYHLRKKLVDSTDKADLRLIYLALAHMIKFRGHFLIEGDLNPDNSDVDKLFIQLVQTYNQLFEENPINASGVDAKAILSARLSKSRRLENLIAQLPGEKKNGLFGNLIALSLGLTPNFKSNFDLAEDAKLQLSKDTYDDDLDNLLAQIGDQYADLFLAAKNLSDAILLSDILRVNTEITKAPLSASMIKRYDEHHQDLTLLKALVRQQLPEKYKEIFFDQSKNGYAGYIDGGASQEEFYKFIKPILEKMDGTEELLVKLNREDLLRKQRTFDNGSIPHQIHLGELHAILRRQEDFYPFLKDNREKIEKILTFRIPYYVGPLARGNSRFAWMTRKSEETITPWNFEEVVDKGASAQSFIERMTNFDKNLPNEKVLPKHSLLYEYFTVYNELTKVKYVTEGMRKPAFLSGEQKKAIVDLLFKTNRKVTVKQLKEDYFKKIECFDSVEISGVEDRFNASLGTYHDLLKIIKDKDFLDNEENEDILEDIVLTLTLFEDREMIEERLKTYAHLFDDKVMKQLKRRRYTGWGRLSRKLINGIRDKQSGKTILDFLKSDGFANRNFMQLIHDDSLTFKEDIQKAQVSGQGDSLHEHIANLAGSPAIKKGILQTVKVVDELVKVMGRHKPENIVIEMARENQTTQKGQKNSRERMKRIEEGIKELGSQILKEHPVENTQLQNEKLYLYYLQNGRDMYVDQELDINRLSDYDVDHIVPQSFLKDDSIDNKVLTRSDKARGKSDNVPSEEVVKKMKNYWRQLLNAKLITQRKFDNLTKAERGGLSELDKAGFIKRQLVETRQITKHVAQILDSRMNTKYDENDKLIREVKVITLKSKLVSDFRKDFQFYKVREINNYHHAHDAYLNAVVGTALIKKYPKLESEFVYGDYKVYDVRKMIAKSEQEIGKATAKYFFYSNIMNFFKTEITLANGEIRKRPLIETNGETGEIVWDKGRDFATVRKVLSMPQVNIVKKTEVQTGGFSKESILPKRNSDKLIARKKDWDPKKYGGFDSPTVAYSVLVVAKVEKGKSKKLKSVKELLGITIMERSSFEKNPIDFLEAKGYKEVKKDLIIKLPKYSLFELENGRKRMLASAGELQKGNELALPSKYVNFLYLASHYEKLKGSPEDNEQKQLFVEQHKHYLDEIIEQISEFSKRVILADANLDKVLSAYNKHRDKPIREQAENIIHLFTLTNLGAPAAFKYFDTTIDRKRYTSTKEVLDATLIHQSITGLYETRIDLSQLGGDGGGGGGSSPAPGGTLNLEDEYRLYETSAEPEVSPGSTWLSDFPQAWAETGGMGLAVRQAPLIIPLKATSTPVSIKQYPMSQEAKLGIKPHIQRLLDQGILVPCQSPWNTPLLPVKKPGTNDYRPVQDLREVNKRVEDIHPTVPNPYNLLSGLPPSHRWYTVLDLKDAFFCLRLHPTSQPLFAFEWRDPGMGISGQLTWTRLPQGFKNSPTLFNEALHRDLADFRIQHPDLILLQYVDDILLAATSELDCQQGTRALLLTLGNLGYRASAKKAQLCQKQVKYLGYLLKEGQRWLTEARKETVMGQPTPKTPRQLREFLGTAGFCRLWIPGFAEMAAPLYPLTKPGTLFNWGPDQQKAYQEIKQALLTAPALGLPDLTKPFELFVDEKQGYAKGVLTQKLGPWRRPVAYLSKKLDPVAAGWPPCLRMVAAIAVLRKDAGKLTMGQPLVILAPHAVEALVKQPPDRWLSNARMTHYQAMLLDTDRVQFGPVVALNPATLLPLPEEGAPHDCLEILAETHGTRPDLTDQPIPDADHTWYTDGSSFLQEGQRKAGAAVTTETEVIWARALPAGTSAQRAELIALTQALKMAEGKRLNVYTDSRYAFATAHIHGEIYRRRGWLTSEGREIKNKSEILALLKALFLPKRLSIIHCLGHQKGDSAEARGNRLADQAAREAAIKTPPDTSTLLAGKRTADGSEFEKRTADGSEFESPKKKAKVE

SEQ ID NO: 7357 - protein, 2094 aa, synthetic construct
MPAAKRVKLDGGDKKYSIGLDIGTNSVGWAVITDEYKVPSKKFKVLGNTDRHSIKKNLIGALLFDSGETAEATRLKRTARRRYTRRKNRICYLQEIFSNEMAKVDDSFFHRLEESFLVEEDKKHERHPIFGNIVDEVAYHEKYPTIYHLRKKLVDSTDKADLRLIYLALAHMIKFRGHFLIEGDLNPDNSDVDKLFIQLVQTYNQLFEENPINASGVDAKAILSARLSKSRRLENLIAQLPGEKKNGLFGNLIALSLGLTPNFKSNFDLAEDAKLQLSKDTYDDDLDNLLAQIGDQYADLFLAAKNLSDAILLSDILRVNTEITKAPLSASMIKRYDEHHQDLTLLKALVRQQLPEKYKEIFFDQSKNGYAGYIDGGASQEEFYKFIKPILEKMDGTEELLVKLNREDLLRKQRTFDNGSIPHQIHLGELHAILRRQEDFYPFLKDNREKIEKILTFRIPYYVGPLARGNSRFAWMTRKSEETITPWNFEEVVDKGASAQSFIERMTNFDKNLPNEKVLPKHSLLYEYFTVYNELTKVKYVTEGMRKPAFLSGEQKKAIVDLLFKTNRKVTVKQLKEDYFKKIECFDSVEISGVEDRFNASLGTYHDLLKIIKDKDFLDNEENEDILEDIVLTLTLFEDREMIEERLKTYAHLFDDKVMKQLKRRRYTGWGRLSRKLINGIRDKQSGKTILDFLKSDGFANRNFMQLIHDDSLTFKEDIQKAQVSGQGDSLHEHIANLAGSPAIKKGILQTVKVVDELVKVMGRHKPENIVIEMARENQTTQKGQKNSRERMKRIEEGIKELGSQILKEHPVENTQLQNEKLYLYYLQNGRDMYVDQELDINRLSDYDVDHIVPQSFLKDDSIDNKVLTRSDKARGKSDNVPSEEVVKKMKNYWRQLLNAKLITQRKFDNLTKAERGGLSELDKAGFIKRQLVETRQITKHVAQILDSRMNTKYDENDKLIREVKVITLKSKLVSDFRKDFQFYKVREINNYHHAHDAYLNAVVGTALIKKYPKLESEFVYGDYKVYDVRKMIAKSEQEIGKATAKYFFYSNIMNFFKTEITLANGEIRKRPLIETNGETGEIVWDKGRDFATVRKVLSMPQVNIVKKTEVQTGGFSKESILPKRNSDKLIARKKDWDPKKYGGFDSPTVAYSVLVVAKVEKGKSKKLKSVKELLGITIMERSSFEKNPIDFLEAKGYKEVKKDLIIKLPKYSLFELENGRKRMLASAGELQKGNELALPSKYVNFLYLASHYEKLKGSPEDNEQKQLFVEQHKHYLDEIIEQISEFSKRVILADANLDKVLSAYNKHRDKPIREQAENIIHLFTLTNLGAPAAFKYFDTTIDRKRYTSTKEVLDATLIHQSITGLYETRIDLSQLGGDGGGGGGSSPAPGGLGIEDEYRLHETSTEPDVSLGSTWLSDFPQAWAETGGMGLAVRQAPLIIPLKATSTPVSIQQYPMSHEARLGIKPHIQRLLDQGILVPCQSPWNTPLLPVKKPGTNDYRPVQDLREVNKRVEDIHPTVPNPYNLLSGLPPSHQWYTVLDLKDAFFCLRLHPTSQPLFAFEWRDPGMGISGQLTWTRLPQGFKNSPTLFNEALHRDLADFRIQHPDLILLQYVDDILLAATSELDCQQGTRALLQTLGDLGYRASAKKAQICQKQVKYLGYLLREGQRWLTEARKETVMGQPVPKTPRQLREFLGKAGFCRLFIPGFAEMAAPLYPLTKPGTLFSWGPDQQKAYQEIKQALLTAPALGLPDLTKPFELFVDEKQGYAKGVLTQKLGPWRRPVAYLSKKLDPVAAGWPPCLRMVAAIAVLTKDAGKLTMGQPLVILAPHAVEALVKQPPDRWLSNARMTHYQAMLLDTDRVQFGPVVALNPATLLPLPEEGAPHDCLEILAETHGTRPDLTDQPIPDADHTWYTDGSSFLQEGQRKAGAAVTTETEVIWAGALPAGTSAQRAELIALTQALKMAEGKRLNVYTDSRYAFATAHIHGEIYRRRGWLTSEGREIKNKSEILALLKALFLPKRLSIIHCLGHQKGDSAEARGNRLADQAAREAAIKTPPDTSTLLIAGKRTADGSEFEKRTADGSEFESPKKKAKVE

SEQ ID NO: 7358 - protein, 2094 aa, synthetic construct; identical to SEQ ID NO: 7357

SEQ ID NO: 7359 - protein, 2094 aa, synthetic construct
MPAAKRVKLDGGDKKYSIGLDIGTNSVGWAVITDEYKVPSKKFKVLGNTDRHSIKKNLIGALLFDSGETAEATRLKRTARRRYTRRKNRICYLQEIFSNEMAKVDDSFFHRLEESFLVEEDKKHERHPIFGNIVDEVAYHEKYPTIYHLRKKLVDSTDKADLRLIYLALAHMIKFRGHFLIEGDLNPDNSDVDKLFIQLVQTYNQLFEENPINASGVDAKAILSARLSKSRRLENLIAQLPGEKKNGLFGNLIALSLGLTPNFKSNFDLAEDAKLQLSKDTYDDDLDNLLAQIGDQYADLFLAAKNLSDAILLSDILRVNTEITKAPLSASMIKRYDEHHQDLTLLKALVRQQLPEKYKEIFFDQSKNGYAGYIDGGASQEEFYKFIKPILEKMDGTEELLVKLNREDLLRKQRTFDNGSIPHQIHLGELHAILRRQEDFYPFLKDNREKIEKILTFRIPYYVGPLARGNSRFAWMTRKSEETITPWNFEEVVDKGASAQSFIERMTNFDKNLPNEKVLPKHSLLYEYFTVYNELTKVKYVTEGMRKPAFLSGEQKKAIVDLLFKTNRKVTVKQLKEDYFKKIECFDSVEISGVEDRFNASLGTYHDLLKIIKDKDFLDNEENEDILEDIVLTLTLFEDREMIEERLKTYAHLFDDKVMKQLKRRRYTGWGRLSRKLINGIRDKQSGKTILDFLKSDGFANRNFMQLIHDDSLTFKEDIQKAQVSGQGDSLHEHIANLAGSPAIKKGILQTVKVVDELVKVMGRHKPENIVIEMARENQTTQKGQKNSRERMKRIEEGIKELGSQILKEHPVENTQLQNEKLYLYYLQNGRDMYVDQELDINRLSDYDVDHIVPQSFLKDDSIDNKVLTRSDKARGKSDNVPSEEVVKKMKNYWRQLLNAKLITQRKFDNLTKAERGGLSELDKAGFIKRQLVETRQITKHVAQILDSRMNTKYDENDKLIREVKVITLKSKLVSDFRKDFQFYKVREINNYHHAHDAYLNAVVGTALIKKYPKLESEFVYGDYKVYDVRKMIAKSEQEIGKATAKYFFYSNIMNFFKTEITLANGEIRKRPLIETNGETGEIVWDKGRDFATVRKVLSMPQVNIVKKTEVQTGGFSKESILPKRNSDKLIARKKDWDPKKYGGFDSPTVAYSVLVVAKVEKGKSKKLKSVKELLGITIMERSSFEKNPIDFLEAKGYKEVKKDLIIKLPKYSLFELENGRKRMLASAGELQKGNELALPSKYVNFLYLASHYEKLKGSPEDNEQKQLFVEQHKHYLDEIIEQISEFSKRVILADANLDKVLSAYNKHRDKPIREQAENIIHLFTLTNLGAPAAFKYFDTTIDRKRYTSTKEVLDATLIHQSITGLYETRIDLSQLGGDGGGGGGSSPAPGGTLNIEDEYRLHETSKEPDVSLGSTWLSDFPQAWAETGGMGLAVRQAPLIIPLKATSTPVSIKQYPMSQEARLGIKPHIQRLLDQGILVPCQSPWNTPLLPVKKPGTNDYRPVQDLREVNKRVEDIHPTVPNPYNLLSGLPPSHQWYTVLDLKDAFFCLRLHPTSQPLFAFEWRDPEMGISGQLTWTRLPQGFKNSPTLFNEALHRDLAGFRIQHPDLILLQYVDDLLLAATSELDCQQGTRALLQTLGDLGYRASAKKAQICQKQVKYLGYLLKEGQRWLTEARKETVMGQPIPKTPRQLREFLGTAGFCRLWIPGFAEMAAPLYPLTKPGTLFNWGPDQQKAFQEIKQALLTAPALGLPDLTKPFELFVDEKQGYAKGVLTQKLGPWRRPVAYLSKKLDPVAAGWPPCLRMVAAIAVLTKDAGKLTMGQPLVILAPHAVEALVKQPPDRWLSNARMTHYQALLLDTDRVQFGPVVALNPATLLPLPEEGLQHDCLDILAEAHGTRSDLMDQPLPDADHTWYTDGSSFLQEGQRKAGAAVTTETEVIWARALPAGTSAQRAELIALTQALKMAEGKKLNVYTDSRYAFATAHIHGEIYRRRGWLTSEGKEIKNKDEILALLKALFLPKRLSIIHCPGHQKGNSAEARGNRMADQAAREVATRETPETSTLLAGKRTADGSEFEKRTADGSEFESPKKKAKVE

SEQ ID NO: 7360 - protein, 2094 aa, synthetic construct
MPAAKRVKLDGGDKKYSIGLDIGTNSVGWAVITDEYKVPSKKFKVLGNTDRHSIKKNLIGALLFDSGETAEATRLKRTARRRYTRRKNRICYLQEIFSNEMAKVDDSFFHRLEESFLVEEDKKHERHPIFGNIVDEVAYHEKYPTIYHLRKKLVDSTDKADLRLIYLALAHMIKFRGHFLIEGDLNPDNSDVDKLFIQLVQTYNQLFEENPINASGVDAKAILSARLSKSRRLENLIAQLPGEKKNGLFGNLIALSLGLTPNFKSNFDLAEDAKLQLSKDTYDDDLDNLLAQIGDQYADLFLAAKNLSDAILLSDILRVNTEITKAPLSASMIKRYDEHHQDLTLLKALVRQQLPEKYKEIFFDQSKNGYAGYIDGGASQEEFYKFIKPILEKMDGTEELLVKLNREDLLRKQRTFDNGSIPHQIHLGELHAILRRQEDFYPFLKDNREKIEKILTFRIPYYVGPLARGNSRFAWMTRKSEETITPWNFEEVVDKGASAQSFIERMTNFDKNLPNEKVLPKHSLLYEYFTVYNELTKVKYVTEGMRKPAFLSGEQKKAIVDLLFKTNRKVTVKQLKEDYFKKIECFDSVEISGVEDRFNASLGTYHDLLKIIKDKDFLDNEENEDILEDIVLTLTLFEDREMIEERLKTYAHLFDDKVMKQLKRRRYTGWGRLSRKLINGIRDKQSGKTILDFLKSDGFANRNFMQLIHDDSLTFKEDIQKAQVSGQGDSLHEHIANLAGSPAIKKGILQTVKVVDELVKVMGRHKPENIVIEMARENQTTQKGQKNSRERMKRIEEGIKELGSQILKEHPVENTQLQNEKLYLYYLQNGRDMYVDQELDINRLSDYDVDHIVPQSFLKDDSIDNKVLTRSDKARGKSDNVPSEEVVKKMKNYWRQLLNAKLITQRKFDNLTKAERGGLSELDKAGFIKRQLVETRQITKHVAQILDSRMNTKYDENDKLIREVKVITLKSKLVSDFRKDFQFYKVREINNYHHAHDAYLNAVVGTALIKKYPKLESEFVYGDYKVYDVRKMIAKSEQEIGKATAKYFFYSNIMNFFKTEITLANGEIRKRPLIETNGETGEIVWDKGRDFATVRKVLSMPQVNIVKKTEVQTGGFSKESILPKRNSDKLIARKKDWDPKKYGGFDSPTVAYSVLVVAKVEKGKSKKLKSVKELLGITIMERSSFEKNPIDFLEAKGYKEVKKDLIIKLPKYSLFELENGRKRMLASAGELQKGNELALPSKYVNFLYLASHYEKLKGSPEDNEQKQLFVEQHKHYLDEIIEQISEFSKRVILADANLDKVLSAYNKHRDKPIREQAENIIHLFTLTNLGAPAAFKYFDTTIDRKRYTSTKEVLDATLIHQSITGLYETRIDLSQLGGDGGGGGGSSPAPGGTLNIEDEYRLHETSKGPDVPLGSTWLSDFPQAWAETGGMGLAVRQAPLIIPLKATSTPVSIKQYPMSQEARLGIKPHIQRLLDQGILVPCQSPWNTPLLPVKKPGTNDYRPVQDLREVNKRVEDIHPTVPNPYNLLSGLPPSHQWYTVLDLKDAFFCLRLHPTSQSLFAFEWRDPEMGISGQLTWTRLPQGFKNSPTLFNEALHRDLADFRIQHPDLILLQYVDDLLLAATSELDCQQGTRALLQTLGDLGYRASAKKAQICQKQVKYLGYLLKEGQRWLTEARKETVMGQPTPKTPRQLREFLGTAGFCRLWIPGFAEMAAPLYPLTKPGTLFEWGPDQQKAYQEIKQALLTAPALGLPDLTKPFELFVDEKQGYAKGVLTQKLGPWRRPVAYLSKKLDPVAAGWPPCLRMVAAIAVLTKDAGKLTMGQPLVILAPHAVEALVKQPPDRWLSNARMTHYQALLLDTDRVQFGPIVALNPATLLPLPEEGLQHDCLDILAEAHGTRPDLTDQPLPDADHTWYTDGSSFLQEGQRKAGAAVTTETEVVWAKALPAGTSAQRAELIALTQALKMAEGKKLNVYTDSRYAFATAHIHGEIYRRRGWLTSEGKEIKNKDEILALLKALFLPKRLSIIHCPGHQKGNRAEARGNRMADQAAREVATRETPETSTLLAGKRTADGSEFEKRTADGSEFESPKKKAKVE

SEQ ID NO: 7361 - protein, 2088 aa, synthetic construct
MPAAKRVKLDGGDKKYSIGLDIGTNSVGWAVITDEYKVPSKKFKVLGNTDRHSIKKNLIGALLFDSGETAEATRLKRTARRRYTRRKNRICYLQEIFSNEMAKVDDSFFHRLEESFLVEEDKKHERHPIFGNIVDEVAYHEKYPTIYHLRKKLVDSTDKADLRLIYLALAHMIKFRGHFLIEGDLNPDNSDVDKLFIQLVQTYNQLFEENPINASGVDAKAILSARLSKSRRLENLIAQLPGEKKNGLFGNLIALSLGLTPNFKSNFDLAEDAKLQLSKDTYDDDLDNLLAQIGDQYADLFLAAKNLSDAILLSDILRVNTEITKAPLSASMIKRYDEHHQDLTLLKALVRQQLPEKYKEIFFDQSKNGYAGYIDGGASQEEFYKFIKPILEKMDGTEELLVKLNREDLLRKQRTFDNGSIPHQIHLGELHAILRRQEDFYPFLKDNREKIEKILTFRIPYYVGPLARGNSRFAWMTRKSEETITPWNFEEVVDKGASAQSFIERMTNFDKNLPNEKVLPKHSLLYEYFTVYNELTKVKYVTEGMRKPAFLSGEQKKAIVDLLFKTNRKVTVKQLKEDYFKKIECFDSVEISGVEDRFNASLGTYHDLLKIIKDKDFLDNEENEDILEDIVLTLTLFEDREMIEERLKTYAHLFDDKVMKQLKRRRYTGWGRLSRKLINGIRDKQSGKTILDFLKSDGFANRNFMQLIHDDSLTFKEDIQKAQVSGQGDSLHEHIANLAGSPAIKKGILQTVKVVDELVKVMGRHKPENIVIEMARENQTTQKGQKNSRERMKRIEEGIKELGSQILKEHPVENTQLQNEKLYLYYLQNGRDMYVDQELDINRLSDYDVDHIVPQSFLKDDSIDNKVLTRSDKARGKSDNVPSEEVVKKMKNYWRQLLNAKLITQRKFDNLTKAERGGLSELDKAGFIKRQLVETRQITKHVAQILDSRMNTKYDENDKLIREVKVITLKSKLVSDFRKDFQFYKVREINNYHHAHDAYLNAVVGTALIKKYPKLESEFVYGDYKVYDVRKMIAKSEQEIGKATAKYFFYSNIMNFFKTEITLANGEIRKRPLIETNGETGEIVWDKGRDFATVRKVLSMPQVNIVKKTEVQTGGFSKESILPKRNSDKLIARKKDWDPKKYGGFDSPTVAYSVLVVAKVEKGKSKKLKSVKELLGITIMERSSFEKNPIDFLEAKGYKEVKKDLIIKLPKYSLFELENGRKRMLASAGELQKGNELALPSKYVNFLYLASHYEKLKGSPEDNEQKQLFVEQHKHYLDEIIEQISEFSKRVILADANLDKVLSAYNKHRDKPIREQAENIIHLFTLTNLGAPAAFKYFDTTIDRKRYTSTKEVLDATLIHQSITGLYETRIDLSQLGGDGGGGGGSSPAPGGTLQLDDEYRLYSPLVKPDQNIQFWLEQFPQAWAETAGMGLAKQVPPQVIQLKASATPVSVRQYPLSKEAQEGIRPHVQRLIQQGILVPVQSPWNTPLLPVRKPGTNDYRPVQDLREVNKRVQDIHPTVPNPYNLLCALPPQRSWYTVLDLKDAFFCLRLHPTSQPLFAFEWRDPGTGRTGQLTWTRLPQGFKNSPTIFDEALHRDLANFRIQHPQVTLLQYVDDLLLAGATKQDCLEGTKALLLELSDLGYRASAKKAQICRREVTYLGYSLRDGQRWLTEARKKTVVQIPAPTTAKQVREFLGTAGFCRLWIPGFATLAAPLYPLTKEKGEFSWAPEHQKAFDAIKKALLSAPALALPDVTKPFTLYVDERKGVARGVLTQTLGPWRRPVAYLSKKLDPVASGWPVCLKAIAAVAILVKDADKLTLGQNITVIAPHALENIVRQPPDRWMTNARMTHYQSLLLTERVTFAPPAALNPATLLPEETDEPVTHDCHQLLIEETGVRKDLTDIPLTGEVLTWFTDGSSYVVEGKRMAGAAVVDGTRTIWASSLPEGTSAQKAELMALTQALRLAEGKSINIYTDSRYAFATAHVHGAIYKQRGLLTSAGREIKNKEEILSLLEALHLPKRLAIIHCPGHQKAKDPISRGNQMADRVAKQAAQGVNLLAGKRTADGSEFEKRTADGSEFESPKKKAKVE

SEQ ID NO: 7362 - protein, 2085 aa, synthetic construct
MPAAKRVKLDGGDKKYSIGLDIGTNSVGWAVITDEYKVPSKKFKVLGNTDRHSIKKNLIGALLFDSGETAEATRLKRTARRRYTRRKNRICYLQEIFSNEMAKVDDSFFHRLEESFLVEEDKKHERHPIFGNIVDEVAYHEKYPTIYHLRKKLVDSTDKADLRLIYLALAHMIKFRGHFLIEGDLNPDNSDVDKLFIQLVQTYNQLFEENPINASGVDAKAILSARLSKSRRLENLIAQLPGEKKNGLFGNLIALSLGLTPNFKSNFDLAEDAKLQLSKDTYDDDLDNLLAQIGDQYADLFLAAKNLSDAILLSDILRVNTEITKAPLSASMIKRYDEHHQDLTLLKALVRQQLPEKYKEIFFDQSKNGYAGYIDGGASQEEFYKFIKPILEKMDGTEELLVKLNREDLLRKQRTFDNGSIPHQIHLGELHAILRRQEDFYPFLKDNREKIEKILTFRIPYYVGPLARGNSRFAWMTRKSEETITPWNFEEVVDKGASAQSFIERMTNFDKNLPNEKVLPKHSLLYEYFTVYNELTKVKYVTEGMRKPAFLSGEQKKAIVDLLFKTNRKVTVKQLKEDYFKKIECFDSVEISGVEDRFNASLGTYHDLLKIIKDKDFLDNEENEDILEDIVLTLTLFEDREMIEERLKTYAHLFDDKVMKQLKRRRYTGWGRLSRKLINGIRDKQSGKTILDFLKSDGFANRNFMQLIHDDSLTFKEDIQKAQVSGQGDSLHEHIANLAGSPAIKKGILQTVKVVDELVKVMGRHKPENIVIEMARENQTTQKGQKNSRERMKRIEEGIKELGSQILKEHPVENTQLQNEKLYLYYLQNGRDMYVDQELDINRLSDYDVDHIVPQSFLKDDSIDNKVLTRSDKARGKSDNVPSEEVVKKMKNYWRQLLNAKLITQRKFDNLTKAERGGLSELDKAGFIKRQLVETRQITKHVAQILDSRMNTKYDENDKLIREVKVITLKSKLVSDFRKDFQFYKVREINNYHHAHDAYLNAVVGTALIKKYPKLESEFVYGDYKVYDVRKMIAKSEQEIGKATAKYFFYSNIMNFFKTEITLANGEIRKRPLIETNGETGEIVWDKGRDFATVRKVLSMPQVNIVKKTEVQTGGFSKESILPKRNSDKLIARKKDWDPKKYGGFDSPTVAYSVLVVAKVEKGKSKKLKSVKELLGITIMERSSFEKNPIDFLEAKGYKEVKKDLIIKLPKYSLFELENGRKRMLASAGELQKGNELALPSKYVNFLYLASHYEKLKGSPEDNEQKQLFVEQHKHYLDEIIEQISEFSKRVILADANLDKVLSAYNKHRDKPIREQAENIIHLFTLTNLGAPAAFKYFDTTIDRKRYTSTKEVLDATLIHQSITGLYETRIDLSQLGGDGGGGGGSSPAPGGIPWLMKKPLQLTTLVPLQEYEERLLKQTMLTGSYKEKLQSLFLKYDALWQHWENQVGHRRIKPHHIATGTVNPRPQKQYPINPKAKASIQTVINDLLKQGVLIQQNSIMNTPVYPVPKPDGKWRMVLDYREVNKTIPLIAAQNQHSAGILSSIFRGKYKTTLDLSNGFWAHSITPESYWLTAFTWLGQQYCWTRLPQGFLNSPALFNADVVDLLKEVPNVQVYVDDIYISHDDPREHLEQLEKVFSLLLNAGYVVSLKKSEIAQHEVEFLGFNITKEGRGLTETFKQKLLNITPPRDLKQLQSILGKLNFARNFIPNFSELVKPLYNIIATAPGKYITWTTDNSQQLQNIISMLNSAENLEERNPEVRLIMKVNTSPSAGYIRFYNEFAKRPIMYLNYVYTKAEVKFTNTEKLLTTIHKGLIKALDLGMGQEILVYSPIVSMTKIQKTPLPERKALPIRWITWMSYLEDPRIQFHYDKTLPELQQVPTVTDDIIAKIKHPSEFSMVFYTDGSAIKHPNVNKSHNAGMGIAQVQFKPEFTVINTWSIPLGDHTAQLAEVAAVEFACKKALKIDGPVLIVTDSFYVAESVNKELPYWQSNGFFNNKKKPLKHVSKWKSIADCIQLKPDIIIIHEKGHQPTASTFHTEGNNLADKLATQGSYVVNAGKRTADGSEFEKRTADGSEFESPKKKAKVE

SEQ ID NO: 7363 - protein, 2174 aa, synthetic construct
MPAAKRVKLDGGDKKYSIGLDIGTNSVGWAVITDEYKVPSKKFKVLGNTDRHSIKKNLIGALLFDSGETAEATRLKRTARRRYTRRKNRICYLQEIFSNEMAKVDDSFFHRLEESFLVEEDKKHERHPIFGNIVDEVAYHEKYPTIYHLRKKLVDSTDKADLRLIYLALAHMIKFRGHFLIEGDLNPDNSDVDKLFIQLVQTYNQLFEENPINASGVDAKAILSARLSKSRRLENLIAQLPGEKKNGLFGNLIALSLGLTPNFKSNFDLAEDAKLQLSKDTYDDDLDNLLAQIGDQYADLFLAAKNLSDAILLSDILRVNTEITKAPLSASMIKRYDEHHQDLTLLKALVRQQLPEKYKEIFFDQSKNGYAGYIDGGASQEEFYKFIKPILEKMDGTEELLVKLNREDLLRKQRTFDNGSIPHQIHLGELHAILRRQEDFYPFLKDNREKIEKILTFRIPYYVGPLARGNSRFAWMTRKSEETITPWNFEEVVDKGASAQSFIERMTNFDKNLPNEKVLPKHSLLYEYFTVYNELTKVKYVTEGMRKPAFLSGEQKKAIVDLLFKTNRKVTVKQLKEDYFKKIECFDSVEISGVEDRFNASLGTYHDLLKIIKDKDFLDNEENEDILEDIVLTLTLFEDREMIEERLKTYAHLFDDKVMKQLKRRRYTGWGRLSRKLINGIRDKQSGKTILDFLKSDGFANRNFMQLIHDDSLTFKEDIQKAQVSGQGDSLHEHIANLAGSPAIKKGILQTVKVVDELVKVMGRHKPENIVIEMARENQTTQKGQKNSRERMKRIEEGIKELGSQILKEHPVENTQLQNEKLYLYYLQNGRDMYVDQELDINRLSDYDVDHIVPQSFLKDDSIDNKVLTRSDKARGKSDNVPSEEVVKKMKNYWRQLLNAKLITQRKFDNLTKAERGGLSELDKAGFIKRQLVETRQITKHVAQILDSRMNTKYDENDKLIREVKVITLKSKLVSDFRKDFQFYKVREINNYHHAHDAYLNAVVGTALIKKYPKLESEFVYGDYKVYDVRKMIAKSEQEIGKATAKYFFYSNIMNFFKTEITLANGEIRKRPLIETNGETGEIVWDKGRDFATVRKVLSMPQVNIVKKTEVQTGGFSKESILPKRNSDKLIARKKDWDPKKYGGFDSPTVAYSVLVVAKVEKGKSKKLKSVKELLGITIMERSSFEKNPIDFLEAKGYKEVKKDLIIKLPKYSLFELENGRKRMLASAGELQKGNELALPSKYVNFLYLASHYEKLKGSPEDNEQKQLFVEQHKHYLDEIIEQISEFSKRVILADANLDKVLSAYNKHRDKPIREQAENIIHLFTLTNLGAPAAFKYFDTTIDRKRYTSTKEVLDATLIHQSITGLYETRIDLSQLGGDGGGGGGSSPAPGGMNPLQLLQPLPAEVKGTKLLAHWNSGATITCIPESFLEDEQPIKQTLIKTIHGEKQQNVYYLTFKVKGRKVEAEVIASPYEYILLSPTDVPWLTQQPLQLTILVPLQEYQDRILNKTALPEEQKQQLKALFTKYDNLWQHWENQVGHRKIRPHNIATGDYPPRPQKQYPINPKAKPSIQIVIDDLLKQGVLTPQNSTMNTPVYPVPKPDGRWRMVLDYREVNKTIPLTAAQNQHSAGILATIVRQKYKTTLDLANGFWAHPITPDSYWLTAFTWQGKQYCWTRLPQGFLNSPALFTADAVDLLKEVPNVQVYVDDIYLSHDNPHEHIQQLEKVFQILLQAGYVVSLKKSEIGQRTVEFLGFNITKEGRGLTDTFKTKLLNVTPPKDLKQLQSILGLLNFARNFIPNFAELVQTLYNLIASSKGKYIEWTEDNTKQLNKVIEALNTASNLEERLPDQRLVIKVNTSPSAGYVRYYNESGKKPIMYLNYVFSKAELKFSMLEKLLTTMHKALIKAMDLAMGQEILVYSPIVSMTKIQKTPLPERKALPIRWITWMTYLEDPRIQFHYDKTLPELKHIPDVYTSSIPPLKHPSQYEGVFCTDGSAIKSPDPTKSNNAGMGIVHAIYNPEYKILNQWSIPLGHHTAQMAEIAAVEFACKKALKVPGPVLVITDSFYVAESANKELPYWKSNGFVNNKKEPLKHISKWKSIAECLSIKPDITIQHEKGHQPINTSIHTEGNALADKLATQGSYVVNAGKRTADGSEFEKRTADGSEFESPKKKAKVE

SEQ ID NO: 7364 - protein, 2093 aa, synthetic construct
MPAAKRVKLDGGDKKYSIGLDIGTNSVGWAVITDEYKVPSKKFKVLGNTDRHSIKKNLIGALLFDSGETAEATRLKRTARRRYTRRKNRICYLQEIFSNEMAKVDDSFFHRLEESFLVEEDKKHERHPIFGNIVDEVAYHEKYPTIYHLRKKLVDSTDKADLRLIYLALAHMIKFRGHFLIEGDLNPDNSDVDKLFIQLVQTYNQLFEENPINASGVDAKAILSARLSKSRRLENLIAQLPGEKKNGLFGNLIALSLGLTPNFKSNFDLAEDAKLQLSKDTYDDDLDNLLAQIGDQYADLFLAAKNLSDAILLSDILRVNTEITKAPLSASMIKRYDEHHQDLTLLKALVRQQLPEKYKEIFFDQSKNGYAGYIDGGASQEEFYKFIKPILEKMDGTEELLVKLNREDLLRKQRTFDNGSIPHQIHLGELHAILRRQEDFYPFLKDNREKIEKILTFRIPYYVGPLARGNSRFAWMTRKSEETITPWNFEEVVDKGASAQSFIERMTNFDKNLPNEKVLPKHSLLYEYFTVYNELTKVKYVTEGMRKPAFLSGEQKKAIVDLLFKTNRKVTVKQLKEDYFKKIECFDSVEISGVEDRFNASLGTYHDLLKIIKDKDFLDNEENEDILEDIVLTLTLFEDREMIEERLKTYAHLFDDKVMKQLKRRRYTGWGRLSRKLINGIRDKQSGKTILDFLKSDGFANRNFMQLIHDDSLTFKEDIQKAQVSGQGDSLHEHIANLAGSPAIKKGILQTVKVVDELVKVMGRHKPENIVIEMARENQTTQKGQKNSRERMKRIEEGIKELGSQILKEHPVENTQLQNEKLYLYYLQNGRDMYVDQELDINRLSDYDVDHIVPQSFLKDDSIDNKVLTRSDKARGKSDNVPSEEVVKKMKNYWRQLLNAKLITQRKFDNLTKAERGGLSELDKAGFIKRQLVETRQITKHVAQILDSRMNTKYDENDKLIREVKVITLKSKLVSDFRKDFQFYKVREINNYHHAHDAYLNAVVGTALIKKYPKLESEFVYGDYKVYDVRKMIAKSEQEIGKATAKYFFYSNIMNFFKTEITLANGEIRKRPLIETNGETGEIVWDKGRDFATVRKVLSMPQVNIVKKTEVQTGGFSKESILPKRNSDKLIARKKDWDPKKYGGFDSPTVAYSVLVVAKVEKGKSKKLKSVKELLGITIMERSSFEKNPIDFLEAKGYKEVKKDLIIKLPKYSLFELENGRKRMLASAGELQKGNELALPSKYVNFLYLASHYEKLKGSPEDNEQKQLFVEQHKHYLDEIIEQISEFSKRVILADANLDKVLSAYNKHRDKPIREQAENIIHLFTLTNLGAPAAFKYFDTTIDRKRYTSTKEVLDATLIHQSITGLYETRIDLSQLGGDGGGGGPAPGSSGGTLQLEEEYRLFEPESTQKQEMDIWLKNFPQAWAETGGMGTAHCQAPVLIQLKATATPISIRQYPMPHEAYQGIKPHIRRMLDQGILKPCQSPWNTPLLPVKKPGTEDYRPVQDLREVNKRVEDIHPTVPNPYNLLSTLPPSHPWYTVLDLKDAFFCLRLHSESQLLFAFEWRDPEIGLSGQLTWTRLPQGFKNSPTLFNEALHSDLADFRVRYPALVLLQYVDDLLLAAATRTECLEGTKALLETLGNKGYRASAKKAQICLQEVTYLGYSLKDGQRWLTKARKEAILSIPVPKNSRQVREFLGTAGYCRLWIPGFAELAAPLYPLTRPGTLFQWGTEQQLAFEDIKKALLSSPALGLPDITKPFELFIDENSGFAKGVLVQKLGPWKRPVAYLSKKLDTVASGWPPCLRMVAAIAILVKDAGKLTLGQPLTILTSHPVEALVRQPPNKWLSNARMTHYQAMLLDAERVHFGPTVSLNPATLLPLPSGGNHHDCLQILAETHGTRPDLTDQPLPDADLTWYTDGSSFIRNGEREAGAAVTTESEVIWAAPLPPGTSAQRAELIALTQALKMAEGKKLTVYTDSRYAFATTHVHGEIYRRRGWLTSEGKEIKNKNEILALLEALFLPKRLSIIHCPGHQKGDSPQAKGNRLADDTAKKAATETHSSLTVLPAGKRTADGSEFEKRTADGSEFESPKKKAKVE

SEQ ID NO: 7365 - protein, 2093 aa, synthetic construct
MPAAKRVKLDGGDKKYSIGLDIGTNSVGWAVITDEYKVPSKKFKVLGNTDRHSIKKNLIGALLFDSGETAEATRLKRTARRRYTRRKNRICYLQEIFSNEMAKVDDSFFHRLEESFLVEEDKKHERHPIFGNIVDEVAYHEKYPTIYHLRKKLVDSTDKADLRLIYLALAHMIKFRGHFLIEGDLNPDNSDVDKLFIQLVQTYNQLFEENPINASGVDAKAILSARLSKSRRLENLIAQLPGEKKNGLFGNLIALSLGLTPNFKSNFDLAEDAKLQLSKDTYDDDLDNLLAQIGDQYADLFLAAKNLSDAILLSDILRVNTEITKAPLSASMIKRYDEHHQDLTLLKALVRQQLPEKYKEIFFDQSKNGYAGYIDGGASQEEFYKFIKPILEKMDGTEELLVKLNREDLLRKQRTFDNGSIPHQIHLGELHAILRRQEDFYPFLKDNREKIEKILTFRIPYYVGPLARGNSRFAWMTRKSEETITPWNFEEVVDKGASAQSFIERMTNFDKNLPNEKVLPKHSLLYEYFTVYNELTKVKYVTEGMRKPAFLSGEQKKAIVDLLFKTNRKVTVKQLKEDYFKKIECFDSVEISGVEDRFNASLGTYHDLLKIIKDKDFLDNEENEDILEDIVLTLTLFEDREMIEERLKTYAHLFDDKVMKQLKRRRYTGWGRLSRKLINGIRDKQSGKTILDFLKSDGFANRNFMQLIHDDSLTFKEDIQKAQVSGQGDSLHEHIANLAGSPAIKKGILQTVKVVDELVKVMGRHKPENIVIEMARENQTTQKGQKNSRERMKRIEEGIKELGSQILKEHPVENTQLQNEKLYLYYLQNGRDMYVDQELDINRLSDYDVDHIVPQSFLKDDSIDNKVLTRSDKARGKSDNVPSEEVVKKMKNYWRQLLNAKLITQRKFDNLTKAERGGLSELDKAGFIKRQLVETRQITKHVAQILDSRMNTKYDENDKLIREVKVITLKSKLVSDFRKDFQFYKVREINNYHHAHDAYLNAVVGTALIKKYPKLESEFVYGDYKVYDVRKMIAKSEQEIGKATAKYFFYSNIMNFFKTEITLANGEIRKRPLIETNGETGEIVWDKGRDFATVRKVLSMPQVNIVKKTEVQTGGFSKESILPKRNSDKLIARKKDWDPKKYGGFDSPTVAYSVLVVAKVEKGKSKKLKSVKELLGITIMERSSFEKNPIDFLEAKGYKEVKKDLIIKLPKYSLFELENGRKRMLASAGELQKGNELALPSKYVNFLYLASHYEKLKGSPEDNEQKQLFVEQHKHYLDEIIEQISEFSKRVILADANLDKVLSAYNKHRDKPIREQAENIIHLFTLTNLGAPAAFKYFDTTIDRKRYTSTKEVLDATLIHQSITGLYETRIDLSQLGGDGGGGGPAPGSSGGTLQLEEEYRLFEPESTQKQEMDIWLKNFPQAWAETGGMGTAHCQAPVLIQLKATATPISIRQYPMPHEAYQGIKPHIRRMLDQGILKPCQSPWNTPLLPVKKPGTEDYRPVQDLREVNKRVEDIHPTVPNPYNLLSTLPPSHPWYTVLDLKDAFFCLRLHSESQLLFAFEWRDPEIGLSGQLTWTRLPQGFKNSPTLFNEALHSDLADFRVRYPALVLLQYVDDLLLAAATRTECLEGTKALLETLGNKGYRASAKKAQICLQEVTYLGYSLKDGQRWLTKARKEAILSIPVPKNSRQVREFLGKAGYCRLFIPGFAELAAPLYPLTRPGTLFQWGTEQQLAFEDIKKALLSSPALGLPDITKPFELFIDENSGFAKGVLVQKLGPWKRPVAYLSKKLDTVASGWPPCLRMVAAIAILVKDAGKLTLGQPLTILTSHPVEALVRQPPNKWLSNARMTHYQAMLLDAERVHFGPTVSLNPATLLPLPSGGNHHDCLQILAETHGTRPDLTDQPLPDADLTWYTDGSSFIRNGEREAGAAVTTESEVIWAAPLPPGTSAQRAELIALTQALKMAEGKKLTVYTDSRYAFATTHVHGEIYRRRGWLTSEGKEIKNKNEILALLEALFLPKRLSIIHCPGHQKGDSPQAKGNRLADDTAKKAATETHSSLTVLPAGKRTADGSEFEKRTADGSEFESPKKKAKVE

SEQ ID NO: 7366 - protein, 2174 aa, synthetic construct
MPAAKRVKLDGGDKKYSIGLDIGTNSVGWAVITDEYKVPSKKFKVLGNTDRHSIKKNLIGALLFDSGETAEATRLKRTARRRYTRRKNRICYLQEIFSNEMAKVDDSFFHRLEESFLVEEDKKHERHPIFGNIVDEVAYHEKYPTIYHLRKKLVDSTDKADLRLIYLALAHMIKFRGHFLIEGDLNPDNSDVDKLFIQLVQTYNQLFEENPINASGVDAKAILSARLSKSRRLENLIAQLPGEKKNGLFGNLIALSLGLTPNFKSNFDLAEDAKLQLSKDTYDDDLDNLLAQIGDQYADLFLAAKNLSDAILLSDILRVNTEITKAPLSASMIKRYDEHHQDLTLLKALVRQQLPEKYKEIFFDQSKNGYAGYIDGGASQEEFYKFIKPILEKMDGTEELLVKLNREDLLRKQRTFDNGSIPHQIHLGELHAILRRQEDFYPFLKDNREKIEKILTFRIPYYVGPLARGNSRFAWMTRKSEETITPWNFEEVVDKGASAQSFIERMTNFDKNLPNEKVLPKHSLLYEYFTVYNELTKVKYVTEGMRKPAFLSGEQKKAIVDLLFKTNRKVTVKQLKEDYFKKIECFDSVEISGVEDRFNASLGTYHDLLKIIKDKDFLDNEENEDILEDIVLTLTLFEDREMIEERLKTYAHLFDDKVMKQLKRRRYTGWGRLSRKLINGIRDKQSGKTILDFLKSDGFANRNFMQLIHDDSLTFKEDIQKAQVSGQGDSLHEHIANLAGSPAIKKGILQTVKVVDELVKVMGRHKPENIVIEMARENQTTQKGQKNSRERMKRIEEGIKELGSQILKEHPVENTQLQNEKLYLYYLQNGRDMYVDQELDINRLSDYDVDHIVPQSFLKDDSIDNKVLTRSDKARGKSDNVPSEEVVKKMKNYWRQLLNAKLITQRKFDNLTKAERGGLSELDKAGFIKRQLVETRQITKHVAQILDSRMNTKYDENDKLIREVKVITLKSKLVSDFRKDFQFYKVREINNYHHAHDAYLNAVVGTALIKKYPKLESEFVYGDYKVYDVRKMIAKSEQEIGKATAKYFFYSNIMNFFKTEITLANGEIRKRPLIETNGETGEIVWDKGRDFATVRKVLSMPQVNIVKKTEVQTGGFSKESILPKRNSDKLIARKKDWDPKKYGGFDSPTVAYSVLVVAKVEKGKSKKLKSVKELLGITIMERSSFEKNPIDFLEAKGYKEVKKDLIIKLPKYSLFELENGRKRMLASAGELQKGNELALPSKYVNFLYLASHYEKLKGSPEDNEQKQLFVEQHKHYLDEIIEQISEFSKRVILADANLDKVLSAYNKHRDKPIREQAENIIHLFTLTNLGAPAAFKYFDTTIDRKRYTSTKEVLDATLIHQSITGLYETRIDLSQLGGDGGGGGPAPGSSGGMNPLQLLQPLPAEIKGTKLLAHWNSGATITCIPESFLEDEQPIKKTLIKTIHGEKQQNVYYVTFKVKGRKVEAEVIASPYEYILLSPTDVPWLTQQPLQLTILVPLQEYQEKILSKTALPEDQKQQLKTLFVKYDNLWQHWENQVGHRKIRPHNIATGDYPPRPQKQYPINPKAKPSIQIVIDDLLKQGVLTPQNSTMNTPVYPVPKPDGRWRMVLDYREVNKTIPLTAAQNQHSAGILATIVRQKYKTTLDLANGFWAHPITPESYWLTAFTWQGKQYCWTRLPQGFLNSPALFNADVVDLLKEIPNVQVYVDDIYLSHDDPKEHVQQLEKVFQILLQAGYVVSLKKSEIGQKTVEFLGFNITKEGRGLTDTFKTKLLNITPPKDLKQLQSILGLLNFARNFIPNFAELVQPLYNLIAPAKGKYIEWSEENTKQLNMVIEALNTASNLEERLPEQRLVIKVNTSPSAGYVRYYNETGKKPIMYLNYVFSKAELKFSMLEKLLTTMHKALIKAMDLAMGQEILVYSPIVSMTKIQKTPLPERKALPIRWITWMTYLEDPRIQFHYDKTLPELKHIPDVYTSSQSPVKHPSQYEGVFYTDGSAIKSPDPTKSNNAGMGIVHATYKPEYQVLNQWSIPLGNHTAQMAEIAAVEFACKKALKIPGPVLVITDSFYVAESANKELPYWKSNGFVNNKKKPLKHISKWKSIAECLSMKPDITIQHEKGISLQIPVFILKGNALADKLATQGSYVVNAGKRTADGSEFEKRTADGSEFESPKKKAKVE

SEQ ID NO: 7367 - protein, 2007 aa, synthetic construct
MPAAKRVKLDGGDKKYSIGLDIGTNSVGWAVITDEYKVPSKKFKVLGNTDRHSIKKNLIGALLFDSGETAEATRLKRTARRRYTRRKNRICYLQEIFSNEMAKVDDSFFHRLEESFLVEEDKKHERHPIFGNIVDEVAYHEKYPTIYHLRKKLVDSTDKADLRLIYLALAHMIKFRGHFLIEGDLNPDNSDVDKLFIQLVQTYNQLFEENPINASGVDAKAILSARLSKSRRLENLIAQLPGEKKNGLFGNLIALSLGLTPNFKSNFDLAEDAKLQLSKDTYDDDLDNLLAQIGDQYADLFLAAKNLSDAILLSDILRVNTEITKAPLSASMIKRYDEHHQDLTLLKALVRQQLPEKYKEIFFDQSKNGYAGYIDGGASQEEFYKFIKPILEKMDGTEELLVKLNREDLLRKQRTFDNGSIPHQIHLGELHAILRRQEDFYPFLKDNREKIEKILTFRIPYYVGPLARGNSRFAWMTRKSEETITPWNFEEVVDKGASAQSFIERMTNFDKNLPNEKVLPKHSLLYEYFTVYNELTKVKYVTEGMRKPAFLSGEQKKAIVDLLFKTNRKVTVKQLKEDYFKKIECFDSVEISGVEDRFNASLGTYHDLLKIIKDKDFLDNEENEDILEDIVLTLTLFEDREMIEERLKTYAHLFDDKVMKQLKRRRYTGWGRLSRKLINGIRDKQSGKTILDFLKSDGFANRNFMQLIHDDSLTFKEDIQKAQVSGQGDSLHEHIANLAGSPAIKKGILQTVKVVDELVKVMGRHKPENIVIEMARENQTTQKGQKNSRERMKRIEEGIKELGSQILKEHPVENTQLQNEKLYLYYLQNGRDMYVDQELDINRLSDYDVDHIVPQSFLKDDSIDNKVLTRSDKARGKSDNVPSEEVVKKMKNYWRQLLNAKLITQRKFDNLTKAERGGLSELDKAGFIKRQLVETRQITKHVAQILDSRMNTKYDENDKLIREVKVITLKSKLVSDFRKDFQFYKVREINNYHHAHDAYLNAVVGTALIKKYPKLESEFVYGDYKVYDVRKMIAKSEQEIGKATAKYFFYSNIMNFFKTEITLANGEIRKRPLIETNGETGEIVWDKGRDFATVRKVLSMPQVNIVKKTEVQTGGFSKESILPKRNSDKLIARKKDWDPKKYGGFDSPTVAYSVLVVAKVEKGKSKKLKSVKELLGITIMERSSFEKNPIDFLEAKGYKEVKKDLIIKLPKYSLFELENGRKRMLASAGELQKGNELALPSKYVNFLYLASHYEKLKGSPEDNEQKQLFVEQHKHYLDEIIEQISEFSKRVILADANLDKVLSAYNKHRDKPIREQAENIIHLFTLTNLGAPAAFKYFDTTIDRKRYTSTKEVLDATLIHQSITGLYETRIDLSQLGGDGGGGGPAPGSSGGGLEHLPPPPEVSQFPLNPERLQALTDLVSRALEAKHIEPYQGPGNNPIFPVKKPNGKWRFIHDLRATNSLTRDLASPSPGPPDLTSLPQDLPHLRTIDLTDAFFQIPLPAVFQPYFAFTLPQPNNHGPGTRYSWRVLPQGFKNSPTLFQQQLSHILAPVRKAFPNSLIIQYMDDILLASPALRELTALTDKVTNALTKEGLPMSLEKTQATPGSIHFLGQVISPDCITYETLPSIHVKSIWSLAELQSMLGELQWVSKGTPVLRSSLHQLYLALRGHRDPRDTIELTSTQVQALKTIQKALALNCRSRLVSQLPILALIILRPTGTTAVLFQTKQKWPLVWLHTPHPATSLRPWGQLLANAIITLDKYSLQHYGQICKSFHHNISNQALTYYLHTSDQSSVAILLQHSHRFHNLGAQPSGPWRSLLQVPQIFQNIDVLRPPFIISPVVIDHAPCLFSDGATSKAAFILWDKQVIHQQVLPLPSTCSAQAGELFGLLAGLQKSKPWPALNIFLDSKFLIGHLRRMAWGAFLGPSTQCDLHARLFPLLQGKTVYVHHVRSHTLLQDPISRLNEATDALMLAPLLPLAGKRTADGSEFEKRTADGSEFESPKKKAKVE

SEQ ID NO: 7368 - protein, 2125 aa, synthetic construct
MPAAKRVKLDGGDKKYSIGLDIGTNSVGWAVITDEYKVPSKKFKVLGNTDRHSIKKNLIGALLFDSGETAEATRLKRTARRRYTRRKNRICYLQEIFSNEMAKVDDSFFHRLEESFLVEEDKKHERHPIFGNIVDEVAYHEKYPTIYHLRKKLVDSTDKADLRLIYLALAHMIKFRGHFLIEGDLNPDNSDVDKLFIQLVQTYNQLFEENPINASGVDAKAILSARLSKSRRLENLIAQLPGEKKNGLFGNLIALSLGLTPNFKSNFDLAEDAKLQLSKDTYDDDLDNLLAQIGDQYADLFLAAKNLSDAILLSDILRVNTEITKAPLSASMIKRYDEHHQDLTLLKALVRQQLPEKYKEIFFDQSKNGYAGYIDGGASQEEFYKFIKPILEKMDGTEELLVKLNREDLLRKQRTFDNGSIPHQIHLGELHAILRRQEDFYPFLKDNREKIEKILTFRIPYYVGPLARGNSRFAWMTRKSEETITPWNFEEVVDKGASAQSFIERMTNFDKNLPNEKVLPKHSLLYEYFTVYNELTKVKYVTEGMRKPAFLSGEQKKAIVDLLFKTNRKVTVKQLKEDYFKKIECFDSVEISGVEDRFNASLGTYHDLLKIIKDKDFLDNEENEDILEDIVLTLTLFEDREMIEERLKTYAHLFDDKVMKQLKRRRYTGWGRLSRKLINGIRDKQSGKTILDFLKSDGFANRNFMQLIHDDSLTFKEDIQKAQVSGQGDSLHEHIANLAGSPAIKKGILQTVKVVDELVKVMGRHKPENIVIEMARENQTTQKGQKNSRERMKRIEEGIKELGSQILKEHPVENTQLQNEKLYLYYLQNGRDMYVDQELDINRLSDYDVDHIVPQSFLKDDSIDNKVLTRSDKARGKSDNVPSEEVVKKMKNYWRQLLNAKLITQRKFDNLTKAERGGLSELDKAGFIKRQLVETRQITKHVAQILDSRMNTKYDENDKLIREVKVITLKSKLVSDFRKDFQFYKVREINNYHHAHDAYLNAVVGTALIKKYPKLESEFVYGDYKVYDVRKMIAKSEQEIGKATAKYFFYSNIMNFFKTEITLANGEIRKRPLIETNGETGEIVWDKGRDFATVRKVLSMPQVNIVKKTEVQTGGFSKESILPKRNSDKLIARKKDWDPKKYGGFDSPTVAYSVLVVAKVEKGKSKKLKSVKELLGITIMERSSFEKNPIDFLEAKGYKEVKKDLIIKLPKYSLFELENGRKRMLASAGELQKGNELALPSKYVNFLYLASHYEKLKGSPEDNEQKQLFVEQHKHYLDEIIEQISEFSKRVILADANLDKVLSAYNKHRDKPIREQAENIIHLFTLTNLGAPAAFKYFDTTIDRKRYTSTKEVLDATLIHQSITGLYETRIDLSQLGGDGGGGGPAPGSSGGLLGRDLLTKLKAQIQFSTEGPQVTWEDRPAMCLVLNLEEEYRLHEKPVPPSIDPSWLQLFPMVWAEKAGMGLANQVPPVVVELKSDASPVAVRQYPMSKEAREGIRPHIQRFLDLGILVPCQSPWNTPLLPVKKPGTNDYRPVQDLREVNKRVQDIHPTVPNPYNLLSSLPPSHTWYSVLDLKDAFFCLKLHPNSQPLFAFEWRDPEKGNTGQLTWTRLPQGFKNSPTLFNEALHRDLASFRALNPQVVMLQYVDDLLVAAPTYRDCKEGTRRLLQELSKLGYRVSAKKAQLCREEVTYLGYLLKGGKRWLTPARKATVMKIPTPTTPRQVREFLGTAGFCRLWIPGFASLAAPLYPLTRPKVPFTWTEAHQEAFGRIKEALLSAPALALPDLTKPFALYVDEKEGVARGVLTQTLGPWRRPVAYLSKKLDPVASGWPTCLKAIAAVALLLKDADKLTLGQNVLVIAPHNLESIVRQPPDRWMTNARMTHYQSLLLNERVSFAPPAILNPATLLPVESDDTPIHICSEILAEETGTRPDLRDQPLPGVPAWYTDGSSFIMDGRRQAGAAIVDNKRTVWASNLPEGTSAQKAELIALTQALRLAEGKSINIYTDSRYAFATAHVHGAIYKQRGWLTSAGKDIKNKEEILALLEAIHLPKRVAIIHCPGHQRGTDPVATGNRKADEAAKQAAQSTRILTETTKNAGKRTADGSEFEKRTADGSEFESPKKKAKVE

SEQ ID NO: 7369 - protein, 2125 aa, synthetic construct
MPAAKRVKLDGGDKKYSIGLDIGTNSVGWAVITDEYKVPSKKFKVLGNTDRHSIKKNLIGALLFDSGETAEATRLKRTARRRYTRRKNRICYLQEIFSNEMAKVDDSFFHRLEESFLVEEDKKHERHPIFGNIVDEVAYHEKYPTIYHLRKKLVDSTDKADLRLIYLALAHMIKFRGHFLIEGDLNPDNSDVDKLFIQLVQTYNQLFEENPINASGVDAKAILSARLSKSRRLENLIAQLPGEKKNGLFGNLIALSLGLTPNFKSNFDLAEDAKLQLSKDTYDDDLDNLLAQIGDQYADLFLAAKNLSDAILLSDILRVNTEITKAPLSASMIKRYDEHHQDLTLLKALVRQQLPEKYKEIFFDQSKNGYAGYIDGGASQEEFYKFIKPILEKMDGTEELLVKLNREDLLRKQRTFDNGSIPHQIHLGELHAILRRQEDFYPFLKDNREKIEKILTFRIPYYVGPLARGNSRFAWMTRKSEETITPWNFEEVVDKGASAQSFIERMTNFDKNLPNEKVLPKHSLLYEYFTVYNELTKVKYVTEGMRKPAFLSGEQKKAIVDLLFKTNRKVTVKQLKEDYFKKIECFDSVEISGVEDRFNASLGTYHDLLKIIKDKDFLDNEENEDILEDIVLTLTLFEDREMIEERLKTYAHLFDDKVMKQLKRRRYTGWGRLSRKLINGIRDKQSGKTILDFLKSDGFANRNFMQLIHDDSLTFKEDIQKAQVSGQGDSLHEHIANLAGSPAIKKGILQTVKVVDELVKVMGRHKPENIVIEMARENQTTQKGQKNSRERMKRIEEGIKELGSQILKEHPVENTQLQNEKLYLYYLQNGRDMYVDQELDINRLSDYDVDHIVPQSFLKDDSIDNKVLTRSDKARGKSDNVPSEEVVKKMKNYWRQLLNAKLITQRKFDNLTKAERGGLSELDKAGFIKRQLVETRQITKHVAQILDSRMNTKYDENDKLIREVKVITLKSKLVSDFRKDFQFYKVREINNYHHAHDAYLNAVVGTALIKKYPKLESEFVYGDYKVYDVRKMIAKSEQEIGKATAKYFFYSNIMNFFKTEITLANGEIRKRPLIETNGETGEIVWDKGRDFATVRKVLSMPQVNIVKKTEVQTGGFSKESILPKRNSDKLIARKKDWDPKKYGGFDSPTVAYSVLVVAKVEKGKSKKLKSVKELLGITIMERSSFEKNPIDFLEAKGYKEVKKDLIIKLPKYSLFELENGRKRMLASAGELQKGNELALPSKYVNFLYLASHYEKLKGSPEDNEQKQLFVEQHKHYLDEIIEQISEFSKRVILADANLDKVLSAYNKHRDKPIREQAENIIHLFTLTNLGAPAAFKYFDTTIDRKRYTSTKEVLDATLIHQSITGLYETRIDLSQLGGDGGGGGPAPGSSGGLLGRDLLTKLKAQIQFSTEGPQVTWEDRPAMCLVLNLEEEYRLHEKPVPPSIDPSWLQLFPMVWAEKAGMGLANQVPPVVVELKSDASPVAVRQYPMSKEAREGIRPHIQRFLDLGILVPCQSPWNTPLLPVKKPGTNDYRPVQDLREVNKRVQDIHPTVPNPYNLLSSLPPSHTWYSVLDLKDAFFCLKLHPNSQPLFAFEWRDPEKGNTGQLTWTRLPQGFKNSPTLFNEALHRDLASFRALNPQVVMLQYVDDLLVAAPTYRDCKEGTRRLLQELSKLGYRVSAKKAQLCREEVTYLGYLLKGGKRWLTPARKATVMKIPTPTTPRQVREFLGKAGFCRLFIPGFASLAAPLYPLTRPKVPFTWTEAHQEAFGRIKEALLSAPALALPDLTKPFALYVDEKEGVARGVLTQTLGPWRRPVAYLSKKLDPVASGWPTCLKAIAAVALLLKDADKLTLGQNVLVIAPHNLESIVRQPPDRWMTNARMTHYQSLLLNERVSFAPPAILNPATLLPVESDDTPIHICSEILAEETGTRPDLRDQPLPGVPAWYTDGSSFIMDGRRQAGAAIVDNKRTVWASNLPEGTSAQKAELIALTQALRLAEGKSINIYTDSRYAFATAHVHGAIYKQRGWLTSAGKDIKNKEEILALLEAIHLPKRVAIIHCPGHQRGTDPVATGNRKADEAAKQAAQSTRILTETTKNAGKRTADGSEFEKRTADGSEFESPKKKAKVE

SEQ ID NO: 7370 - protein, 2216 aa, synthetic construct
MPAAKRVKLDGGDKKYSIGLDIGTNSVGWAVITDEYKVPSKKFKVLGNTDRHSIKKNLIGALLFDSGETAEATRLKRTARRRYTRRKNRICYLQEIFSNEMAKVDDSFFHRLEESFLVEEDKKHERHPIFGNIVDEVAYHEKYPTIYHLRKKLVDSTDKADLRLIYLALAHMIKFRGHFLIEGDLNPDNSDVDKLFIQLVQTYNQLFEENPINASGVDAKAILSARLSKSRRLENLIAQLPGEKKNGLFGNLIALSLGLTPNFKSNFDLAEDAKLQLSKDTYDDDLDNLLAQIGDQYADLFLAAKNLSDAILLSDILRVNTEITKAPLSASMIKRYDEHHQDLTLLKALVRQQLPEKYKEIFFDQSKNGYAGYIDGGASQEEFYKFIKPILEKMDGTEELLVKLNREDLLRKQRTFDNGSIPHQIHLGELHAILRRQEDFYPFLKDNREKIEKILTFRIPYYVGPLARGNSRFAWMTRKSEETITPWNFEEVVDKGASAQSFIERMTNFDKNLPNEKVLPKHSLLYEYFTVYNELTKVKYVTEGMRKPAFLSGEQKKAIVDLLFKTNRKVTVKQLKEDYFKKIECFDSVEISGVEDRFNASLGTYHDLLKIIKDKDFLDNEENEDILEDIVLTLTLFEDREMIEERLKTYAHLFDDKVMKQLKRRRYTGWGRLSRKLINGIRDKQSGKTILDFLKSDGFANRNFMQLIHDDSLTFKEDIQKAQVSGQGDSLHEHIANLAGSPAIKKGILQTVKVVDELVKVMGRHKPENIVIEMARENQTTQKGQKNSRERMKRIEEGIKELGSQILKEHPVENTQLQNEKLYLYYLQNGRDMYVDQELDINRLSDYDVDHIVPQSFLKDDSIDNKVLTRSDKARGKSDNVPSEEVVKKMKNYWRQLLNAKLITQRKFDNLTKAERGGLSELDKAGFIKRQLVETRQITKHVAQILDSRMNTKYDENDKLIREVKVITLKSKLVSDFRKDFQFYKVREINNYHHAHDAYLNAVVGTALIKKYPKLESEFVYGDYKVYDVRKMIAKSEQEIGKATAKYFFYSNIMNFFKTEITLANGEIRKRPLIETNGETGEIVWDKGRDFATVRKVLSMPQVNIVKKTEVQTGGFSKESILPKRNSDKLIARKKDWDPKKYGGFDSPTVAYSVLVVAKVEKGKSKKLKSVKELLGITIMERSSFEKNPIDFLEAKGYKEVKKDLIIKLPKYSLFELENGRKRMLASAGELQKGNELALPSKYVNFLYLASHYEKLKGSPEDNEQKQLFVEQHKHYLDEIIEQISEFSKRVILADANLDKVLSAYNKHRDKPIREQAENIIHLFTLTNLGAPAAFKYFDTTIDRKRYTSTKEVLDATLIHQSITGLYETRIDLSQLGGDGGGGGPAPGSSGGTLGDQGSRGSDPLPEPRVTLTVEGIPTEFLVNTGAEHSVLTKPMGKMGSKRTVVAGATGSKVYPWTTKRLLKIGQKQVTHSFLVIPECPAPLLGRDLLTKLKAQIQFSTEGPQVTWEDRPAMCLVLNLEEEYRLHEKPVPPSIDPSWLQLFPMVWAEKAGMGLANQVPPVVVELKSDASPVAVRQYPMSKEAREGIRPHIQRFLDLGILVPCQSPWNTPLLPVKKPGTNDYRPVQDLREVNKRVQDIHPTVPNPYNLLSSLPPSHTWYSVLDLKDAFFCLKLHPNSQPLFAFEWRDPEKGNTGQLTWTRLPQGFKNSPTLFNEALHRDLASFRALNPQVVMLQYVDDLLVAAPTYRDCKEGTRRLLQELSKLGYRVSAKKAQLCREEVTYLGYLLKGGKRWLTPARKATVMKIPTPTTPRQVREFLGTAGFCRLWIPGFASLAAPLYPLTRPKVPFTWTEAHQEAFGRIKEALLSAPALALPDLTKPFALYVDEKEGVARGVLTQTLGPWRRPVAYLSKKLDPVASGWPTCLKAIAAVALLLKDADKLTLGQNVLVIAPHNLESIVRQPPDRWMTNARMTHYQSLLLNERVSFAPPAILNPATLLPVESDDTPIHICSEILAEETGTRPDLRDQPLPGVPAWYTDGSSFIMDGRRQAGAAIVDNKRTVWASNLPEGTSAQKAELIALTQALRLAEGKSINIYTDSRYAFATAHVHGAIYKQRGWLTSAGKDIKNKEEILALLEAIHLPKRVAIIHCPGHQRGTDPVATGNRKADEAAKQAAQSTRILTETTKNAGKRTADGSEFEKRTADGSEFESPKKKAKVE

SEQ ID NO: 7371 - protein, 2216 aa, synthetic construct
MPAAKRVKLDGGDKKYSIGLDIGTNSVGWAVITDEYKVPSKKFKVLGNTDRHSIKKNLIGALLFDSGETAEATRLKRTARRRYTRRKNRICYLQEIFSNEMAKVDDSFFHRLEESFLVEEDKKHERHPIFGNIVDEVAYHEKYPTIYHLRKKLVDSTDKADLRLIYLALAHMIKFRGHFLIEGDLNPDNSDVDKLFIQLVQTYNQLFEENPINASGVDAKAILSARLSKSRRLENLIAQLPGEKKNGLFGNLIALSLGLTPNFKSNFDLAEDAKLQLSKDTYDDDLDNLLAQIGDQYADLFLAAKNLSDAILLSDILRVNTEITKAPLSASMIKRYDEHHQDLTLLKALVRQQLPEKYKEIFFDQSKNGYAGYIDGGASQEEFYKFIKPILEKMDGTEELLVKLNREDLLRKQRTFDNGSIPHQIHLGELHAILRRQEDFYPFLKDNREKIEKILTFRIPYYVGPLARGNSRFAWMTRKSEETITPWNFEEVVDKGASAQSFIERMTNFDKNLPNEKVLPKHSLLYEYFTVYNELTKVKYVTEGMRKPAFLSGEQKKAIVDLLFKTNRKVTVKQLKEDYFKKIECFDSVEISGVEDRFNASLGTYHDLLKIIKDKDFLDNEENEDILEDIVLTLTLFEDREMIEERLKTYAHLFDDKVMKQLKRRRYTGWGRLSRKLINGIRDKQSGKTILDFLKSDGFANRNFMQLIHDDSLTFKEDIQKAQVSGQGDSLHEHIANLAGSPAIKKGILQTVKVVDELVKVMGRHKPENIVIEMARENQTTQKGQKNSRERMKRIEEGIKELGSQILKEHPVENTQLQNEKLYLYYLQNGRDMYVDQELDINRLSDYDVDHIVPQSFLKDDSIDNKVLTRSDKARGKSDNVPSEEVVKKMKNYWRQLLNAKLITQRKFDNLTKAERGGLSELDKAGFIKRQLVETRQITKHVAQILDSRMNTKYDENDKLIREVKVITLKSKLVSDFRKDFQFYKVREINNYHHAHDAYLNAVVGTALIKKYPKLESEFVYGDYKVYDVRKMIAKSEQEIGKATAKYFFYSNIMNFFKTEITLANGEIRKRPLIETNGETGEIVWDKGRDFATVRKVLSMPQVNIVKKTEVQTGGFSKESILPKRNSDKLIARKKDWDPKKYGGFDSPTVAYSVLVVAKVEKGKSKKLKSVKELLGITIMERSSFEKNPIDFLEAKGYKEVKKDLIIKLPKYSLFELENGRKRMLASAGELQKGNELALPSKYVNFLYLASHYEKLKGSPEDNEQKQLFVEQHKHYLDEIIEQISEFSKRVILADANLDKVLSAYNKHRDKPIREQAENIIHLFTLTNLGAPAAFKYFDTTIDRKRYTSTKEVLDATLIHQSITGLYETRIDLSQLGGDGGGGGPAPGSSGGTLGDQGSRGSDPLPEPRVTLTVEGIPTEFLVNTGAEHSVLTKPMGKMGSKRTVVAGATGSKVYPWTTKRLLKIGQKQVTHSFLVIPECPAPLLGRDLLTKLKAQIQFSTEGPQVTWEDRPAMCLVLNLEEEYRLHEKPVPPSIDPSWLQLFPMVWAEKAGMGLANQVPPVVVELKSDASPVAVRQYPMSKEAREGIRPHIQRFLDLGILVPCQSPWNTPLLPVKKPGTNDYRPVQDLREVNKRVQDIHPTVPNPYNLLSSLPPSHTWYSVLDLKDAFFCLKLHPNSQPLFAFEWRDPEKGNTGQLTWTRLPQGFKNSPTLFNEALHRDLASFRALNPQVVMLQYVDDLLVAAPTYRDCKEGTRRLLQELSKLGYRVSAKKAQLCREEVTYLGYLLKGGKRWLTPARKATVMKIPTPTTPRQVREFLGKAGFCRLFIPGFASLAAPLYPLTRPKVPFTWTEAHQEAFGRIKEALLSAPALALPDLTKPFALYVDEKEGVARGVLTQTLGPWRRPVAYLSKKLDPVASGWPTCLKAIAAVALLLKDADKLTLGQNVLVIAPHNLESIVRQPPDRWMTNARMTHYQSLLLNERVSFAPPAILNPATLLPVESDDTPIHICSEILAEETGTRPDLRDQPLPGVPAWYTDGSSFIMDGRRQAGAAIVDNKRTVWASNLPEGTSAQKAELIALTQALRLAEGKSINIYTDSRYAFATAHVHGAIYKQRGWLTSAGKDIKNKEEILALLEAIHLPKRVAIIHCPGHQRGTDPVATGNRKADEAAKQAAQSTRILTETTKNAGKRTADGSEFEKRTADGSEFESPKKKAKVE

SEQ ID NO: 7372 - protein, 2094 aa, synthetic construct
MPAAKRVKLDGGDKKYSIGLDIGTNSVGWAVITDEYKVPSKKFKVLGNTDRHSIKKNLIGALLFDSGETAEATRLKRTARRRYTRRKNRICYLQEIFSNEMAKVDDSFFHRLEESFLVEEDKKHERHPIFGNIVDEVAYHEKYPTIYHLRKKLVDSTDKADLRLIYLALAHMIKFRGHFLIEGDLNPDNSDVDKLFIQLVQTYNQLFEENPINASGVDAKAILSARLSKSRRLENLIAQLPGEKKNGLFGNLIALSLGLTPNFKSNFDLAEDAKLQLSKDTYDDDLDNLLAQIGDQYADLFLAAKNLSDAILLSDILRVNTEITKAPLSASMIKRYDEHHQDLTLLKALVRQQLPEKYKEIFFDQSKNGYAGYIDGGASQEEFYKFIKPILEKMDGTEELLVKLNREDLLRKQRTFDNGSIPHQIHLGELHAILRRQEDFYPFLKDNREKIEKILTFRIPYYVGPLARGNSRFAWMTRKSEETITPWNFEEVVDKGASAQSFIERMTNFDKNLPNEKVLPKHSLLYEYFTVYNELTKVKYVTEGMRKPAFLSGEQKKAIVDLLFKTNRKVTVKQLKEDYFKKIECFDSVEISGVEDRFNASLGTYHDLLKIIKDKDFLDNEENEDILEDIVLTLTLFEDREMIEERLKTYAHLFDDKVMKQLKRRRYTGWGRLSRKLINGIRDKQSGKTILDFLKSDGFANRNFMQLIHDDSLTFKEDIQKAQVSGQGDSLHEHIANLAGSPAIKKGILQTVKVVDELVKVMGRHKPENIVIEMARENQTTQKGQKNSRERMKRIEEGIKELGSQILKEHPVENTQLQNEKLYLYYLQNGRDMYVDQELDINRLSDYDVDHIVPQSFLKDDSIDNKVLTRSDKARGKSDNVPSEEVVKKMKNYWRQLLNAKLITQRKFDNLTKAERGGLSELDKAGFIKRQLVETRQITKHVAQILDSRMNTKYDENDKLIREVKVITLKSKLVSDFRKDFQFYKVREINNYHHAHDAYLNAVVGTALIKKYPKLESEFVYGDYKVYDVRKMIAKSEQEIGKATAKYFFYSNIMNFFKTEITLANGEIRKRPLIETNGETGEIVWDKGRDFATVRKVLSMPQVNIVKKTEVQTGGFSKESILPKRNSDKLIARKKDWDPKKYGGFDSPTVAYSVLVVAKVEKGKSKKLKSVKELLGITIMERSSFEKNPIDFLEAKGYKEVKKDLIIKLPKYSLFELENGRKRMLASAGELQKGNELALPSKYVNFLYLASHYEKLKGSPEDNEQKQLFVEQHKHYLDEIIEQISEFSKRVILADANLDKVLSAYNKHRDKPIREQAENIIHLFTLTNLGAPAAFKYFDTTIDRKRYTSTKEVLDATLIHQSITGLYETRIDLSQLGGDGGGGGPAPGSSGGTLNIEDEYRLHETSKEPDVSLGSTWLSDFPQAWAETGGMGLAVRQAPLIIPLKATSTPVSIKQYPMSQEARLGIKPHIQRLLDQGILVPCQSPWNTPLLPVKKPGTNDYRPVQDLREVNKRVEDIHPTVPNPYNLLSGLPPSHQWYTVLDLKDAFFCLRLHPTSQPLFAFEWRDPEMGISGQLTWTRLPQGFKNSPTLFNEALHRDLAGFRIQHPDLILLQYVDDLLLAATSELDCQQGTRALLQTLGDLGYRASAKKAQICQKQVKYLGYLLKEGQRWLTEARKETVMGQPIPKTPRQLREFLGKAGFCRLFIPGFAEMAAPLYPLTKPGTLFNWGPDQQKAFQEIKQALLTAPALGLPDLTKPFELFVDEKQGYAKGVLTQKLGPWRRPVAYLSKKLDPVAAGWPPCLRMVAAIAVLTKDAGKLTMGQPLVILAPHAVEALVKQPPDRWLSNARMTHYQALLLDTDRVQFGPVVALNPATLLPLPEEGLQHDCLDILAEAHGTRSDLMDQPLPDADHTWYTDGSSFLQEGQRKAGAAVTTETEVIWARALPAGTSAQRAELIALTQALKMAEGKKLNVYTDSRYAFATAHIHGEIYRRRGWLTSEGKEIKNKDEILALLKALFLPKRLSIIHCPGHQKGNSAEARGNRMADQAAREVATRETPETSTLLAGKRTADGSEFEKRTADGSEFESPKKKAKVE

SEQ ID NO: 7373 - protein, 2094 aa, synthetic construct
MPAAKRVKLDGGDKKYSIGLDIGTNSVGWAVITDEYKVPSKKFKVLGNTDRHSIKKNLIGALLFDSGETAEATRLKRTARRRYTRRKNRICYLQEIFSNEMAKVDDSFFHRLEESFLVEEDKKHERHPIFGNIVDEVAYHEKYPTIYHLRKKLVDSTDKADLRLIYLALAHMIKFRGHFLIEGDLNPDNSDVDKLFIQLVQTYNQLFEENPINASGVDAKAILSARLSKSRRLENLIAQLPGEKKNGLFGNLIALSLGLTPNFKSNFDLAEDAKLQLSKDTYDDDLDNLLAQIGDQYADLFLAAKNLSDAILLSDILRVNTEITKAPLSASMIKRYDEHHQDLTLLKALVRQQLPEKYKEIFFDQSKNGYAGYIDGGASQEEFYKFIKPILEKMDGTEELLVKLNREDLLRKQRTFDNGSIPHQIHLGELHAILRRQEDFYPFLKDNREKIEKILTFRIPYYVGPLARGNSRFAWMTRKSEETITPWNFEEVVDKGASAQSFIERMTNFDKNLPNEKVLPKHSLLYEYFTVYNELTKVKYVTEGMRKPAFLSGEQKKAIVDLLFKTNRKVTVKQLKEDYFKKIECFDSVEISGVEDRFNASLGTYHDLLKIIKDKDFLDNEENEDILEDIVLTLTLFEDREMIEERLKTYAHLFDDKVMKQLKRRRYTGWGRLSRKLINGIRDKQSGKTILDFLKSDGFANRNFMQLIHDDSLTFKEDIQKAQVSGQGDSLHEHIANLAGSPAIKKGILQTVKVVDELVKVMGRHKPENIVIEMARENQTTQKGQKNSRERMKRIEEGIKELGSQILKEHPVENTQLQNEKLYLYYLQNGRDMYVDQELDINRLSDYDVDHIVPQSFLKDDSIDNKVLTRSDKARGKSDNVPSEEVVKKMKNYWRQLLNAKLITQRKFDNLTKAERGGLSELDKAGFIKRQLVETRQITKHVAQILDSRMNTKYDENDKLIREVKVITLKSKLVSDFRKDFQFYKVREINNYHHAHDAYLNAVVGTALIKKYPKLESEFVYGDYKVYDVRKMIAKSEQEIGKATAKYFFYSNIMNFFKTEITLANGEIRKRPLIETNGETGEIVWDKGRDFATVRKVLSMPQVNIVKKTEVQTGGFSKESILPKRNSDKLIARKKDWDPKKYGGFDSPTVAYSVLVVAKVEKGKSKKLKSVKELLGITIMERSSFEKNPIDFLEAKGYKEVKKDLIIKLPKYSLFELENGRKRMLASAGELQKGNELALPSKYVNFLYLASHYEKLKGSPEDNEQKQLFVEQHKHYLDEIIEQISEFSKRVILADANLDKVLSAYNKHRDKPIREQAENIIHLFTLTNLGAPAAFKYFDTTIDRKRYTSTKEVLDATLIHQSITGLYETRIDLSQLGGDGGGGGPAPGSSGGTLNIEDEYRLHETSKGPDVPLGSTWLSDFPQAWAETGGMGLAFRQAPLIISLKATSTPVSIKQYPMSQEARLGIKPHIQRLLDQGILVPCQSPWNTPLLPVKKPGTNDYRPVQDLREVNKRVEDIHPTVPNPYNLLSGLPPSHQWYTVLDLKDAFFCLRLHPTSQSLFAFEWKDPEMGISGQLTWTRLPQGFKNSPTLFNEALHRDLADFRIQHPDLILLQYVDDLLLAATSELDCQQGTRALLQTLGDLGYRASAKKAQICQKQVKYLGYLLKEGQRWLTEARKETVMGQPTPKTPRQLREFLGKAGLCRLFIPGFAEMAAPLYPLTKPGTLFKWGPDQQKAYQEIKQALLTAPALGLPDLTKPFELFVDEKQGYAKGVLTQKLGPWRRPVAYLSKKLDPVAAGWPPCLRMVAAIAVLTKDVGKLTMGQPLVILAPHAVEALVKQPPDRWLSNARMTHYQALLLDTDRVQFGPIVALNPATLLPLPEEGLQHDCLDILAEAHGTRPDLTDQPLPDADHTWYTDGSSFLQEGQRRAGAAVTTETEVIWAKALPAGTSAQRAELIALTQALKMAAGKKLNVYTDSRYAFATAHIHGEIYRRRGWLTSEGKEIKNKDEILALLKALFLPKRLSIIHCPGHQKGNHAEARGNRMADQAAREVATRETPETSTLLAGKRTADGSEFEKRTADGSEFESPKKKAKVE

SEQ ID NO: 7374 - protein, 2094 aa, synthetic construct
MPAAKRVKLDGGDKKYSIGLDIGTNSVGWAVITDEYKVPSKKFKVLGNTDRHSIKKNLIGALLFDSGETAEATRLKRTARRRYTRRKNRICYLQEIFSNEMAKVDDSFFHRLEESFLVEEDKKHERHPIFGNIVDEVAYHEKYPTIYHLRKKLVDSTDKADLRLIYLALAHMIKFRGHFLIEGDLNPDNSDVDKLFIQLVQTYNQLFEENPINASGVDAKAILSARLSKSRRLENLIAQLPGEKKNGLFGNLIALSLGLTPNFKSNFDLAEDAKLQLSKDTYDDDLDNLLAQIGDQYADLFLAAKNLSDAILLSDILRVNTEITKAPLSASMIKRYDEHHQDLTLLKALVRQQLPEKYKEIFFDQSKNGYAGYIDGGASQEEFYKFIKPILEKMDGTEELLVKLNREDLLRKQRTFDNGSIPHQIHLGELHAILRRQEDFYPFLKDNREKIEKILTFRIPYYVGPLARGNSRFAWMTRKSEETITPWNFEEVVDKGASAQSFIERMTNFDKNLPNEKVLPKHSLLYEYFTVYNELTKVKYVTEGMRKPAFLSGEQKKAIVDLLFKTNRKVTVKQLKEDYFKKIECFDSVEISGVEDRFNASLGTYHDLLKIIKDKDFLDNEENEDILEDIVLTLTLFEDREMIEERLKTYAHLFDDKVMKQLKRRRYTGWGRLSRKLINGIRDKQSGKTILDFLKSDGFANRNFMQLIHDDSLTFKEDIQKAQVSGQGDSLHEHIANLAGSPAIKKGILQTVKVVDELVKVMGRHKPENIVIEMARENQTTQKGQKNSRERMKRIEEGIKELGSQILKEHPVENTQLQNEKLYLYYLQNGRDMYVDQELDINRLSDYDVDHIVPQSFLKDDSIDNKVLTRSDKARGKSDNVPSEEVVKKMKNYWRQLLNAKLITQRKFDNLTKAERGGLSELDKAGFIKRQLVETRQITKHVAQILDSRMNTKYDENDKLIREVKVITLKSKLVSDFRKDFQFYKVREINNYHHAHDAYLNAVVGTALIKKYPKLESEFVYGDYKVYDVRKMIAKSEQEIGKATAKYFFYSNIMNFFKTEITLANGEIRKRPLIETNGETGEIVWDKGRDFATVRKVLSMPQVNIVKKTEVQTGGFSKESILPKRNSDKLIARKKDWDPKKYGGFDSPTVAYSVLVVAKVEKGKSKKLKSVKELLGITIMERSSFEKNPIDFLEAKGYKEVKKDLIIKLPKYSLFELENGRKRMLASAGELQKGNELALPSKYVNFLYLASHYEKLKGSPEDNEQKQLFVEQHKHYLDEIIEQISEFSKRVILADANLDKVLSAYNKHRDKPIREQAENIIHLFTLTNLGAPAAFKYFDTTIDRKRYTSTKEVLDATLIHQSITGLYETRIDLSQLGGDGGGGGPAPGSSGGTLNIEDEYRLHETSKGPDVPLGSTWLSDFPQAWAETGGMGLAVRQAPLIIPLKATSTPVSIKQYPMSQEARLGIKPHIQRLLDQGILVPCQSPWNTPLLPVKKPGTNDYRPVQDLREVNKRVEDIHPTVPNPYNLLSGLPPSHQWYTVLDLKDAFFCLRLHPTSQSLFAFEWRDPEMGISGQLTWTRLPQGFKNSPTLFNEALHRDLADFRIQHPDLILLQYVDDLLLAATSELDCQQGTRALLQTLGDLGYRASAKKAQICQKQVKYLGYLLKEGQRWLTEARKETVMGQPTPKTPRQLREFLGTAGFCRLWIPGFAEMAAPLYPLTKPGTLFEWGPDQQKAYQEIKQALLTAPALGLPDLTKPFELFVDEKQGYAKGVLTQKLGPWRRPVAYLSKKLDPVAAGWPPCLRMVAAIAVLTKDAGKLTMGQPLVILAPHAVEALVKQPPDRWLSNARMTHYQALLLDTDRVQFGPIVALNPATLLPLPEEGLQHDCLDILAEAHGTRPDLTDQPLPDADHTWYTDGSSFLQEGQRKAGAAVTTETEVVWAKALPAGTSAQRAELIALTQALKMAEGKKLNVYTDSRYAFATAHIHGEIYRRRGWLTSEGKEIKNKDEILALLKALFLPKRLSIIHCPGHQKGNRAEARGNRMADQAAREVATRETPETSTLLAGKRTADGSEFEKRTADGSEFESPKKKAKVE

SEQ ID NO: 7375 - protein, 2094 aa, synthetic construct
MPAAKRVKLDGGDKKYSIGLDIGTNSVGWAVITDEYKVPSKKFKVLGNTDRHSIKKNLIGALLFDSGETAEATRLKRTARRRYTRRKNRICYLQEIFSNEMAKVDDSFFHRLEESFLVEEDKKHERHPIFGNIVDEVAYHEKYPTIYHLRKKLVDSTDKADLRLIYLALAHMIKFRGHFLIEGDLNPDNSDVDKLFIQLVQTYNQLFEENPINASGVDAKAILSARLSKSRRLENLIAQLPGEKKNGLFGNLIALSLGLTPNFKSNFDLAEDAKLQLSKDTYDDDLDNLLAQIGDQYADLFLAAKNLSDAILLSDILRVNTEITKAPLSASMIKRYDEHHQDLTLLKALVRQQLPEKYKEIFFDQSKNGYAGYIDGGASQEEFYKFIKPILEKMDGTEELLVKLNREDLLRKQRTFDNGSIPHQIHLGELHAILRRQEDFYPFLKDNREKIEKILTFRIPYYVGPLARGNSRFAWMTRKSEETITPWNFEEVVDKGASAQSFIERMTNFDKNLPNEKVLPKHSLLYEYFTVYNELTKVKYVTEGMRKPAFLSGEQKKAIVDLLFKTNRKVTVKQLKEDYFKKIECFDSVEISGVEDRFNASLGTYHDLLKIIKDKDFLDNEENEDILEDIVLTLTLFEDREMIEERLKTYAHLFDDKVMKQLKRRRYTGWGRLSRKLINGIRDKQSGKTILDFLKSDGFANRNFMQLIHDDSLTFKEDIQKAQVSGQGDSLHEHIANLAGSPAIKKGILQTVKVVDELVKVMGRHKPENIVIEMARENQTTQKGQKNSRERMKRIEEGIKELGSQILKEHPVENTQLQNEKLYLYYLQNGRDMYVDQELDINRLSDYDVDHIVPQSFLKDDSIDNKVLTRSDKARGKSDNVPSEEVVKKMKNYWRQLLNAKLITQRKFDNLTKAERGGLSELDKAGFIKRQLVETRQITKHVAQILDSRMNTKYDENDKLIREVKVITLKSKLVSDFRKDFQFYKVREINNYHHAHDAYLNAVVGTALIKKYPKLESEFVYGDYKVYDVRKMIAKSEQEIGKATAKYFFYSNIMNFFKTEITLANGEIRKRPLIETNGETGEIVWDKGRDFATVRKVLSMPQVNIVKKTEVQTGGFSKESILPKRNSDKLIARKKDWDPKKYGGFDSPTVAYSVLVVAKVEKGKSKKLKSVKELLGITIMERSSFEKNPIDFLEAKGYKEVKKDLIIKLPKYSLFELENGRKRMLASAGELQKGNELALPSKYVNFLYLASHYEKLKGSPEDNEQKQLFVEQHKHYLDEIIEQISEFSKRVILADANLDKVLSAYNKHRDKPIREQAENIIHLFTLTNLGAPAAFKYFDTTIDRKRYTSTKEVLDATLIHQSITGLYETRIDLSQLGGDGGGGGPAPGSSGGTLNIEDEYRLHEISTEPDVSPGSTWLSDFPQAWAETGGMGLAVRQAPLIIPLKATSTPVSIKQYPMSQEAKLGIKPHIQRLLDQGILVPCQSPWNTPLLPVKKPGTNDYRPVQGLREVNKRVEDIHPTVPNPYNLLSGLPTSHRWYTVLDLKDAFFCLRLHPTSQPLFASEWRDPGMGISGQLTWTRLPQGFKNSPTLFDEALHRGLADFRIQHPDLILLQYVDDLLLAATSELDCQQGTRALLKTLGNLGYRASAKKAQICQKQVKYLGYLLREGQRWLTEARKETVMGQPTPKTPRQLREFLGTAGFCRLWIPRFAEMAAPLYPLTKTGTLFNWGPDQQKAYHEIKQALLTAPALGLPDLTKPFELFVDEKQGYAKGVLTQKLGPWRRPVAYLSKKLDPVAAGWPPCLRMVAAIAVLTKDAGKLTMGQPLVILAPHAVEALVKQPPDRWLSNARMTHYQAMLLDTDRVQFGPVVALNPATLLPLPEEGAPHDCLEILAETHGTEPDLTDQPIPDADHTWYTDGSSFLQEGQRKAGAAVTTETEVIWARALPAGTSAQRAELIALTQALKMAEGKRLNVYTDSRYAFATAHIHGEIYKRRGLLTSEGREIKNKSEILALLKALFLPKRLSIIHCLGHQKGDSAEARGNRLADQAAREAAIKTPPDTSTLLAGKRTADGSEFEKRTADGSEFESPKKKAKVE

SEQ ID NO: 7376 - protein, 2114 aa, synthetic construct
MPAAKRVKLDGGDKKYSIGLDIGTNSVGWAVITDEYKVPSKKFKVLGNTDRHSIKKNLIGALLFDSGETAEATRLKRTARRRYTRRKNRICYLQEIFSNEMAKVDDSFFHRLEESFLVEEDKKHERHPIFGNIVDEVAYHEKYPTIYHLRKKLVDSTDKADLRLIYLALAHMIKFRGHFLIEGDLNPDNSDVDKLFIQLVQTYNQLFEENPINASGVDAKAILSARLSKSRRLENLIAQLPGEKKNGLFGNLIALSLGLTPNFKSNFDLAEDAKLQLSKDTYDDDLDNLLAQIGDQYADLFLAAKNLSDAILLSDILRVNTEITKAPLSASMIKRYDEHHQDLTLLKALVRQQLPEKYKEIFFDQSKNGYAGYIDGGASQEEFYKFIKPILEKMDGTEELLVKLNREDLLRKQRTFDNGSIPHQIHLGELHAILRRQEDFYPFLKDNREKIEKILTFRIPYYVGPLARGNSRFAWMTRKSEETITPWNFEEVVDKGASAQSFIERMTNFDKNLPNEKVLPKHSLLYEYFTVYNELTKVKYVTEGMRKPAFLSGEQKKAIVDLLFKTNRKVTVKQLKEDYFKKIECFDSVEISGVEDRFNASLGTYHDLLKIIKDKDFLDNEENEDILEDIVLTLTLFEDREMIEERLKTYAHLFDDKVMKQLKRRRYTGWGRLSRKLINGIRDKQSGKTILDFLKSDGFANRNFMQLIHDDSLTFKEDIQKAQVSGQGDSLHEHIANLAGSPAIKKGILQTVKVVDELVKVMGRHKPENIVIEMARENQTTQKGQKNSRERMKRIEEGIKELGSQILKEHPVENTQLQNEKLYLYYLQNGRDMYVDQELDINRLSDYDVDHIVPQSFLKDDSIDNKVLTRSDKARGKSDNVPSEEVVKKMKNYWRQLLNAKLITQRKFDNLTKAERGGLSELDKAGFIKRQLVETRQITKHVAQILDSRMNTKYDENDKLIREVKVITLKSKLVSDFRKDFQFYKVREINNYHHAHDAYLNAVVGTALIKKYPKLESEFVYGDYKVYDVRKMIAKSEQEIGKATAKYFFYSNIMNFFKTEITLANGEIRKRPLIETNGETGEIVWDKGRDFATVRKVLSMPQVNIVKKTEVQTGGFSKESILPKRNSDKLIARKKDWDPKKYGGFDSPTVAYSVLVVAKVEKGKSKKLKSVKELLGITIMERSSFEKNPIDFLEAKGYKEVKKDLIIKLPKYSLFELENGRKRMLASAGELQKGNELALPSKYVNFLYLASHYEKLKGSPEDNEQKQLFVEQHKHYLDEIIEQISEFSKRVILADANLDKVLSAYNKHRDKPIREQAENIIHLFTLTNLGAPAAFKYFDTTIDRKRYTSTKEVLDATLIHQSITGLYETRIDLSQLGGDGGGGGPAPGSSGGWVQEISDSRPMLHIYLNGRRFLGLLNTGADKTCIAGRDWPANWPIHQTESSLQGLGMACGVARSSQPLRWQHEDKSGIIHPFVIPTLPFTLWGRDIMKDIKVRLMTDSPDDSQDLMIGAIESNLFADQISWKSDQPVWLNQWPLKQEKLQALQQLVTEQLQLGHLEESNSPWNTPVFVIKKKSGKWRLLQDLRAVNATMHDMGALQPGLPSPVAPPKGWEIIIIDLQDCFFNIKLHPEDCKRFAFSVPSPNFKRPYQRFQWKVLPQGMKNSPTLCQKFVDKAILTVRDKYQDSYIVHYMDDILLAHPSRSIVDEILTSMIQALNKHGLVVSTEKIQKYDNLKYLGTHIQGDSVSYQKLQIRTDKLRTLNDFQKLLGNINWIRPFLKLTTGELKPLFEILNPDSNPISTRKLTPEACKALQLMNERLSTARVKRLDLSQPWSLCILKTEYTPTACLWQDGVVEWIHLPHISPKVITPYDIFCTQLIIKGRHRSKELFSKDPDYIVVPYTKVQFDLLLQEKEDWPISLLGFLGEVHFHLPKDPLLTFTLQTAIIFPHMTSTTPLEKGIVIFTDGSANGRSVTYIQGREPIIKENTQNTAQQAEIVAVITAFEEVSQPFNLYTDSKYVTGLFPEIETATLSPRTKIYTELKHLQRLIHKRQEKFYIGHIRGHTGLPGPLAQGNAYADSLTRILTAGKRTADGSEFEKRTADGSEFESPKKKAKVE

SEQ ID NO: 7377 - protein, 2085 aa, synthetic construct
MPAAKRVKLDGGDKKYSIGLDIGTNSVGWAVITDEYKVPSKKFKVLGNTDRHSIKKNLIGALLFDSGETAEATRLKRTARRRYTRRKNRICYLQEIFSNEMAKVDDSFFHRLEESFLVEEDKKHERHPIFGNIVDEVAYHEKYPTIYHLRKKLVDSTDKADLRLIYLALAHMIKFRGHFLIEGDLNPDNSDVDKLFIQLVQTYNQLFEENPINASGVDAKAILSARLSKSRRLENLIAQLPGEKKNGLFGNLIALSLGLTPNFKSNFDLAEDAKLQLSKDTYDDDLDNLLAQIGDQYADLFLAAKNLSDAILLSDILRVNTEITKAPLSASMIKRYDEHHQDLTLLKALVRQQLPEKYKEIFFDQSKNGYAGYIDGGASQEEFYKFIKPILEKMDGTEELLVKLNREDLLRKQRTFDNGSIPHQIHLGELHAILRRQEDFYPFLKDNREKIEKILTFRIPYYVGPLARGNSRFAWMTRKSEETITPWNFEEVVDKGASAQSFIERMTNFDKNLPNEKVLPKHSLLYEYFTVYNELTKVKYVTEGMRKPAFLSGEQKKAIVDLLFKTNRKVTVKQLKEDYFKKIECFDSVEISGVEDRFNASLGTYHDLLKIIKDKDFLDNEENEDILEDIVLTLTLFEDREMIEERLKTYAHLFDDKVMKQLKRRRYTGWGRLSRKLINGIRDKQSGKTILDFLKSDGFANRNFMQLIHDDSLTFKEDIQKAQVSGQGDSLHEHIANLAGSPAIKKGILQTVKVVDELVKVMGRHKPENIVIEMARENQTTQKGQKNSRERMKRIEEGIKELGSQILKEHPVENTQLQNEKLYLYYLQNGRDMYVDQELDINRLSDYDVDHIVPQSFLKDDSIDNKVLTRSDKARGKSDNVPSEEVVKKMKNYWRQLLNAKLITQRKFDNLTKAERGGLSELDKAGFIKRQLVETRQITKHVAQILDSRMNTKYDENDKLIREVKVITLKSKLVSDFRKDFQFYKVREINNYHHAHDAYLNAVVGTALIKKYPKLESEFVYGDYKVYDVRKMIAKSEQEIGKATAKYFFYSNIMNFFKTEITLANGEIRKRPLIETNGETGEIVWDKGRDFATVRKVLSMPQVNIVKKTEVQTGGFSKESILPKRNSDKLIARKKDWDPKKYGGFDSPTVAYSVLVVAKVEKGKSKKLKSVKELLGITIMERSSFEKNPIDFLEAKGYKEVKKDLIIKLPKYSLFELENGRKRMLASAGELQKGNELALPSKYVNFLYLASHYEKLKGSPEDNEQKQLFVEQHKHYLDEIIEQISEFSKRVILADANLDKVLSAYNKHRDKPIREQAENIIHLFTLTNLGAPAAFKYFDTTIDRKRYTSTKEVLDATLIHQSITGLYETRIDLSQLGGDGGGGGPAPGSSGGIPWLMKKPLQLTTLVPLQEYEERLLKQTMLTGSYKEKLQSLFLKYDALWQHWENQVGHRRIKPHHIATGTVNPRPQKQYPINPKAKASIQTVINDLLKQGVLIQQNSIMNTPVYPVPKPDGKWRMVLDYREVNKTIPLIAAQNQHSAGILSSIFRGKYKTTLDLSNGFWAHSITPESYWLTAFTWLGQQYCWTRLPQGFLNSPALFNADVVDLLKEVPNVQVYVDDIYISHDDPREHLEQLEKVFSLLLNAGYVVSLKKSEIAQHEVEFLGFNITKEGRGLTETFKQKLLNITPPRDLKQLQSILGLLNFARNFIPNFSELVKPLYNIIATAPGKYITWTTDNSQQLQNIISMLNSAENLEERNPEVRLIMKVNTSPSAGYIRFYNEFAKRPIMYLNYVYTKAEVKFTNTEKLLTTIHKGLIKALDLGMGQEILVYSPIVSMTKIQKTPLPERKALPIRWITWMSYLEDPRIQFHYDKTLPELQQVPTVTDDIIAKIKHPSEFSMVFYTDGSAIKHPNVNKSHNAGMGIAQVQFKPEFTVINTWSIPLGDHTAQLAEVAAVEFACKKALKIDGPVLIVTDSFYVAESVNKELPYWQSNGFFNNKKKPLKHVSKWKSIADCIQLKPDIIIIHEKGHQPTASTFHTEGNNLADKLATQGSYVVNAGKRTADGSEFEKRTADGSEFESPKKKAKVE

SEQ ID NO: 7378 - protein, 2092 aa, synthetic construct
MPAAKRVKLDGGDKKYSIGLDIGTNSVGWAVITDEYKVPSKKFKVLGNTDRHSIKKNLIGALLFDSGETAEATRLKRTARRRYTRRKNRICYLQEIFSNEMAKVDDSFFHRLEESFLVEEDKKHERHPIFGNIVDEVAYHEKYPTIYHLRKKLVDSTDKADLRLIYLALAHMIKFRGHFLIEGDLNPDNSDVDKLFIQLVQTYNQLFEENPINASGVDAKAILSARLSKSRRLENLIAQLPGEKKNGLFGNLIALSLGLTPNFKSNFDLAEDAKLQLSKDTYDDDLDNLLAQIGDQYADLFLAAKNLSDAILLSDILRVNTEITKAPLSASMIKRYDEHHQDLTLLKALVRQQLPEKYKEIFFDQSKNGYAGYIDGGASQEEFYKFIKPILEKMDGTEELLVKLNREDLLRKQRTFDNGSIPHQIHLGELHAILRRQEDFYPFLKDNREKIEKILTFRIPYYVGPLARGNSRFAWMTRKSEETITPWNFEEVVDKGASAQSFIERMTNFDKNLPNEKVLPKHSLLYEYFTVYNELTKVKYVTEGMRKPAFLSGEQKKAIVDLLFKTNRKVTVKQLKEDYFKKIECFDSVEISGVEDRFNASLGTYHDLLKIIKDKDFLDNEENEDILEDIVLTLTLFEDREMIEERLKTYAHLFDDKVMKQLKRRRYTGWGRLSRKLINGIRDKQSGKTILDFLKSDGFANRNFMQLIHDDSLTFKEDIQKAQVSGQGDSLHEHIANLAGSPAIKKGILQTVKVVDELVKVMGRHKPENIVIEMARENQTTQKGQKNSRERMKRIEEGIKELGSQILKEHPVENTQLQNEKLYLYYLQNGRDMYVDQELDINRLSDYDVDHIVPQSFLKDDSIDNKVLTRSDKARGKSDNVPSEEVVKKMKNYWRQLLNAKLITQRKFDNLTKAERGGLSELDKAGFIKRQLVETRQITKHVAQILDSRMNTKYDENDKLIREVKVITLKSKLVSDFRKDFQFYKVREINNYHHAHDAYLNAVVGTALIKKYPKLESEFVYGDYKVYDVRKMIAKSEQEIGKATAKYFFYSNIMNFFKTEITLANGEIRKRPLIETNGETGEIVWDKGRDFATVRKVLSMPQVNIVKKTEVQTGGFSKESILPKRNSDKLIARKKDWDPKKYGGFDSPTVAYSVLVVAKVEKGKSKKLKSVKELLGITIMERSSFEKNPIDFLEAKGYKEVKKDLIIKLPKYSLFELENGRKRMLASAGELQKGNELALPSKYVNFLYLASHYEKLKGSPEDNEQKQLFVEQHKHYLDEIIEQISEFSKRVILADANLDKVLSAYNKHRDKPIREQAENIIHLFTLTNLGAPAAFKYFDTTIDRKRYTSTKEVLDATLIHQSITGLYETRIDLSQLGGDGGGGGPAPGSSGGVLNLEEEYRLHEKPVPSSIDPSWLQLFPTVWAERAGMGLANQVPPVVVELRSGASPVAVRQYPMSKEAREGIRPHIQRFLDLGVLVPCQSPWNTPLLPVKKPGTNDYRPVQDLREINKRVQDIHPTVPNPYNLLSSLPPSHTWYSVLDLKDAFFCLKLHPNSQPLFAFEWRDPEKGNTGQLTWTRLPQGFKNSPTLFNEALHRDLAPFRALNPQVVLLQYVDDLLVAAPTYRDCKEGTQKLLQELSKLGYRVSAKKAQLCQKEVTYLGYLLKEGKRWLTPARKATVMKIPPPTTPRQVREFLGTAGFCRLWIPGFASLAAPLYPLTKPSIPFIWTEEHQKAFDRIKEALLSAPALALPDLTKPFTLYVDERAGVARGVLTQTLGPWRRPVAYLSKKLDPVASGWPTCLKAVAAVALLLKDADKLTLGQNVTVIASHSLESIVRQPPDRWMTNARMTHYQSLLLNERVSFAPPAVLNPATLLPVESEATPVHRCSEILAEETGTRRDLKDQPLPGVPAWYTDGSSFIAEGKRRAGAAIVDGKRTVWASSLPEGTSAQKAELVALTQALRLAEGKDINIYTDSRYAFATAHIHGAIYKQRGWLTSAGKDIKNKEEILALLEAIHLPKRVAIIHCPGHQKGNDPVATGNRRADEAAKQAALSTRVLAETTKPAGKRTADGSEFEKRTADGSEFESPKKKAKVE

SEQ ID NO: 7379 - protein, 2096 aa, synthetic construct
MPAAKRVKLDGGDKKYSIGLDIGTNSVGWAVITDEYKVPSKKFKVLGNTDRHSIKKNLIGALLFDSGETAEATRLKRTARRRYTRRKNRICYLQEIFSNEMAKVDDSFFHRLEESFLVEEDKKHERHPIFGNIVDEVAYHEKYPTIYHLRKKLVDSTDKADLRLIYLALAHMIKFRGHFLIEGDLNPDNSDVDKLFIQLVQTYNQLFEENPINASGVDAKAILSARLSKSRRLENLIAQLPGEKKNGLFGNLIALSLGLTPNFKSNFDLAEDAKLQLSKDTYDDDLDNLLAQIGDQYADLFLAAKNLSDAILLSDILRVNTEITKAPLSASMIKRYDEHHQDLTLLKALVRQQLPEKYKEIFFDQSKNGYAGYIDGGASQEEFYKFIKPILEKMDGTEELLVKLNREDLLRKQRTFDNGSIPHQIHLGELHAILRRQEDFYPFLKDNREKIEKILTFRIPYYVGPLARGNSRFAWMTRKSEETITPWNFEEVVDKGASAQSFIERMTNFDKNLPNEKVLPKHSLLYEYFTVYNELTKVKYVTEGMRKPAFLSGEQKKAIVDLLFKTNRKVTVKQLKEDYFKKIECFDSVEISGVEDRFNASLGTYHDLLKIIKDKDFLDNEENEDILEDIVLTLTLFEDREMIEERLKTYAHLFDDKVMKQLKRRRYTGWGRLSRKLINGIRDKQSGKTILDFLKSDGFANRNFMQLIHDDSLTFKEDIQKAQVSGQGDSLHEHIANLAGSPAIKKGILQTVKVVDELVKVMGRHKPENIVIEMARENQTTQKGQKNSRERMKRIEEGIKELGSQILKEHPVENTQLQNEKLYLYYLQNGRDMYVDQELDINRLSDYDVDHIVPQSFLKDDSIDNKVLTRSDKARGKSDNVPSEEVVKKMKNYWRQLLNAKLITQRKFDNLTKAERGGLSELDKAGFIKRQLVETRQITKHVAQILDSRMNTKYDENDKLIREVKVITLKSKLVSDFRKDFQFYKVREINNYHHAHDAYLNAVVGTALIKKYPKLESEFVYGDYKVYDVRKMIAKSEQEIGKATAKYFFYSNIMNFFKTEITLANGEIRKRPLIETNGETGEIVWDKGRDFATVRKVLSMPQVNIVKKTEVQTGGFSKESILPKRNSDKLIARKKDWDPKKYGGFDSPTVAYSVLVVAKVEKGKSKKLKSVKELLGITIMERSSFEKNPIDFLEAKGYKEVKKDLIIKLPKYSLFELENGRKRMLASAGELQKGNELALPSKYVNFLYLASHYEKLKGSPEDNEQKQLFVEQHKHYLDEIIEQISEFSKRVILADANLDKVLSAYNKHRDKPIREQAENIIHLFTLTNLGAPAAFKYFDTTIDRKRYTSTKEVLDATLIHQSITGLYETRIDLSQLGGDGGGSSGGGPAPGGTAPLEEEYRLFLEAPIQNVTLLEQWKREIPKVWAEINPPGLASTQAPIHVQLLSTALPVRVRQYPITLEAKRSLRETIRKFRAAGILRPVHSPWNTPLLPVRKSGTSEYRMVQDLREVNKRVETIHPTVPNPYTLLSLLPPDRIWYSVLDLKDAFFCIPLAPESQLIFAFEWADAEEGESGQLTWTRLPQGFKNSPTLFDEALNRDLQGFRLDHPSVSLLQYVDDLLIAADTQAACLSATRDLLMTLAELGYRVSGKKAQLCQEEVTYLGFKIHKGSRSLSNSRTQAILQIPVPKTKRQVREFLGTIGYCRLWIPGFAELAQPLYAATRGGNDPLVWGEKEEEAFQSLKLALTQPPALALPSLDKPFQLFVEETSGAAKGVLTQALGPWKRPVAYLSKRLDPVAAGWPRCLRAIAAAALLTREASKLTFGQDIEITSSHNLESLLRSPPDKWLTNARITQYQVLLLDPPRVRFKQTAALNPATLLPETDDTLPIHHCLDTLDSLTSTRPDLTDQPLAQAEATLFTDGSSYIRDGKRYAGAAVVTLDSVIWAEPLPIGTSAQKAELIALTKALEWSKDKSVNIYTDSRYAFATLHVHGMIYRERGLLTAGGKAIKNAPEILALLTAVWLPKRVAVMHCKGHQKDDAPTSTGNRRADEVAREVAIRPLSTQATISAGKRTADGSEFEKRTADGSEFESPKKKAKVE

SEQ ID NO: 7380 - protein, 2096 aa, synthetic construct
MPAAKRVKLDGGDKKYSIGLDIGTNSVGWAVITDEYKVPSKKFKVLGNTDRHSIKKNLIGALLFDSGETAEATRLKRTARRRYTRRKNRICYLQEIFSNEMAKVDDSFFHRLEESFLVEEDKKHERHPIFGNIVDEVAYHEKYPTIYHLRKKLVDSTDKADLRLIYLALAHMIKFRGHFLIEGDLNPDNSDVDKLFIQLVQTYNQLFEENPINASGVDAKAILSARLSKSRRLENLIAQLPGEKKNGLFGNLIALSLGLTPNFKSNFDLAEDAKLQLSKDTYDDDLDNLLAQIGDQYADLFLAAKNLSDAILLSDILRVNTEITKAPLSASMIKRYDEHHQDLTLLKALVRQQLPEKYKEIFFDQSKNGYAGYIDGGASQEEFYKFIKPILEKMDGTEELLVKLNREDLLRKQRTFDNGSIPHQIHLGELHAILRRQEDFYPFLKDNREKIEKILTFRIPYYVGPLARGNSRFAWMTRKSEETITPWNFEEVVDKGASAQSFIERMTNFDKNLPNEKVLPKHSLLYEYFTVYNELTKVKYVTEGMRKPAFLSGEQKKAIVDLLFKTNRKVTVKQLKEDYFKKIECFDSVEISGVEDRFNASLGTYHDLLKIIKDKDFLDNEENEDILEDIVLTLTLFEDREMIEERLKTYAHLFDDKVMKQLKRRRYTGWGRLSRKLINGIRDKQSGKTILDFLKSDGFANRNFMQLIHDDSLTFKEDIQKAQVSGQGDSLHEHIANLAGSPAIKKGILQTVKVVDELVKVMGRHKPENIVIEMARENQTTQKGQKNSRERMKRIEEGIKELGSQILKEHPVENTQLQNEKLYLYYLQNGRDMYVDQELDINRLSDYDVDHIVPQSFLKDDSIDNKVLTRSDKARGKSDNVPSEEVVKKMKNYWRQLLNAKLITQRKFDNLTKAERGGLSELDKAGFIKRQLVETRQITKHVAQILDSRMNTKYDENDKLIREVKVITLKSKLVSDFRKDFQFYKVREINNYHHAHDAYLNAVVGTALIKKYPKLESEFVYGDYKVYDVRKMIAKSEQEIGKATAKYFFYSNIMNFFKTEITLANGEIRKRPLIETNGETGEIVWDKGRDFATVRKVLSMPQVNIVKKTEVQTGGFSKESILPKRNSDKLIARKKDWDPKKYGGFDSPTVAYSVLVVAKVEKGKSKKLKSVKELLGITIMERSSFEKNPIDFLEAKGYKEVKKDLIIKLPKYSLFELENGRKRMLASAGELQKGNELALPSKYVNFLYLASHYEKLKGSPEDNEQKQLFVEQHKHYLDEIIEQISEFSKRVILADANLDKVLSAYNKHRDKPIREQAENIIHLFTLTNLGAPAAFKYFDTTIDRKRYTSTKEVLDATLIHQSITGLYETRIDLSQLGGDGGGSSGGGPAPGGTAPLEEEYRLFLEAPIQNVTLLEQWKREIPKVWAEINPPGLASTQAPIHVQLLSTALPVRVRQYPITLEAKRSLRETIRKFRAAGILRPVHSPWNTPLLPVRKSGTSEYRMVQDLREVNKRVETIHPTVPNPYTLLSLLPPDRIWYSVLDLKDAFFCIPLAPESQLIFAFEWADAEEGESGQLTWTRLPQGFKNSPTLFNEALNRDLQGFRLDHPSVSLLQYVDDLLIAADTQAACLSATRDLLMTLAELGYRVSGKKAQLCQEEVTYLGFKIHKGSRSLSNSRTQAILQIPVPKTKRQVREFLGTIGYCRLWIPGFAELAQPLYAATRPGNDPLVWGEKEEEAFQSLKLALTQPPALALPSLDKPFQLFVEETSGAAKGVLTQALGPWKRPVAYLSKRLDPVAAGWPRCLRAIAAAALLTREASKLTFGQDIEITSSHNLESLLRSPPDKWLTNARITQYQVLLLDPPRVRFKQTAALNPATLLPETDDTLPIHHCLDTLDSLTSTRPDLTDQPLAQAEATLFTDGSSYIRDGKRYAGAAVVTLDSVIWAEPLPIGTSAQKAELIALTKALEWSKDKSVNIYTDSRYAFATLHVHGMIYRERGWLTAGGKAIKNAPEILALLTAVWLPKRVAVMHCKGHQKDDAPTSTGNRRADEVAREVAIRPLSTQATISAGKRTADGSEFEKRTADGSEFESPKKKAKVE

SEQ ID NO: 7381 - protein, 2096 aa, synthetic construct
MPAAKRVKLDGGDKKYSIGLDIGTNSVGWAVITDEYKVPSKKFKVLGNTDRHSIKKNLIGALLFDSGETAEATRLKRTARRRYTRRKNRICYLQEIFSNEMAKVDDSFFHRLEESFLVEEDKKHERHPIFGNIVDEVAYHEKYPTIYHLRKKLVDSTDKADLRLIYLALAHMIKFRGHFLIEGDLNPDNSDVDKLFIQLVQTYNQLFEENPINASGVDAKAILSARLSKSRRLENLIAQLPGEKKNGLFGNLIALSLGLTPNFKSNFDLAEDAKLQLSKDTYDDDLDNLLAQIGDQYADLFLAAKNLSDAILLSDILRVNTEITKAPLSASMIKRYDEHHQDLTLLKALVRQQLPEKYKEIFFDQSKNGYAGYIDGGASQEEFYKFIKPILEKMDGTEELLVKLNREDLLRKQRTFDNGSIPHQIHLGELHAILRRQEDFYPFLKDNREKIEKILTFRIPYYVGPLARGNSRFAWMTRKSEETITPWNFEEVVDKGASAQSFIERMTNFDKNLPNEKVLPKHSLLYEYFTVYNELTKVKYVTEGMRKPAFLSGEQKKAIVDLLFKTNRKVTVKQLKEDYFKKIECFDSVEISGVEDRFNASLGTYHDLLKIIKDKDFLDNEENEDILEDIVLTLTLFEDREMIEERLKTYAHLFDDKVMKQLKRRRYTGWGRLSRKLINGIRDKQSGKTILDFLKSDGFANRNFMQLIHDDSLTFKEDIQKAQVSGQGDSLHEHIANLAGSPAIKKGILQTVKVVDELVKVMGRHKPENIVIEMARENQTTQKGQKNSRERMKRIEEGIKELGSQILKEHPVENTQLQNEKLYLYYLQNGRDMYVDQELDINRLSDYDVDHIVPQSFLKDDSIDNKVLTRSDKARGKSDNVPSEEVVKKMKNYWRQLLNAKLITQRKFDNLTKAERGGLSELDKAGFIKRQLVETRQITKHVAQILDSRMNTKYDENDKLIREVKVITLKSKLVSDFRKDFQFYKVREINNYHHAHDAYLNAVVGTALIKKYPKLESEFVYGDYKVYDVRKMIAKSEQEIGKATAKYFFYSNIMNFFKTEITLANGEIRKRPLIETNGETGEIVWDKGRDFATVRKVLSMPQVNIVKKTEVQTGGFSKESILPKRNSDKLIARKKDWDPKKYGGFDSPTVAYSVLVVAKVEKGKSKKLKSVKELLGITIMERSSFEKNPIDFLEAKGYKEVKKDLIIKLPKYSLFELENGRKRMLASAGELQKGNELALPSKYVNFLYLASHYEKLKGSPEDNEQKQLFVEQHKHYLDEIIEQISEFSKRVILADANLDKVLSAYNKHRDKPIREQAENIIHLFTLTNLGAPAAFKYFDTTIDRKRYTSTKEVLDATLIHQSITGLYETRIDLSQLGGDGGGSSGGGPAPGGTAPLEEEYRLFLEAPIQNVTLLEQWKREIPKVWAEINPPGLASTQAPIHVQLLSTALPVRVRQYPITLEAKRSLRETIRKFRAAGILRPVHSPWNTPLLPVRKSGTSEYRMVQDLREVNKRVETIHPTVPNPYTLLSLLPPDRIWYSVLDLKDAFFCIPLAPESQLIFAFEWADAEEGESGQLTWTRLPQGFKNSPTLFNEALNRDLQGFRLDHPSVSLLQYVDDLLIAADTQAACLSATRDLLMTLAELGYRVSGKKAQLCQEEVTYLGFKIHKGSRSLSNSRTQAILQIPVPKTKRQVREFLGKIGYCRLFIPGFAELAQPLYAATRPGNDPLVWGEKEEEAFQSLKLALTQPPALALPSLDKPFQLFVEETSGAAKGVLTQALGPWKRPVAYLSKRLDPVAAGWPRCLRAIAAAALLTREASKLTFGQDIEITSSHNLESLLRSPPDKWLTNARITQYQVLLLDPPRVRFKQTAALNPATLLPETDDTLPIHHCLDTLDSLTSTRPDLTDQPLAQAEATLFTDGSSYIRDGKRYAGAAVVTLDSVIWAEPLPIGTSAQKAELIALTKALEWSKDKSVNIYTDSRYAFATLHVHGMIYRERGWLTAGGKAIKNAPEILALLTAVWLPKRVAVMHCKGHQKDDAPTSTGNRRADEVAREVAIRPLSTQATISAGKRTADGSEFEKRTADGSEFESPKKKAKVE

SEQ ID NO: 7382 - protein, 2100 aa, synthetic construct
MPAAKRVKLDGGDKKYSIGLDIGTNSVGWAVITDEYKVPSKKFKVLGNTDRHSIKKNLIGALLFDSGETAEATRLKRTARRRYTRRKNRICYLQEIFSNEMAKVDDSFFHRLEESFLVEEDKKHERHPIFGNIVDEVAYHEKYPTIYHLRKKLVDSTDKADLRLIYLALAHMIKFRGHFLIEGDLNPDNSDVDKLFIQLVQTYNQLFEENPINASGVDAKAILSARLSKSRRLENLIAQLPGEKKNGLFGNLIALSLGLTPNFKSNFDLAEDAKLQLSKDTYDDDLDNLLAQIGDQYADLFLAAKNLSDAILLSDILRVNTEITKAPLSASMIKRYDEHHQDLTLLKALVRQQLPEKYKEIFFDQSKNGYAGYIDGGASQEEFYKFIKPILEKMDGTEELLVKLNREDLLRKQRTFDNGSIPHQIHLGELHAILRRQEDFYPFLKDNREKIEKILTFRIPYYVGPLARGNSRFAWMTRKSEETITPWNFEEVVDKGASAQSFIERMTNFDKNLPNEKVLPKHSLLYEYFTVYNELTKVKYVTEGMRKPAFLSGEQKKAIVDLLFKTNRKVTVKQLKEDYFKKIECFDSVEISGVEDRFNASLGTYHDLLKIIKDKDFLDNEENEDILEDIVLTLTLFEDREMIEERLKTYAHLFDDKVMKQLKRRRYTGWGRLSRKLINGIRDKQSGKTILDFLKSDGFANRNFMQLIHDDSLTFKEDIQKAQVSGQGDSLHEHIANLAGSPAIKKGILQTVKVVDELVKVMGRHKPENIVIEMARENQTTQKGQKNSRERMKRIEEGIKELGSQILKEHPVENTQLQNEKLYLYYLQNGRDMYVDQELDINRLSDYDVDHIVPQSFLKDDSIDNKVLTRSDKARGKSDNVPSEEVVKKMKNYWRQLLNAKLITQRKFDNLTKAERGGLSELDKAGFIKRQLVETRQITKHVAQILDSRMNTKYDENDKLIREVKVITLKSKLVSDFRKDFQFYKVREINNYHHAHDAYLNAVVGTALIKKYPKLESEFVYGDYKVYDVRKMIAKSEQEIGKATAKYFFYSNIMNFFKTEITLANGEIRKRPLIETNGETGEIVWDKGRDFATVRKVLSMPQVNIVKKTEVQTGGFSKESILPKRNSDKLIARKKDWDPKKYGGFDSPTVAYSVLVVAKVEKGKSKKLKSVKELLGITIMERSSFEKNPIDFLEAKGYKEVKKDLIIKLPKYSLFELENGRKRMLASAGELQKGNELALPSKYVNFLYLASHYEKLKGSPEDNEQKQLFVEQHKHYLDEIIEQISEFSKRVILADANLDKVLSAYNKHRDKPIREQAENIIHLFTLTNLGAPAAFKYFDTTIDRKRYTSTKEVLDATLIHQSITGLYETRIDLSQLGGDGGGSSGGGPAPGGTVSLQDEHRLFDIPVTTSLPDVWLQDFPQAWAETGGLGRAKCQAPIIIDLKPTAVPVSIKQYPMSLEAHMGIRQHIIKFLELGVLRPCRSPWNTPLLPVKKPGTQDYRPVQDLREINKRTVDIHPTVPNPYNLLSTLKPDYSWYTVLDLKDAFFCLPLAPQSQELFAFEWKDPERGISGQLTWTRLPQGFKNSPTLFNEALHRDLTDFRTQHPEVTLLQYVDDLLLAAPTKKACTQGTRHLLQELGEKGYRASAKKAQICQTKVTYLGYILSEGKRWLTPGRIETVARIPPPRNPREVREFLGTAGFCRLWIPGFAELAAPLYALTKPSTPFTWQTEHQLAFEALKKALLSAPALGLPDTSKPFTLFLDERQGIAKGVLTQKLGPWKRPVAYLSKKLDPVAAGWPPCLRIMAATAMLVKDSAKLTLGQPLTVITPHTLEAIVRQPPDRWITNARLTHYQALLLDTDRVQFGPPVTLNPATLLPVPENQPSPHDCRQVLAETHGTREDLKDQELPDADHTWYTDGSSYLDSGTRRAGAAVVDGHNTIWAQSLPPGTSAQKAELIALTKALELSKGKKANIYTDSRYAFATAHTHGSIYERRGWLTSEGKEIKNKAEIIALLKALFLPQEVAIIHCPGHQKGQDPVAVGNRQADRVARQAAMAEVLTLATEPDNTSHITAGKRTADGSEFEKRTADGSEFESPKKKAKVE

SEQ ID NO: 7383 - protein, 2085 aa, synthetic construct
MPAAKRVKLDGGDKKYSIGLDIGTNSVGWAVITDEYKVPSKKFKVLGNTDRHSIKKNLIGALLFDSGETAEATRLKRTARRRYTRRKNRICYLQEIFSNEMAKVDDSFFHRLEESFLVEEDKKHERHPIFGNIVDEVAYHEKYPTIYHLRKKLVDSTDKADLRLIYLALAHMIKFRGHFLIEGDLNPDNSDVDKLFIQLVQTYNQLFEENPINASGVDAKAILSARLSKSRRLENLIAQLPGEKKNGLFGNLIALSLGLTPNFKSNFDLAEDAKLQLSKDTYDDDLDNLLAQIGDQYADLFLAAKNLSDAILLSDILRVNTEITKAPLSASMIKRYDEHHQDLTLLKALVRQQLPEKYKEIFFDQSKNGYAGYIDGGASQEEFYKFIKPILEKMDGTEELLVKLNREDLLRKQRTFDNGSIPHQIHLGELHAILRRQEDFYPFLKDNREKIEKILTFRIPYYVGPLARGNSRFAWMTRKSEETITPWNFEEVVDKGASAQSFIERMTNFDKNLPNEKVLPKHSLLYEYFTVYNELTKVKYVTEGMRKPAFLSGEQKKAIVDLLFKTNRKVTVKQLKEDYFKKIECFDSVEISGVEDRFNASLGTYHDLLKIIKDKDFLDNEENEDILEDIVLTLTLFEDREMIEERLKTYAHLFDDKVMKQLKRRRYTGWGRLSRKLINGIRDKQSGKTILDFLKSDGFANRNFMQLIHDDSLTFKEDIQKAQVSGQGDSLHEHIANLAGSPAIKKGILQTVKVVDELVKVMGRHKPENIVIEMARENQTTQKGQKNSRERMKRIEEGIKELGSQILKEHPVENTQLQNEKLYLYYLQNGRDMYVDQELDINRLSDYDVDHIVPQSFLKDDSIDNKVLTRSDKARGKSDNVPSEEVVKKMKNYWRQLLNAKLITQRKFDNLTKAERGGLSELDKAGFIKRQLVETRQITKHVAQILDSRMNTKYDENDKLIREVKVITLKSKLVSDFRKDFQFYKVREINNYHHAHDAYLNAVVGTALIKKYPKLESEFVYGDYKVYDVRKMIAKSEQEIGKATAKYFFYSNIMNFFKTEITLANGEIRKRPLIETNGETGEIVWDKGRDFATVRKVLSMPQVNIVKKTEVQTGGFSKESILPKRNSDKLIARKKDWDPKKYGGFDSPTVAYSVLVVAKVEKGKSKKLKSVKELLGITIMERSSFEKNPIDFLEAKGYKEVKKDLIIKLPKYSLFELENGRKRMLASAGELQKGNELALPSKYVNFLYLASHYEKLKGSPEDNEQKQLFVEQHKHYLDEIIEQISEFSKRVILADANLDKVLSAYNKHRDKPIREQAENIIHLFTLTNLGAPAAFKYFDTTIDRKRYTSTKEVLDATLIHQSITGLYETRIDLSQLGGDGGGSSGGGPAPGGVPWILKKPLELTIKLDLEEQQGTLLNNSILSKKGKEELKQLFEKYSALWQSWENQVGHRRIRPHKIATGTVKPTPQKQYHINPKAKPDIQIVINDLLKQGVLIQKESTMNTPVYPVPKPNGRWRMVLDYRAVNKVTPLIAVQNQHSYGILGSLFKGRYKTTIDLSNGFWAHPIVPEDYWITAFTWQGKQYCWTVLPQGFLNSPGLFTGDVVDLLQGIPNVEVYVDDVYISHDSEKEHLEYLDILFNRLKEAGYIISLKKSNIANSIVDFLGFQITNEGRGLTDTFKEKLENITAPTTLKQLQSILGLLNFARNFIPDFTELIAPLYALIPKSTKNYVPWQIEHSTTLETLITKLNGAEYLQGRKGDKTLIMKVNASYTTGYIRYYNEGEKKPISYVSIVFSKTELKFTELEKLLTTVHKGLLKALDLSMGQNIHVYSPIVSMQNIQKTPQTAKKALASRWLSWLSYLEDPRIRFFYDPQMPALKDLPAVDTGKDNKKHPSNFQHIFYTDGSAITSPTKEGHLNAGMGIVYFINKDGNLQKQQEWSISLGNHTAQFAEIAAFEFALKKCLPLGGNILVVTDSNYVAKAYNEELDVWASNGFVNNRKKPLKHISKWKSVADLKRLRPDVVVTHEPGHQKLDSSPHAYGNNLADQLATQASFKVHAGKRTADGSEFEKRTADGSEFESPKKKAKVE

SEQ ID NO: 7384 - protein, 2093 aa, synthetic construct
MPAAKRVKLDGGDKKYSIGLDIGTNSVGWAVITDEYKVPSKKFKVLGNTDRHSIKKNLIGALLFDSGETAEATRLKRTARRRYTRRKNRICYLQEIFSNEMAKVDDSFFHRLEESFLVEEDKKHERHPIFGNIVDEVAYHEKYPTIYHLRKKLVDSTDKADLRLIYLALAHMIKFRGHFLIEGDLNPDNSDVDKLFIQLVQTYNQLFEENPINASGVDAKAILSARLSKSRRLENLIAQLPGEKKNGLFGNLIALSLGLTPNFKSNFDLAEDAKLQLSKDTYDDDLDNLLAQIGDQYADLFLAAKNLSDAILLSDILRVNTEITKAPLSASMIKRYDEHHQDLTLLKALVRQQLPEKYKEIFFDQSKNGYAGYIDGGASQEEFYKFIKPILEKMDGTEELLVKLNREDLLRKQRTFDNGSIPHQIHLGELHAILRRQEDFYPFLKDNREKIEKILTFRIPYYVGPLARGNSRFAWMTRKSEETITPWNFEEVVDKGASAQSFIERMTNFDKNLPNEKVLPKHSLLYEYFTVYNELTKVKYVTEGMRKPAFLSGEQKKAIVDLLFKTNRKVTVKQLKEDYFKKIECFDSVEISGVEDRFNASLGTYHDLLKIIKDKDFLDNEENEDILEDIVLTLTLFEDREMIEERLKTYAHLFDDKVMKQLKRRRYTGWGRLSRKLINGIRDKQSGKTILDFLKSDGFANRNFMQLIHDDSLTFKEDIQKAQVSGQGDSLHEHIANLAGSPAIKKGILQTVKVVDELVKVMGRHKPENIVIEMARENQTTQKGQKNSRERMKRIEEGIKELGSQILKEHPVENTQLQNEKLYLYYLQNGRDMYVDQELDINRLSDYDVDHIVPQSFLKDDSIDNKVLTRSDKARGKSDNVPSEEVVKKMKNYWRQLLNAKLITQRKFDNLTKAERGGLSELDKAGFIKRQLVETRQITKHVAQILDSRMNTKYDENDKLIREVKVITLKSKLVSDFRKDFQFYKVREINNYHHAHDAYLNAVVGTALIKKYPKLESEFVYGDYKVYDVRKMIAKSEQEIGKATAKYFFYSNIMNFFKTEITLANGEIRKRPLIETNGETGEIVWDKGRDFATVRKVLSMPQVNIVKKTEVQTGGFSKESILPKRNSDKLIARKKDWDPKKYGGFDSPTVAYSVLVVAKVEKGKSKKLKSVKELLGITIMERSSFEKNPIDFLEAKGYKEVKKDLIIKLPKYSLFELENGRKRMLASAGELQKGNELALPSKYVNFLYLASHYEKLKGSPEDNEQKQLFVEQHKHYLDEIIEQISEFSKRVILADANLDKVLSAYNKHRDKPIREQAENIIHLFTLTNLGAPAAFKYFDTTIDRKRYTSTKEVLDATLIHQSITGLYETRIDLSQLGGDGGGSSGGGPAPGGTLQLEEEYRLFEPESTQKQEMDIWLKNFPQAWAETGGMGTAHCQAPVLIQLKATATPISIRQYPMPHEAYQGIKPHIRRMLDQGILKPCQSPWNTPLLPVKKPGTEDYRPVQDLREVNKRVEDIHPTVPNPYNLLSTLPPSHPWYTVLDLKDAFFCLRLHSESQLLFAFEWRDPEIGLSGQLTWTRLPQGFKNSPTLFNEALHSDLADFRVRYPALVLLQYVDDLLLAAATRTECLEGTKALLETLGNKGYRASAKKAQICLQEVTYLGYSLKDGQRWLTKARKEAILSIPVPKNSRQVREFLGTAGYCRLWIPGFAELAAPLYPLTRPGTLFQWGTEQQLAFEDIKKALLSSPALGLPDITKPFELFIDENSGFAKGVLVQKLGPWKRPVAYLSKKLDTVASGWPPCLRMVAAIAILVKDAGKLTLGQPLTILTSHPVEALVRQPPNKWLSNARMTHYQAMLLDAERVHFGPTVSLNPATLLPLPSGGNHHDCLQILAETHGTRPDLTDQPLPDADLTWYTDGSSFIRNGEREAGAAVTTESEVIWAAPLPPGTSAQRAELIALTQALKMAEGKKLTVYTDSRYAFATTHVHGEIYRRRGWLTSEGKEIKNKNEILALLEALFLPKRLSIIHCPGHQKGDSPQAKGNRLADDTAKKAATETHSSLTVLPAGKRTADGSEFEKRTADGSEFESPKKKAKVE

SEQ ID NO: 7385 - protein, 2174 aa, synthetic construct
MPAAKRVKLDGGDKKYSIGLDIGTNSVGWAVITDEYKVPSKKFKVLGNTDRHSIKKNLIGALLFDSGETAEATRLKRTARRRYTRRKNRICYLQEIFSNEMAKVDDSFFHRLEESFLVEEDKKHERHPIFGNIVDEVAYHEKYPTIYHLRKKLVDSTDKADLRLIYLALAHMIKFRGHFLIEGDLNPDNSDVDKLFIQLVQTYNQLFEENPINASGVDAKAILSARLSKSRRLENLIAQLPGEKKNGLFGNLIALSLGLTPNFKSNFDLAEDAKLQLSKDTYDDDLDNLLAQIGDQYADLFLAAKNLSDAILLSDILRVNTEITKAPLSASMIKRYDEHHQDLTLLKALVRQQLPEKYKEIFFDQSKNGYAGYIDGGASQEEFYKFIKPILEKMDGTEELLVKLNREDLLRKQRTFDNGSIPHQIHLGELHAILRRQEDFYPFLKDNREKIEKILTFRIPYYVGPLARGNSRFAWMTRKSEETITPWNFEEVVDKGASAQSFIERMTNFDKNLPNEKVLPKHSLLYEYFTVYNELTKVKYVTEGMRKPAFLSGEQKKAIVDLLFKTNRKVTVKQLKEDYFKKIECFDSVEISGVEDRFNASLGTYHDLLKIIKDKDFLDNEENEDILEDIVLTLTLFEDREMIEERLKTYAHLFDDKVMKQLKRRRYTGWGRLSRKLINGIRDKQSGKTILDFLKSDGFANRNFMQLIHDDSLTFKEDIQKAQVSGQGDSLHEHIANLAGSPAIKKGILQTVKVVDELVKVMGRHKPENIVIEMARENQTTQKGQKNSRERMKRIEEGIKELGSQILKEHPVENTQLQNEKLYLYYLQNGRDMYVDQELDINRLSDYDVDHIVPQSFLKDDSIDNKVLTRSDKARGKSDNVPSEEVVKKMKNYWRQLLNAKLITQRKFDNLTKAERGGLSELDKAGFIKRQLVETRQITKHVAQILDSRMNTKYDENDKLIREVKVITLKSKLVSDFRKDFQFYKVREINNYHHAHDAYLNAVVGTALIKKYPKLESEFVYGDYKVYDVRKMIAKSEQEIGKATAKYFFYSNIMNFFKTEITLANGEIRKRPLIETNGETGEIVWDKGRDFATVRKVLSMPQVNIVKKTEVQTGGFSKESILPKRNSDKLIARKKDWDPKKYGGFDSPTVAYSVLVVAKVEKGKSKKLKSVKELLGITIMERSSFEKNPIDFLEAKGYKEVKKDLIIKLPKYSLFELENGRKRMLASAGELQKGNELALPSKYVNFLYLASHYEKLKGSPEDNEQKQLFVEQHKHYLDEIIEQISEFSKRVILADANLDKVLSAYNKHRDKPIREQAENIIHLFTLTNLGAPAAFKYFDTTIDRKRYTSTKEVLDATLIHQSITGLYETRIDLSQLGGDGGGSSGGGPAPGGMNPLQLLQPLPAEIKGTKLLAHWNSGATITCIPESFLEDEQPIKKTLIKTIHGEKQQNVYYVTFKVKGRKVEAEVIASPYEYILLSPTDVPWLTQQPLQLTILVPLQEYQEKILSKTALPEDQKQQLKTLFVKYDNLWQHWENQVGHRKIRPHNIATGDYPPRPQKQYPINPKAKPSIQIVIDDLLKQGVLTPQNSTMNTPVYPVPKPDGRWRMVLDYREVNKTIPLTAAQNQHSAGILATIVRQKYKTTLDLANGFWAHPITPESYWLTAFTWQGKQYCWTRLPQGFLNSPALFNADVVDLLKEIPNVQVYVDDIYLSHDDPKEHVQQLEKVFQILLQAGYVVSLKKSEIGQKTVEFLGFNITKEGRGLTDTFKTKLLNITPPKDLKQLQSILGLLNFARNFIPNFAELVQPLYNLIAPAKGKYIEWSEENTKQLNMVIEALNTASNLEERLPEQRLVIKVNTSPSAGYVRYYNETGKKPIMYLNYVFSKAELKFSMLEKLLTTMHKALIKAMDLAMGQEILVYSPIVSMTKIQKTPLPERKALPIRWITWMTYLEDPRIQFHYDKTLPELKHIPDVYTSSQSPVKHPSQYEGVFYTDGSAIKSPDPTKSNNAGMGIVHATYKPEYQVLNQWSIPLGNHTAQMAEIAAVEFACKKALKIPGPVLVITDSFYVAESANKELPYWKSNGFVNNKKKPLKHISKWKSIAECLSMKPDITIQHEKGISLQIPVFILKGNALADKLATQGSYVVNAGKRTADGSEFEKRTADGSEFESPKKKAKVE

SEQ ID NO: 7386 - protein, 2125 aa, synthetic construct
MPAAKRVKLDGGDKKYSIGLDIGTNSVGWAVITDEYKVPSKKFKVLGNTDRHSIKKNLIGALLFDSGETAEATRLKRTARRRYTRRKNRICYLQEIFSNEMAKVDDSFFHRLEESFLVEEDKKHERHPIFGNIVDEVAYHEKYPTIYHLRKKLVDSTDKADLRLIYLALAHMIKFRGHFLIEGDLNPDNSDVDKLFIQLVQTYNQLFEENPINASGVDAKAILSARLSKSRRLENLIAQLPGEKKNGLFGNLIALSLGLTPNFKSNFDLAEDAKLQLSKDTYDDDLDNLLAQIGDQYADLFLAAKNLSDAILLSDILRVNTEITKAPLSASMIKRYDEHHQDLTLLKALVRQQLPEKYKEIFFDQSKNGYAGYIDGGASQEEFYKFIKPILEKMDGTEELLVKLNREDLLRKQRTFDNGSIPHQIHLGELHAILRRQEDFYPFLKDNREKIEKILTFRIPYYVGPLARGNSRFAWMTRKSEETITPWNFEEVVDKGASAQSFIERMTNFDKNLPNEKVLPKHSLLYEYFTVYNELTKVKYVTEGMRKPAFLSGEQKKAIVDLLFKTNRKVTVKQLKEDYFKKIECFDSVEISGVEDRFNASLGTYHDLLKIIKDKDFLDNEENEDILEDIVLTLTLFEDREMIEERLKTYAHLFDDKVMKQLKRRRYTGWGRLSRKLINGIRDKQSGKTILDFLKSDGFANRNFMQLIHDDSLTFKEDIQKAQVSGQGDSLHEHIANLAGSPAIKKGILQTVKVVDELVKVMGRHKPENIVIEMARENQTTQKGQKNSRERMKRIEEGIKELGSQILKEHPVENTQLQNEKLYLYYLQNGRDMYVDQELDINRLSDYDVDHIVPQSFLKDDSIDNKVLTRSDKARGKSDNVPSEEVVKKMKNYWRQLLNAKLITQRKFDNLTKAERGGLSELDKAGFIKRQLVETRQITKHVAQILDSRMNTKYDENDKLIREVKVITLKSKLVSDFRKDFQFYKVREINNYHHAHDAYLNAVVGTALIKKYPKLESEFVYGDYKVYDVRKMIAKSEQEIGKATAKYFFYSNIMNFFKTEITLANGEIRKRPLIETNGETGEIVWDKGRDFATVRKVLSMPQVNIVKKTEVQTGGFSKESILPKRNSDKLIARKKDWDPKKYGGFDSPTVAYSVLVVAKVEKGKSKKLKSVKELLGITIMERSSFEKNPIDFLEAKGYKEVKKDLIIKLPKYSLFELENGRKRMLASAGELQKGNELALPSKYVNFLYLASHYEKLKGSPEDNEQKQLFVEQHKHYLDEIIEQISEFSKRVILADANLDKVLSAYNKHRDKPIREQAENIIHLFTLTNLGAPAAFKYFDTTIDRKRYTSTKEVLDATLIHQSITGLYETRIDLSQLGGDGGGSSGGGPAPGGLLGRDLLTKLKAQIQFSTEGPQVTWEDRPAMCLVLNLEEEYRLHEKPVPPSIDPSWLQLFPMVWAEKAGMGLANQVPPVVVELKSDASPVAVRQYPMSKEAREGIRPHIQRFLDLGILVPCQSPWNTPLLPVKKPGTNDYRPVQDLREVNKRVQDIHPTVPNPYNLLSSLPPSHTWYSVLDLKDAFFCLKLHPNSQPLFAFEWRDPEKGNTGQLTWTRLPQGFKNSPTLFNEALHRDLASFRALNPQVVMLQYVDDLLVAAPTYRDCKEGTRRLLQELSKLGYRVSAKKAQLCREEVTYLGYLLKGGKRWLTPARKATVMKIPTPTTPRQVREFLGTAGFCRLWIPGFASLAAPLYPLTRPKVPFTWTEAHQEAFGRIKEALLSAPALALPDLTKPFALYVDEKEGVARGVLTQTLGPWRRPVAYLSKKLDPVASGWPTCLKAIAAVALLLKDADKLTLGQNVLVIAPHNLESIVRQPPDRWMTNARMTHYQSLLLNERVSFAPPAILNPATLLPVESDDTPIHICSEILAEETGTRPDLRDQPLPGVPAWYTDGSSFIMDGRRQAGAAIVDNKRTVWASNLPEGTSAQKAELIALTQALRLAEGKSINIYTDSRYAFATAHVHGAIYKQRGWLTSAGKDIKNKEEILALLEAIHLPKRVAIIHCPGHQRGTDPVATGNRKADEAAKQAAQSTRILTETTKNAGKRTADGSEFEKRTADGSEFESPKKKAKVE

SEQ ID NO: 7387 - protein, 2216 aa, synthetic construct
MPAAKRVKLDGGDKKYSIGLDIGTNSVGWAVITDEYKVPSKKFKVLGNTDRHSIKKNLIGALLFDSGETAEATRLKRTARRRYTRRKNRICYLQEIFSNEMAKVDDSFFHRLEESFLVEEDKKHERHPIFGNIVDEVAYHEKYPTIYHLRKKLVDSTDKADLRLIYLALAHMIKFRGHFLIEGDLNPDNSDVDKLFIQLVQTYNQLFEENPINASGVDAKAILSARLSKSRRLENLIAQLPGEKKNGLFGNLIALSLGLTPNFKSNFDLAEDAKLQLSKDTYDDDLDNLLAQIGDQYADLFLAAKNLSDAILLSDILRVNTEITKAPLSASMIKRYDEHHQDLTLLKALVRQQLPEKYKEIFFDQSKNGYAGYIDGGASQEEFYKFIKPILEKMDGTEELLVKLNREDLLRKQRTFDNGSIPHQIHLGELHAILRRQEDFYPFLKDNREKIEKILTFRIPYYVGPLARGNSRFAWMTRKSEETITPWNFEEVVDKGASAQSFIERMTNFDKNLPNEKVLPKHSLLYEYFTVYNELTKVKYVTEGMRKPAFLSGEQKKAIVDLLFKTNRKVTVKQLKEDYFKKIECFDSVEISGVEDRFNASLGTYHDLLKIIKDKDFLDNEENEDILEDIVLTLTLFEDREMIEERLKTYAHLFDDKVMKQLKRRRYTGWGRLSRKLINGIRDKQSGKTILDFLKSDGFANRNFMQLIHDDSLTFKEDIQKAQVSGQGDSLHEHIANLAGSPAIKKGILQTVKVVDELVKVMGRHKPENIVIEMARENQTTQKGQKNSRERMKRIEEGIKELGSQILKEHPVENTQLQNEKLYLYYLQNGRDMYVDQELDINRLSDYDVDHIVPQSFLKDDSIDNKVLTRSDKARGKSDNVPSEEVVKKMKNYWRQLLNAKLITQRKFDNLTKAERGGLSELDKAGFIKRQLVETRQITKHVAQILDSRMNTKYDENDKLIREVKVITLKSKLVSDFRKDFQFYKVREINNYHHAHDAYLNAVVGTALIKKYPKLESEFVYGDYKVYDVRKMIAKSEQEIGKATAKYFFYSNIMNFFKTEITLANGEIRKRPLIETNGETGEIVWDKGRDFATVRKVLSMPQVNIVKKTEVQTGGFSKESILPKRNSDKLIARKKDWDPKKYGGFDSPTVAYSVLVVAKVEKGKSKKLKSVKELLGITIMERSSFEKNPIDFLEAKGYKEVKKDLIIKLPKYSLFELENGRKRMLASAGELQKGNELALPSKYVNFLYLASHYEKLKGSPEDNEQKQLFVEQHKHYLDEIIEQISEFSKRVILADANLDKVLSAYNKHRDKPIREQAENIIHLFTLTNLGAPAAFKYFDTTIDRKRYTSTKEVLDATLIHQSITGLYETRIDLSQLGGDGGGSSGGGPAPGGTLGDQGSRGSDPLPEPRVTLTVEGIPTEFLVNTGAEHSVLTKPMGKMGSKRTVVAGATGSKVYPWTTKRLLKIGQKQVTHSFLVIPECPAPLLGRDLLTKLKAQIQFSTEGPQVTWEDRPAMCLVLNLEEEYRLHEKPVPPSIDPSWLQLFPMVWAEKAGMGLANQVPPVVVELKSDASPVAVRQYPMSKEAREGIRPHIQRFLDLGILVPCQSPWNTPLLPVKKPGTNDYRPVQDLREVNKRVQDIHPTVPNPYNLLSSLPPSHTWYSVLDLKDAFFCLKLHPNSQPLFAFEWRDPEKGNTGQLTWTRLPQGFKNSPTLFNEALHRDLASFRALNPQVVMLQYVDDLLVAAPTYRDCKEGTRRLLQELSKLGYRVSAKKAQLCREEVTYLGYLLKGGKRWLTPARKATVMKIPTPTTPRQVREFLGTAGFCRLWIPGFASLAAPLYPLTRPKVPFTWTEAHQEAFGRIKEALLSAPALALPDLTKPFALYVDEKEGVARGVLTQTLGPWRRPVAYLSKKLDPVASGWPTCLKAIAAVALLLKDADKLTLGQNVLVIAPHNLESIVRQPPDRWMTNARMTHYQSLLLNERVSFAPPAILNPATLLPVESDDTPIHICSEILAEETGTRPDLRDQPLPGVPAWYTDGSSFIMDGRRQAGAAIVDNKRTVWASNLPEGTSAQKAELIALTQALRLAEGKSINIYTDSRYAFATAHVHGAIYKQRGWLTSAGKDIKNKEEILALLEAIHLPKRVAIIHCPGHQRGTDPVATGNRKADEAAKQAAQSTRILTETTKNAGKRTADGSEFEKRTADGSEFESPKKKAKVE

SEQ ID NO: 7388 - protein, 2216 aa, synthetic construct
MPAAKRVKLDGGDKKYSIGLDIGTNSVGWAVITDEYKVPSKKFKVLGNTDRHSIKKNLIGALLFDSGETAEATRLKRTARRRYTRRKNRICYLQEIFSNEMAKVDDSFFHRLEESFLVEEDKKHERHPIFGNIVDEVAYHEKYPTIYHLRKKLVDSTDKADLRLIYLALAHMIKFRGHFLIEGDLNPDNSDVDKLFIQLVQTYNQLFEENPINASGVDAKAILSARLSKSRRLENLIAQLPGEKKNGLFGNLIALSLGLTPNFKSNFDLAEDAKLQLSKDTYDDDLDNLLAQIGDQYADLFLAAKNLSDAILLSDILRVNTEITKAPLSASMIKRYDEHHQDLTLLKALVRQQLPEKYKEIFFDQSKNGYAGYIDGGASQEEFYKFIKPILEKMDGTEELLVKLNREDLLRKQRTFDNGSIPHQIHLGELHAILRRQEDFYPFLKDNREKIEKILTFRIPYYVGPLARGNSRFAWMTRKSEETITPWNFEEVVDKGASAQSFIERMTNFDKNLPNEKVLPKHSLLYEYFTVYNELTKVKYVTEGMRKPAFLSGEQKKAIVDLLFKTNRKVTVKQLKEDYFKKIECFDSVEISGVEDRFNASLGTYHDLLKIIKDKDFLDNEENEDILEDIVLTLTLFEDREMIEERLKTYAHLFDDKVMKQLKRRRYTGWGRLSRKLINGIRDKQSGKTILDFLKSDGFANRNFMQLIHDDSLTFKEDIQKAQVSGQGDSLHEHIANLAGSPAIKKGILQTVKVVDELVKVMGRHKPENIVIEMARENQTTQKGQKNSRERMKRIEEGIKELGSQILKEHPVENTQLQNEKLYLYYLQNGRDMYVDQELDINRLSDYDVDHIVPQSFLKDDSIDNKVLTRSDKARGKSDNVPSEEVVKKMKNYWRQLLNAKLITQRKFDNLTKAERGGLSELDKAGFIKRQLVETRQITKHVAQILDSRMNTKYDENDKLIREVKVITLKSKLVSDFRKDFQFYKVREINNYHHAHDAYLNAVVGTALIKKYPKLESEFVYGDYKVYDVRKMIAKSEQEIGKATAKYFFYSNIMNFFKTEITLANGEIRKRPLIETNGETGEIVWDKGRDFATVRKVLSMPQVNIVKKTEVQTGGFSKESILPKRNSDKLIARKKDWDPKKYGGFDSPTVAYSVLVVAKVEKGKSKKLKSVKELLGITIMERSSFEKNPIDFLEAKGYKEVKKDLIIKLPKYSLFELENGRKRMLASAGELQKGNELALPSKYVNFLYLASHYEKLKGSPEDNEQKQLFVEQHKHYLDEIIEQISEFSKRVILADANLDKVLSAYNKHRDKPIREQAENIIHLFTLTNLGAPAAFKYFDTTIDRKRYTSTKEVLDATLIHQSITGLYETRIDLSQLGGDGGGSSGGGPAPGGTLGDQGSRGSDPLPEPRVTLTVEGIPTEFLVNTGAEHSVLTKPMGKMGSKRTVVAGATGSKVYPWTTKRLLKIGQKQVTHSFLVIPECPAPLLGRDLLTKLKAQIQFSTEGPQVTWEDRPAMCLVLNLEEEYRLHEKPVPPSIDPSWLQLFPMVWAEKAGMGLANQVPPVVVELKSDASPVAVRQYPMSKEAREGIRPHIQRFLDLGILVPCQSPWNTPLLPVKKPGTNDYRPVQDLREVNKRVQDIHPTVPNPYNLLSSLPPSHTWYSVLDLKDAFFCLKLHPNSQPLFAFEWRDPEKGNTGQLTWTRLPQGFKNSPTLFNEALHRDLASFRALNPQVVMLQYVDDLLVAAPTYRDCKEGTRRLLQELSKLGYRVSAKKAQLCREEVTYLGYLLKGGKRWLTPARKATVMKIPTPTTPRQVREFLGKAGFCRLFIPGFASLAAPLYPLTRPKVPFTWTEAHQEAFGRIKEALLSAPALALPDLTKPFALYVDEKEGVARGVLTQTLGPWRRPVAYLSKKLDPVASGWPTCLKAIAAVALLLKDADKLTLGQNVLVIAPHNLESIVRQPPDRWMTNARMTHYQSLLLNERVSFAPPAILNPATLLPVESDDTPIHICSEILAEETGTRPDLRDQPLPGVPAWYTDGSSFIMDGRRQAGAAIVDNKRTVWASNLPEGTSAQKAELIALTQALRLAEGKSINIYTDSRYAFATAHVHGAIYKQRGWLTSAGKDIKNKEEILALLEAIHLPKRVAIIHCPGHQRGTDPVATGNRKADEAAKQAAQSTRILTETTKNAGKRTADGSEFEKRTADGSEFESPKKKAKVE

SEQ ID NO: 7389 - protein, 2094 aa, synthetic construct
MPAAKRVKLDGGDKKYSIGLDIGTNSVGWAVITDEYKVPSKKFKVLGNTDRHSIKKNLIGALLFDSGETAEATRLKRTARRRYTRRKNRICYLQEIFSNEMAKVDDSFFHRLEESFLVEEDKKHERHPIFGNIVDEVAYHEKYPTIYHLRKKLVDSTDKADLRLIYLALAHMIKFRGHFLIEGDLNPDNSDVDKLFIQLVQTYNQLFEENPINASGVDAKAILSARLSKSRRLENLIAQLPGEKKNGLFGNLIALSLGLTPNFKSNFDLAEDAKLQLSKDTYDDDLDNLLAQIGDQYADLFLAAKNLSDAILLSDILRVNTEITKAPLSASMIKRYDEHHQDLTLLKALVRQQLPEKYKEIFFDQSKNGYAGYIDGGASQEEFYKFIKPILEKMDGTEELLVKLNREDLLRKQRTFDNGSIPHQIHLGELHAILRRQEDFYPFLKDNREKIEKILTFRIPYYVGPLARGNSRFAWMTRKSEETITPWNFEEVVDKGASAQSFIERMTNFDKNLPNEKVLPKHSLLYEYFTVYNELTKVKYVTEGMRKPAFLSGEQKKAIVDLLFKTNRKVTVKQLKEDYFKKIECFDSVEISGVEDRFNASLGTYHDLLKIIKDKDFLDNEENEDILEDIVLTLTLFEDREMIEERLKTYAHLFDDKVMKQLKRRRYTGWGRLSRKLINGIRDKQSGKTILDFLKSDGFANRNFMQLIHDDSLTFKEDIQKAQVSGQGDSLHEHIANLAGSPAIKKGILQTVKVVDELVKVMGRHKPENIVIEMARENQTTQKGQKNSRERMKRIEEGIKELGSQILKEHPVENTQLQNEKLYLYYLQNGRDMYVDQELDINRLSDYDVDHIVPQSFLKDDSIDNKVLTRSDKARGKSDNVPSEEVVKKMKNYWRQLLNAKLITQRKFDNLTKAERGGLSELDKAGFIKRQLVETRQITKHVAQILDSRMNTKYDENDKLIREVKVITLKSKLVSDFRKDFQFYKVREINNYHHAHDAYLNAVVGTALIKKYPKLESEFVYGDYKVYDVRKMIAKSEQEIGKATAKYFFYSNIMNFFKTEITLANGEIRKRPLIETNGETGEIVWDKGRDFATVRKVLSMPQVNIVKKTEVQTGGFSKESILPKRNSDKLIARKKDWDPKKYGGFDSPTVAYSVLVVAKVEKGKSKKLKSVKELLGITIMERSSFEKNPIDFLEAKGYKEVKKDLIIKLPKYSLFELENGRKRMLASAGELQKGNELALPSKYVNFLYLASHYEKLKGSPEDNEQKQLFVEQHKHYLDEIIEQISEFSKRVILADANLDKVLSAYNKHRDKPIREQAENIIHLFTLTNLGAPAAFKYFDTTIDRKRYTSTKEVLDATLIHQSITGLYETRIDLSQLGGDGGGSSGGGPAPGGTLNLEDEYRLYETSAEPEVSPGSTWLSDFPQAWAETGGMGLAVRQAPLIIPLKATSTPVSIKQYPMSQEAKLGIKPHIQRLLDQGILVPCQSPWNTPLLPVKKPGTNDYRPVQDLREVNKRVEDIHPTVPNPYNLLSGLPPSHRWYTVLDLKDAFFCLRLHPTSQPLFAFEWRDPGMGISGQLTWTRLPQGFKNSPTLFNEALHRDLADFRIQHPDLILLQYVDDILLAATSELDCQQGTRALLLTLGNLGYRASAKKAQLCQKQVKYLGYLLKEGQRWLTEARKETVMGQPTPKTPRQLREFLGKAGFCRLFIPGFAEMAAPLYPLTKPGTLFNWGPDQQKAYQEIKQALLTAPALGLPDLTKPFELFVDEKQGYAKGVLTQKLGPWRRPVAYLSKKLDPVAAGWPPCLRMVAAIAVLRKDAGKLTMGQPLVILAPHAVEALVKQPPDRWLSNARMTHYQAMLLDTDRVQFGPVVALNPATLLPLPEEGAPHDCLEILAETHGTRPDLTDQPIPDADHTWYTDGSSFLQEGQRKAGAAVTTETEVIWARALPAGTSAQRAELIALTQALKMAEGKRLNVYTDSRYAFATAHIHGEIYRRRGWLTSEGREIKNKSEILALLKALFLPKRLSIIHCLGHQKGDSAEARGNRLADQAAREAAIKTPPDTSTLLAGKRTADGSEFEKRTADGSEFESPKKKAKVE

SEQ ID NO: 7390 - protein, 2094 aa, synthetic construct
MPAAKRVKLDGGDKKYSIGLDIGTNSVGWAVITDEYKVPSKKFKVLGNTDRHSIKKNLIGALLFDSGETAEATRLKRTARRRYTRRKNRICYLQEIFSNEMAKVDDSFFHRLEESFLVEEDKKHERHPIFGNIVDEVAYHEKYPTIYHLRKKLVDSTDKADLRLIYLALAHMIKFRGHFLIEGDLNPDNSDVDKLFIQLVQTYNQLFEENPINASGVDAKAILSARLSKSRRLENLIAQLPGEKKNGLFGNLIALSLGLTPNFKSNFDLAEDAKLQLSKDTYDDDLDNLLAQIGDQYADLFLAAKNLSDAILLSDILRVNTEITKAPLSASMIKRYDEHHQDLTLLKALVRQQLPEKYKEIFFDQSKNGYAGYIDGGASQEEFYKFIKPILEKMDGTEELLVKLNREDLLRKQRTFDNGSIPHQIHLGELHAILRRQEDFYPFLKDNREKIEKILTFRIPYYVGPLARGNSRFAWMTRKSEETITPWNFEEVVDKGASAQSFIERMTNFDKNLPNEKVLPKHSLLYEYFTVYNELTKVKYVTEGMRKPAFLSGEQKKAIVDLLFKTNRKVTVKQLKEDYFKKIECFDSVEISGVEDRFNASLGTYHDLLKIIKDKDFLDNEENEDILEDIVLTLTLFEDREMIEERLKTYAHLFDDKVMKQLKRRRYTGWGRLSRKLINGIRDKQSGKTILDFLKSDGFANRNFMQLIHDDSLTFKEDIQKAQVSGQGDSLHEHIANLAGSPAIKKGILQTVKVVDELVKVMGRHKPENIVIEMARENQTTQKGQKNSRERMKRIEEGIKELGSQILKEHPVENTQLQNEKLYLYYLQNGRDMYVDQELDINRLSDYDVDHIVPQSFLKDDSIDNKVLTRSDKARGKSDNVPSEEVVKKMKNYWRQLLNAKLITQRKFDNLTKAERGGLSELDKAGFIKRQLVETRQITKHVAQILDSRMNTKYDENDKLIREVKVITLKSKLVSDFRKDFQFYKVREINNYHHAHDAYLNAVVGTALIKKYPKLESEFVYGDYKVYDVRKMIAKSEQEIGKATAKYFFYSNIMNFFKTEITLANGEIRKRPLIETNGETGEIVWDKGRDFATVRKVLSMPQVNIVKKTEVQTGGFSKESILPKRNSDKLIARKKDWDPKKYGGFDSPTVAYSVLVVAKVEKGKSKKLKSVKELLGITIMERSSFEKNPIDFLEAKGYKEVKKDLIIKLPKYSLFELENGRKRMLASAGELQKGNELALPSKYVNFLYLASHYEKLKGSPEDNEQKQLFVEQHKHYLDEIIEQISEFSKRVILADANLDKVLSAYNKHRDKPIREQAENIIHLFTLTNLGAPAAFKYFDTTIDRKRYTSTKEVLDATLIHQSITGLYETRIDLSQLGGDGGGSSGGGPAPGGLGIEDEYRLHETSTEPDVSLGSTWLSDFPQAWAETGGMGLAVRQAPLIIPLKATSTPVSIQQYPMSHEARLGIKPHIQRLLDQGILVPCQSPWNTPLLPVKKPGTNDYRPVQDLREVNKRVEDIHPTVPNPYNLLSGLPPSHQWYTVLDLKDAFFCLRLHPTSQPLFAFEWRDPGMGISGQLTWTRLPQGFKNSPTLFNEALHRDLADFRIQHPDLILLQYVDDILLAATSELDCQQGTRALLQTLGDLGYRASAKKAQICQKQVKYLGYLLREGQRWLTEARKETVMGQPVPKTPRQLREFLGKAGFCRLFIPGFAEMAAPLYPLTKPGTLFSWGPDQQKAYQEIKQALLTAPALGLPDLTKPFELFVDEKQGYAKGVLTQKLGPWRRPVAYLSKKLDPVAAGWPPCLRMVAAIAVLTKDAGKLTMGQPLVILAPHAVEALVKQPPDRWLSNARMTHYQAMLLDTDRVQFGPVVALNPATLLPLPEEGAPHDCLEILAETHGTRPDLTDQPIPDADHTWYTDGSSFLQEGQRKAGAAVTTETEVIWAGALPAGTSAQRAELIALTQALKMAEGKRLNVYTDSRYAFATAHIHGEIYRRRGWLTSEGREIKNKSEILALLKALFLPKRLSIIHCLGHQKGDSAEARGNRLADQAAREAAIKTPPDTSTLLIAGKRTADGSEFEKRTADGSEFESPKKKAKVE

SEQ ID NO: 7391 - protein, 2094 aa, synthetic construct; identical to SEQ ID NO: 7390

SEQ ID NO: 7392 - protein, 2094 aa, synthetic construct
MPAAKRVKLDGGDKKYSIGLDIGTNSVGWAVITDEYKVPSKKFKVLGNTDRHSIKKNLIGALLFDSGETAEATRLKRTARRRYTRRKNRICYLQEIFSNEMAKVDDSFFHRLEESFLVEEDKKHERHPIFGNIVDEVAYHEKYPTIYHLRKKLVDSTDKADLRLIYLALAHMIKFRGHFLIEGDLNPDNSDVDKLFIQLVQTYNQLFEENPINASGVDAKAILSARLSKSRRLENLIAQLPGEKKNGLFGNLIALSLGLTPNFKSNFDLAEDAKLQLSKDTYDDDLDNLLAQIGDQYADLFLAAKNLSDAILLSDILRVNTEITKAPLSASMIKRYDEHHQDLTLLKALVRQQLPEKYKEIFFDQSKNGYAGYIDGGASQEEFYKFIKPILEKMDGTEELLVKLNREDLLRKQRTFDNGSIPHQIHLGELHAILRRQEDFYPFLKDNREKIEKILTFRIPYYVGPLARGNSRFAWMTRKSEETITPWNFEEVVDKGASAQSFIERMTNFDKNLPNEKVLPKHSLLYEYFTVYNELTKVKYVTEGMRKPAFLSGEQKKAIVDLLFKTNRKVTVKQLKEDYFKKIECFDSVEISGVEDRFNASLGTYHDLLKIIKDKDFLDNEENEDILEDIVLTLTLFEDREMIEERLKTYAHLFDDKVMKQLKRRRYTGWGRLSRKLINGIRDKQSGKTILDFLKSDGFANRNFMQLIHDDSLTFKEDIQKAQVSGQGDSLHEHIANLAGSPAIKKGILQTVKVVDELVKVMGRHKPENIVIEMARENQTTQKGQKNSRERMKRIEEGIKELGSQILKEHPVENTQLQNEKLYLYYLQNGRDMYVDQELDINRLSDYDVDHIVPQSFLKDDSIDNKVLTRSDKARGKSDNVPSEEVVKKMKNYWRQLLNAKLITQRKFDNLTKAERGGLSELDKAGFIKRQLVETRQITKHVAQILDSRMNTKYDENDKLIREVKVITLKSKLVSDFRKDFQFYKVREINNYHHAHDAYLNAVVGTALIKKYPKLESEFVYGDYKVYDVRKMIAKSEQEIGKATAKYFFYSNIMNFFKTEITLANGEIRKRPLIETNGETGEIVWDKGRDFATVRKVLSMPQVNIVKKTEVQTGGFSKESILPKRNSDKLIARKKDWDPKKYGGFDSPTVAYSVLVVAKVEKGKSKKLKSVKELLGITIMERSSFEKNPIDFLEAKGYKEVKKDLIIKLPKYSLFELENGRKRMLASAGELQKGNELALPSKYVNFLYLASHYEKLKGSPEDNEQKQLFVEQHKHYLDEIIEQISEFSKRVILADANLDKVLSAYNKHRDKPIREQAENIIHLFTLTNLGAPAAFKYFDTTIDRKRYTSTKEVLDATLIHQSITGLYETRIDLSQLGGDGGGSSGGGPAPGGTLNIEDEYRLHETSKGPDVPLGSTWLSDFPQAWAETGGMGLAFRQAPLIISLKATSTPVSIKQYPMSQEARLGIKPHIQRLLDQGILVPCQSPWNTPLLPVKKPGTNDYRPVQDLREVNKRVEDIHPTVPNPYNLLSGLPPSHQWYTVLDLKDAFFCLRLHPTSQSLFAFEWKDPEMGISGQLTWTRLPQGFKNSPTLFNEALHRDLADFRIQHPDLILLQYVDDLLLAATSELDCQQGTRALLQTLGDLGYRASAKKAQICQKQVKYLGYLLKEGQRWLTEARKETVMGQPTPKTPRQLREFLGKAGLCRLFIPGFAEMAAPLYPLTKPGTLFKWGPDQQKAYQEIKQALLTAPALGLPDLTKPFELFVDEKQGYAKGVLTQKLGPWRRPVAYLSKKLDPVAAGWPPCLRMVAAIAVLTKDVGKLTMGQPLVILAPHAVEALVKQPPDRWLSNARMTHYQALLLDTDRVQFGPIVALNPATLLPLPEEGLQHDCLDILAEAHGTRPDLTDQPLPDADHTWYTDGSSFLQEGQRRAGAAVTTETEVIWAKALPAGTSAQRAELIALTQALKMAAGKKLNVYTDSRYAFATAHIHGEIYRRRGWLTSEGKEIKNKDEILALLKALFLPKRLSIIHCPGHQKGNHAEARGNRMADQAAREVATRETPETSTLLAGKRTADGSEFEKRTADGSEFESPKKKAKVE

SEQ ID NO: 7393 - protein, 2094 aa, synthetic construct
MPAAKRVKLDGGDKKYSIGLDIGTNSVGWAVITDEYKVPSKKFKVLGNTDRHSIKKNLIGALLFDSGETAEATRLKRTARRRYTRRKNRICYLQEIFSNEMAKVDDSFFHRLEESFLVEEDKKHERHPIFGNIVDEVAYHEKYPTIYHLRKKLVDSTDKADLRLIYLALAHMIKFRGHFLIEGDLNPDNSDVDKLFIQLVQTYNQLFEENPINASGVDAKAILSARLSKSRRLENLIAQLPGEKKNGLFGNLIALSLGLTPNFKSNFDLAEDAKLQLSKDTYDDDLDNLLAQIGDQYADLFLAAKNLSDAILLSDILRVNTEITKAPLSASMIKRYDEHHQDLTLLKALVRQQLPEKYKEIFFDQSKNGYAGYIDGGASQEEFYKFIKPILEKMDGTEELLVKLNREDLLRKQRTFDNGSIPHQIHLGELHAILRRQEDFYPFLKDNREKIEKILTFRIPYYVGPLARGNSRFAWMTRKSEETITPWNFEEVVDKGASAQSFIERMTNFDKNLPNEKVLPKHSLLYEYFTVYNELTKVKYVTEGMRKPAFLSGEQKKAIVDLLFKTNRKVTVKQLKEDYFKKIECFDSVEISGVEDRFNASLGTYHDLLKIIKDKDFLDNEENEDILEDIVLTLTLFEDREMIEERLKTYAHLFDDKVMKQLKRRRYTGWGRLSRKLINGIRDKQSGKTILDFLKSDGFANRNFMQLIHDDSLTFKEDIQKAQVSGQGDSLHEHIANLAGSPAIKKGILQTVKVVDELVKVMGRHKPENIVIEMARENQTTQKGQKNSRERMKRIEEGIKELGSQILKEHPVENTQLQNEKLYLYYLQNGRDMYVDQELDINRLSDYDVDHIVPQSFLKDDSIDNKVLTRSDKARGKSDNVPSEEVVKKMKNYWRQLLNAKLITQRKFDNLTKAERGGLSELDKAGFIKRQLVETRQITKHVAQILDSRMNTKYDENDKLIREVKVITLKSKLVSDFRKDFQFYKVREINNYHHAHDAYLNAVVGTALIKKYPKLESEFVYGDYKVYDVRKMIAKSEQEIGKATAKYFFYSNIMNFFKTEITLANGEIRKRPLIETNGETGEIVWDKGRDFATVRKVLSMPQVNIVKKTEVQTGGFSKESILPKRNSDKLIARKKDWDPKKYGGFDSPTVAYSVLVVAKVEKGKSKKLKSVKELLGITIMERSSFEKNPIDFLEAKGYKEVKKDLIIKLPKYSLFELENGRKRMLASAGELQKGNELALPSKYVNFLYLASHYEKLKGSPEDNEQKQLFVEQHKHYLDEIIEQISEFSKRVILADANLDKVLSAYNKHRDKPIREQAENIIHLFTLTNLGAPAAFKYFDTTIDRKRYTSTKEVLDATLIHQSITGLYETRIDLSQLGGDGGGSSGGGPAPGGTLNIEDEHRLHETSKEPDVSLGSTWLSDFPQAWAETGGMGLAVRQAPLIIPLKATSTPVSIKQYPMSQEARLGIKPHIQRLLDQGILVPCQSPWNTPLLPVKKPGTNDYRPVQDLREVNKRVEDIHPTVPNPYNLLSGLPPSHQWYTVLDLKDAFFCLRLHPTSQPLFAFEWRDPEMGISGQLTWTRLPQGFKNSPTLFNEALHRDLADFRIQHPDLILLQYVDDLLLAATSELDCQQGTRALLQTLGNLGYRASAKKAQICQKQVKYLGYLLKEGQRWLTEARKETVMGQPTPKTPRQLREFLGTAGFCRLWIPGFAEMAAPLYPLTKPGTLFNWGPDQQKAYQEIKQALLTAPALGLPDLTKPFELFVDEKQGYAKGVLTQKLGPWRRPVAYLSKKLDPVAAGWPPCLRMVAAIAVLTKDAGKLTMGQPLVILAPHAVEALVKQPPDRWLSNARMTHYQALLLDTDRVQFGPVVALNPATLLPLPEEGLQHNCLDILAEAHGTRPDLTDQPLPDADHTWYTDGSSLLQEGQRKAGAAVTTETEVIWAKALPAGTSAQRAELIALTQALKMAEGKKLNVYTDSRYAFATAHIHGEIYRRRGWLTSEGKEIKNKDEILALLKALFLPKRLSIIHCPGHQKGHSAEARGNRMADQAARKAAITETPDTSTLLAGKRTADGSEFEKRTADGSEFESPKKKAKVE

SEQ ID NO: 7394 - protein, 2094 aa, synthetic construct; identical to SEQ ID NO: 7393

SEQ ID NO: 7395 - protein, 2088 aa, synthetic construct; identical to SEQ ID NO: 4532

SEQ ID NO: 7396 - protein, 2088 aa, synthetic construct
MPAAKRVKLDGGDKKYSIGLDIGTNSVGWAVITDEYKVPSKKFKVLGNTDRHSIKKNLIGALLFDSGETAEATRLKRTARRRYTRRKNRICYLQEIFSNEMAKVDDSFFHRLEESFLVEEDKKHERHPIFGNIVDEVAYHEKYPTIYHLRKKLVDSTDKADLRLIYLALAHMIKFRGHFLIEGDLNPDNSDVDKLFIQLVQTYNQLFEENPINASGVDAKAILSARLSKSRRLENLIAQLPGEKKNGLFGNLIALSLGLTPNFKSNFDLAEDAKLQLSKDTYDDDLDNLLAQIGDQYADLFLAAKNLSDAILLSDILRVNTEITKAPLSASMIKRYDEHHQDLTLLKALVRQQLPEKYKEIFFDQSKNGYAGYIDGGASQEEFYKFIKPILEKMDGTEELLVKLNREDLLRKQRTFDNGSIPHQIHLGELHAILRRQEDFYPFLKDNREKIEKILTFRIPYYVGPLARGNSRFAWMTRKSEETITPWNFEEVVDKGASAQSFIERMTNFDKNLPNEKVLPKHSLLYEYFTVYNELTKVKYVTEGMRKPAFLSGEQKKAIVDLLFKTNRKVTVKQLKEDYFKKIECFDSVEISGVEDRFNASLGTYHDLLKIIKDKDFLDNEENEDILEDIVLTLTLFEDREMIEERLKTYAHLFDDKVMKQLKRRRYTGWGRLSRKLINGIRDKQSGKTILDFLKSDGFANRNFMQLIHDDSLTFKEDIQKAQVSGQGDSLHEHIANLAGSPAIKKGILQTVKVVDELVKVMGRHKPENIVIEMARENQTTQKGQKNSRERMKRIEEGIKELGSQILKEHPVENTQLQNEKLYLYYLQNGRDMYVDQELDINRLSDYDVDHIVPQSFLKDDSIDNKVLTRSDKARGKSDNVPSEEVVKKMKNYWRQLLNAKLITQRKFDNLTKAERGGLSELDKAGFIKRQLVETRQITKHVAQILDSRMNTKYDENDKLIREVKVITLKSKLVSDFRKDFQFYKVREINNYHHAHDAYLNAVVGTALIKKYPKLESEFVYGDYKVYDVRKMIAKSEQEIGKATAKYFFYSNIMNFFKTEITLANGEIRKRPLIETNGETGEIVWDKGRDFATVRKVLSMPQVNIVKKTEVQTGGFSKESILPKRNSDKLIARKKDWDPKKYGGFDSPTVAYSVLVVAKVEKGKSKKLKSVKELLGITIMERSSFEKNPIDFLEAKGYKEVKKDLIIKLPKYSLFELENGRKRMLASAGELQKGNELALPSKYVNFLYLASHYEKLKGSPEDNEQKQLFVEQHKHYLDEIIEQISEFSKRVILADANLDKVLSAYNKHRDKPIREQAENIIHLFTLTNLGAPAAFKYFDTTIDRKRYTSTKEVLDATLIHQSITGLYETRIDLSQLGGDGGGSSGGGPAPGGTLQLDDEYRLYSPLVKPDQNIQFWLEQFPQAWAETAGMGLAKQVPPQVIQLKASATPVSVRQYPLSKEAQEGIRPHVQRLIQQGILVPVQSPWNTPLLPVRKPGTNDYRPVQDLREVNKRVQDIHPTVPNPYNLLCALPPQRSWYTVLDLKDAFFCLRLHPTSQPLFAFEWRDPGTGRTGQLTWTRLPQGFKNSPTIFDEALHRDLANFRIQHPQVTLLQYVDDLLLAGATKQDCLEGTKALLLELSDLGYRASAKKAQICRREVTYLGYSLRDGQRWLTEARKKTVVQIPAPTTAKQVREFLGTAGFCRLWIPGFATLAAPLYPLTKEKGEFSWAPEHQKAFDAIKKALLSAPALALPDVTKPFTLYVDERKGVARGVLTQTLGPWRRPVAYLSKKLDPVASGWPVCLKAIAAVAILVKDADKLTLGQNITVIAPHALENIVRQPPDRWMTNARMTHYQSLLLTERVTFAPPAALNPATLLPEETDEPVTHDCHQLLIEETGVRKDLTDIPLTGEVLTWFTDGSSYVVEGKRMAGAAVVDGTRTIWASSLPEGTSAQKAELMALTQALRLAEGKSINIYTDSRYAFATAHVHGAIYKQRGLLTSAGREIKNKEEILSLLEALHLPKRLAIIHCPGHQKAKDPISRGNQMADRVAKQAAQGVNLLAGKRTADGSEFEKRTADGSEFESPKKKAKVE

SEQ ID NO: 7397 - protein, 2088 aa, synthetic construct; identical to SEQ ID NO: 4532

SEQ ID NO: 7398 - protein, 2085 aa, synthetic construct
MPAAKRVKLDGGDKKYSIGLDIGTNSVGWAVITDEYKVPSKKFKVLGNTDRHSIKKNLIGALLFDSGETAEATRLKRTARRRYTRRKNRICYLQEIFSNEMAKVDDSFFHRLEESFLVEEDKKHERHPIFGNIVDEVAYHEKYPTIYHLRKKLVDSTDKADLRLIYLALAHMIKFRGHFLIEGDLNPDNSDVDKLFIQLVQTYNQLFEENPINASGVDAKAILSARLSKSRRLENLIAQLPGEKKNGLFGNLIALSLGLTPNFKSNFDLAEDAKLQLSKDTYDDDLDNLLAQIGDQYADLFLAAKNLSDAILLSDILRVNTEITKAPLSASMIKRYDEHHQDLTLLKALVRQQLPEKYKEIFFDQSKNGYAGYIDGGASQEEFYKFIKPILEKMDGTEELLVKLNREDLLRKQRTFDNGSIPHQIHLGELHAILRRQEDFYPFLKDNREKIEKILTFRIPYYVGPLARGNSRFAWMTRKSEETITPWNFEEVVDKGASAQSFIERMTNFDKNLPNEKVLPKHSLLYEYFTVYNELTKVKYVTEGMRKPAFLSGEQKKAIVDLLFKTNRKVTVKQLKEDYFKKIECFDSVEISGVEDRFNASLGTYHDLLKIIKDKDFLDNEENEDILEDIVLTLTLFEDREMIEERLKTYAHLFDDKVMKQLKRRRYTGWGRLSRKLINGIRDKQSGKTILDFLKSDGFANRNFMQLIHDDSLTFKEDIQKAQVSGQGDSLHEHIANLAGSPAIKKGILQTVKVVDELVKVMGRHKPENIVIEMARENQTTQKGQKNSRERMKRIEEGIKELGSQILKEHPVENTQLQNEKLYLYYLQNGRDMYVDQELDINRLSDYDVDHIVPQSFLKDDSIDNKVLTRSDKARGKSDNVPSEEVVKKMKNYWRQLLNAKLITQRKFDNLTKAERGGLSELDKAGFIKRQLVETRQITKHVAQILDSRMNTKYDENDKLIREVKVITLKSKLVSDFRKDFQFYKVREINNYHHAHDAYLNAVVGTALIKKYPKLESEFVYGDYKVYDVRKMIAKSEQEIGKATAKYFFYSNIMNFFKTEITLANGEIRKRPLIETNGETGEIVWDKGRDFATVRKVLSMPQVNIVKKTEVQTGGFSKESILPKRNSDKLIARKKDWDPKKYGGFDSPTVAYSVLVVAKVEKGKSKKLKSVKELLGITIMERSSFEKNPIDFLEAKGYKEVKKDLIIKLPKYSLFELENGRKRMLASAGELQKGNELALPSKYVNFLYLASHYEKLKGSPEDNEQKQLFVEQHKHYLDEIIEQISEFSKRVILADANLDKVLSAYNKHRDKPIREQAENIIHLFTLTNLGAPAAFKYFDTTIDRKRYTSTKEVLDATLIHQSITGLYETRIDLSQLGGDGGGSSGGGPAPGGIPWLMKKPLQLTTLVPLQEYEERLLKQTMLTGSYKEKLQSLFLKYDALWQHWENQVGHRRIKPHHIATGTVNPRPQKQYPINPKAKASIQTVINDLLKQGVLIQQNSIMNTPVYPVPKPDGKWRMVLDYREVNKTIPLIAAQNQHSAGILSSIFRGKYKTTLDLSNGFWAHSITPESYWLTAFTWLGQQYCWTRLPQGFLNSPALFNADVVDLLKEVPNVQVYVDDIYISHDDPREHLEQLEKVFSLLLNAGYVVSLKKSEIAQHEVEFLGFNITKEGRGLTETFKQKLLNITPPRDLKQLQSILGKLNFARNFIPNFSELVKPLYNIIATAPGKYITWTTDNSQQLQNIISMLNSAENLEERNPEVRLIMKVNTSPSAGYIRFYNEFAKRPIMYLNYVYTKAEVKFTNTEKLLTTIHKGLIKALDLGMGQEILVYSPIVSMTKIQKTPLPERKALPIRWITWMSYLEDPRIQFHYDKTLPELQQVPTVTDDIIAKIKHPSEFSMVFYTDGSAIKHPNVNKSHNAGMGIAQVQFKPEFTVINTWSIPLGDHTAQLAEVAAVEFACKKALKIDGPVLIVTDSFYVAESVNKELPYWQSNGFFNNKKKPLKHVSKWKSIADCIQLKPDIIIIHEKGHQPTASTFHTEGNNLADKLATQGSYVVNAGKRTADGSEFEKRTADGSEFESPKKKAKVE

SEQ ID NO: 7399 - protein, 2174 aa, synthetic construct
MPAAKRVKLDGGDKKYSIGLDIGTNSVGWAVITDEYKVPSKKFKVLGNTDRHSIKKNLIGALLFDSGETAEATRLKRTARRRYTRRKNRICYLQEIFSNEMAKVDDSFFHRLEESFLVEEDKKHERHPIFGNIVDEVAYHEKYPTIYHLRKKLVDSTDKADLRLIYLALAHMIKFRGHFLIEGDLNPDNSDVDKLFIQLVQTYNQLFEENPINASGVDAKAILSARLSKSRRLENLIAQLPGEKKNGLFGNLIALSLGLTPNFKSNFDLAEDAKLQLSKDTYDDDLDNLLAQIGDQYADLFLAAKNLSDAILLSDILRVNTEITKAPLSASMIKRYDEHHQDLTLLKALVRQQLPEKYKEIFFDQSKNGYAGYIDGGASQEEFYKFIKPILEKMDGTEELLVKLNREDLLRKQRTFDNGSIPHQIHLGELHAILRRQEDFYPFLKDNREKIEKILTFRIPYYVGPLARGNSRFAWMTRKSEETITPWNFEEVVDKGASAQSFIERMTNFDKNLPNEKVLPKHSLLYEYFTVYNELTKVKYVTEGMRKPAFLSGEQKKAIVDLLFKTNRKVTVKQLKEDYFKKIECFDSVEISGVEDRFNASLGTYHDLLKIIKDKDFLDNEENEDILEDIVLTLTLFEDREMIEERLKTYAHLFDDKVMKQLKRRRYTGWGRLSRKLINGIRDKQSGKTILDFLKSDGFANRNFMQLIHDDSLTFKEDIQKAQVSGQGDSLHEHIANLAGSPAIKKGILQTVKVVDELVKVMGRHKPENIVIEMARENQTTQKGQKNSRERMKRIEEGIKELGSQILKEHPVENTQLQNEKLYLYYLQNGRDMYVDQELDINRLSDYDVDHIVPQSFLKDDSIDNKVLTRSDKARGKSDNVPSEEVVKKMKNYWRQLLNAKLITQRKFDNLTKAERGGLSELDKAGFIKRQLVETRQITKHVAQILDSRMNTKYDENDKLIREVKVITLKSKLVSDFRKDFQFYKVREINNYHHAHDAYLNAVVGTALIKKYPKLESEFVYGDYKVYDVRKMIAKSEQEIGKATAKYFFYSNIMNFFKTEITLANGEIRKRPLIETNGETGEIVWDKGRDFATVRKVLSMPQVNIVKKTEVQTGGFSKESILPKRNSDKLIARKKDWDPKKYGGFDSPTVAYSVLVVAKVEKGKSKKLKSVKELLGITIMERSSFEKNPIDFLEAKGYKEVKKDLIIKLPKYSLFELENGRKRMLASAGELQKGNELALPSKYVNFLYLASHYEKLKGSPEDNEQKQLFVEQHKHYLDEIIEQISEFSKRVILADANLDKVLSAYNKHRDKPIREQAENIIHLFTLTNLGAPAAFKYFDTTIDRKRYTSTKEVLDATLIHQSITGLYETRIDLSQLGGDGGGSSGGGPAPGGMDPLQLLQPLEAEIKGTKLKAHWNSGATITCVPQAFLEEEVPIKNIWIKTIHGEKEQPVYYLTFKIQGRKVEAEVISSPYDYILVSPSDIPWLMKKPLQLTTLVPLQEYEERLLKQTMLTGSYKEKLQSLFLKYDALWQHWENQVGHRRIKPHHIATGTVNPRPQKQYPINPKAKASIQTVINDLLKQGVLIQQNSIMNTPVYPVPKPDGKWRMVLDYREVNKTIPLIAAQNQHSAGILSSIFRGKYKTTLDLSNGFWAHSITPESYWLTAFTWLGQQYCWTRLPQGFLNSPALFNADVVDLLKEVPNVQVYVDDIYISHDDPREHLEQLEKVFSLLLNAGYVVSLKKSEIAQHEVEFLGFNITKEGRGLTETFKQKLLNITPPRDLKQLQSILGLLNFARNFIPNFSELVKPLYNIIATAPGKYITWTTDNSQQLQNIISMLNSAENLEERNPEVRLIMKVNTSPSAGYIRFYNEFAKRPIMYLNYVYTKAEVKFTNTEKLLTTIHKGLIKALDLGMGQEILVYSPIVSMTKIQKTPLPERKALPIRWITWMSYLEDPRIQFHYDKTLPELQQVPTVTDDIIAKIKHPSEFSMVFYTDGSAIKHPNVNKSHNAGMGIAQVQFKPEFTVINTWSIPLGDHTAQLAEVAAVEFACKKALKIDGPVLIVTDSFYVAESVNKELPYWQSNGFFNNKKKPLKHVSKWKSIADCIQLKPDIIIIHEKGHQPTASTFHTEGNNLADKLATQGSYVVNAGKRTADGSEFEKRTADGSEFESPKKKAKVE

SEQ ID NO: 7400 - protein, 2092 aa, synthetic construct
MPAAKRVKLDGGDKKYSIGLDIGTNSVGWAVITDEYKVPSKKFKVLGNTDRHSIKKNLIGALLFDSGETAEATRLKRTARRRYTRRKNRICYLQEIFSNEMAKVDDSFFHRLEESFLVEEDKKHERHPIFGNIVDEVAYHEKYPTIYHLRKKLVDSTDKADLRLIYLALAHMIKFRGHFLIEGDLNPDNSDVDKLFIQLVQTYNQLFEENPINASGVDAKAILSARLSKSRRLENLIAQLPGEKKNGLFGNLIALSLGLTPNFKSNFDLAEDAKLQLSKDTYDDDLDNLLAQIGDQYADLFLAAKNLSDAILLSDILRVNTEITKAPLSASMIKRYDEHHQDLTLLKALVRQQLPEKYKEIFFDQSKNGYAGYIDGGASQEEFYKFIKPILEKMDGTEELLVKLNREDLLRKQRTFDNGSIPHQIHLGELHAILRRQEDFYPFLKDNREKIEKILTFRIPYYVGPLARGNSRFAWMTRKSEETITPWNFEEVVDKGASAQSFIERMTNFDKNLPNEKVLPKHSLLYEYFTVYNELTKVKYVTEGMRKPAFLSGEQKKAIVDLLFKTNRKVTVKQLKEDYFKKIECFDSVEISGVEDRFNASLGTYHDLLKIIKDKDFLDNEENEDILEDIVLTLTLFEDREMIEERLKTYAHLFDDKVMKQLKRRRYTGWGRLSRKLINGIRDKQSGKTILDFLKSDGFANRNFMQLIHDDSLTFKEDIQKAQVSGQGDSLHEHIANLAGSPAIKKGILQTVKVVDELVKVMGRHKPENIVIEMARENQTTQKGQKNSRERMKRIEEGIKELGSQILKEHPVENTQLQNEKLYLYYLQNGRDMYVDQELDINRLSDYDVDHIVPQSFLKDDSIDNKVLTRSDKARGKSDNVPSEEVVKKMKNYWRQLLNAKLITQRKFDNLTKAERGGLSELDKAGFIKRQLVETRQITKHVAQILDSRMNTKYDENDKLIREVKVITLKSKLVSDFRKDFQFYKVREINNYHHAHDAYLNAVVGTALIKKYPKLESEFVYGDYKVYDVRKMIAKSEQEIGKATAKYFFYSNIMNFFKTEITLANGEIRKRPLIETNGETGEIVWDKGRDFATVRKVLSMPQVNIVKKTEVQTGGFSKESILPKRNSDKLIARKKDWDPKKYGGFDSPTVAYSVLVVAKVEKGKSKKLKSVKELLGITIMERSSFEKNPIDFLEAKGYKEVKKDLIIKLPKYSLFELENGRKRMLASAGELQKGNELALPSKYVNFLYLASHYEKLKGSPEDNEQKQLFVEQHKHYLDEIIEQISEFSKRVILADANLDKVLSAYNKHRDKPIREQAENIIHLFTLTNLGAPAAFKYFDTTIDRKRYTSTKEVLDATLIHQSITGLYETRIDLSQLGGDGGGSSGGGPAPGGVLNLEEEYRLHEKPVPSSIDPSWLQLFPTVWAERAGMGLANQVPPVVVELRSGASPVAVRQYPMSKEAREGIRPHIQRFLDLGVLVPCQSPWNTPLLPVKKPGTNDYRPVQDLREINKRVQDIHPTVPNPYNLLSSLPPSHTWYSVLDLKDAFFCLKLHPNSQPLFAFEWRDPEKGNTGQLTWTRLPQGFKNSPTLFNEALHRDLAPFRALNPQVVLLQYVDDLLVAAPTYRDCKEGTQKLLQELSKLGYRVSAKKAQLCQKEVTYLGYLLKEGKRWLTPARKATVMKIPPPTTPRQVREFLGKAGFCRLFIPGFASLAAPLYPLTKPSIPFIWTEEHQKAFDRIKEALLSAPALALPDLTKPFTLYVDERAGVARGVLTQTLGPWRRPVAYLSKKLDPVASGWPTCLKAVAAVALLLKDADKLTLGQNVTVIASHSLESIVRQPPDRWMTNARMTHYQSLLLNERVSFAPPAVLNPATLLPVESEATPVHRCSEILAEETGTRRDLKDQPLPGVPAWYTDGSSFIAEGKRRAGAAIVDGKRTVWASSLPEGTSAQKAELVALTQALRLAEGKDINIYTDSRYAFATAHIHGAIYKQRGWLTSAGKDIKNKEEILALLEAIHLPKRVAIIHCPGHQKGNDPVATGNRRADEAAKQAALSTRVLAETTKPAGKRTADGSEFEKRTADGSEFESPKKKAKVE

SEQ ID NO: 7401 - protein, 2094 aa, synthetic construct
MPAAKRVKLDGGDKKYSIGLDIGTNSVGWAVITDEYKVPSKKFKVLGNTDRHSIKKNLIGALLFDSGETAEATRLKRTARRRYTRRKNRICYLQEIFSNEMAKVDDSFFHRLEESFLVEEDKKHERHPIFGNIVDEVAYHEKYPTIYHLRKKLVDSTDKADLRLIYLALAHMIKFRGHFLIEGDLNPDNSDVDKLFIQLVQTYNQLFEENPINASGVDAKAILSARLSKSRRLENLIAQLPGEKKNGLFGNLIALSLGLTPNFKSNFDLAEDAKLQLSKDTYDDDLDNLLAQIGDQYADLFLAAKNLSDAILLSDILRVNTEITKAPLSASMIKRYDEHHQDLTLLKALVRQQLPEKYKEIFFDQSKNGYAGYIDGGASQEEFYKFIKPILEKMDGTEELLVKLNREDLLRKQRTFDNGSIPHQIHLGELHAILRRQEDFYPFLKDNREKIEKILTFRIPYYVGPLARGNSRFAWMTRKSEETITPWNFEEVVDKGASAQSFIERMTNFDKNLPNEKVLPKHSLLYEYFTVYNELTKVKYVTEGMRKPAFLSGEQKKAIVDLLFKTNRKVTVKQLKEDYFKKIECFDSVEISGVEDRFNASLGTYHDLLKIIKDKDFLDNEENEDILEDIVLTLTLFEDREMIEERLKTYAHLFDDKVMKQLKRRRYTGWGRLSRKLINGIRDKQSGKTILDFLKSDGFANRNFMQLIHDDSLTFKEDIQKAQVSGQGDSLHEHIANLAGSPAIKKGILQTVKVVDELVKVMGRHKPENIVIEMARENQTTQKGQKNSRERMKRIEEGIKELGSQILKEHPVENTQLQNEKLYLYYLQNGRDMYVDQELDINRLSDYDVDHIVPQSFLKDDSIDNKVLTRSDKARGKSDNVPSEEVVKKMKNYWRQLLNAKLITQRKFDNLTKAERGGLSELDKAGFIKRQLVETRQITKHVAQILDSRMNTKYDENDKLIREVKVITLKSKLVSDFRKDFQFYKVREINNYHHAHDAYLNAVVGTALIKKYPKLESEFVYGDYKVYDVRKMIAKSEQEIGKATAKYFFYSNIMNFFKTEITLANGEIRKRPLIETNGETGEIVWDKGRDFATVRKVLSMPQVNIVKKTEVQTGGFSKESILPKRNSDKLIARKKDWDPKKYGGFDSPTVAYSVLVVAKVEKGKSKKLKSVKELLGITIMERSSFEKNPIDFLEAKGYKEVKKDLIIKLPKYSLFELENGRKRMLASAGELQKGNELALPSKYVNFLYLASHYEKLKGSPEDNEQKQLFVEQHKHYLDEIIEQISEFSKRVILADANLDKVLSAYNKHRDKPIREQAENIIHLFTLTNLGAPAAFKYFDTTIDRKRYTSTKEVLDATLIHQSITGLYETRIDLSQLGGDGGGSSGGGPAPGGTLNIEDEYRLHETSKEPDVPLGSTWLSDFPQAWAETGGMGLAVRQAPLIIPLKATSTPVSIKQYPMSQEARLGIKPHIQRLLDQGILVPCQSPWNTPLLPVKKPGTNDYRPVQDLREVNKRVEDIHPTVPNPYNLLSGLPPSHQWYTVLDLKDAFFCLRLHPTSQPLFAFEWRDPEMGISGQLTWTRLPQGFKNSPTLFNEALHRDLADFRIQHPDLILLQYVDDLLLAATSEQDCQRGTRALLQTLGNLGYRASAKKAQICQKQVKYLGYLLKEGQRWLTEARKETVMGQPTPKTPRQLREFLGTAGFCRLWIPGFAEMAAPLYPLTKPGTLFNWGPDQQKAYQEIKQALLTAPALGLPDLTKPFELFVDEKQGYAKGVLTQKLGPWRRPVAYLSKKLDPVAAGWPPCLRMVAAIAVLTKDAGKLTMGQPLVILAPHAVEALVKQPPDRWLSNARMTHYQAMLLDTDRVQFGPVVALNPATLLPLPEKEAPHDCLEILAETHGTRPDLTDQPIPDADYTWYTDGSSFLQEGQRRAGAAVTTETEVIWARALPAGTSAQRAELIALTQALKMAEGKKLNVYTDSRYAFATAHVHGEIYRRRGWLTSEGREIKNKNEILALLKALFLPKRLSIIHCPGHQKGNSAEARGNRMADQAAREAAMKAVLETSTLLAGKRTADGSEFEKRTADGSEFESPKKKAKVE

SEQ ID NO: 7402 - protein, 2096 aa, synthetic construct
MPAAKRVKLDGGDKKYSIGLDIGTNSVGWAVITDEYKVPSKKFKVLGNTDRHSIKKNLIGALLFDSGETAEATRLKRTARRRYTRRKNRICYLQEIFSNEMAKVDDSFFHRLEESFLVEEDKKHERHPIFGNIVDEVAYHEKYPTIYHLRKKLVDSTDKADLRLIYLALAHMIKFRGHFLIEGDLNPDNSDVDKLFIQLVQTYNQLFEENPINASGVDAKAILSARLSKSRRLENLIAQLPGEKKNGLFGNLIALSLGLTPNFKSNFDLAEDAKLQLSKDTYDDDLDNLLAQIGDQYADLFLAAKNLSDAILLSDILRVNTEITKAPLSASMIKRYDEHHQDLTLLKALVRQQLPEKYKEIFFDQSKNGYAGYIDGGASQEEFYKFIKPILEKMDGTEELLVKLNREDLLRKQRTFDNGSIPHQIHLGELHAILRRQEDFYPFLKDNREKIEKILTFRIPYYVGPLARGNSRFAWMTRKSEETITPWNFEEVVDKGASAQSFIERMTNFDKNLPNEKVLPKHSLLYEYFTVYNELTKVKYVTEGMRKPAFLSGEQKKAIVDLLFKTNRKVTVKQLKEDYFKKIECFDSVEISGVEDRFNASLGTYHDLLKIIKDKDFLDNEENEDILEDIVLTLTLFEDREMIEERLKTYAHLFDDKVMKQLKRRRYTGWGRLSRKLINGIRDKQSGKTILDFLKSDGFANRNFMQLIHDDSLTFKEDIQKAQVSGQGDSLHEHIANLAGSPAIKKGILQTVKVVDELVKVMGRHKPENIVIEMARENQTTQKGQKNSRERMKRIEEGIKELGSQILKEHPVENTQLQNEKLYLYYLQNGRDMYVDQELDINRLSDYDVDHIVPQSFLKDDSIDNKVLTRSDKARGKSDNVPSEEVVKKMKNYWRQLLNAKLITQRKFDNLTKAERGGLSELDKAGFIKRQLVETRQITKHVAQILDSRMNTKYDENDKLIREVKVITLKSKLVSDFRKDFQFYKVREINNYHHAHDAYLNAVVGTALIKKYPKLESEFVYGDYKVYDVRKMIAKSEQEIGKATAKYFFYSNIMNFFKTEITLANGEIRKRPLIETNGETGEIVWDKGRDFATVRKVLSMPQVNIVKKTEVQTGGFSKESILPKRNSDKLIARKKDWDPKKYGGFDSPTVAYSVLVVAKVEKGKSKKLKSVKELLGITIMERSSFEKNPIDFLEAKGYKEVKKDLIIKLPKYSLFELENGRKRMLASAGELQKGNELALPSKYVNFLYLASHYEKLKGSPEDNEQKQLFVEQHKHYLDEIIEQISEFSKRVILADANLDKVLSAYNKHRDKPIREQAENIIHLFTLTNLGAPAAFKYFDTTIDRKRYTSTKEVLDATLIHQSITGLYETRIDLSQLGGDGGGSSPAPGGGGGTAPLEEEYRLFLEAPIQNVTLLEQWKREIPKVWAEINPPGLASTQAPIHVQLLSTALPVRVRQYPITLEAKRSLRETIRKFRAAGILRPVHSPWNTPLLPVRKSGTSEYRMVQDLREVNKRVETIHPTVPNPYTLLSLLPPDRIWYSVLDLKDAFFCIPLAPESQLIFAFEWADAEEGESGQLTWTRLPQGFKNSPTLFNEALNRDLQGFRLDHPSVSLLQYVDDLLIAADTQAACLSATRDLLMTLAELGYRVSGKKAQLCQEEVTYLGFKIHKGSRSLSNSRTQAILQIPVPKTKRQVREFLGTIGYCRLWIPGFAELAQPLYAATRPGNDPLVWGEKEEEAFQSLKLALTQPPALALPSLDKPFQLFVEETSGAAKGVLTQALGPWKRPVAYLSKRLDPVAAGWPRCLRAIAAAALLTREASKLTFGQDIEITSSHNLESLLRSPPDKWLTNARITQYQVLLLDPPRVRFKQTAALNPATLLPETDDTLPIHHCLDTLDSLTSTRPDLTDQPLAQAEATLFTDGSSYIRDGKRYAGAAVVTLDSVIWAEPLPIGTSAQKAELIALTKALEWSKDKSVNIYTDSRYAFATLHVHGMIYRERGWLTAGGKAIKNAPEILALLTAVWLPKRVAVMHCKGHQKDDAPTSTGNRRADEVAREVAIRPLSTQATISAGKRTADGSEFEKRTADGSEFESPKKKAKVE

SEQ ID NO: 7403 - protein, 2096 aa, synthetic construct
MPAAKRVKLDGGDKKYSIGLDIGTNSVGWAVITDEYKVPSKKFKVLGNTDRHSIKKNLIGALLFDSGETAEATRLKRTARRRYTRRKNRICYLQEIFSNEMAKVDDSFFHRLEESFLVEEDKKHERHPIFGNIVDEVAYHEKYPTIYHLRKKLVDSTDKADLRLIYLALAHMIKFRGHFLIEGDLNPDNSDVDKLFIQLVQTYNQLFEENPINASGVDAKAILSARLSKSRRLENLIAQLPGEKKNGLFGNLIALSLGLTPNFKSNFDLAEDAKLQLSKDTYDDDLDNLLAQIGDQYADLFLAAKNLSDAILLSDILRVNTEITKAPLSASMIKRYDEHHQDLTLLKALVRQQLPEKYKEIFFDQSKNGYAGYIDGGASQEEFYKFIKPILEKMDGTEELLVKLNREDLLRKQRTFDNGSIPHQIHLGELHAILRRQEDFYPFLKDNREKIEKILTFRIPYYVGPLARGNSRFAWMTRKSEETITPWNFEEVVDKGASAQSFIERMTNFDKNLPNEKVLPKHSLLYEYFTVYNELTKVKYVTEGMRKPAFLSGEQKKAIVDLLFKTNRKVTVKQLKEDYFKKIECFDSVEISGVEDRFNASLGTYHDLLKIIKDKDFLDNEENEDILEDIVLTLTLFEDREMIEERLKTYAHLFDDKVMKQLKRRRYTGWGRLSRKLINGIRDKQSGKTILDFLKSDGFANRNFMQLIHDDSLTFKEDIQKAQVSGQGDSLHEHIANLAGSPAIKKGILQTVKVVDELVKVMGRHKPENIVIEMARENQTTQKGQKNSRERMKRIEEGIKELGSQILKEHPVENTQLQNEKLYLYYLQNGRDMYVDQELDINRLSDYDVDHIVPQSFLKDDSIDNKVLTRSDKARGKSDNVPSEEVVKKMKNYWRQLLNAKLITQRKFDNLTKAERGGLSELDKAGFIKRQLVETRQITKHVAQILDSRMNTKYDENDKLIREVKVITLKSKLVSDFRKDFQFYKVREINNYHHAHDAYLNAVVGTALIKKYPKLESEFVYGDYKVYDVRKMIAKSEQEIGKATAKYFFYSNIMNFFKTEITLANGEIRKRPLIETNGETGEIVWDKGRDFATVRKVLSMPQVNIVKKTEVQTGGFSKESILPKRNSDKLIARKKDWDPKKYGGFDSPTVAYSVLVVAKVEKGKSKKLKSVKELLGITIMERSSFEKNPIDFLEAKGYKEVKKDLIIKLPKYSLFELENGRKRMLASAGELQKGNELALPSKYVNFLYLASHYEKLKGSPEDNEQKQLFVEQHKHYLDEIIEQISEFSKRVILADANLDKVLSAYNKHRDKPIREQAENIIHLFTLTNLGAPAAFKYFDTTIDRKRYTSTKEVLDATLIHQSITGLYETRIDLSQLGGDGGGSSPAPGGGGGTAPLEEEYRLFLEAPIQNVTLLEQWKREIPKVWAEINPPGLASTQAPIHVQLLSTALPVRVRQYPITLEAKRSLRETIRKFRAAGILRPVHSPWNTPLLPVRKSGTSEYRMVQDLREVNKRVETIHPTVPNPYTLLSLLPPDRIWYSVLDLKDAFFCIPLAPESQLIFAFEWADAEEGESGQLTWTRLPQGFKNSPTLFNEALNRDLQGFRLDHPSVSLLQYVDDLLIAADTQAACLSATRDLLMTLAELGYRVSGKKAQLCQEEVTYLGFKIHKGSRSLSNSRTQAILQIPVPKTKRQVREFLGKIGYCRLFIPGFAELAQPLYAATRPGNDPLVWGEKEEEAFQSLKLALTQPPALALPSLDKPFQLFVEETSGAAKGVLTQALGPWKRPVAYLSKRLDPVAAGWPRCLRAIAAAALLTREASKLTFGQDIEITSSHNLESLLRSPPDKWLTNARITQYQVLLLDPPRVRFKQTAALNPATLLPETDDTLPIHHCLDTLDSLTSTRPDLTDQPLAQAEATLFTDGSSYIRDGKRYAGAAVVTLDSVIWAEPLPIGTSAQKAELIALTKALEWSKDKSVNIYTDSRYAFATLHVHGMIYRERGWLTAGGKAIKNAPEILALLTAVWLPKRVAVMHCKGHQKDDAPTSTGNRRADEVAREVAIRPLSTQATISAGKRTADGSEFEKRTADGSEFESPKKKAKVE

SEQ ID NO: 7404 - protein, 2092 aa, synthetic construct
MPAAKRVKLDGGDKKYSIGLDIGTNSVGWAVITDEYKVPSKKFKVLGNTDRHSIKKNLIGALLFDSGETAEATRLKRTARRRYTRRKNRICYLQEIFSNEMAKVDDSFFHRLEESFLVEEDKKHERHPIFGNIVDEVAYHEKYPTIYHLRKKLVDSTDKADLRLIYLALAHMIKFRGHFLIEGDLNPDNSDVDKLFIQLVQTYNQLFEENPINASGVDAKAILSARLSKSRRLENLIAQLPGEKKNGLFGNLIALSLGLTPNFKSNFDLAEDAKLQLSKDTYDDDLDNLLAQIGDQYADLFLAAKNLSDAILLSDILRVNTEITKAPLSASMIKRYDEHHQDLTLLKALVRQQLPEKYKEIFFDQSKNGYAGYIDGGASQEEFYKFIKPILEKMDGTEELLVKLNREDLLRKQRTFDNGSIPHQIHLGELHAILRRQEDFYPFLKDNREKIEKILTFRIPYYVGPLARGNSRFAWMTRKSEETITPWNFEEVVDKGASAQSFIERMTNFDKNLPNEKVLPKHSLLYEYFTVYNELTKVKYVTEGMRKPAFLSGEQKKAIVDLLFKTNRKVTVKQLKEDYFKKIECFDSVEISGVEDRFNASLGTYHDLLKIIKDKDFLDNEENEDILEDIVLTLTLFEDREMIEERLKTYAHLFDDKVMKQLKRRRYTGWGRLSRKLINGIRDKQSGKTILDFLKSDGFANRNFMQLIHDDSLTFKEDIQKAQVSGQGDSLHEHIANLAGSPAIKKGILQTVKVVDELVKVMGRHKPENIVIEMARENQTTQKGQKNSRERMKRIEEGIKELGSQILKEHPVENTQLQNEKLYLYYLQNGRDMYVDQELDINRLSDYDVDHIVPQSFLKDDSIDNKVLTRSDKARGKSDNVPSEEVVKKMKNYWRQLLNAKLITQRKFDNLTKAERGGLSELDKAGFIKRQLVETRQITKHVAQILDSRMNTKYDENDKLIREVKVITLKSKLVSDFRKDFQFYKVREINNYHHAHDAYLNAVVGTALIKKYPKLESEFVYGDYKVYDVRKMIAKSEQEIGKATAKYFFYSNIMNFFKTEITLANGEIRKRPLIETNGETGEIVWDKGRDFATVRKVLSMPQVNIVKKTEVQTGGFSKESILPKRNSDKLIARKKDWDPKKYGGFDSPTVAYSVLVVAKVEKGKSKKLKSVKELLGITIMERSSFEKNPIDFLEAKGYKEVKKDLIIKLPKYSLFELENGRKRMLASAGELQKGNELALPSKYVNFLYLASHYEKLKGSPEDNEQKQLFVEQHKHYLDEIIEQISEFSKRVILADANLDKVLSAYNKHRDKPIREQAENIIHLFTLTNLGAPAAFKYFDTTIDRKRYTSTKEVLDATLIHQSITGLYETRIDLSQLGGDGGGSSPAPGGGGGVLNLEEEYRLHEKPVPSSIDPSWLQLFPTVWAERAGMGLANQVPPVVVELRSGASPVAVRQYPMSKEAREGIRPHIQKFLDLGVLVPCRSPWNTPLLPVKKPGTNDYRPVQDLREINKRVQDIHPTVPNPYNLLSSLPPSYTWYSVLDLKDAFFCLRLHPNSQPLFAFEWKDPEKGNTGQLTWTRLPQGFKNSPTLFNEALHRDLAPFRALNPQVVLLQYVDDLLVAAPTYEDCKKGTQKLLQELSKLGYRVSAKKAQLCQREVTYLGYLLKEGKRWLTPARKATVMKIPVPTTPRQVREFLGKAGFCRLFIPGFASLAAPLYPLTKPSIPFIWTEEHQQAFDHIKKALLSAPALALPDLTKPFTLYIDERAGVARGVLTQTLGPWRRPVAYLSKKLDPVASGWPTCLKAVAAVALLLKDADKLTLGQNVTVIASHSLESIVRQPPDRWMTNARMTHYQSLLLNERVSFAPPAVLNPATLLPVESEATPVHRCSEILAEETGTRRDLEDQPLPGVPTWYTDGSSFITEGKRRAGAPIVDGKRTVWASSLPEGTSAQKAELVALTQALRLAEGKNINIYTDSRYAFATAHIHGAIYKQRGWLTSAGKDIKNKEEILALLEAIHLPRRVAIIHCPGHQRGSNPVATGNRRADEAAKQAALSTRVLAGTTKPAGKRTADGSEFEKRTADGSEFESPKKKAKVE

SEQ ID NO: 7405 - protein, 2125 aa, synthetic construct
MPAAKRVKLDGGDKKYSIGLDIGTNSVGWAVITDEYKVPSKKFKVLGNTDRHSIKKNLIGALLFDSGETAEATRLKRTARRRYTRRKNRICYLQEIFSNEMAKVDDSFFHRLEESFLVEEDKKHERHPIFGNIVDEVAYHEKYPTIYHLRKKLVDSTDKADLRLIYLALAHMIKFRGHFLIEGDLNPDNSDVDKLFIQLVQTYNQLFEENPINASGVDAKAILSARLSKSRRLENLIAQLPGEKKNGLFGNLIALSLGLTPNFKSNFDLAEDAKLQLSKDTYDDDLDNLLAQIGDQYADLFLAAKNLSDAILLSDILRVNTEITKAPLSASMIKRYDEHHQDLTLLKALVRQQLPEKYKEIFFDQSKNGYAGYIDGGASQEEFYKFIKPILEKMDGTEELLVKLNREDLLRKQRTFDNGSIPHQIHLGELHAILRRQEDFYPFLKDNREKIEKILTFRIPYYVGPLARGNSRFAWMTRKSEETITPWNFEEVVDKGASAQSFIERMTNFDKNLPNEKVLPKHSLLYEYFTVYNELTKVKYVTEGMRKPAFLSGEQKKAIVDLLFKTNRKVTVKQLKEDYFKKIECFDSVEISGVEDRFNASLGTYHDLLKIIKDKDFLDNEENEDILEDIVLTLTLFEDREMIEERLKTYAHLFDDKVMKQLKRRRYTGWGRLSRKLINGIRDKQSGKTILDFLKSDGFANRNFMQLIHDDSLTFKEDIQKAQVSGQGDSLHEHIANLAGSPAIKKGILQTVKVVDELVKVMGRHKPENIVIEMARENQTTQKGQKNSRERMKRIEEGIKELGSQILKEHPVENTQLQNEKLYLYYLQNGRDMYVDQELDINRLSDYDVDHIVPQSFLKDDSIDNKVLTRSDKARGKSDNVPSEEVVKKMKNYWRQLLNAKLITQRKFDNLTKAERGGLSELDKAGFIKRQLVETRQITKHVAQILDSRMNTKYDENDKLIREVKVITLKSKLVSDFRKDFQFYKVREINNYHHAHDAYLNAVVGTALIKKYPKLESEFVYGDYKVYDVRKMIAKSEQEIGKATAKYFFYSNIMNFFKTEITLANGEIRKRPLIETNGETGEIVWDKGRDFATVRKVLSMPQVNIVKKTEVQTGGFSKESILPKRNSDKLIARKKDWDPKKYGGFDSPTVAYSVLVVAKVEKGKSKKLKSVKELLGITIMERSSFEKNPIDFLEAKGYKEVKKDLIIKLPKYSLFELENGRKRMLASAGELQKGNELALPSKYVNFLYLASHYEKLKGSPEDNEQKQLFVEQHKHYLDEIIEQISEFSKRVILADANLDKVLSAYNKHRDKPIREQAENIIHLFTLTNLGAPAAFKYFDTTIDRKRYTSTKEVLDATLIHQSITGLYETRIDLSQLGGDGGGSSPAPGGGGGLLGRDLLTKLKAQIQFSTEGPQVTWEDRPAMCLVLNLEEEYRLHEKPVPPSIDPSWLQLFPMVWAEKAGMGLANQVPPVVVELKSDASPVAVRQYPMSKEAREGIRPHIQRFLDLGILVPCQSPWNTPLLPVKKPGTNDYRPVQDLREVNKRVQDIHPTVPNPYNLLSSLPPSHTWYSVLDLKDAFFCLKLHPNSQPLFAFEWRDPEKGNTGQLTWTRLPQGFKNSPTLFDEALHRDLASFRALNPQVVMLQYVDDLLVAAPTYRDCKEGTRRLLQELSKLGYRVSAKKAQLCREEVTYLGYLLKGGKRWLTPARKATVMKIPTPTTPRQVREFLGTAGFCRLWIPGFASLAAPLYPLTREKVPFTWTEAHQEAFGRIKEALLSAPALALPDLTKPFALYVDEKEGVARGVLTQTLGPWRRPVAYLSKKLDPVASGWPTCLKAIAAVALLLKDADKLTLGQNVLVIAPHNLESIVRQPPDRWMTNARMTHYQSLLLNERVSFAPPAILNPATLLPVESDDTPIHICSEILAEETGTRPDLRDQPLPGVPAWYTDGSSFIMDGRRQAGAAIVDNKRTVWASNLPEGTSAQKAELIALTQALRLAEGKSINIYTDSRYAFATAHVHGAIYKQRGLLTSAGKDIKNKEEILALLEAIHLPKRVAIIHCPGHQRGTDPVATGNRKADEAAKQAAQSTRILTETTKNAGKRTADGSEFEKRTADGSEFESPKKKAKVE

SEQ ID NO: 7406 - protein, 2216 aa, synthetic construct
MPAAKRVKLDGGDKKYSIGLDIGTNSVGWAVITDEYKVPSKKFKVLGNTDRHSIKKNLIGALLFDSGETAEATRLKRTARRRYTRRKNRICYLQEIFSNEMAKVDDSFFHRLEESFLVEEDKKHERHPIFGNIVDEVAYHEKYPTIYHLRKKLVDSTDKADLRLIYLALAHMIKFRGHFLIEGDLNPDNSDVDKLFIQLVQTYNQLFEENPINASGVDAKAILSARLSKSRRLENLIAQLPGEKKNGLFGNLIALSLGLTPNFKSNFDLAEDAKLQLSKDTYDDDLDNLLAQIGDQYADLFLAAKNLSDAILLSDILRVNTEITKAPLSASMIKRYDEHHQDLTLLKALVRQQLPEKYKEIFFDQSKNGYAGYIDGGASQEEFYKFIKPILEKMDGTEELLVKLNREDLLRKQRTFDNGSIPHQIHLGELHAILRRQEDFYPFLKDNREKIEKILTFRIPYYVGPLARGNSRFAWMTRKSEETITPWNFEEVVDKGASAQSFIERMTNFDKNLPNEKVLPKHSLLYEYFTVYNELTKVKYVTEGMRKPAFLSGEQKKAIVDLLFKTNRKVTVKQLKEDYFKKIECFDSVEISGVEDRFNASLGTYHDLLKIIKDKDFLDNEENEDILEDIVLTLTLFEDREMIEERLKTYAHLFDDKVMKQLKRRRYTGWGRLSRKLINGIRDKQSGKTILDFLKSDGFANRNFMQLIHDDSLTFKEDIQKAQVSGQGDSLHEHIANLAGSPAIKKGILQTVKVVDELVKVMGRHKPENIVIEMARENQTTQKGQKNSRERMKRIEEGIKELGSQILKEHPVENTQLQNEKLYLYYLQNGRDMYVDQELDINRLSDYDVDHIVPQSFLKDDSIDNKVLTRSDKARGKSDNVPSEEVVKKMKNYWRQLLNAKLITQRKFDNLTKAERGGLSELDKAGFIKRQLVETRQITKHVAQILDSRMNTKYDENDKLIREVKVITLKSKLVSDFRKDFQFYKVREINNYHHAHDAYLNAVVGTALIKKYPKLESEFVYGDYKVYDVRKMIAKSEQEIGKATAKYFFYSNIMNFFKTEITLANGEIRKRPLIETNGETGEIVWDKGRDFATVRKVLSMPQVNIVKKTEVQTGGFSKESILPKRNSDKLIARKKDWDPKKYGGFDSPTVAYSVLVVAKVEKGKSKKLKSVKELLGITIMERSSFEKNPIDFLEAKGYKEVKKDLIIKLPKYSLFELENGRKRMLASAGELQKGNELALPSKYVNFLYLASHYEKLKGSPEDNEQKQLFVEQHKHYLDEIIEQISEFSKRVILADANLDKVLSAYNKHRDKPIREQAENIIHLFTLTNLGAPAAFKYFDTTIDRKRYTSTKEVLDATLIHQSITGLYETRIDLSQLGGDGGGSSPAPGGGGGTLGDQGSRGSDPLPEPRVTLTVEGIPTEFLVNTGAEHSVLTKPMGKMGSKRTVVAGATGSKVYPWTTKRLLKIGQKQVTHSFLVIPECPAPLLGRDLLTKLKAQIQFSTEGPQVTWEDRPAMCLVLNLEEEYRLHEKPVPPSIDPSWLQLFPMVWAEKAGMGLANQVPPVVVELKSDASPVAVRQYPMSKEAREGIRPHIQRFLDLGILVPCQSPWNTPLLPVKKPGTNDYRPVQDLREVNKRVQDIHPTVPNPYNLLSSLPPSHTWYSVLDLKDAFFCLKLHPNSQPLFAFEWRDPEKGNTGQLTWTRLPQGFKNSPTLFNEALHRDLASFRALNPQVVMLQYVDDLLVAAPTYRDCKEGTRRLLQELSKLGYRVSAKKAQLCREEVTYLGYLLKGGKRWLTPARKATVMKIPTPTTPRQVREFLGTAGFCRLWIPGFASLAAPLYPLTRPKVPFTWTEAHQEAFGRIKEALLSAPALALPDLTKPFALYVDEKEGVARGVLTQTLGPWRRPVAYLSKKLDPVASGWPTCLKAIAAVALLLKDADKLTLGQNVLVIAPHNLESIVRQPPDRWMTNARMTHYQSLLLNERVSFAPPAILNPATLLPVESDDTPIHICSEILAEETGTRPDLRDQPLPGVPAWYTDGSSFIMDGRRQAGAAIVDNKRTVWASNLPEGTSAQKAELIALTQALRLAEGKSINIYTDSRYAFATAHVHGAIYKQRGWLTSAGKDIKNKEEILALLEAIHLPKRVAIIHCPGHQRGTDPVATGNRKADEAAKQAAQSTRILTETTKNAGKRTADGSEFEKRTADGSEFESPKKKAKVE

SEQ ID NO: 7407 - protein, 2216 aa, synthetic construct
MPAAKRVKLDGGDKKYSIGLDIGTNSVGWAVITDEYKVPSKKFKVLGNTDRHSIKKNLIGALLFDSGETAEATRLKRTARRRYTRRKNRICYLQEIFSNEMAKVDDSFFHRLEESFLVEEDKKHERHPIFGNIVDEVAYHEKYPTIYHLRKKLVDSTDKADLRLIYLALAHMIKFRGHFLIEGDLNPDNSDVDKLFIQLVQTYNQLFEENPINASGVDAKAILSARLSKSRRLENLIAQLPGEKKNGLFGNLIALSLGLTPNFKSNFDLAEDAKLQLSKDTYDDDLDNLLAQIGDQYADLFLAAKNLSDAILLSDILRVNTEITKAPLSASMIKRYDEHHQDLTLLKALVRQQLPEKYKEIFFDQSKNGYAGYIDGGASQEEFYKFIKPILEKMDGTEELLVKLNREDLLRKQRTFDNGSIPHQIHLGELHAILRRQEDFYPFLKDNREKIEKILTFRIPYYVGPLARGNSRFAWMTRKSEETITPWNFEEVVDKGASAQSFIERMTNFDKNLPNEKVLPKHSLLYEYFTVYNELTKVKYVTEGMRKPAFLSGEQKKAIVDLLFKTNRKVTVKQLKEDYFKKIECFDSVEISGVEDRFNASLGTYHDLLKIIKDKDFLDNEENEDILEDIVLTLTLFEDREMIEERLKTYAHLFDDKVMKQLKRRRYTGWGRLSRKLINGIRDKQSGKTILDFLKSDGFANRNFMQLIHDDSLTFKEDIQKAQVSGQGDSLHEHIANLAGSPAIKKGILQTVKVVDELVKVMGRHKPENIVIEMARENQTTQKGQKNSRERMKRIEEGIKELGSQILKEHPVENTQLQNEKLYLYYLQNGRDMYVDQELDINRLSDYDVDHIVPQSFLKDDSIDNKVLTRSDKARGKSDNVPSEEVVKKMKNYWRQLLNAKLITQRKFDNLTKAERGGLSELDKAGFIKRQLVETRQITKHVAQILDSRMNTKYDENDKLIREVKVITLKSKLVSDFRKDFQFYKVREINNYHHAHDAYLNAVVGTALIKKYPKLESEFVYGDYKVYDVRKMIAKSEQEIGKATAKYFFYSNIMNFFKTEITLANGEIRKRPLIETNGETGEIVWDKGRDFATVRKVLSMPQVNIVKKTEVQTGGFSKESILPKRNSDKLIARKKDWDPKKYGGFDSPTVAYSVLVVAKVEKGKSKKLKSVKELLGITIMERSSFEKNPIDFLEAKGYKEVKKDLIIKLPKYSLFELENGRKRMLASAGELQKGNELALPSKYVNFLYLASHYEKLKGSPEDNEQKQLFVEQHKHYLDEIIEQISEFSKRVILADANLDKVLSAYNKHRDKPIREQAENIIHLFTLTNLGAPAAFKYFDTTIDRKRYTSTKEVLDATLIHQSITGLYETRIDLSQLGGDGGGSSPAPGGGGGTLGDQGSRGSDPLPEPRVTLTVEGIPTEFLVNTGAEHSVLTKPMGKMGSKRTVVAGATGSKVYPWTTKRLLKIGQKQVTHSFLVIPECPAPLLGRDLLTKLKAQIQFSTEGPQVTWEDRPAMCLVLNLEEEYRLHEKPVPPSIDPSWLQLFPMVWAEKAGMGLANQVPPVVVELKSDASPVAVRQYPMSKEAREGIRPHIQRFLDLGILVPCQSPWNTPLLPVKKPGTNDYRPVQDLREVNKRVQDIHPTVPNPYNLLSSLPPSHTWYSVLDLKDAFFCLKLHPNSQPLFAFEWRDPEKGNTGQLTWTRLPQGFKNSPTLFNEALHRDLASFRALNPQVVMLQYVDDLLVAAPTYRDCKEGTRRLLQELSKLGYRVSAKKAQLCREEVTYLGYLLKGGKRWLTPARKATVMKIPTPTTPRQVREFLGKAGFCRLFIPGFASLAAPLYPLTRPKVPFTWTEAHQEAFGRIKEALLSAPALALPDLTKPFALYVDEKEGVARGVLTQTLGPWRRPVAYLSKKLDPVASGWPTCLKAIAAVALLLKDADKLTLGQNVLVIAPHNLESIVRQPPDRWMTNARMTHYQSLLLNERVSFAPPAILNPATLLPVESDDTPIHICSEILAEETGTRPDLRDQPLPGVPAWYTDGSSFIMDGRRQAGAAIVDNKRTVWASNLPEGTSAQKAELIALTQALRLAEGKSINIYTDSRYAFATAHVHGAIYKQRGWLTSAGKDIKNKEEILALLEAIHLPKRVAIIHCPGHQRGTDPVATGNRKADEAAKQAAQSTRILTETTKNAGKRTADGSEFEKRTADGSEFESPKKKAKVE

SEQ ID NO: 7408 - protein, 2094 aa, synthetic construct
MPAAKRVKLDGGDKKYSIGLDIGTNSVGWAVITDEYKVPSKKFKVLGNTDRHSIKKNLIGALLFDSGETAEATRLKRTARRRYTRRKNRICYLQEIFSNEMAKVDDSFFHRLEESFLVEEDKKHERHPIFGNIVDEVAYHEKYPTIYHLRKKLVDSTDKADLRLIYLALAHMIKFRGHFLIEGDLNPDNSDVDKLFIQLVQTYNQLFEENPINASGVDAKAILSARLSKSRRLENLIAQLPGEKKNGLFGNLIALSLGLTPNFKSNFDLAEDAKLQLSKDTYDDDLDNLLAQIGDQYADLFLAAKNLSDAILLSDILRVNTEITKAPLSASMIKRYDEHHQDLTLLKALVRQQLPEKYKEIFFDQSKNGYAGYIDGGASQEEFYKFIKPILEKMDGTEELLVKLNREDLLRKQRTFDNGSIPHQIHLGELHAILRRQEDFYPFLKDNREKIEKILTFRIPYYVGPLARGNSRFAWMTRKSEETITPWNFEEVVDKGASAQSFIERMTNFDKNLPNEKVLPKHSLLYEYFTVYNELTKVKYVTEGMRKPAFLSGEQKKAIVDLLFKTNRKVTVKQLKEDYFKKIECFDSVEISGVEDRFNASLGTYHDLLKIIKDKDFLDNEENEDILEDIVLTLTLFEDREMIEERLKTYAHLFDDKVMKQLKRRRYTGWGRLSRKLINGIRDKQSGKTILDFLKSDGFANRNFMQLIHDDSLTFKEDIQKAQVSGQGDSLHEHIANLAGSPAIKKGILQTVKVVDELVKVMGRHKPENIVIEMARENQTTQKGQKNSRERMKRIEEGIKELGSQILKEHPVENTQLQNEKLYLYYLQNGRDMYVDQELDINRLSDYDVDHIVPQSFLKDDSIDNKVLTRSDKARGKSDNVPSEEVVKKMKNYWRQLLNAKLITQRKFDNLTKAERGGLSELDKAGFIKRQLVETRQITKHVAQILDSRMNTKYDENDKLIREVKVITLKSKLVSDFRKDFQFYKVREINNYHHAHDAYLNAVVGTALIKKYPKLESEFVYGDYKVYDVRKMIAKSEQEIGKATAKYFFYSNIMNFFKTEITLANGEIRKRPLIETNGETGEIVWDKGRDFATVRKVLSMPQVNIVKKTEVQTGGFSKESILPKRNSDKLIARKKDWDPKKYGGFDSPTVAYSVLVVAKVEKGKSKKLKSVKELLGITIMERSSFEKNPIDFLEAKGYKEVKKDLIIKLPKYSLFELENGRKRMLASAGELQKGNELALPSKYVNFLYLASHYEKLKGSPEDNEQKQLFVEQHKHYLDEIIEQISEFSKRVILADANLDKVLSAYNKHRDKPIREQAENIIHLFTLTNLGAPAAFKYFDTTIDRKRYTSTKEVLDATLIHQSITGLYETRIDLSQLGGDGGGSSPAPGGGGGTLNLEDEYRLYETSAEPEVSPGSTWLSDFPQAWAETGGMGLAVRQAPLIIPLKATSTPVSIKQYPMSQEAKLGIKPHIQRLLDQGILVPCQSPWNTPLLPVKKPGTNDYRPVQDLREVNKRVEDIHPTVPNPYNLLSGLPPSHRWYTVLDLKDAFFCLRLHPTSQPLFAFEWRDPGMGISGQLTWTRLPQGFKNSPTLFNEALHRDLADFRIQHPDLILLQYVDDILLAATSELDCQQGTRALLLTLGNLGYRASAKKAQLCQKQVKYLGYLLKEGQRWLTEARKETVMGQPTPKTPRQLREFLGTAGFCRLWIPGFAEMAAPLYPLTKPGTLFNWGPDQQKAYQEIKQALLTAPALGLPDLTKPFELFVDEKQGYAKGVLTQKLGPWRRPVAYLSKKLDPVAAGWPPCLRMVAAIAVLRKDAGKLTMGQPLVILAPHAVEALVKQPPDRWLSNARMTHYQAMLLDTDRVQFGPVVALNPATLLPLPEEGAPHDCLEILAETHGTRPDLTDQPIPDADHTWYTDGSSFLQEGQRKAGAAVTTETEVIWARALPAGTSAQRAELIALTQALKMAEGKRLNVYTDSRYAFATAHIHGEIYRRRGWLTSEGREIKNKSEILALLKALFLPKRLSIIHCLGHQKGDSAEARGNRLADQAAREAAIKTPPDTSTLLAGKRTADGSEFEKRTADGSEFESPKKKAKVE

SEQ ID NO: 7409 - protein, 2094 aa, synthetic construct
MPAAKRVKLDGGDKKYSIGLDIGTNSVGWAVITDEYKVPSKKFKVLGNTDRHSIKKNLIGALLFDSGETAEATRLKRTARRRYTRRKNRICYLQEIFSNEMAKVDDSFFHRLEESFLVEEDKKHERHPIFGNIVDEVAYHEKYPTIYHLRKKLVDSTDKADLRLIYLALAHMIKFRGHFLIEGDLNPDNSDVDKLFIQLVQTYNQLFEENPINASGVDAKAILSARLSKSRRLENLIAQLPGEKKNGLFGNLIALSLGLTPNFKSNFDLAEDAKLQLSKDTYDDDLDNLLAQIGDQYADLFLAAKNLSDAILLSDILRVNTEITKAPLSASMIKRYDEHHQDLTLLKALVRQQLPEKYKEIFFDQSKNGYAGYIDGGASQEEFYKFIKPILEKMDGTEELLVKLNREDLLRKQRTFDNGSIPHQIHLGELHAILRRQEDFYPFLKDNREKIEKILTFRIPYYVGPLARGNSRFAWMTRKSEETITPWNFEEVVDKGASAQSFIERMTNFDKNLPNEKVLPKHSLLYEYFTVYNELTKVKYVTEGMRKPAFLSGEQKKAIVDLLFKTNRKVTVKQLKEDYFKKIECFDSVEISGVEDRFNASLGTYHDLLKIIKDKDFLDNEENEDILEDIVLTLTLFEDREMIEERLKTYAHLFDDKVMKQLKRRRYTGWGRLSRKLINGIRDKQSGKTILDFLKSDGFANRNFMQLIHDDSLTFKEDIQKAQVSGQGDSLHEHIANLAGSPAIKKGILQTVKVVDELVKVMGRHKPENIVIEMARENQTTQKGQKNSRERMKRIEEGIKELGSQILKEHPVENTQLQNEKLYLYYLQNGRDMYVDQELDINRLSDYDVDHIVPQSFLKDDSIDNKVLTRSDKARGKSDNVPSEEVVKKMKNYWRQLLNAKLITQRKFDNLTKAERGGLSELDKAGFIKRQLVETRQITKHVAQILDSRMNTKYDENDKLIREVKVITLKSKLVSDFRKDFQFYKVREINNYHHAHDAYLNAVVGTALIKKYPKLESEFVYGDYKVYDVRKMIAKSEQEIGKATAKYFFYSNIMNFFKTEITLANGEIRKRPLIETNGETGEIVWDKGRDFATVRKVLSMPQVNIVKKTEVQTGGFSKESILPKRNSDKLIARKKDWDPKKYGGFDSPTVAYSVLVVAKVEKGKSKKLKSVKELLGITIMERSSFEKNPIDFLEAKGYKEVKKDLIIKLPKYSLFELENGRKRMLASAGELQKGNELALPSKYVNFLYLASHYEKLKGSPEDNEQKQLFVEQHKHYLDEIIEQISEFSKRVILADANLDKVLSAYNKHRDKPIREQAENIIHLFTLTNLGAPAAFKYFDTTIDRKRYTSTKEVLDATLIHQSITGLYETRIDLSQLGGDGGGSSPAPGGGGGTLNIEDEYRLHETSKGPDVPLGSTWLSDFPQAWAETGGMGLAFRQAPLIISLKATSTPVSIKQYPMSQEARLGIKPHIQRLLDQGILVPCQSPWNTPLLPVKKPGTNDYRPVQDLREVNKRVEDIHPTVPNPYNLLSGLPPSHQWYTVLDLKDAFFCLRLHPTSQSLFAFEWKDPEMGISGQLTWTRLPQGFKNSPTLFNEALHRDLADFRIQHPDLILLQYVDDLLLAATSELDCQQGTRALLQTLGDLGYRASAKKAQICQKQVKYLGYLLKEGQRWLTEARKETVMGQPTPKTPRQLREFLGTAGLCRLWIPGFAEMAAPLYPLTKPGTLFKWGPDQQKAYQEIKQALLTAPALGLPDLTKPFELFVDEKQGYAKGVLTQKLGPWRRPVAYLSKKLDPVAAGWPPCLRMVAAIAVLTKDVGKLTMGQPLVILAPHAVEALVKQPPDRWLSNARMTHYQALLLDTDRVQFGPIVALNPATLLPLPEEGLQHDCLDILAEAHGTRPDLTDQPLPDADHTWYTDGSSFLQEGQRRAGAAVTTETEVIWAKALPAGTSAQRAELIALTQALKMAAGKKLNVYTDSRYAFATAHIHGEIYRRRGWLTSEGKEIKNKDEILALLKALFLPKRLSIIHCPGHQKGNHAEARGNRMADQAAREVATRETPETSTLLAGKRTADGSEFEKRTADGSEFESPKKKAKVE

SEQ ID NO: 7410 - protein, 2094 aa, synthetic construct
MPAAKRVKLDGGDKKYSIGLDIGTNSVGWAVITDEYKVPSKKFKVLGNTDRHSIKKNLIGALLFDSGETAEATRLKRTARRRYTRRKNRICYLQEIFSNEMAKVDDSFFHRLEESFLVEEDKKHERHPIFGNIVDEVAYHEKYPTIYHLRKKLVDSTDKADLRLIYLALAHMIKFRGHFLIEGDLNPDNSDVDKLFIQLVQTYNQLFEENPINASGVDAKAILSARLSKSRRLENLIAQLPGEKKNGLFGNLIALSLGLTPNFKSNFDLAEDAKLQLSKDTYDDDLDNLLAQIGDQYADLFLAAKNLSDAILLSDILRVNTEITKAPLSASMIKRYDEHHQDLTLLKALVRQQLPEKYKEIFFDQSKNGYAGYIDGGASQEEFYKFIKPILEKMDGTEELLVKLNREDLLRKQRTFDNGSIPHQIHLGELHAILRRQEDFYPFLKDNREKIEKILTFRIPYYVGPLARGNSRFAWMTRKSEETITPWNFEEVVDKGASAQSFIERMTNFDKNLPNEKVLPKHSLLYEYFTVYNELTKVKYVTEGMRKPAFLSGEQKKAIVDLLFKTNRKVTVKQLKEDYFKKIECFDSVEISGVEDRFNASLGTYHDLLKIIKDKDFLDNEENEDILEDIVLTLTLFEDREMIEERLKTYAHLFDDKVMKQLKRRRYTGWGRLSRKLINGIRDKQSGKTILDFLKSDGFANRNFMQLIHDDSLTFKEDIQKAQVSGQGDSLHEHIANLAGSPAIKKGILQTVKVVDELVKVMGRHKPENIVIEMARENQTTQKGQKNSRERMKRIEEGIKELGSQILKEHPVENTQLQNEKLYLYYLQNGRDMYVDQELDINRLSDYDVDHIVPQSFLKDDSIDNKVLTRSDKARGKSDNVPSEEVVKKMKNYWRQLLNAKLITQRKFDNLTKAERGGLSELDKAGFIKRQLVETRQITKHVAQILDSRMNTKYDENDKLIREVKVITLKSKLVSDFRKDFQFYKVREINNYHHAHDAYLNAVVGTALIKKYPKLESEFVYGDYKVYDVRKMIAKSEQEIGKATAKYFFYSNIMNFFKTEITLANGEIRKRPLIETNGETGEIVWDKGRDFATVRKVLSMPQVNIVKKTEVQTGGFSKESILPKRNSDKLIARKKDWDPKKYGGFDSPTVAYSVLVVAKVEKGKSKKLKSVKELLGITIMERSSFEKNPIDFLEAKGYKEVKKDLIIKLPKYSLFELENGRKRMLASAGELQKGNELALPSKYVNFLYLASHYEKLKGSPEDNEQKQLFVEQHKHYLDEIIEQISEFSKRVILADANLDKVLSAYNKHRDKPIREQAENIIHLFTLTNLGAPAAFKYFDTTIDRKRYTSTKEVLDATLIHQSITGLYETRIDLSQLGGDGGGSSPAPGGGGGTLNIEDEYRLHETSKGPDVPLGSTWLSDFPQAWAETGGMGLAVRQAPLIIPLKATSTPVSIKQYPMSQEARLGIKPHIQRLLDQGILVPCQSPWNTPLLPVKKPGTNDYRPVQDLREVNKRVEDIHPTVPNPYNLLSGLPPSHQWYTVLDLKDAFFCLRLHPTSQSLFAFEWRDPEMGISGQLTWTRLPQGFKNSPTLFNEALHRDLADFRIQHPDLILLQYVDDLLLAATSELDCQQGTRALLQTLGDLGYRASAKKAQICQKQVKYLGYLLKEGQRWLTEARKETVMGQPTPKTPRQLREFLGTAGFCRLWIPGFAEMAAPLYPLTKPGTLFEWGPDQQKAYQEIKQALLTAPALGLPDLTKPFELFVDEKQGYAKGVLTQKLGPWRRPVAYLSKKLDPVAAGWPPCLRMVAAIAVLTKDAGKLTMGQPLVILAPHAVEALVKQPPDRWLSNARMTHYQALLLDTDRVQFGPIVALNPATLLPLPEEGLQHDCLDILAEAHGTRPDLTDQPLPDADHTWYTDGSSFLQEGQRKAGAAVTTETEVVWAKALPAGTSAQRAELIALTQALKMAEGKKLNVYTDSRYAFATAHIHGEIYRRRGWLTSEGKEIKNKDEILALLKALFLPKRLSIIHCPGHQKGNRAEARGNRMADQAAREVATRETPETSTLLAGKRTADGSEFEKRTADGSEFESPKKKAKVE

SEQ ID NO: 7411 - protein, 2094 aa, synthetic construct
MPAAKRVKLDGGDKKYSIGLDIGTNSVGWAVITDEYKVPSKKFKVLGNTDRHSIKKNLIGALLFDSGETAEATRLKRTARRRYTRRKNRICYLQEIFSNEMAKVDDSFFHRLEESFLVEEDKKHERHPIFGNIVDEVAYHEKYPTIYHLRKKLVDSTDKADLRLIYLALAHMIKFRGHFLIEGDLNPDNSDVDKLFIQLVQTYNQLFEENPINASGVDAKAILSARLSKSRRLENLIAQLPGEKKNGLFGNLIALSLGLTPNFKSNFDLAEDAKLQLSKDTYDDDLDNLLAQIGDQYADLFLAAKNLSDAILLSDILRVNTEITKAPLSASMIKRYDEHHQDLTLLKALVRQQLPEKYKEIFFDQSKNGYAGYIDGGASQEEFYKFIKPILEKMDGTEELLVKLNREDLLRKQRTFDNGSIPHQIHLGELHAILRRQEDFYPFLKDNREKIEKILTFRIPYYVGPLARGNSRFAWMTRKSEETITPWNFEEVVDKGASAQSFIERMTNFDKNLPNEKVLPKHSLLYEYFTVYNELTKVKYVTEGMRKPAFLSGEQKKAIVDLLFKTNRKVTVKQLKEDYFKKIECFDSVEISGVEDRFNASLGTYHDLLKIIKDKDFLDNEENEDILEDIVLTLTLFEDREMIEERLKTYAHLFDDKVMKQLKRRRYTGWGRLSRKLINGIRDKQSGKTILDFLKSDGFANRNFMQLIHDDSLTFKEDIQKAQVSGQGDSLHEHIANLAGSPAIKKGILQTVKVVDELVKVMGRHKPENIVIEMARENQTTQKGQKNSRERMKRIEEGIKELGSQILKEHPVENTQLQNEKLYLYYLQNGRDMYVDQELDINRLSDYDVDHIVPQSFLKDDSIDNKVLTRSDKARGKSDNVPSEEVVKKMKNYWRQLLNAKLITQRKFDNLTKAERGGLSELDKAGFIKRQLVETRQITKHVAQILDSRMNTKYDENDKLIREVKVITLKSKLVSDFRKDFQFYKVREINNYHHAHDAYLNAVVGTALIKKYPKLESEFVYGDYKVYDVRKMIAKSEQEIGKATAKYFFYSNIMNFFKTEITLANGEIRKRPLIETNGETGEIVWDKGRDFATVRKVLSMPQVNIVKKTEVQTGGFSKESILPKRNSDKLIARKKDWDPKKYGGFDSPTVAYSVLVVAKVEKGKSKKLKSVKELLGITIMERSSFEKNPIDFLEAKGYKEVKKDLIIKLPKYSLFELENGRKRMLASAGELQKGNELALPSKYVNFLYLASHYEKLKGSPEDNEQKQLFVEQHKHYLDEIIEQISEFSKRVILADANLDKVLSAYNKHRDKPIREQAENIIHLFTLTNLGAPAAFKYFDTTIDRKRYTSTKEVLDATLIHQSITGLYETRIDLSQLGGDGGGSSPAPGGGGGTLNIEDEHRLHETSKEPDVSLGSTWLSDFPQAWAETGGMGLAVRQAPLIIPLKATSTPVSIKQYPMSQEARLGIKPHIQRLLDQGILVPCQSPWNTPLLPVKKPGTNDYRPVQDLREVNKRVEDIHPTVPNPYNLLSGLPPSHQWYTVLDLKDAFFCLRLHPTSQPLFAFEWRDPEMGISGQLTWTRLPQGFKNSPTLFDEALHRDLADFRIQHPDLILLQYVDDLLLAATSELDCQQGTRALLQTLGNLGYRASAKKAQICQKQVKYLGYLLKEGQRWLTEARKETVMGQPTPKTPRQLREFLGTAGFCRLWIPGFAEMAAPLYPLTKTGTLFNWGPDQQKAYQEIKQALLTAPALGLPDLTKPFELFVDEKQGYAKGVLTQKLGPWRRPVAYLSKKLDPVAAGWPPCLRMVAAIAVLTKDAGKLTMGQPLVILAPHAVEALVKQPPDRWLSNARMTHYQALLLDTDRVQFGPVVALNPATLLPLPEEGLQHNCLDILAEAHGTRPDLTDQPLPDADHTWYTDGSSLLQEGQRKAGAAVTTETEVIWAKALPAGTSAQRAELIALTQALKMAEGKKLNVYTDSRYAFATAHIHGEIYRRRGLLTSEGKEIKNKDEILALLKALFLPKRLSIIHCPGHQKGHSAEARGNRMADQAARKAAITETPDTSTLLAGKRTADGSEFEKRTADGSEFESPKKKAKVE

SEQ ID NO: 7412 - protein, 2100 aa, synthetic construct
MPAAKRVKLDGGDKKYSIGLDIGTNSVGWAVITDEYKVPSKKFKVLGNTDRHSIKKNLIGALLFDSGETAEATRLKRTARRRYTRRKNRICYLQEIFSNEMAKVDDSFFHRLEESFLVEEDKKHERHPIFGNIVDEVAYHEKYPTIYHLRKKLVDSTDKADLRLIYLALAHMIKFRGHFLIEGDLNPDNSDVDKLFIQLVQTYNQLFEENPINASGVDAKAILSARLSKSRRLENLIAQLPGEKKNGLFGNLIALSLGLTPNFKSNFDLAEDAKLQLSKDTYDDDLDNLLAQIGDQYADLFLAAKNLSDAILLSDILRVNTEITKAPLSASMIKRYDEHHQDLTLLKALVRQQLPEKYKEIFFDQSKNGYAGYIDGGASQEEFYKFIKPILEKMDGTEELLVKLNREDLLRKQRTFDNGSIPHQIHLGELHAILRRQEDFYPFLKDNREKIEKILTFRIPYYVGPLARGNSRFAWMTRKSEETITPWNFEEVVDKGASAQSFIERMTNFDKNLPNEKVLPKHSLLYEYFTVYNELTKVKYVTEGMRKPAFLSGEQKKAIVDLLFKTNRKVTVKQLKEDYFKKIECFDSVEISGVEDRFNASLGTYHDLLKIIKDKDFLDNEENEDILEDIVLTLTLFEDREMIEERLKTYAHLFDDKVMKQLKRRRYTGWGRLSRKLINGIRDKQSGKTILDFLKSDGFANRNFMQLIHDDSLTFKEDIQKAQVSGQGDSLHEHIANLAGSPAIKKGILQTVKVVDELVKVMGRHKPENIVIEMARENQTTQKGQKNSRERMKRIEEGIKELGSQILKEHPVENTQLQNEKLYLYYLQNGRDMYVDQELDINRLSDYDVDHIVPQSFLKDDSIDNKVLTRSDKARGKSDNVPSEEVVKKMKNYWRQLLNAKLITQRKFDNLTKAERGGLSELDKAGFIKRQLVETRQITKHVAQILDSRMNTKYDENDKLIREVKVITLKSKLVSDFRKDFQFYKVREINNYHHAHDAYLNAVVGTALIKKYPKLESEFVYGDYKVYDVRKMIAKSEQEIGKATAKYFFYSNIMNFFKTEITLANGEIRKRPLIETNGETGEIVWDKGRDFATVRKVLSMPQVNIVKKTEVQTGGFSKESILPKRNSDKLIARKKDWDPKKYGGFDSPTVAYSVLVVAKVEKGKSKKLKSVKELLGITIMERSSFEKNPIDFLEAKGYKEVKKDLIIKLPKYSLFELENGRKRMLASAGELQKGNELALPSKYVNFLYLASHYEKLKGSPEDNEQKQLFVEQHKHYLDEIIEQISEFSKRVILADANLDKVLSAYNKHRDKPIREQAENIIHLFTLTNLGAPAAFKYFDTTIDRKRYTSTKEVLDATLIHQSITGLYETRIDLSQLGGDGGPAPGGGGSSGGTVSLQDEHRLFDIPVTTSLPDVWLQDFPQAWAETGGLGRAKCQAPIIIDLKPTAVPVSIKQYPMSLEAHMGIRQHIIKFLELGVLRPCRSPWNTPLLPVKKPGTQDYRPVQDLREINKRTVDIHPTVPNPYNLLSTLKPDYSWYTVLDLKDAFFCLPLAPQSQELFAFEWKDPERGISGQLTWTRLPQGFKNSPTLFNEALHRDLTDFRTQHPEVTLLQYVDDLLLAAPTKKACTQGTRHLLQELGEKGYRASAKKAQICQTKVTYLGYILSEGKRWLTPGRIETVARIPPPRNPREVREFLGTAGFCRLWIPGFAELAAPLYALTKPSTPFTWQTEHQLAFEALKKALLSAPALGLPDTSKPFTLFLDERQGIAKGVLTQKLGPWKRPVAYLSKKLDPVAAGWPPCLRIMAATAMLVKDSAKLTLGQPLTVITPHTLEAIVRQPPDRWITNARLTHYQALLLDTDRVQFGPPVTLNPATLLPVPENQPSPHDCRQVLAETHGTREDLKDQELPDADHTWYTDGSSYLDSGTRRAGAAVVDGHNTIWAQSLPPGTSAQKAELIALTKALELSKGKKANIYTDSRYAFATAHTHGSIYERRGWLTSEGKEIKNKAEIIALLKALFLPQEVAIIHCPGHQKGQDPVAVGNRQADRVARQAAMAEVLTLATEPDNTSHITAGKRTADGSEFEKRTADGSEFESPKKKAKVE

SEQ ID NO: 7413 - protein, 1999 aa, synthetic construct
MPAAKRVKLDGGDKKYSIGLDIGTNSVGWAVITDEYKVPSKKFKVLGNTDRHSIKKNLIGALLFDSGETAEATRLKRTARRRYTRRKNRICYLQEIFSNEMAKVDDSFFHRLEESFLVEEDKKHERHPIFGNIVDEVAYHEKYPTIYHLRKKLVDSTDKADLRLIYLALAHMIKFRGHFLIEGDLNPDNSDVDKLFIQLVQTYNQLFEENPINASGVDAKAILSARLSKSRRLENLIAQLPGEKKNGLFGNLIALSLGLTPNFKSNFDLAEDAKLQLSKDTYDDDLDNLLAQIGDQYADLFLAAKNLSDAILLSDILRVNTEITKAPLSASMIKRYDEHHQDLTLLKALVRQQLPEKYKEIFFDQSKNGYAGYIDGGASQEEFYKFIKPILEKMDGTEELLVKLNREDLLRKQRTFDNGSIPHQIHLGELHAILRRQEDFYPFLKDNREKIEKILTFRIPYYVGPLARGNSRFAWMTRKSEETITPWNFEEVVDKGASAQSFIERMTNFDKNLPNEKVLPKHSLLYEYFTVYNELTKVKYVTEGMRKPAFLSGEQKKAIVDLLFKTNRKVTVKQLKEDYFKKIECFDSVEISGVEDRFNASLGTYHDLLKIIKDKDFLDNEENEDILEDIVLTLTLFEDREMIEERLKTYAHLFDDKVMKQLKRRRYTGWGRLSRKLINGIRDKQSGKTILDFLKSDGFANRNFMQLIHDDSLTFKEDIQKAQVSGQGDSLHEHIANLAGSPAIKKGILQTVKVVDELVKVMGRHKPENIVIEMARENQTTQKGQKNSRERMKRIEEGIKELGSQILKEHPVENTQLQNEKLYLYYLQNGRDMYVDQELDINRLSDYDVDHIVPQSFLKDDSIDNKVLTRSDKARGKSDNVPSEEVVKKMKNYWRQLLNAKLITQRKFDNLTKAERGGLSELDKAGFIKRQLVETRQITKHVAQILDSRMNTKYDENDKLIREVKVITLKSKLVSDFRKDFQFYKVREINNYHHAHDAYLNAVVGTALIKKYPKLESEFVYGDYKVYDVRKMIAKSEQEIGKATAKYFFYSNIMNFFKTEITLANGEIRKRPLIETNGETGEIVWDKGRDFATVRKVLSMPQVNIVKKTEVQTGGFSKESILPKRNSDKLIARKKDWDPKKYGGFDSPTVAYSVLVVAKVEKGKSKKLKSVKELLGITIMERSSFEKNPIDFLEAKGYKEVKKDLIIKLPKYSLFELENGRKRMLASAGELQKGNELALPSKYVNFLYLASHYEKLKGSPEDNEQKQLFVEQHKHYLDEIIEQISEFSKRVILADANLDKVLSAYNKHRDKPIREQAENIIHLFTLTNLGAPAAFKYFDTTIDRKRYTSTKEVLDATLIHQSITGLYETRIDLSQLGGDGGPAPGGGGSSGGGVLDTPPSHIGLEHLPPPPEVPQFPLNLERLQALQDLVHRSLEAGYISPWDGPGNNPVFPVRKPNGAWRFVHDLRATNALTKPIPALSPGPPDLTAPPTHPPHIICLDLKDAFFQIPVEDRFRFYLSFTLPSPGGLQPHRRFAWRVLPQGFINSPALFQRALQEPLRQVSAAFSQSLLVSYMDDILYASPTEEQRSQCYQALAARLRDLGFQVASEKTSQTPSPVPFLGQMVHEQIVTYQSLPTLQISSPISLHQLQAVLGDLQWVSRGTPTTRRPLQLLYSSLKRHHDPRAIIQLSPEQLQGIAELRQALSHNARSRYNEQEPLLAYVHLTRAGSTLVLFQKGAQFPLAYFQTPLTDNQASPWGLLLLLGCQYLQTQALSSYAKPILKYYHNLPKTSLDNWIQSSEDPRVQELLQLWPQISSQGIQPPGPWKTLITRAEVFLTPQFSPDPIPAALCLFSDGATGRGAYCLWKDHLLDFQAVPAPESAQKGELAGLLAGLAAAPPEPVNIWVDSKYLYSLLRTWVLGAWLQPDPVPSYALLYKSLLRHPAIVVGHVRSHSSASHPIASLNNYVDQLAGKRTADGSEFEKRTADGSEFESPKKKAKVE

SEQ ID NO: 7414 - protein, 2171 aa, synthetic construct
MPAAKRVKLDGGDKKYSIGLDIGTNSVGWAVITDEYKVPSKKFKVLGNTDRHSIKKNLIGALLFDSGETAEATRLKRTARRRYTRRKNRICYLQEIFSNEMAKVDDSFFHRLEESFLVEEDKKHERHPIFGNIVDEVAYHEKYPTIYHLRKKLVDSTDKADLRLIYLALAHMIKFRGHFLIEGDLNPDNSDVDKLFIQLVQTYNQLFEENPINASGVDAKAILSARLSKSRRLENLIAQLPGEKKNGLFGNLIALSLGLTPNFKSNFDLAEDAKLQLSKDTYDDDLDNLLAQIGDQYADLFLAAKNLSDAILLSDILRVNTEITKAPLSASMIKRYDEHHQDLTLLKALVRQQLPEKYKEIFFDQSKNGYAGYIDGGASQEEFYKFIKPILEKMDGTEELLVKLNREDLLRKQRTFDNGSIPHQIHLGELHAILRRQEDFYPFLKDNREKIEKILTFRIPYYVGPLARGNSRFAWMTRKSEETITPWNFEEVVDKGASAQSFIERMTNFDKNLPNEKVLPKHSLLYEYFTVYNELTKVKYVTEGMRKPAFLSGEQKKAIVDLLFKTNRKVTVKQLKEDYFKKIECFDSVEISGVEDRFNASLGTYHDLLKIIKDKDFLDNEENEDILEDIVLTLTLFEDREMIEERLKTYAHLFDDKVMKQLKRRRYTGWGRLSRKLINGIRDKQSGKTILDFLKSDGFANRNFMQLIHDDSLTFKEDIQKAQVSGQGDSLHEHIANLAGSPAIKKGILQTVKVVDELVKVMGRHKPENIVIEMARENQTTQKGQKNSRERMKRIEEGIKELGSQILKEHPVENTQLQNEKLYLYYLQNGRDMYVDQELDINRLSDYDVDHIVPQSFLKDDSIDNKVLTRSDKARGKSDNVPSEEVVKKMKNYWRQLLNAKLITQRKFDNLTKAERGGLSELDKAGFIKRQLVETRQITKHVAQILDSRMNTKYDENDKLIREVKVITLKSKLVSDFRKDFQFYKVREINNYHHAHDAYLNAVVGTALIKKYPKLESEFVYGDYKVYDVRKMIAKSEQEIGKATAKYFFYSNIMNFFKTEITLANGEIRKRPLIETNGETGEIVWDKGRDFATVRKVLSMPQVNIVKKTEVQTGGFSKESILPKRNSDKLIARKKDWDPKKYGGFDSPTVAYSVLVVAKVEKGKSKKLKSVKELLGITIMERSSFEKNPIDFLEAKGYKEVKKDLIIKLPKYSLFELENGRKRMLASAGELQKGNELALPSKYVNFLYLASHYEKLKGSPEDNEQKQLFVEQHKHYLDEIIEQISEFSKRVILADANLDKVLSAYNKHRDKPIREQAENIIHLFTLTNLGAPAAFKYFDTTIDRKRYTSTKEVLDATLIHQSITGLYETRIDLSQLGGDGGPAPGGGGSSGGMDLLKPLTVERKGVKIKGYWNSQADITCVPKDLLQGEEPVRQQNVTTIHGTQEGDVYYVNLKIDGRRINTEVIGTTLDYAIITPGDVPWILKKPLELTIKLDLEEQQGTLLNNSILSKKGKEELKQLFEKYSALWQSWENQVGHRRIRPHKIATGTVKPTPQKQYHINPKAKPDIQIVINDLLKQGVLIQKESTMNTPVYPVPKPNGRWRMVLDYRAVNKVTPLIAVQNQHSYGILGSLFKGRYKTTIDLSNGFWAHPIVPEDYWITAFTWQGKQYCWTVLPQGFLNSPGLFTGDVVDLLQGIPNVEVYVDDVYISHDSEKEHLEYLDILFNRLKEAGYIISLKKSNIANSIVDFLGFQITNEGRGLTDTFKEKLENITAPTTLKQLQSILGLLNFARNFIPDFTELIAPLYALIPKSTKNYVPWQIEHSTTLETLITKLNGAEYLQGRKGDKTLIMKVNASYTTGYIRYYNEGEKKPISYVSIVFSKTELKFTELEKLLTTVHKGLLKALDLSMGQNIHVYSPIVSMQNIQKTPQTAKKALASRWLSWLSYLEDPRIRFFYDPQMPALKDLPAVDTGKDNKKHPSNFQHIFYTDGSAITSPTKEGHLNAGMGIVYFINKDGNLQKQQEWSISLGNHTAQFAEIAAFEFALKKCLPLGGNILVVTDSNYVAKAYNEELDVWASNGFVNNRKKPLKHISKWKSVADLKRLRPDVVVTHEPGHQKLDSSPHAYGNNLADQLATQASFKVHAGKRTADGSEFEKRTADGSEFESPKKKAKVE

SEQ ID NO: 7415 - protein, 2093 aa, synthetic construct
MPAAKRVKLDGGDKKYSIGLDIGTNSVGWAVITDEYKVPSKKFKVLGNTDRHSIKKNLIGALLFDSGETAEATRLKRTARRRYTRRKNRICYLQEIFSNEMAKVDDSFFHRLEESFLVEEDKKHERHPIFGNIVDEVAYHEKYPTIYHLRKKLVDSTDKADLRLIYLALAHMIKFRGHFLIEGDLNPDNSDVDKLFIQLVQTYNQLFEENPINASGVDAKAILSARLSKSRRLENLIAQLPGEKKNGLFGNLIALSLGLTPNFKSNFDLAEDAKLQLSKDTYDDDLDNLLAQIGDQYADLFLAAKNLSDAILLSDILRVNTEITKAPLSASMIKRYDEHHQDLTLLKALVRQQLPEKYKEIFFDQSKNGYAGYIDGGASQEEFYKFIKPILEKMDGTEELLVKLNREDLLRKQRTFDNGSIPHQIHLGELHAILRRQEDFYPFLKDNREKIEKILTFRIPYYVGPLARGNSRFAWMTRKSEETITPWNFEEVVDKGASAQSFIERMTNFDKNLPNEKVLPKHSLLYEYFTVYNELTKVKYVTEGMRKPAFLSGEQKKAIVDLLFKTNRKVTVKQLKEDYFKKIECFDSVEISGVEDRFNASLGTYHDLLKIIKDKDFLDNEENEDILEDIVLTLTLFEDREMIEERLKTYAHLFDDKVMKQLKRRRYTGWGRLSRKLINGIRDKQSGKTILDFLKSDGFANRNFMQLIHDDSLTFKEDIQKAQVSGQGDSLHEHIANLAGSPAIKKGILQTVKVVDELVKVMGRHKPENIVIEMARENQTTQKGQKNSRERMKRIEEGIKELGSQILKEHPVENTQLQNEKLYLYYLQNGRDMYVDQELDINRLSDYDVDHIVPQSFLKDDSIDNKVLTRSDKARGKSDNVPSEEVVKKMKNYWRQLLNAKLITQRKFDNLTKAERGGLSELDKAGFIKRQLVETRQITKHVAQILDSRMNTKYDENDKLIREVKVITLKSKLVSDFRKDFQFYKVREINNYHHAHDAYLNAVVGTALIKKYPKLESEFVYGDYKVYDVRKMIAKSEQEIGKATAKYFFYSNIMNFFKTEITLANGEIRKRPLIETNGETGEIVWDKGRDFATVRKVLSMPQVNIVKKTEVQTGGFSKESILPKRNSDKLIARKKDWDPKKYGGFDSPTVAYSVLVVAKVEKGKSKKLKSVKELLGITIMERSSFEKNPIDFLEAKGYKEVKKDLIIKLPKYSLFELENGRKRMLASAGELQKGNELALPSKYVNFLYLASHYEKLKGSPEDNEQKQLFVEQHKHYLDEIIEQISEFSKRVILADANLDKVLSAYNKHRDKPIREQAENIIHLFTLTNLGAPAAFKYFDTTIDRKRYTSTKEVLDATLIHQSITGLYETRIDLSQLGGDGGPAPGGGGSSGGTLQLEEEYRLFEPESTQKQEMDIWLKNFPQAWAETGGMGTAHCQAPVLIQLKATATPISIRQYPMPHEAYQGIKPHIRRMLDQGILKPCQSPWNTPLLPVKKPGTEDYRPVQDLREVNKRVEDIHPTVPNPYNLLSTLPPSHPWYTVLDLKDAFFCLRLHSESQLLFAFEWRDPEIGLSGQLTWTRLPQGFKNSPTLFNEALHSDLADFRVRYPALVLLQYVDDLLLAAATRTECLEGTKALLETLGNKGYRASAKKAQICLQEVTYLGYSLKDGQRWLTKARKEAILSIPVPKNSRQVREFLGTAGYCRLWIPGFAELAAPLYPLTRPGTLFQWGTEQQLAFEDIKKALLSSPALGLPDITKPFELFIDENSGFAKGVLVQKLGPWKRPVAYLSKKLDTVASGWPPCLRMVAAIAILVKDAGKLTLGQPLTILTSHPVEALVRQPPNKWLSNARMTHYQAMLLDAERVHFGPTVSLNPATLLPLPSGGNHHDCLQILAETHGTRPDLTDQPLPDADLTWYTDGSSFIRNGEREAGAAVTTESEVIWAAPLPPGTSAQRAELIALTQALKMAEGKKLTVYTDSRYAFATTHVHGEIYRRRGWLTSEGKEIKNKNEILALLEALFLPKRLSIIHCPGHQKGDSPQAKGNRLADDTAKKAATETHSSLTVLPAGKRTADGSEFEKRTADGSEFESPKKKAKVE

SEQ ID NO: 7416 - protein, 2216 aa, synthetic construct
MPAAKRVKLDGGDKKYSIGLDIGTNSVGWAVITDEYKVPSKKFKVLGNTDRHSIKKNLIGALLFDSGETAEATRLKRTARRRYTRRKNRICYLQEIFSNEMAKVDDSFFHRLEESFLVEEDKKHERHPIFGNIVDEVAYHEKYPTIYHLRKKLVDSTDKADLRLIYLALAHMIKFRGHFLIEGDLNPDNSDVDKLFIQLVQTYNQLFEENPINASGVDAKAILSARLSKSRRLENLIAQLPGEKKNGLFGNLIALSLGLTPNFKSNFDLAEDAKLQLSKDTYDDDLDNLLAQIGDQYADLFLAAKNLSDAILLSDILRVNTEITKAPLSASMIKRYDEHHQDLTLLKALVRQQLPEKYKEIFFDQSKNGYAGYIDGGASQEEFYKFIKPILEKMDGTEELLVKLNREDLLRKQRTFDNGSIPHQIHLGELHAILRRQEDFYPFLKDNREKIEKILTFRIPYYVGPLARGNSRFAWMTRKSEETITPWNFEEVVDKGASAQSFIERMTNFDKNLPNEKVLPKHSLLYEYFTVYNELTKVKYVTEGMRKPAFLSGEQKKAIVDLLFKTNRKVTVKQLKEDYFKKIECFDSVEISGVEDRFNASLGTYHDLLKIIKDKDFLDNEENEDILEDIVLTLTLFEDREMIEERLKTYAHLFDDKVMKQLKRRRYTGWGRLSRKLINGIRDKQSGKTILDFLKSDGFANRNFMQLIHDDSLTFKEDIQKAQVSGQGDSLHEHIANLAGSPAIKKGILQTVKVVDELVKVMGRHKPENIVIEMARENQTTQKGQKNSRERMKRIEEGIKELGSQILKEHPVENTQLQNEKLYLYYLQNGRDMYVDQELDINRLSDYDVDHIVPQSFLKDDSIDNKVLTRSDKARGKSDNVPSEEVVKKMKNYWRQLLNAKLITQRKFDNLTKAERGGLSELDKAGFIKRQLVETRQITKHVAQILDSRMNTKYDENDKLIREVKVITLKSKLVSDFRKDFQFYKVREINNYHHAHDAYLNAVVGTALIKKYPKLESEFVYGDYKVYDVRKMIAKSEQEIGKATAKYFFYSNIMNFFKTEITLANGEIRKRPLIETNGETGEIVWDKGRDFATVRKVLSMPQVNIVKKTEVQTGGFSKESILPKRNSDKLIARKKDWDPKKYGGFDSPTVAYSVLVVAKVEKGKSKKLKSVKELLGITIMERSSFEKNPIDFLEAKGYKEVKKDLIIKLPKYSLFELENGRKRMLASAGELQKGNELALPSKYVNFLYLASHYEKLKGSPEDNEQKQLFVEQHKHYLDEIIEQISEFSKRVILADANLDKVLSAYNKHRDKPIREQAENIIHLFTLTNLGAPAAFKYFDTTIDRKRYTSTKEVLDATLIHQSITGLYETRIDLSQLGGDGGPAPGGGGSSGGTLGDQGSRGSDPLPEPRVTLTVEGIPTEFLVNTGAEHSVLTKPMGKMGSKRTVVAGATGSKVYPWTTKRLLKIGQKQVTHSFLVIPECPAPLLGRDLLTKLKAQIQFSTEGPQVTWEDRPAMCLVLNLEEEYRLHEKPVPPSIDPSWLQLFPMVWAEKAGMGLANQVPPVVVELKSDASPVAVRQYPMSKEAREGIRPHIQRFLDLGILVPCQSPWNTPLLPVKKPGTNDYRPVQDLREVNKRVQDIHPTVPNPYNLLSSLPPSHTWYSVLDLKDAFFCLKLHPNSQPLFAFEWRDPEKGNTGQLTWTRLPQGFKNSPTLFDEALHRDLASFRALNPQVVMLQYVDDLLVAAPTYRDCKEGTRRLLQELSKLGYRVSAKKAQLCREEVTYLGYLLKGGKRWLTPARKATVMKIPTPTTPRQVREFLGTAGFCRLWIPGFASLAAPLYPLTREKVPFTWTEAHQEAFGRIKEALLSAPALALPDLTKPFALYVDEKEGVARGVLTQTLGPWRRPVAYLSKKLDPVASGWPTCLKAIAAVALLLKDADKLTLGQNVLVIAPHNLESIVRQPPDRWMTNARMTHYQSLLLNERVSFAPPAILNPATLLPVESDDTPIHICSEILAEETGTRPDLRDQPLPGVPAWYTDGSSFIMDGRRQAGAAIVDNKRTVWASNLPEGTSAQKAELIALTQALRLAEGKSINIYTDSRYAFATAHVHGAIYKQRGLLTSAGKDIKNKEEILALLEAIHLPKRVAIIHCPGHQRGTDPVATGNRKADEAAKQAAQSTRILTETTKNAGKRTADGSEFEKRTADGSEFESPKKKAKVE

SEQ ID NO: 7417 - protein, 2125 aa, synthetic construct
MPAAKRVKLDGGDKKYSIGLDIGTNSVGWAVITDEYKVPSKKFKVLGNTDRHSIKKNLIGALLFDSGETAEATRLKRTARRRYTRRKNRICYLQEIFSNEMAKVDDSFFHRLEESFLVEEDKKHERHPIFGNIVDEVAYHEKYPTIYHLRKKLVDSTDKADLRLIYLALAHMIKFRGHFLIEGDLNPDNSDVDKLFIQLVQTYNQLFEENPINASGVDAKAILSARLSKSRRLENLIAQLPGEKKNGLFGNLIALSLGLTPNFKSNFDLAEDAKLQLSKDTYDDDLDNLLAQIGDQYADLFLAAKNLSDAILLSDILRVNTEITKAPLSASMIKRYDEHHQDLTLLKALVRQQLPEKYKEIFFDQSKNGYAGYIDGGASQEEFYKFIKPILEKMDGTEELLVKLNREDLLRKQRTFDNGSIPHQIHLGELHAILRRQEDFYPFLKDNREKIEKILTFRIPYYVGPLARGNSRFAWMTRKSEETITPWNFEEVVDKGASAQSFIERMTNFDKNLPNEKVLPKHSLLYEYFTVYNELTKVKYVTEGMRKPAFLSGEQKKAIVDLLFKTNRKVTVKQLKEDYFKKIECFDSVEISGVEDRFNASLGTYHDLLKIIKDKDFLDNEENEDILEDIVLTLTLFEDREMIEERLKTYAHLFDDKVMKQLKRRRYTGWGRLSRKLINGIRDKQSGKTILDFLKSDGFANRNFMQLIHDDSLTFKEDIQKAQVSGQGDSLHEHIANLAGSPAIKKGILQTVKVVDELVKVMGRHKPENIVIEMARENQTTQKGQKNSRERMKRIEEGIKELGSQILKEHPVENTQLQNEKLYLYYLQNGRDMYVDQELDINRLSDYDVDHIVPQSFLKDDSIDNKVLTRSDKARGKSDNVPSEEVVKKMKNYWRQLLNAKLITQRKFDNLTKAERGGLSELDKAGFIKRQLVETRQITKHVAQILDSRMNTKYDENDKLIREVKVITLKSKLVSDFRKDFQFYKVREINNYHHAHDAYLNAVVGTALIKKYPKLESEFVYGDYKVYDVRKMIAKSEQEIGKATAKYFFYSNIMNFFKTEITLANGEIRKRPLIETNGETGEIVWDKGRDFATVRKVLSMPQVNIVKKTEVQTGGFSKESILPKRNSDKLIARKKDWDPKKYGGFDSPTVAYSVLVVAKVEKGKSKKLKSVKELLGITIMERSSFEKNPIDFLEAKGYKEVKKDLIIKLPKYSLFELENGRKRMLASAGELQKGNELALPSKYVNFLYLASHYEKLKGSPEDNEQKQLFVEQHKHYLDEIIEQISEFSKRVILADANLDKVLSAYNKHRDKPIREQAENIIHLFTLTNLGAPAAFKYFDTTIDRKRYTSTKEVLDATLIHQSITGLYETRIDLSQLGGDGGPAPGGGGSSGGLLGRDLLTKLKAQIQFSTEGPQVTWEDRPAMCLVLNLEEEYRLHEKPVPPSIDPSWLQLFPMVWAEKAGMGLANQVPPVVVELKSDASPVAVRQYPMSKEAREGIRPHIQRFLDLGILVPCQSPWNTPLLPVKKPGTNDYRPVQDLREVNKRVQDIHPTVPNPYNLLSSLPPSHTWYSVLDLKDAFFCLKLHPNSQPLFAFEWRDPEKGNTGQLTWTRLPQGFKNSPTLFNEALHRDLASFRALNPQVVMLQYVDDLLVAAPTYRDCKEGTRRLLQELSKLGYRVSAKKAQLCREEVTYLGYLLKGGKRWLTPARKATVMKIPTPTTPRQVREFLGTAGFCRLWIPGFASLAAPLYPLTRPKVPFTWTEAHQEAFGRIKEALLSAPALALPDLTKPFALYVDEKEGVARGVLTQTLGPWRRPVAYLSKKLDPVASGWPTCLKAIAAVALLLKDADKLTLGQNVLVIAPHNLESIVRQPPDRWMTNARMTHYQSLLLNERVSFAPPAILNPATLLPVESDDTPIHICSEILAEETGTRPDLRDQPLPGVPAWYTDGSSFIMDGRRQAGAAIVDNKRTVWASNLPEGTSAQKAELIALTQALRLAEGKSINIYTDSRYAFATAHVHGAIYKQRGWLTSAGKDIKNKEEILALLEAIHLPKRVAIIHCPGHQRGTDPVATGNRKADEAAKQAAQSTRILTETTKNAGKRTADGSEFEKRTADGSEFESPKKKAKVE

SEQ ID NO: 7418 - protein, 2216 aa, synthetic construct
MPAAKRVKLDGGDKKYSIGLDIGTNSVGWAVITDEYKVPSKKFKVLGNTDRHSIKKNLIGALLFDSGETAEATRLKRTARRRYTRRKNRICYLQEIFSNEMAKVDDSFFHRLEESFLVEEDKKHERHPIFGNIVDEVAYHEKYPTIYHLRKKLVDSTDKADLRLIYLALAHMIKFRGHFLIEGDLNPDNSDVDKLFIQLVQTYNQLFEENPINASGVDAKAILSARLSKSRRLENLIAQLPGEKKNGLFGNLIALSLGLTPNFKSNFDLAEDAKLQLSKDTYDDDLDNLLAQIGDQYADLFLAAKNLSDAILLSDILRVNTEITKAPLSASMIKRYDEHHQDLTLLKALVRQQLPEKYKEIFFDQSKNGYAGYIDGGASQEEFYKFIKPILEKMDGTEELLVKLNREDLLRKQRTFDNGSIPHQIHLGELHAILRRQEDFYPFLKDNREKIEKILTFRIPYYVGPLARGNSRFAWMTRKSEETITPWNFEEVVDKGASAQSFIERMTNFDKNLPNEKVLPKHSLLYEYFTVYNELTKVKYVTEGMRKPAFLSGEQKKAIVDLLFKTNRKVTVKQLKEDYFKKIECFDSVEISGVEDRFNASLGTYHDLLKIIKDKDFLDNEENEDILEDIVLTLTLFEDREMIEERLKTYAHLFDDKVMKQLKRRRYTGWGRLSRKLINGIRDKQSGKTILDFLKSDGFANRNFMQLIHDDSLTFKEDIQKAQVSGQGDSLHEHIANLAGSPAIKKGILQTVKVVDELVKVMGRHKPENIVIEMARENQTTQKGQKNSRERMKRIEEGIKELGSQILKEHPVENTQLQNEKLYLYYLQNGRDMYVDQELDINRLSDYDVDHIVPQSFLKDDSIDNKVLTRSDKARGKSDNVPSEEVVKKMKNYWRQLLNAKLITQRKFDNLTKAERGGLSELDKAGFIKRQLVETRQITKHVAQILDSRMNTKYDENDKLIREVKVITLKSKLVSDFRKDFQFYKVREINNYHHAHDAYLNAVVGTALIKKYPKLESEFVYGDYKVYDVRKMIAKSEQEIGKATAKYFFYSNIMNFFKTEITLANGEIRKRPLIETNGETGEIVWDKGRDFATVRKVLSMPQVNIVKKTEVQTGGFSKESILPKRNSDKLIARKKDWDPKKYGGFDSPTVAYSVLVVAKVEKGKSKKLKSVKELLGITIMERSSFEKNPIDFLEAKGYKEVKKDLIIKLPKYSLFELENGRKRMLASAGELQKGNELALPSKYVNFLYLASHYEKLKGSPEDNEQKQLFVEQHKHYLDEIIEQISEFSKRVILADANLDKVLSAYNKHRDKPIREQAENIIHLFTLTNLGAPAAFKYFDTTIDRKRYTSTKEVLDATLIHQSITGLYETRIDLSQLGGDGGPAPGGGGSSGGTLGDQGSRGSDPLPEPRVTLTVEGIPTEFLVNTGAEHSVLTKPMGKMGSKRTVVAGATGSKVYPWTTKRLLKIGQKQVTHSFLVIPECPAPLLGRDLLTKLKAQIQFSTEGPQVTWEDRPAMCLVLNLEEEYRLHEKPVPPSIDPSWLQLFPMVWAEKAGMGLANQVPPVVVELKSDASPVAVRQYPMSKEAREGIRPHIQRFLDLGILVPCQSPWNTPLLPVKKPGTNDYRPVQDLREVNKRVQDIHPTVPNPYNLLSSLPPSHTWYSVLDLKDAFFCLKLHPNSQPLFAFEWRDPEKGNTGQLTWTRLPQGFKNSPTLFNEALHRDLASFRALNPQVVMLQYVDDLLVAAPTYRDCKEGTRRLLQELSKLGYRVSAKKAQLCREEVTYLGYLLKGGKRWLTPARKATVMKIPTPTTPRQVREFLGTAGFCRLWIPGFASLAAPLYPLTRPKVPFTWTEAHQEAFGRIKEALLSAPALALPDLTKPFALYVDEKEGVARGVLTQTLGPWRRPVAYLSKKLDPVASGWPTCLKAIAAVALLLKDADKLTLGQNVLVIAPHNLESIVRQPPDRWMTNARMTHYQSLLLNERVSFAPPAILNPATLLPVESDDTPIHICSEILAEETGTRPDLRDQPLPGVPAWYTDGSSFIMDGRRQAGAAIVDNKRTVWASNLPEGTSAQKAELIALTQALRLAEGKSINIYTDSRYAFATAHVHGAIYKQRGWLTSAGKDIKNKEEILALLEAIHLPKRVAIIHCPGHQRGTDPVATGNRKADEAAKQAAQSTRILTETTKNAGKRTADGSEFEKRTADGSEFESPKKKAKVE

SEQ ID NO: 7419 - protein, 2094 aa, synthetic construct
MPAAKRVKLDGGDKKYSIGLDIGTNSVGWAVITDEYKVPSKKFKVLGNTDRHSIKKNLIGALLFDSGETAEATRLKRTARRRYTRRKNRICYLQEIFSNEMAKVDDSFFHRLEESFLVEEDKKHERHPIFGNIVDEVAYHEKYPTIYHLRKKLVDSTDKADLRLIYLALAHMIKFRGHFLIEGDLNPDNSDVDKLFIQLVQTYNQLFEENPINASGVDAKAILSARLSKSRRLENLIAQLPGEKKNGLFGNLIALSLGLTPNFKSNFDLAEDAKLQLSKDTYDDDLDNLLAQIGDQYADLFLAAKNLSDAILLSDILRVNTEITKAPLSASMIKRYDEHHQDLTLLKALVRQQLPEKYKEIFFDQSKNGYAGYIDGGASQEEFYKFIKPILEKMDGTEELLVKLNREDLLRKQRTFDNGSIPHQIHLGELHAILRRQEDFYPFLKDNREKIEKILTFRIPYYVGPLARGNSRFAWMTRKSEETITPWNFEEVVDKGASAQSFIERMTNFDKNLPNEKVLPKHSLLYEYFTVYNELTKVKYVTEGMRKPAFLSGEQKKAIVDLLFKTNRKVTVKQLKEDYFKKIECFDSVEISGVEDRFNASLGTYHDLLKIIKDKDFLDNEENEDILEDIVLTLTLFEDREMIEERLKTYAHLFDDKVMKQLKRRRYTGWGRLSRKLINGIRDKQSGKTILDFLKSDGFANRNFMQLIHDDSLTFKEDIQKAQVSGQGDSLHEHIANLAGSPAIKKGILQTVKVVDELVKVMGRHKPENIVIEMARENQTTQKGQKNSRERMKRIEEGIKELGSQILKEHPVENTQLQNEKLYLYYLQNGRDMYVDQELDINRLSDYDVDHIVPQSFLKDDSIDNKVLTRSDKARGKSDNVPSEEVVKKMKNYWRQLLNAKLITQRKFDNLTKAERGGLSELDKAGFIKRQLVETRQITKHVAQILDSRMNTKYDENDKLIREVKVITLKSKLVSDFRKDFQFYKVREINNYHHAHDAYLNAVVGTALIKKYPKLESEFVYGDYKVYDVRKMIAKSEQEIGKATAKYFFYSNIMNFFKTEITLANGEIRKRPLIETNGETGEIVWDKGRDFATVRKVLSMPQVNIVKKTEVQTGGFSKESILPKRNSDKLIARKKDWDPKKYGGFDSPTVAYSVLVVAKVEKGKSKKLKSVKELLGITIMERSSFEKNPIDFLEAKGYKEVKKDLIIKLPKYSLFELENGRKRMLASAGELQKGNELALPSKYVNFLYLASHYEKLKGSPEDNEQKQLFVEQHKHYLDEIIEQISEFSKRVILADANLDKVLSAYNKHRDKPIREQAENIIHLFTLTNLGAPAAFKYFDTTIDRKRYTSTKEVLDATLIHQSITGLYETRIDLSQLGGDGGPAPGGGGSSGGTLNLEDEYRLYETSAEPEVSPGSTWLSDFPQAWAETGGMGLAVRQAPLIIPLKATSTPVSIKQYPMSQEAKLGIKPHIQRLLDQGILVPCQSPWNTPLLPVKKPGTNDYRPVQDLREVNKRVEDIHPTVPNPYNLLSGLPPSHRWYTVLDLKDAFFCLRLHPTSQPLFAFEWRDPGMGISGQLTWTRLPQGFKNSPTLFNEALHRDLADFRIQHPDLILLQYVDDILLAATSELDCQQGTRALLLTLGNLGYRASAKKAQLCQKQVKYLGYLLKEGQRWLTEARKETVMGQPTPKTPRQLREFLGTAGFCRLWIPGFAEMAAPLYPLTKPGTLFNWGPDQQKAYQEIKQALLTAPALGLPDLTKPFELFVDEKQGYAKGVLTQKLGPWRRPVAYLSKKLDPVAAGWPPCLRMVAAIAVLRKDAGKLTMGQPLVILAPHAVEALVKQPPDRWLSNARMTHYQAMLLDTDRVQFGPVVALNPATLLPLPEEGAPHDCLEILAETHGTRPDLTDQPIPDADHTWYTDGSSFLQEGQRKAGAAVTTETEVIWARALPAGTSAQRAELIALTQALKMAEGKRLNVYTDSRYAFATAHIHGEIYRRRGWLTSEGREIKNKSEILALLKALFLPKRLSIIHCLGHQKGDSAEARGNRLADQAAREAAIKTPPDTSTLLAGKRTADGSEFEKRTADGSEFESPKKKAKVE

SEQ ID NO: 7420 - protein, 2094 aa, synthetic construct
MPAAKRVKLDGGDKKYSIGLDIGTNSVGWAVITDEYKVPSKKFKVLGNTDRHSIKKNLIGALLFDSGETAEATRLKRTARRRYTRRKNRICYLQEIFSNEMAKVDDSFFHRLEESFLVEEDKKHERHPIFGNIVDEVAYHEKYPTIYHLRKKLVDSTDKADLRLIYLALAHMIKFRGHFLIEGDLNPDNSDVDKLFIQLVQTYNQLFEENPINASGVDAKAILSARLSKSRRLENLIAQLPGEKKNGLFGNLIALSLGLTPNFKSNFDLAEDAKLQLSKDTYDDDLDNLLAQIGDQYADLFLAAKNLSDAILLSDILRVNTEITKAPLSASMIKRYDEHHQDLTLLKALVRQQLPEKYKEIFFDQSKNGYAGYIDGGASQEEFYKFIKPILEKMDGTEELLVKLNREDLLRKQRTFDNGSIPHQIHLGELHAILRRQEDFYPFLKDNREKIEKILTFRIPYYVGPLARGNSRFAWMTRKSEETITPWNFEEVVDKGASAQSFIERMTNFDKNLPNEKVLPKHSLLYEYFTVYNELTKVKYVTEGMRKPAFLSGEQKKAIVDLLFKTNRKVTVKQLKEDYFKKIECFDSVEISGVEDRFNASLGTYHDLLKIIKDKDFLDNEENEDILEDIVLTLTLFEDREMIEERLKTYAHLFDDKVMKQLKRRRYTGWGRLSRKLINGIRDKQSGKTILDFLKSDGFANRNFMQLIHDDSLTFKEDIQKAQVSGQGDSLHEHIANLAGSPAIKKGILQTVKVVDELVKVMGRHKPENIVIEMARENQTTQKGQKNSRERMKRIEEGIKELGSQILKEHPVENTQLQNEKLYLYYLQNGRDMYVDQELDINRLSDYDVDHIVPQSFLKDDSIDNKVLTRSDKARGKSDNVPSEEVVKKMKNYWRQLLNAKLITQRKFDNLTKAERGGLSELDKAGFIKRQLVETRQITKHVAQILDSRMNTKYDENDKLIREVKVITLKSKLVSDFRKDFQFYKVREINNYHHAHDAYLNAVVGTALIKKYPKLESEFVYGDYKVYDVRKMIAKSEQEIGKATAKYFFYSNIMNFFKTEITLANGEIRKRPLIETNGETGEIVWDKGRDFATVRKVLSMPQVNIVKKTEVQTGGFSKESILPKRNSDKLIARKKDWDPKKYGGFDSPTVAYSVLVVAKVEKGKSKKLKSVKELLGITIMERSSFEKNPIDFLEAKGYKEVKKDLIIKLPKYSLFELENGRKRMLASAGELQKGNELALPSKYVNFLYLASHYEKLKGSPEDNEQKQLFVEQHKHYLDEIIEQISEFSKRVILADANLDKVLSAYNKHRDKPIREQAENIIHLFTLTNLGAPAAFKYFDTTIDRKRYTSTKEVLDATLIHQSITGLYETRIDLSQLGGDGGPAPGGGGSSGGTLGIEDEYRLHETSTEPDVSLGSTWLSDFPQAWAETGGMGLAVRQAPLIIPLKATSTPVSIQQYPMSHEARLGIKPHIQRLLDQGILVPCQSPWNTPLLPVKKPGTNDYRPVQDLREVNKRVEDIHPTVPNPYNLLSGLPPSHQWYTVLDLKDAFFCLRLHPTSQPLFAFEWRDPGMGISGQLTWTRLPQGFKNSPTLFDEALHRDLADFRIQHPDLILLQYVDDILLAATSELDCQQGTRALLQTLGDLGYRASAKKAQICQKQVKYLGYLLREGQRWLTEARKETVMGQPVPKTPRQLREFLGTAGFCRLWIPGFAEMAAPLYPLTKTGTLFSWGPDQQKAYQEIKQALLTAPALGLPDLTKPFELFVDEKQGYAKGVLTQKLGPWRRPVAYLSKKLDPVAAGWPPCLRMVAAIAVLTKDAGKLTMGQPLVILAPHAVEALVKQPPDRWLSNARMTHYQAMLLDTDRVQFGPVVALNPATLLPLPEEGAPHDCLEILAETHGTRPDLTDQPIPDADHTWYTDGSSFLQEGQRKAGAAVTTETEVIWAGALPAGTSAQRAELIALTQALKMAEGKRLNVYTDSRYAFATAHIHGEIYRRRGLLTSEGREIKNKSEILALLKALFLPKRLSIIHCLGHQKGDSAEARGNRLADQAAREAAIKTPPDTSTLLAGKRTADGSEFEKRTADGSEFESPKKKAKVE

SEQ ID NO: 7421 - protein, 2094 aa, synthetic construct
MPAAKRVKLDGGDKKYSIGLDIGTNSVGWAVITDEYKVPSKKFKVLGNTDRHSIKKNLIGALLFDSGETAEATRLKRTARRRYTRRKNRICYLQEIFSNEMAKVDDSFFHRLEESFLVEEDKKHERHPIFGNIVDEVAYHEKYPTIYHLRKKLVDSTDKADLRLIYLALAHMIKFRGHFLIEGDLNPDNSDVDKLFIQLVQTYNQLFEENPINASGVDAKAILSARLSKSRRLENLIAQLPGEKKNGLFGNLIALSLGLTPNFKSNFDLAEDAKLQLSKDTYDDDLDNLLAQIGDQYADLFLAAKNLSDAILLSDILRVNTEITKAPLSASMIKRYDEHHQDLTLLKALVRQQLPEKYKEIFFDQSKNGYAGYIDGGASQEEFYKFIKPILEKMDGTEELLVKLNREDLLRKQRTFDNGSIPHQIHLGELHAILRRQEDFYPFLKDNREKIEKILTFRIPYYVGPLARGNSRFAWMTRKSEETITPWNFEEVVDKGASAQSFIERMTNFDKNLPNEKVLPKHSLLYEYFTVYNELTKVKYVTEGMRKPAFLSGEQKKAIVDLLFKTNRKVTVKQLKEDYFKKIECFDSVEISGVEDRFNASLGTYHDLLKIIKDKDFLDNEENEDILEDIVLTLTLFEDREMIEERLKTYAHLFDDKVMKQLKRRRYTGWGRLSRKLINGIRDKQSGKTILDFLKSDGFANRNFMQLIHDDSLTFKEDIQKAQVSGQGDSLHEHIANLAGSPAIKKGILQTVKVVDELVKVMGRHKPENIVIEMARENQTTQKGQKNSRERMKRIEEGIKELGSQILKEHPVENTQLQNEKLYLYYLQNGRDMYVDQELDINRLSDYDVDHIVPQSFLKDDSIDNKVLTRSDKARGKSDNVPSEEVVKKMKNYWRQLLNAKLITQRKFDNLTKAERGGLSELDKAGFIKRQLVETRQITKHVAQILDSRMNTKYDENDKLIREVKVITLKSKLVSDFRKDFQFYKVREINNYHHAHDAYLNAVVGTALIKKYPKLESEFVYGDYKVYDVRKMIAKSEQEIGKATAKYFFYSNIMNFFKTEITLANGEIRKRPLIETNGETGEIVWDKGRDFATVRKVLSMPQVNIVKKTEVQTGGFSKESILPKRNSDKLIARKKDWDPKKYGGFDSPTVAYSVLVVAKVEKGKSKKLKSVKELLGITIMERSSFEKNPIDFLEAKGYKEVKKDLIIKLPKYSLFELENGRKRMLASAGELQKGNELALPSKYVNFLYLASHYEKLKGSPEDNEQKQLFVEQHKHYLDEIIEQISEFSKRVILADANLDKVLSAYNKHRDKPIREQAENIIHLFTLTNLGAPAAFKYFDTTIDRKRYTSTKEVLDATLIHQSITGLYETRIDLSQLGGDGGPAPGGGGSSGGTLGIEDEYRLHETSTEPDVSLGSTWLSDFPQAWAETGGMGLAVRQAPLIIPLKATSTPVSIQQYPMSHEARLGIKPHIQRLLDQGILVPCQSPWNTPLLPVKKPGTNDYRPVQDLREVNKRVEDIHPTVPNPYNLLSGLPPSHQWYTVLDLKDAFFCLRLHPTSQPLFAFEWRDPGMGISGQLTWTRLPQGFKNSPTLFNEALHRDLADFRIQHPDLILLQYVDDILLAATSELDCQQGTRALLQTLGDLGYRASAKKAQICQKQVKYLGYLLREGQRWLTEARKETVMGQPVPKTPRQLREFLGTAGFCRLWIPGFAEMAAPLYPLTKPGTLFSWGPDQQKAYQEIKQALLTAPALGLPDLTKPFELFVDEKQGYAKGVLTQKLGPWRRPVAYLSKKLDPVAAGWPPCLRMVAAIAVLTKDAGKLTMGQPLVILAPHAVEALVKQPPDRWLSNARMTHYQAMLLDTDRVQFGPVVALNPATLLPLPEEGAPHDCLEILAETHGTRPDLTDQPIPDADHTWYTDGSSFLQEGQRKAGAAVTTETEVIWAGALPAGTSAQRAELIALTQALKMAEGKRLNVYTDSRYAFATAHIHGEIYRRRGWLTSEGREIKNKSEILALLKALFLPKRLSIIHCLGHQKGDSAEARGNRLADQAAREAAIKTPPDTSTLLAGKRTADGSEFEKRTADGSEFESPKKKAKVE

SEQ ID NO: 7422 - protein, 2094 aa, synthetic construct; identical to SEQ ID NO: 7421

SEQ ID NO: 7423 - protein, 2094 aa, synthetic construct
MPAAKRVKLDGGDKKYSIGLDIGTNSVGWAVITDEYKVPSKKFKVLGNTDRHSIKKNLIGALLFDSGETAEATRLKRTARRRYTRRKNRICYLQEIFSNEMAKVDDSFFHRLEESFLVEEDKKHERHPIFGNIVDEVAYHEKYPTIYHLRKKLVDSTDKADLRLIYLALAHMIKFRGHFLIEGDLNPDNSDVDKLFIQLVQTYNQLFEENPINASGVDAKAILSARLSKSRRLENLIAQLPGEKKNGLFGNLIALSLGLTPNFKSNFDLAEDAKLQLSKDTYDDDLDNLLAQIGDQYADLFLAAKNLSDAILLSDILRVNTEITKAPLSASMIKRYDEHHQDLTLLKALVRQQLPEKYKEIFFDQSKNGYAGYIDGGASQEEFYKFIKPILEKMDGTEELLVKLNREDLLRKQRTFDNGSIPHQIHLGELHAILRRQEDFYPFLKDNREKIEKILTFRIPYYVGPLARGNSRFAWMTRKSEETITPWNFEEVVDKGASAQSFIERMTNFDKNLPNEKVLPKHSLLYEYFTVYNELTKVKYVTEGMRKPAFLSGEQKKAIVDLLFKTNRKVTVKQLKEDYFKKIECFDSVEISGVEDRFNASLGTYHDLLKIIKDKDFLDNEENEDILEDIVLTLTLFEDREMIEERLKTYAHLFDDKVMKQLKRRRYTGWGRLSRKLINGIRDKQSGKTILDFLKSDGFANRNFMQLIHDDSLTFKEDIQKAQVSGQGDSLHEHIANLAGSPAIKKGILQTVKVVDELVKVMGRHKPENIVIEMARENQTTQKGQKNSRERMKRIEEGIKELGSQILKEHPVENTQLQNEKLYLYYLQNGRDMYVDQELDINRLSDYDVDHIVPQSFLKDDSIDNKVLTRSDKARGKSDNVPSEEVVKKMKNYWRQLLNAKLITQRKFDNLTKAERGGLSELDKAGFIKRQLVETRQITKHVAQILDSRMNTKYDENDKLIREVKVITLKSKLVSDFRKDFQFYKVREINNYHHAHDAYLNAVVGTALIKKYPKLESEFVYGDYKVYDVRKMIAKSEQEIGKATAKYFFYSNIMNFFKTEITLANGEIRKRPLIETNGETGEIVWDKGRDFATVRKVLSMPQVNIVKKTEVQTGGFSKESILPKRNSDKLIARKKDWDPKKYGGFDSPTVAYSVLVVAKVEKGKSKKLKSVKELLGITIMERSSFEKNPIDFLEAKGYKEVKKDLIIKLPKYSLFELENGRKRMLASAGELQKGNELALPSKYVNFLYLASHYEKLKGSPEDNEQKQLFVEQHKHYLDEIIEQISEFSKRVILADANLDKVLSAYNKHRDKPIREQAENIIHLFTLTNLGAPAAFKYFDTTIDRKRYTSTKEVLDATLIHQSITGLYETRIDLSQLGGDGGPAPGGGGSSGGTLNIEDEYRLHETSKEPDVSLGSTWLSDFPQAWAETGGMGLAVRQAPLIIPLKATSTPVSIKQYPMSQEARLGIKPHIQRLLDQGILVPCQSPWNTPLLPVKKPGTNDYRPVQDLREVNKRVEDIHPTVPNPYNLLSGLPPSHQWYTVLDLKDAFFCLRLHPTSQPLFAFEWRDPEMGISGQLTWTRLPQGFKNSPTLFDEALHRDLAGFRIQHPDLILLQYVDDLLLAATSELDCQQGTRALLQTLGDLGYRASAKKAQICQKQVKYLGYLLKEGQRWLTEARKETVMGQPIPKTPRQLREFLGTAGFCRLWIPGFAEMAAPLYPLTKTGTLFNWGPDQQKAFQEIKQALLTAPALGLPDLTKPFELFVDEKQGYAKGVLTQKLGPWRRPVAYLSKKLDPVAAGWPPCLRMVAAIAVLTKDAGKLTMGQPLVILAPHAVEALVKQPPDRWLSNARMTHYQALLLDTDRVQFGPVVALNPATLLPLPEEGLQHDCLDILAEAHGTRSDLMDQPLPDADHTWYTDGSSFLQEGQRKAGAAVTTETEVIWARALPAGTSAQRAELIALTQALKMAEGKKLNVYTDSRYAFATAHIHGEIYRRRGLLTSEGKEIKNKDEILALLKALFLPKRLSIIHCPGHQKGNSAEARGNRMADQAAREVATRETPETSTLLAGKRTADGSEFEKRTADGSEFESPKKKAKVE

SEQ ID NO: 7424 - protein, 2094 aa, synthetic construct
MPAAKRVKLDGGDKKYSIGLDIGTNSVGWAVITDEYKVPSKKFKVLGNTDRHSIKKNLIGALLFDSGETAEATRLKRTARRRYTRRKNRICYLQEIFSNEMAKVDDSFFHRLEESFLVEEDKKHERHPIFGNIVDEVAYHEKYPTIYHLRKKLVDSTDKADLRLIYLALAHMIKFRGHFLIEGDLNPDNSDVDKLFIQLVQTYNQLFEENPINASGVDAKAILSARLSKSRRLENLIAQLPGEKKNGLFGNLIALSLGLTPNFKSNFDLAEDAKLQLSKDTYDDDLDNLLAQIGDQYADLFLAAKNLSDAILLSDILRVNTEITKAPLSASMIKRYDEHHQDLTLLKALVRQQLPEKYKEIFFDQSKNGYAGYIDGGASQEEFYKFIKPILEKMDGTEELLVKLNREDLLRKQRTFDNGSIPHQIHLGELHAILRRQEDFYPFLKDNREKIEKILTFRIPYYVGPLARGNSRFAWMTRKSEETITPWNFEEVVDKGASAQSFIERMTNFDKNLPNEKVLPKHSLLYEYFTVYNELTKVKYVTEGMRKPAFLSGEQKKAIVDLLFKTNRKVTVKQLKEDYFKKIECFDSVEISGVEDRFNASLGTYHDLLKIIKDKDFLDNEENEDILEDIVLTLTLFEDREMIEERLKTYAHLFDDKVMKQLKRRRYTGWGRLSRKLINGIRDKQSGKTILDFLKSDGFANRNFMQLIHDDSLTFKEDIQKAQVSGQGDSLHEHIANLAGSPAIKKGILQTVKVVDELVKVMGRHKPENIVIEMARENQTTQKGQKNSRERMKRIEEGIKELGSQILKEHPVENTQLQNEKLYLYYLQNGRDMYVDQELDINRLSDYDVDHIVPQSFLKDDSIDNKVLTRSDKARGKSDNVPSEEVVKKMKNYWRQLLNAKLITQRKFDNLTKAERGGLSELDKAGFIKRQLVETRQITKHVAQILDSRMNTKYDENDKLIREVKVITLKSKLVSDFRKDFQFYKVREINNYHHAHDAYLNAVVGTALIKKYPKLESEFVYGDYKVYDVRKMIAKSEQEIGKATAKYFFYSNIMNFFKTEITLANGEIRKRPLIETNGETGEIVWDKGRDFATVRKVLSMPQVNIVKKTEVQTGGFSKESILPKRNSDKLIARKKDWDPKKYGGFDSPTVAYSVLVVAKVEKGKSKKLKSVKELLGITIMERSSFEKNPIDFLEAKGYKEVKKDLIIKLPKYSLFELENGRKRMLASAGELQKGNELALPSKYVNFLYLASHYEKLKGSPEDNEQKQLFVEQHKHYLDEIIEQISEFSKRVILADANLDKVLSAYNKHRDKPIREQAENIIHLFTLTNLGAPAAFKYFDTTIDRKRYTSTKEVLDATLIHQSITGLYETRIDLSQLGGDGGPAPGGGGSSGGTLNIEDEYRLHETSKGPDVPLGSTWLSDFPQAWAETGGMGLAVRQAPLIIPLKATSTPVSIKQYPMSQEARLGIKPHIQRLLDQGILVPCQSPWNTPLLPVKKPGTNDYRPVQDLREVNKRVEDIHPTVPNPYNLLSGLPPSHQWYTVLDLKDAFFCLRLHPTSQSLFAFEWRDPEMGISGQLTWTRLPQGFKNSPTLFNEALHRDLADFRIQHPDLILLQYVDDLLLAATSELDCQQGTRALLQTLGDLGYRASAKKAQICQKQVKYLGYLLKEGQRWLTEARKETVMGQPTPKTPRQLREFLGKAGFCRLFIPGFAEMAAPLYPLTKPGTLFEWGPDQQKAYQEIKQALLTAPALGLPDLTKPFELFVDEKQGYAKGVLTQKLGPWRRPVAYLSKKLDPVAAGWPPCLRMVAAIAVLTKDAGKLTMGQPLVILAPHAVEALVKQPPDRWLSNARMTHYQALLLDTDRVQFGPIVALNPATLLPLPEEGLQHDCLDILAEAHGTRPDLTDQPLPDADHTWYTDGSSFLQEGQRKAGAAVTTETEVVWAKALPAGTSAQRAELIALTQALKMAEGKKLNVYTDSRYAFATAHIHGEIYRRRGWLTSEGKEIKNKDEILALLKALFLPKRLSIIHCPGHQKGNRAEARGNRMADQAAREVATRETPETSTLLAGKRTADGSEFEKRTADGSEFESPKKKAKVE

SEQ ID NO: 7425 - protein, 2094 aa, synthetic construct
MPAAKRVKLDGGDKKYSIGLDIGTNSVGWAVITDEYKVPSKKFKVLGNTDRHSIKKNLIGALLFDSGETAEATRLKRTARRRYTRRKNRICYLQEIFSNEMAKVDDSFFHRLEESFLVEEDKKHERHPIFGNIVDEVAYHEKYPTIYHLRKKLVDSTDKADLRLIYLALAHMIKFRGHFLIEGDLNPDNSDVDKLFIQLVQTYNQLFEENPINASGVDAKAILSARLSKSRRLENLIAQLPGEKKNGLFGNLIALSLGLTPNFKSNFDLAEDAKLQLSKDTYDDDLDNLLAQIGDQYADLFLAAKNLSDAILLSDILRVNTEITKAPLSASMIKRYDEHHQDLTLLKALVRQQLPEKYKEIFFDQSKNGYAGYIDGGASQEEFYKFIKPILEKMDGTEELLVKLNREDLLRKQRTFDNGSIPHQIHLGELHAILRRQEDFYPFLKDNREKIEKILTFRIPYYVGPLARGNSRFAWMTRKSEETITPWNFEEVVDKGASAQSFIERMTNFDKNLPNEKVLPKHSLLYEYFTVYNELTKVKYVTEGMRKPAFLSGEQKKAIVDLLFKTNRKVTVKQLKEDYFKKIECFDSVEISGVEDRFNASLGTYHDLLKIIKDKDFLDNEENEDILEDIVLTLTLFEDREMIEERLKTYAHLFDDKVMKQLKRRRYTGWGRLSRKLINGIRDKQSGKTILDFLKSDGFANRNFMQLIHDDSLTFKEDIQKAQVSGQGDSLHEHIANLAGSPAIKKGILQTVKVVDELVKVMGRHKPENIVIEMARENQTTQKGQKNSRERMKRIEEGIKELGSQILKEHPVENTQLQNEKLYLYYLQNGRDMYVDQELDINRLSDYDVDHIVPQSFLKDDSIDNKVLTRSDKARGKSDNVPSEEVVKKMKNYWRQLLNAKLITQRKFDNLTKAERGGLSELDKAGFIKRQLVETRQITKHVAQILDSRMNTKYDENDKLIREVKVITLKSKLVSDFRKDFQFYKVREINNYHHAHDAYLNAVVGTALIKKYPKLESEFVYGDYKVYDVRKMIAKSEQEIGKATAKYFFYSNIMNFFKTEITLANGEIRKRPLIETNGETGEIVWDKGRDFATVRKVLSMPQVNIVKKTEVQTGGFSKESILPKRNSDKLIARKKDWDPKKYGGFDSPTVAYSVLVVAKVEKGKSKKLKSVKELLGITIMERSSFEKNPIDFLEAKGYKEVKKDLIIKLPKYSLFELENGRKRMLASAGELQKGNELALPSKYVNFLYLASHYEKLKGSPEDNEQKQLFVEQHKHYLDEIIEQISEFSKRVILADANLDKVLSAYNKHRDKPIREQAENIIHLFTLTNLGAPAAFKYFDTTIDRKRYTSTKEVLDATLIHQSITGLYETRIDLSQLGGDGGPAPGGGGSSGGTLNIEDEHRLHETSKEPDVSLGSTWLSDFPQAWAETGGMGLAVRQAPLIIPLKATSTPVSIKQYPMSQEARLGIKPHIQRLLDQGILVPCQSPWNTPLLPVKKPGTNDYRPVQDLREVNKRVEDIHPTVPNPYNLLSGLPPSHQWYTVLDLKDAFFCLRLHPTSQPLFAFEWRDPEMGISGQLTWTRLPQGFKNSPTLFNEALHRDLADFRIQHPDLILLQYVDDLLLAATSELDCQQGTRALLQTLGNLGYRASAKKAQICQKQVKYLGYLLKEGQRWLTEARKETVMGQPTPKTPRQLREFLGTAGFCRLWIPGFAEMAAPLYPLTKPGTLFNWGPDQQKAYQEIKQALLTAPALGLPDLTKPFELFVDEKQGYAKGVLTQKLGPWRRPVAYLSKKLDPVAAGWPPCLRMVAAIAVLTKDAGKLTMGQPLVILAPHAVEALVKQPPDRWLSNARMTHYQALLLDTDRVQFGPVVALNPATLLPLPEEGLQHNCLDILAEAHGTRPDLTDQPLPDADHTWYTDGSSLLQEGQRKAGAAVTTETEVIWAKALPAGTSAQRAELIALTQALKMAEGKKLNVYTDSRYAFATAHIHGEIYRRRGWLTSEGKEIKNKDEILALLKALFLPKRLSIIHCPGHQKGHSAEARGNRMADQAARKAAITETPDTSTLLAGKRTADGSEFEKRTADGSEFESPKKKAKVE

SEQ ID NO: 7426 - protein, 2094 aa, synthetic construct; identical to SEQ ID NO: 7425

SEQ ID NO: 7427 - protein, 2114 aa, synthetic construct
MPAAKRVKLDGGDKKYSIGLDIGTNSVGWAVITDEYKVPSKKFKVLGNTDRHSIKKNLIGALLFDSGETAEATRLKRTARRRYTRRKNRICYLQEIFSNEMAKVDDSFFHRLEESFLVEEDKKHERHPIFGNIVDEVAYHEKYPTIYHLRKKLVDSTDKADLRLIYLALAHMIKFRGHFLIEGDLNPDNSDVDKLFIQLVQTYNQLFEENPINASGVDAKAILSARLSKSRRLENLIAQLPGEKKNGLFGNLIALSLGLTPNFKSNFDLAEDAKLQLSKDTYDDDLDNLLAQIGDQYADLFLAAKNLSDAILLSDILRVNTEITKAPLSASMIKRYDEHHQDLTLLKALVRQQLPEKYKEIFFDQSKNGYAGYIDGGASQEEFYKFIKPILEKMDGTEELLVKLNREDLLRKQRTFDNGSIPHQIHLGELHAILRRQEDFYPFLKDNREKIEKILTFRIPYYVGPLARGNSRFAWMTRKSEETITPWNFEEVVDKGASAQSFIERMTNFDKNLPNEKVLPKHSLLYEYFTVYNELTKVKYVTEGMRKPAFLSGEQKKAIVDLLFKTNRKVTVKQLKEDYFKKIECFDSVEISGVEDRFNASLGTYHDLLKIIKDKDFLDNEENEDILEDIVLTLTLFEDREMIEERLKTYAHLFDDKVMKQLKRRRYTGWGRLSRKLINGIRDKQSGKTILDFLKSDGFANRNFMQLIHDDSLTFKEDIQKAQVSGQGDSLHEHIANLAGSPAIKKGILQTVKVVDELVKVMGRHKPENIVIEMARENQTTQKGQKNSRERMKRIEEGIKELGSQILKEHPVENTQLQNEKLYLYYLQNGRDMYVDQELDINRLSDYDVDHIVPQSFLKDDSIDNKVLTRSDKARGKSDNVPSEEVVKKMKNYWRQLLNAKLITQRKFDNLTKAERGGLSELDKAGFIKRQLVETRQITKHVAQILDSRMNTKYDENDKLIREVKVITLKSKLVSDFRKDFQFYKVREINNYHHAHDAYLNAVVGTALIKKYPKLESEFVYGDYKVYDVRKMIAKSEQEIGKATAKYFFYSNIMNFFKTEITLANGEIRKRPLIETNGETGEIVWDKGRDFATVRKVLSMPQVNIVKKTEVQTGGFSKESILPKRNSDKLIARKKDWDPKKYGGFDSPTVAYSVLVVAKVEKGKSKKLKSVKELLGITIMERSSFEKNPIDFLEAKGYKEVKKDLIIKLPKYSLFELENGRKRMLASAGELQKGNELALPSKYVNFLYLASHYEKLKGSPEDNEQKQLFVEQHKHYLDEIIEQISEFSKRVILADANLDKVLSAYNKHRDKPIREQAENIIHLFTLTNLGAPAAFKYFDTTIDRKRYTSTKEVLDATLIHQSITGLYETRIDLSQLGGDGGPAPGGGGSSGGVQEISDSRPMLHIYLNGRRFLGLLDTGADKTCIAGRDWPANWPIHQTESSLQGLGMACGVARSSQPLRWQHEDKSGIIHPFVIPTLPFTLWGRDIMKDIKVRLMTDSPDDSQDLMIGAIESNLFADQISWKSDQPVWLNQWPLKQEKLQALQQLVTEQLQLGHLEESNSPWNTPVFVIKKKSGKWRLLQDLRAVNATMHDMGALQPGLPSPVAVPKGWEIIIIDLQDCFFNIKLHPEDCKRFAFSVPSPNFKRPYQRFQWKVLPQGMKNSPTLCQKFVDKAILTVRDKYQDSYIVHYMDDILLAHPSRSIVDEILTSMIQALNKHGLVVSTEKIQKYDNLKYLGTHIQGDSVSYQKLQIRTDKLRTLNDFQKLLGNINWIRPFLKLTTGELKPLFEILNPDSNPISTRKLTPEACKALQLMNERLSTARVKRLDLSQPWSLCILKTEYTPTACLWQDGVVEWIHLPHISPKVITPYDIFCTQLIIKGRHRSKELFSKDPDYIVVPYTKVQFDLLLQEKEDWPISLLGFLGEVHFHLPKDPLLTFTLQTAIIFPHMTSTTPLEKGIVIFTDGSANGRSVTYIQGREPIIKENTQNTAQQAEIVAVITAFEEVSQPFNLYTDSKYVTGLFPEIETATLSPRTKIYTELKHLQRLIHKRQEKFYIGHIRGHTGLPGPLAQGNAYADSLTRILTAAGKRTADGSEFEKRTADGSEFESPKKKAKVE

SEQ ID NO: 7428 - protein, 2114 aa, synthetic construct
MPAAKRVKLDGGDKKYSIGLDIGTNSVGWAVITDEYKVPSKKFKVLGNTDRHSIKKNLIGALLFDSGETAEATRLKRTARRRYTRRKNRICYLQEIFSNEMAKVDDSFFHRLEESFLVEEDKKHERHPIFGNIVDEVAYHEKYPTIYHLRKKLVDSTDKADLRLIYLALAHMIKFRGHFLIEGDLNPDNSDVDKLFIQLVQTYNQLFEENPINASGVDAKAILSARLSKSRRLENLIAQLPGEKKNGLFGNLIALSLGLTPNFKSNFDLAEDAKLQLSKDTYDDDLDNLLAQIGDQYADLFLAAKNLSDAILLSDILRVNTEITKAPLSASMIKRYDEHHQDLTLLKALVRQQLPEKYKEIFFDQSKNGYAGYIDGGASQEEFYKFIKPILEKMDGTEELLVKLNREDLLRKQRTFDNGSIPHQIHLGELHAILRRQEDFYPFLKDNREKIEKILTFRIPYYVGPLARGNSRFAWMTRKSEETITPWNFEEVVDKGASAQSFIERMTNFDKNLPNEKVLPKHSLLYEYFTVYNELTKVKYVTEGMRKPAFLSGEQKKAIVDLLFKTNRKVTVKQLKEDYFKKIECFDSVEISGVEDRFNASLGTYHDLLKIIKDKDFLDNEENEDILEDIVLTLTLFEDREMIEERLKTYAHLFDDKVMKQLKRRRYTGWGRLSRKLINGIRDKQSGKTILDFLKSDGFANRNFMQLIHDDSLTFKEDIQKAQVSGQGDSLHEHIANLAGSPAIKKGILQTVKVVDELVKVMGRHKPENIVIEMARENQTTQKGQKNSRERMKRIEEGIKELGSQILKEHPVENTQLQNEKLYLYYLQNGRDMYVDQELDINRLSDYDVDHIVPQSFLKDDSIDNKVLTRSDKARGKSDNVPSEEVVKKMKNYWRQLLNAKLITQRKFDNLTKAERGGLSELDKAGFIKRQLVETRQITKHVAQILDSRMNTKYDENDKLIREVKVITLKSKLVSDFRKDFQFYKVREINNYHHAHDAYLNAVVGTALIKKYPKLESEFVYGDYKVYDVRKMIAKSEQEIGKATAKYFFYSNIMNFFKTEITLANGEIRKRPLIETNGETGEIVWDKGRDFATVRKVLSMPQVNIVKKTEVQTGGFSKESILPKRNSDKLIARKKDWDPKKYGGFDSPTVAYSVLVVAKVEKGKSKKLKSVKELLGITIMERSSFEKNPIDFLEAKGYKEVKKDLIIKLPKYSLFELENGRKRMLASAGELQKGNELALPSKYVNFLYLASHYEKLKGSPEDNEQKQLFVEQHKHYLDEIIEQISEFSKRVILADANLDKVLSAYNKHRDKPIREQAENIIHLFTLTNLGAPAAFKYFDTTIDRKRYTSTKEVLDATLIHQSITGLYETRIDLSQLGGDGGPAPGGGGSSGGVQEISDSRPMLHIYLNGRRFLGLLDTGADKTCIAGRDWPANWPIHQTESSLQGLGMACGVARSSQPLRWQHEDKSGIIHPFVIPTLPFTLWGRDIMKDIKVRLMTDSPDDSQDLMIGAIESNLFADQISWKSDQPVWLNQWPLKQEKLQALQQLVTEQLQLGHLEESNSPWNTPVFVIKKKSGKWRLLQDLRAVNATMHDMGALQPGLPSPVAVPKGWEIIIIDLQDCFFNIKLHPEDCKRFAFSVPSPNFKRPYQRFQWKVLPQGMKNSPTLCQKFVDKAILTVRDKYQDSYIVHYMDDILLAHPSRSIVDEILTSMIQALNKHGLVVSTEKIQKYDNLKYLGTHIQGDSVSYQKLQIRTDKLRTLNDFQKLLGNINWIRPFLKLTTGELKPLFEILNGDSNPISTRKLTPEACKALQLMNERLSTARVKRLDLSQPWSLCILKTEYTPTACLWQDGVVEWIHLPHISPKVITPYDIFCTQLIIKGRHRSKELFSKDPDYIVVPYTKVQFDLLLQEKEDWPISLLGFLGEVHFHLPKDPLLTFTLQTAIIFPHMTSTTPLEKGIVIFTDGSANGRSVTYIQGREPIIKENTQNTAQQAEIVAVITAFEEVSQPFNLYTDSKYVTGLFPEIETATLSPRTKIYTELKHLQRLIHKRQEKFYIGHIRGHTGLPGPLAQGNAYADSLTRILTAAGKRTADGSEFEKRTADGSEFESPKKKAKVE

SEQ ID NO: 7429 - protein, 2086 aa, synthetic construct
MPAAKRVKLDGGDKKYSIGLDIGTNSVGWAVITDEYKVPSKKFKVLGNTDRHSIKKNLIGALLFDSGETAEATRLKRTARRRYTRRKNRICYLQEIFSNEMAKVDDSFFHRLEESFLVEEDKKHERHPIFGNIVDEVAYHEKYPTIYHLRKKLVDSTDKADLRLIYLALAHMIKFRGHFLIEGDLNPDNSDVDKLFIQLVQTYNQLFEENPINASGVDAKAILSARLSKSRRLENLIAQLPGEKKNGLFGNLIALSLGLTPNFKSNFDLAEDAKLQLSKDTYDDDLDNLLAQIGDQYADLFLAAKNLSDAILLSDILRVNTEITKAPLSASMIKRYDEHHQDLTLLKALVRQQLPEKYKEIFFDQSKNGYAGYIDGGASQEEFYKFIKPILEKMDGTEELLVKLNREDLLRKQRTFDNGSIPHQIHLGELHAILRRQEDFYPFLKDNREKIEKILTFRIPYYVGPLARGNSRFAWMTRKSEETITPWNFEEVVDKGASAQSFIERMTNFDKNLPNEKVLPKHSLLYEYFTVYNELTKVKYVTEGMRKPAFLSGEQKKAIVDLLFKTNRKVTVKQLKEDYFKKIECFDSVEISGVEDRFNASLGTYHDLLKIIKDKDFLDNEENEDILEDIVLTLTLFEDREMIEERLKTYAHLFDDKVMKQLKRRRYTGWGRLSRKLINGIRDKQSGKTILDFLKSDGFANRNFMQLIHDDSLTFKEDIQKAQVSGQGDSLHEHIANLAGSPAIKKGILQTVKVVDELVKVMGRHKPENIVIEMARENQTTQKGQKNSRERMKRIEEGIKELGSQILKEHPVENTQLQNEKLYLYYLQNGRDMYVDQELDINRLSDYDVDHIVPQSFLKDDSIDNKVLTRSDKARGKSDNVPSEEVVKKMKNYWRQLLNAKLITQRKFDNLTKAERGGLSELDKAGFIKRQLVETRQITKHVAQILDSRMNTKYDENDKLIREVKVITLKSKLVSDFRKDFQFYKVREINNYHHAHDAYLNAVVGTALIKKYPKLESEFVYGDYKVYDVRKMIAKSEQEIGKATAKYFFYSNIMNFFKTEITLANGEIRKRPLIETNGETGEIVWDKGRDFATVRKVLSMPQVNIVKKTEVQTGGFSKESILPKRNSDKLIARKKDWDPKKYGGFDSPTVAYSVLVVAKVEKGKSKKLKSVKELLGITIMERSSFEKNPIDFLEAKGYKEVKKDLIIKLPKYSLFELENGRKRMLASAGELQKGNELALPSKYVNFLYLASHYEKLKGSPEDNEQKQLFVEQHKHYLDEIIEQISEFSKRVILADANLDKVLSAYNKHRDKPIREQAENIIHLFTLTNLGAPAAFKYFDTTIDRKRYTSTKEVLDATLIHQSITGLYETRIDLSQLGGDGGPAPGGGGSSGGLDDEYRLYSPLVKPDQNIQFWLEQFPQAWAETAGMGLAKQVPPQVIQLKASATPVSVRQYPLSKEAQEGIRPHVQRLIQQGILVPVQSPWNTPLLPVRKPGTNDYRPVQDLREVNKRVQDIHPTVPNPYNLLCALPPQRSWYTVLDLKDAFFCLRLHPTSQPLFAFEWRDPGTGRTGQLTWTRLPQGFKNSPTIFNEALHRDLANFRIQHPQVTLLQYVDDLLLAGATKQDCLEGTKALLLELSDLGYRASAKKAQICRREVTYLGYSLRDGQRWLTEARKKTVVQIPAPTTAKQVREFLGKAGFCRLFIPGFATLAAPLYPLTKPKGEFSWAPEHQKAFDAIKKALLSAPALALPDVTKPFTLYVDERKGVARGVLTQTLGPWRRPVAYLSKKLDPVASGWPVCLKAIAAVAILVKDADKLTLGQNITVIAPHALENIVRQPPDRWMTNARMTHYQSLLLTERVTFAPPAALNPATLLPEETDEPVTHDCHQLLIEETGVRKDLTDIPLTGEVLTWFTDGSSYVVEGKRMAGAAVVDGTRTIWASSLPEGTSAQKAELMALTQALRLAEGKSINIYTDSRYAFATAHVHGAIYKQRGWLTSAGREIKNKEEILSLLEALHLPKRLAIIHCPGHQKAKDPISRGNQMADRVAKQAAQGVNLLPAGKRTADGSEFEKRTADGSEFESPKKKAKVE

SEQ ID NO: 7430 - protein, 2086 aa, synthetic construct; identical to SEQ ID NO: 7429

SEQ ID NO: 7431 - protein, 2085 aa, synthetic construct
MPAAKRVKLDGGDKKYSIGLDIGTNSVGWAVITDEYKVPSKKFKVLGNTDRHSIKKNLIGALLFDSGETAEATRLKRTARRRYTRRKNRICYLQEIFSNEMAKVDDSFFHRLEESFLVEEDKKHERHPIFGNIVDEVAYHEKYPTIYHLRKKLVDSTDKADLRLIYLALAHMIKFRGHFLIEGDLNPDNSDVDKLFIQLVQTYNQLFEENPINASGVDAKAILSARLSKSRRLENLIAQLPGEKKNGLFGNLIALSLGLTPNFKSNFDLAEDAKLQLSKDTYDDDLDNLLAQIGDQYADLFLAAKNLSDAILLSDILRVNTEITKAPLSASMIKRYDEHHQDLTLLKALVRQQLPEKYKEIFFDQSKNGYAGYIDGGASQEEFYKFIKPILEKMDGTEELLVKLNREDLLRKQRTFDNGSIPHQIHLGELHAILRRQEDFYPFLKDNREKIEKILTFRIPYYVGPLARGNSRFAWMTRKSEETITPWNFEEVVDKGASAQSFIERMTNFDKNLPNEKVLPKHSLLYEYFTVYNELTKVKYVTEGMRKPAFLSGEQKKAIVDLLFKTNRKVTVKQLKEDYFKKIECFDSVEISGVEDRFNASLGTYHDLLKIIKDKDFLDNEENEDILEDIVLTLTLFEDREMIEERLKTYAHLFDDKVMKQLKRRRYTGWGRLSRKLINGIRDKQSGKTILDFLKSDGFANRNFMQLIHDDSLTFKEDIQKAQVSGQGDSLHEHIANLAGSPAIKKGILQTVKVVDELVKVMGRHKPENIVIEMARENQTTQKGQKNSRERMKRIEEGIKELGSQILKEHPVENTQLQNEKLYLYYLQNGRDMYVDQELDINRLSDYDVDHIVPQSFLKDDSIDNKVLTRSDKARGKSDNVPSEEVVKKMKNYWRQLLNAKLITQRKFDNLTKAERGGLSELDKAGFIKRQLVETRQITKHVAQILDSRMNTKYDENDKLIREVKVITLKSKLVSDFRKDFQFYKVREINNYHHAHDAYLNAVVGTALIKKYPKLESEFVYGDYKVYDVRKMIAKSEQEIGKATAKYFFYSNIMNFFKTEITLANGEIRKRPLIETNGETGEIVWDKGRDFATVRKVLSMPQVNIVKKTEVQTGGFSKESILPKRNSDKLIARKKDWDPKKYGGFDSPTVAYSVLVVAKVEKGKSKKLKSVKELLGITIMERSSFEKNPIDFLEAKGYKEVKKDLIIKLPKYSLFELENGRKRMLASAGELQKGNELALPSKYVNFLYLASHYEKLKGSPEDNEQKQLFVEQHKHYLDEIIEQISEFSKRVILADANLDKVLSAYNKHRDKPIREQAENIIHLFTLTNLGAPAAFKYFDTTIDRKRYTSTKEVLDATLIHQSITGLYETRIDLSQLGGDGGPAPGGGGSSGGIPWLMKKPLQLTTLVPLQEYEERLLKQTMLTGSYKEKLQSLFLKYDALWQHWENQVGHRRIKPHHIATGTVNPRPQKQYPINPKAKASIQTVINDLLKQGVLIQQNSIMNTPVYPVPKPDGKWRMVLDYREVNKTIPLIAAQNQHSAGILSSIFRGKYKTTLDLSNGFWAHSITPESYWLTAFTWLGQQYCWTRLPQGFLNSPALFTADVVDLLKEVPNVQVYVDDIYISHDDPREHLEQLEKVFSLLLNAGYVVSLKKSEIAQHEVEFLGFNITKEGRGLTETFKQKLLNITPPRDLKQLQSILGLLNFARNFIPNFSELVKPLYNIIATANGKYITWTTDNSQQLQNIISMLNSAENLEERNPEVRLIMKVNTSPSAGYIRFYNEFAKRPIMYLNYVYTKAEVKFTNTEKLLTTIHKGLIKALDLGMGQEILVYSPIVSMTKIQKTPLPERKALPIRWITWMSYLEDPRIQFHYDKTLPELQQVPTVTDDIIAKIKHPSEFSMVFYTDGSAIKHPNVNKSHNAGMGIAQVQFKPEFTVINTWSIPLGDHTAQLAEVAAVEFACKKALKIDGPVLIVTDSFYVAESVNKELPYWQSNGFFNNKKKPLKHVSKWKSIADCIQLKPDIIIIHEKGHQPTASTFHTEGNNLADKLATQGSYVVNAGKRTADGSEFEKRTADGSEFESPKKKAKVE

SEQ ID NO: 7432 - protein, 2085 aa, synthetic construct
MPAAKRVKLDGGDKKYSIGLDIGTNSVGWAVITDEYKVPSKKFKVLGNTDRHSIKKNLIGALLFDSGETAEATRLKRTARRRYTRRKNRICYLQEIFSNEMAKVDDSFFHRLEESFLVEEDKKHERHPIFGNIVDEVAYHEKYPTIYHLRKKLVDSTDKADLRLIYLALAHMIKFRGHFLIEGDLNPDNSDVDKLFIQLVQTYNQLFEENPINASGVDAKAILSARLSKSRRLENLIAQLPGEKKNGLFGNLIALSLGLTPNFKSNFDLAEDAKLQLSKDTYDDDLDNLLAQIGDQYADLFLAAKNLSDAILLSDILRVNTEITKAPLSASMIKRYDEHHQDLTLLKALVRQQLPEKYKEIFFDQSKNGYAGYIDGGASQEEFYKFIKPILEKMDGTEELLVKLNREDLLRKQRTFDNGSIPHQIHLGELHAILRRQEDFYPFLKDNREKIEKILTFRIPYYVGPLARGNSRFAWMTRKSEETITPWNFEEVVDKGASAQSFIERMTNFDKNLPNEKVLPKHSLLYEYFTVYNELTKVKYVTEGMRKPAFLSGEQKKAIVDLLFKTNRKVTVKQLKEDYFKKIECFDSVEISGVEDRFNASLGTYHDLLKIIKDKDFLDNEENEDILEDIVLTLTLFEDREMIEERLKTYAHLFDDKVMKQLKRRRYTGWGRLSRKLINGIRDKQSGKTILDFLKSDGFANRNFMQLIHDDSLTFKEDIQKAQVSGQGDSLHEHIANLAGSPAIKKGILQTVKVVDELVKVMGRHKPENIVIEMARENQTTQKGQKNSRERMKRIEEGIKELGSQILKEHPVENTQLQNEKLYLYYLQNGRDMYVDQELDINRLSDYDVDHIVPQSFLKDDSIDNKVLTRSDKARGKSDNVPSEEVVKKMKNYWRQLLNAKLITQRKFDNLTKAERGGLSELDKAGFIKRQLVETRQITKHVAQILDSRMNTKYDENDKLIREVKVITLKSKLVSDFRKDFQFYKVREINNYHHAHDAYLNAVVGTALIKKYPKLESEFVYGDYKVYDVRKMIAKSEQEIGKATAKYFFYSNIMNFFKTEITLANGEIRKRPLIETNGETGEIVWDKGRDFATVRKVLSMPQVNIVKKTEVQTGGFSKESILPKRNSDKLIARKKDWDPKKYGGFDSPTVAYSVLVVAKVEKGKSKKLKSVKELLGITIMERSSFEKNPIDFLEAKGYKEVKKDLIIKLPKYSLFELENGRKRMLASAGELQKGNELALPSKYVNFLYLASHYEKLKGSPEDNEQKQLFVEQHKHYLDEIIEQISEFSKRVILADANLDKVLSAYNKHRDKPIREQAENIIHLFTLTNLGAPAAFKYFDTTIDRKRYTSTKEVLDATLIHQSITGLYETRIDLSQLGGDGGPAPGGGGSSGGIPWLMKKPLQLTTLVPLQEYEERLLKQTMLTGSYKEKLQSLFLKYDALWQHWENQVGHRRIKPHHIATGTVNPRPQKQYPINPKAKASIQTVINDLLKQGVLIQQNSIMNTPVYPVPKPDGKWRMVLDYREVNKTIPLIAAQNQHSAGILSSIFRGKYKTTLDLSNGFWAHSITPESYWLTAFTWLGQQYCWTRLPQGFLNSPALFNADVVDLLKEVPNVQVYVDDIYISHDDPREHLEQLEKVFSLLLNAGYVVSLKKSEIAQHEVEFLGFNITKEGRGLTETFKQKLLNITPPRDLKQLQSILGLLNFARNFIPNFSELVKPLYNIIATAPGKYITWTTDNSQQLQNIISMLNSAENLEERNPEVRLIMKVNTSPSAGYIRFYNEFAKRPIMYLNYVYTKAEVKFTNTEKLLTTIHKGLIKALDLGMGQEILVYSPIVSMTKIQKTPLPERKALPIRWITWMSYLEDPRIQFHYDKTLPELQQVPTVTDDIIAKIKHPSEFSMVFYTDGSAIKHPNVNKSHNAGMGIAQVQFKPEFTVINTWSIPLGDHTAQLAEVAAVEFACKKALKIDGPVLIVTDSFYVAESVNKELPYWQSNGFFNNKKKPLKHVSKWKSIADCIQLKPDIIIIHEKGHQPTASTFHTEGNNLADKLATQGSYVVNAGKRTADGSEFEKRTADGSEFESPKKKAKVE

SEQ ID NO: 7433 - protein, 2085 aa, synthetic construct
MPAAKRVKLDGGDKKYSIGLDIGTNSVGWAVITDEYKVPSKKFKVLGNTDRHSIKKNLIGALLFDSGETAEATRLKRTARRRYTRRKNRICYLQEIFSNEMAKVDDSFFHRLEESFLVEEDKKHERHPIFGNIVDEVAYHEKYPTIYHLRKKLVDSTDKADLRLIYLALAHMIKFRGHFLIEGDLNPDNSDVDKLFIQLVQTYNQLFEENPINASGVDAKAILSARLSKSRRLENLIAQLPGEKKNGLFGNLIALSLGLTPNFKSNFDLAEDAKLQLSKDTYDDDLDNLLAQIGDQYADLFLAAKNLSDAILLSDILRVNTEITKAPLSASMIKRYDEHHQDLTLLKALVRQQLPEKYKEIFFDQSKNGYAGYIDGGASQEEFYKFIKPILEKMDGTEELLVKLNREDLLRKQRTFDNGSIPHQIHLGELHAILRRQEDFYPFLKDNREKIEKILTFRIPYYVGPLARGNSRFAWMTRKSEETITPWNFEEVVDKGASAQSFIERMTNFDKNLPNEKVLPKHSLLYEYFTVYNELTKVKYVTEGMRKPAFLSGEQKKAIVDLLFKTNRKVTVKQLKEDYFKKIECFDSVEISGVEDRFNASLGTYHDLLKIIKDKDFLDNEENEDILEDIVLTLTLFEDREMIEERLKTYAHLFDDKVMKQLKRRRYTGWGRLSRKLINGIRDKQSGKTILDFLKSDGFANRNFMQLIHDDSLTFKEDIQKAQVSGQGDSLHEHIANLAGSPAIKKGILQTVKVVDELVKVMGRHKPENIVIEMARENQTTQKGQKNSRERMKRIEEGIKELGSQILKEHPVENTQLQNEKLYLYYLQNGRDMYVDQELDINRLSDYDVDHIVPQSFLKDDSIDNKVLTRSDKARGKSDNVPSEEVVKKMKNYWRQLLNAKLITQRKFDNLTKAERGGLSELDKAGFIKRQLVETRQITKHVAQILDSRMNTKYDENDKLIREVKVITLKSKLVSDFRKDFQFYKVREINNYHHAHDAYLNAVVGTALIKKYPKLESEFVYGDYKVYDVRKMIAKSEQEIGKATAKYFFYSNIMNFFKTEITLANGEIRKRPLIETNGETGEIVWDKGRDFATVRKVLSMPQVNIVKKTEVQTGGFSKESILPKRNSDKLIARKKDWDPKKYGGFDSPTVAYSVLVVAKVEKGKSKKLKSVKELLGITIMERSSFEKNPIDFLEAKGYKEVKKDLIIKLPKYSLFELENGRKRMLASAGELQKGNELALPSKYVNFLYLASHYEKLKGSPEDNEQKQLFVEQHKHYLDEIIEQISEFSKRVILADANLDKVLSAYNKHRDKPIREQAENIIHLFTLTNLGAPAAFKYFDTTIDRKRYTSTKEVLDATLIHQSITGLYETRIDLSQLGGDGGPAPGGGGSSGGIPWLMKKPLQLTTLVPLQEYEERLLKQTMLTGSYKEKLQSLFLKYDALWQHWENQVGHRRIKPHHIATGTVNPRPQKQYPINPKAKASIQTVINDLLKQGVLIQQNSIMNTPVYPVPKPDGKWRMVLDYREVNKTIPLIAAQNQHSAGILSSIFRGKYKTTLDLSNGFWAHSITPESYWLTAFTWLGQQYCWTRLPQGFLNSPALFNADVVDLLKEVPNVQVYVDDIYISHDDPREHLEQLEKVFSLLLNAGYVVSLKKSEIAQHEVEFLGFNITKEGRGLTETFKQKLLNITPPRDLKQLQSILGKLNFARNFIPNFSELVKPLYNIIATAPGKYITWTTDNSQQLQNIISMLNSAENLEERNPEVRLIMKVNTSPSAGYIRFYNEFAKRPIMYLNYVYTKAEVKFTNTEKLLTTIHKGLIKALDLGMGQEILVYSPIVSMTKIQKTPLPERKALPIRWITWMSYLEDPRIQFHYDKTLPELQQVPTVTDDIIAKIKHPSEFSMVFYTDGSAIKHPNVNKSHNAGMGIAQVQFKPEFTVINTWSIPLGDHTAQLAEVAAVEFACKKALKIDGPVLIVTDSFYVAESVNKELPYWQSNGFFNNKKKPLKHVSKWKSIADCIQLKPDIIIIHEKGHQPTASTFHTEGNNLADKLATQGSYVVNAGKRTADGSEFEKRTADGSEFESPKKKAKVE

SEQ ID NO: 7434 - protein, 2174 aa, synthetic construct
MPAAKRVKLDGGDKKYSIGLDIGTNSVGWAVITDEYKVPSKKFKVLGNTDRHSIKKNLIGALLFDSGETAEATRLKRTARRRYTRRKNRICYLQEIFSNEMAKVDDSFFHRLEESFLVEEDKKHERHPIFGNIVDEVAYHEKYPTIYHLRKKLVDSTDKADLRLIYLALAHMIKFRGHFLIEGDLNPDNSDVDKLFIQLVQTYNQLFEENPINASGVDAKAILSARLSKSRRLENLIAQLPGEKKNGLFGNLIALSLGLTPNFKSNFDLAEDAKLQLSKDTYDDDLDNLLAQIGDQYADLFLAAKNLSDAILLSDILRVNTEITKAPLSASMIKRYDEHHQDLTLLKALVRQQLPEKYKEIFFDQSKNGYAGYIDGGASQEEFYKFIKPILEKMDGTEELLVKLNREDLLRKQRTFDNGSIPHQIHLGELHAILRRQEDFYPFLKDNREKIEKILTFRIPYYVGPLARGNSRFAWMTRKSEETITPWNFEEVVDKGASAQSFIERMTNFDKNLPNEKVLPKHSLLYEYFTVYNELTKVKYVTEGMRKPAFLSGEQKKAIVDLLFKTNRKVTVKQLKEDYFKKIECFDSVEISGVEDRFNASLGTYHDLLKIIKDKDFLDNEENEDILEDIVLTLTLFEDREMIEERLKTYAHLFDDKVMKQLKRRRYTGWGRLSRKLINGIRDKQSGKTILDFLKSDGFANRNFMQLIHDDSLTFKEDIQKAQVSGQGDSLHEHIANLAGSPAIKKGILQTVKVVDELVKVMGRHKPENIVIEMARENQTTQKGQKNSRERMKRIEEGIKELGSQILKEHPVENTQLQNEKLYLYYLQNGRDMYVDQELDINRLSDYDVDHIVPQSFLKDDSIDNKVLTRSDKARGKSDNVPSEEVVKKMKNYWRQLLNAKLITQRKFDNLTKAERGGLSELDKAGFIKRQLVETRQITKHVAQILDSRMNTKYDENDKLIREVKVITLKSKLVSDFRKDFQFYKVREINNYHHAHDAYLNAVVGTALIKKYPKLESEFVYGDYKVYDVRKMIAKSEQEIGKATAKYFFYSNIMNFFKTEITLANGEIRKRPLIETNGETGEIVWDKGRDFATVRKVLSMPQVNIVKKTEVQTGGFSKESILPKRNSDKLIARKKDWDPKKYGGFDSPTVAYSVLVVAKVEKGKSKKLKSVKELLGITIMERSSFEKNPIDFLEAKGYKEVKKDLIIKLPKYSLFELENGRKRMLASAGELQKGNELALPSKYVNFLYLASHYEKLKGSPEDNEQKQLFVEQHKHYLDEIIEQISEFSKRVILADANLDKVLSAYNKHRDKPIREQAENIIHLFTLTNLGAPAAFKYFDTTIDRKRYTSTKEVLDATLIHQSITGLYETRIDLSQLGGDGGPAPGGGGSSGGMDPLQLLQPLEAEIKGTKLKAHWNSGATITCVPQAFLEEEVPIKNIWIKTIHGEKEQPVYYLTFKIQGRKVEAEVISSPYDYILVSPSDIPWLMKKPLQLTTLVPLQEYEERLLKQTMLTGSYKEKLQSLFLKYDALWQHWENQVGHRRIKPHHIATGTVNPRPQKQYPINPKAKASIQTVINDLLKQGVLIQQNSIMNTPVYPVPKPDGKWRMVLDYREVNKTIPLIAAQNQHSAGILSSIFRGKYKTTLDLSNGFWAHSITPESYWLTAFTWLGQQYCWTRLPQGFLNSPALFNADVVDLLKEVPNVQVYVDDIYISHDDPREHLEQLEKVFSLLLNAGYVVSLKKSEIAQHEVEFLGFNITKEGRGLTETFKQKLLNITPPRDLKQLQSILGKLNFARNFIPNFSELVKPLYNIIATAPGKYITWTTDNSQQLQNIISMLNSAENLEERNPEVRLIMKVNTSPSAGYIRFYNEFAKRPIMYLNYVYTKAEVKFTNTEKLLTTIHKGLIKALDLGMGQEILVYSPIVSMTKIQKTPLPERKALPIRWITWMSYLEDPRIQFHYDKTLPELQQVPTVTDDIIAKIKHPSEFSMVFYTDGSAIKHPNVNKSHNAGMGIAQVQFKPEFTVINTWSIPLGDHTAQLAEVAAVEFACKKALKIDGPVLIVTDSFYVAESVNKELPYWQSNGFFNNKKKPLKHVSKWKSIADCIQLKPDIIIIHEKGHQPTASTFHTEGNNLADKLATQGSYVVNAGKRTADGSEFEKRTADGSEFESPKKKAKVE

SEQ ID NO: 7435 - protein, 2092 aa, synthetic construct
MPAAKRVKLDGGDKKYSIGLDIGTNSVGWAVITDEYKVPSKKFKVLGNTDRHSIKKNLIGALLFDSGETAEATRLKRTARRRYTRRKNRICYLQEIFSNEMAKVDDSFFHRLEESFLVEEDKKHERHPIFGNIVDEVAYHEKYPTIYHLRKKLVDSTDKADLRLIYLALAHMIKFRGHFLIEGDLNPDNSDVDKLFIQLVQTYNQLFEENPINASGVDAKAILSARLSKSRRLENLIAQLPGEKKNGLFGNLIALSLGLTPNFKSNFDLAEDAKLQLSKDTYDDDLDNLLAQIGDQYADLFLAAKNLSDAILLSDILRVNTEITKAPLSASMIKRYDEHHQDLTLLKALVRQQLPEKYKEIFFDQSKNGYAGYIDGGASQEEFYKFIKPILEKMDGTEELLVKLNREDLLRKQRTFDNGSIPHQIHLGELHAILRRQEDFYPFLKDNREKIEKILTFRIPYYVGPLARGNSRFAWMTRKSEETITPWNFEEVVDKGASAQSFIERMTNFDKNLPNEKVLPKHSLLYEYFTVYNELTKVKYVTEGMRKPAFLSGEQKKAIVDLLFKTNRKVTVKQLKEDYFKKIECFDSVEISGVEDRFNASLGTYHDLLKIIKDKDFLDNEENEDILEDIVLTLTLFEDREMIEERLKTYAHLFDDKVMKQLKRRRYTGWGRLSRKLINGIRDKQSGKTILDFLKSDGFANRNFMQLIHDDSLTFKEDIQKAQVSGQGDSLHEHIANLAGSPAIKKGILQTVKVVDELVKVMGRHKPENIVIEMARENQTTQKGQKNSRERMKRIEEGIKELGSQILKEHPVENTQLQNEKLYLYYLQNGRDMYVDQELDINRLSDYDVDHIVPQSFLKDDSIDNKVLTRSDKARGKSDNVPSEEVVKKMKNYWRQLLNAKLITQRKFDNLTKAERGGLSELDKAGFIKRQLVETRQITKHVAQILDSRMNTKYDENDKLIREVKVITLKSKLVSDFRKDFQFYKVREINNYHHAHDAYLNAVVGTALIKKYPKLESEFVYGDYKVYDVRKMIAKSEQEIGKATAKYFFYSNIMNFFKTEITLANGEIRKRPLIETNGETGEIVWDKGRDFATVRKVLSMPQVNIVKKTEVQTGGFSKESILPKRNSDKLIARKKDWDPKKYGGFDSPTVAYSVLVVAKVEKGKSKKLKSVKELLGITIMERSSFEKNPIDFLEAKGYKEVKKDLIIKLPKYSLFELENGRKRMLASAGELQKGNELALPSKYVNFLYLASHYEKLKGSPEDNEQKQLFVEQHKHYLDEIIEQISEFSKRVILADANLDKVLSAYNKHRDKPIREQAENIIHLFTLTNLGAPAAFKYFDTTIDRKRYTSTKEVLDATLIHQSITGLYETRIDLSQLGGDGGPAPGGGGSSGGVLNLEEEYRLHEKPVPSSIDPSWLQLFPTVWAERAGMGLANQVPPVVVELRSGASPVAVRQYPMSKEAREGIRPHIQRFLDLGVLVPCQSPWNTPLLPVKKPGTNDYRPVQDLREINKRVQDIHPTVPNPYNLLSSLPPSHTWYSVLDLKDAFFCLKLHPNSQPLFAFEWRDPEKGNTGQLTWTRLPQGFKNSPTLFNEALHRDLAPFRALNPQVVLLQYVDDLLVAAPTYRDCKEGTQKLLQELSKLGYRVSAKKAQLCQKEVTYLGYLLKEGKRWLTPARKATVMKIPPPTTPRQVREFLGTAGFCRLWIPGFASLAAPLYPLTKPSIPFIWTEEHQKAFDRIKEALLSAPALALPDLTKPFTLYVDERAGVARGVLTQTLGPWRRPVAYLSKKLDPVASGWPTCLKAVAAVALLLKDADKLTLGQNVTVIASHSLESIVRQPPDRWMTNARMTHYQSLLLNERVSFAPPAVLNPATLLPVESEATPVHRCSEILAEETGTRRDLKDQPLPGVPAWYTDGSSFIAEGKRRAGAAIVDGKRTVWASSLPEGTSAQKAELVALTQALRLAEGKDINIYTDSRYAFATAHIHGAIYKQRGWLTSAGKDIKNKEEILALLEAIHLPKRVAIIHCPGHQKGNDPVATGNRRADEAAKQAALSTRVLAETTKPAGKRTADGSEFEKRTADGSEFESPKKKAKVE

SEQ ID NO: 7436 - protein, 2094 aa, synthetic construct
MPAAKRVKLDGGDKKYSIGLDIGTNSVGWAVITDEYKVPSKKFKVLGNTDRHSIKKNLIGALLFDSGETAEATRLKRTARRRYTRRKNRICYLQEIFSNEMAKVDDSFFHRLEESFLVEEDKKHERHPIFGNIVDEVAYHEKYPTIYHLRKKLVDSTDKADLRLIYLALAHMIKFRGHFLIEGDLNPDNSDVDKLFIQLVQTYNQLFEENPINASGVDAKAILSARLSKSRRLENLIAQLPGEKKNGLFGNLIALSLGLTPNFKSNFDLAEDAKLQLSKDTYDDDLDNLLAQIGDQYADLFLAAKNLSDAILLSDILRVNTEITKAPLSASMIKRYDEHHQDLTLLKALVRQQLPEKYKEIFFDQSKNGYAGYIDGGASQEEFYKFIKPILEKMDGTEELLVKLNREDLLRKQRTFDNGSIPHQIHLGELHAILRRQEDFYPFLKDNREKIEKILTFRIPYYVGPLARGNSRFAWMTRKSEETITPWNFEEVVDKGASAQSFIERMTNFDKNLPNEKVLPKHSLLYEYFTVYNELTKVKYVTEGMRKPAFLSGEQKKAIVDLLFKTNRKVTVKQLKEDYFKKIECFDSVEISGVEDRFNASLGTYHDLLKIIKDKDFLDNEENEDILEDIVLTLTLFEDREMIEERLKTYAHLFDDKVMKQLKRRRYTGWGRLSRKLINGIRDKQSGKTILDFLKSDGFANRNFMQLIHDDSLTFKEDIQKAQVSGQGDSLHEHIANLAGSPAIKKGILQTVKVVDELVKVMGRHKPENIVIEMARENQTTQKGQKNSRERMKRIEEGIKELGSQILKEHPVENTQLQNEKLYLYYLQNGRDMYVDQELDINRLSDYDVDHIVPQSFLKDDSIDNKVLTRSDKARGKSDNVPSEEVVKKMKNYWRQLLNAKLITQRKFDNLTKAERGGLSELDKAGFIKRQLVETRQITKHVAQILDSRMNTKYDENDKLIREVKVITLKSKLVSDFRKDFQFYKVREINNYHHAHDAYLNAVVGTALIKKYPKLESEFVYGDYKVYDVRKMIAKSEQEIGKATAKYFFYSNIMNFFKTEITLANGEIRKRPLIETNGETGEIVWDKGRDFATVRKVLSMPQVNIVKKTEVQTGGFSKESILPKRNSDKLIARKKDWDPKKYGGFDSPTVAYSVLVVAKVEKGKSKKLKSVKELLGITIMERSSFEKNPIDFLEAKGYKEVKKDLIIKLPKYSLFELENGRKRMLASAGELQKGNELALPSKYVNFLYLASHYEKLKGSPEDNEQKQLFVEQHKHYLDEIIEQISEFSKRVILADANLDKVLSAYNKHRDKPIREQAENIIHLFTLTNLGAPAAFKYFDTTIDRKRYTSTKEVLDATLIHQSITGLYETRIDLSQLGGDGGPAPGGGGSSGGTLNIEDEYRLHETSKEPDVPLGSTWLSDFPQAWAETGGMGLAVRQAPLIIPLKATSTPVSIKQYPMSQEARLGIKPHIQRLLDQGILVPCQSPWNTPLLPVKKPGTNDYRPVQDLREVNKRVEDIHPTVPNPYNLLSGLPPSHQWYTVLDLKDAFFCLRLHPTSQPLFAFEWRDPEMGISGQLTWTRLPQGFKNSPTLFNEALHRDLADFRIQHPDLILLQYVDDLLLAATSEQDCQRGTRALLQTLGNLGYRASAKKAQICQKQVKYLGYLLKEGQRWLTEARKETVMGQPTPKTPRQLREFLGTAGFCRLWIPGFAEMAAPLYPLTKPGTLFNWGPDQQKAYQEIKQALLTAPALGLPDLTKPFELFVDEKQGYAKGVLTQKLGPWRRPVAYLSKKLDPVAAGWPPCLRMVAAIAVLTKDAGKLTMGQPLVILAPHAVEALVKQPPDRWLSNARMTHYQAMLLDTDRVQFGPVVALNPATLLPLPEKEAPHDCLEILAETHGTRPDLTDQPIPDADYTWYTDGSSFLQEGQRRAGAAVTTETEVIWARALPAGTSAQRAELIALTQALKMAEGKKLNVYTDSRYAFATAHVHGEIYRRRGWLTSEGREIKNKNEILALLKALFLPKRLSIIHCPGHQKGNSAEARGNRMADQAAREAAMKAVLETSTLLAGKRTADGSEFEKRTADGSEFESPKKKAKVE

SEQ ID NO: 7437 - protein, 2094 aa, synthetic construct
MPAAKRVKLDGGDKKYSIGLDIGTNSVGWAVITDEYKVPSKKFKVLGNTDRHSIKKNLIGALLFDSGETAEATRLKRTARRRYTRRKNRICYLQEIFSNEMAKVDDSFFHRLEESFLVEEDKKHERHPIFGNIVDEVAYHEKYPTIYHLRKKLVDSTDKADLRLIYLALAHMIKFRGHFLIEGDLNPDNSDVDKLFIQLVQTYNQLFEENPINASGVDAKAILSARLSKSRRLENLIAQLPGEKKNGLFGNLIALSLGLTPNFKSNFDLAEDAKLQLSKDTYDDDLDNLLAQIGDQYADLFLAAKNLSDAILLSDILRVNTEITKAPLSASMIKRYDEHHQDLTLLKALVRQQLPEKYKEIFFDQSKNGYAGYIDGGASQEEFYKFIKPILEKMDGTEELLVKLNREDLLRKQRTFDNGSIPHQIHLGELHAILRRQEDFYPFLKDNREKIEKILTFRIPYYVGPLARGNSRFAWMTRKSEETITPWNFEEVVDKGASAQSFIERMTNFDKNLPNEKVLPKHSLLYEYFTVYNELTKVKYVTEGMRKPAFLSGEQKKAIVDLLFKTNRKVTVKQLKEDYFKKIECFDSVEISGVEDRFNASLGTYHDLLKIIKDKDFLDNEENEDILEDIVLTLTLFEDREMIEERLKTYAHLFDDKVMKQLKRRRYTGWGRLSRKLINGIRDKQSGKTILDFLKSDGFANRNFMQLIHDDSLTFKEDIQKAQVSGQGDSLHEHIANLAGSPAIKKGILQTVKVVDELVKVMGRHKPENIVIEMARENQTTQKGQKNSRERMKRIEEGIKELGSQILKEHPVENTQLQNEKLYLYYLQNGRDMYVDQELDINRLSDYDVDHIVPQSFLKDDSIDNKVLTRSDKARGKSDNVPSEEVVKKMKNYWRQLLNAKLITQRKFDNLTKAERGGLSELDKAGFIKRQLVETRQITKHVAQILDSRMNTKYDENDKLIREVKVITLKSKLVSDFRKDFQFYKVREINNYHHAHDAYLNAVVGTALIKKYPKLESEFVYGDYKVYDVRKMIAKSEQEIGKATAKYFFYSNIMNFFKTEITLANGEIRKRPLIETNGETGEIVWDKGRDFATVRKVLSMPQVNIVKKTEVQTGGFSKESILPKRNSDKLIARKKDWDPKKYGGFDSPTVAYSVLVVAKVEKGKSKKLKSVKELLGITIMERSSFEKNPIDFLEAKGYKEVKKDLIIKLPKYSLFELENGRKRMLASAGELQKGNELALPSKYVNFLYLASHYEKLKGSPEDNEQKQLFVEQHKHYLDEIIEQISEFSKRVILADANLDKVLSAYNKHRDKPIREQAENIIHLFTLTNLGAPAAFKYFDTTIDRKRYTSTKEVLDATLIHQSITGLYETRIDLSQLGGDGGPAPGGGGSSGGTLNIEDEYRLHETSKEPDVPLGSTWLSDFPQAWAETGGMGLAVRQAPLIIPLKATSTPVSIKQYPMSQEARLGIKPHIQRLLDQGILVPCQSPWNTPLLPVKKPGTNDYRPVQDLREVNKRVEDIHPTVPNPYNLLSGLPPSHQWYTVLDLKDAFFCLRLHPTSQPLFAFEWRDPEMGISGQLTWTRLPQGFKNSPTLFNEALHRDLADFRIQHPDLILLQYVDDLLLAATSEQDCQRGTRALLQTLGNLGYRASAKKAQICQKQVKYLGYLLKEGQRWLTEARKETVMGQPTPKTPRQLREFLGKAGFCRLFIPGFAEMAAPLYPLTKPGTLFNWGPDQQKAYQEIKQALLTAPALGLPDLTKPFELFVDEKQGYAKGVLTQKLGPWRRPVAYLSKKLDPVAAGWPPCLRMVAAIAVLTKDAGKLTMGQPLVILAPHAVEALVKQPPDRWLSNARMTHYQAMLLDTDRVQFGPVVALNPATLLPLPEKEAPHDCLEILAETHGTRPDLTDQPIPDADYTWYTDGSSFLQEGQRRAGAAVTTETEVIWARALPAGTSAQRAELIALTQALKMAEGKKLNVYTDSRYAFATAHVHGEIYRRRGWLTSEGREIKNKNEILALLKALFLPKRLSIIHCPGHQKGNSAEARGNRMADQAAREAAMKAVLETSTLLAGKRTADGSEFEKRTADGSEFESPKKKAKVE

SEQ ID NO: 7438 - protein, 2096 aa, synthetic construct
MPAAKRVKLDGGDKKYSIGLDIGTNSVGWAVITDEYKVPSKKFKVLGNTDRHSIKKNLIGALLFDSGETAEATRLKRTARRRYTRRKNRICYLQEIFSNEMAKVDDSFFHRLEESFLVEEDKKHERHPIFGNIVDEVAYHEKYPTIYHLRKKLVDSTDKADLRLIYLALAHMIKFRGHFLIEGDLNPDNSDVDKLFIQLVQTYNQLFEENPINASGVDAKAILSARLSKSRRLENLIAQLPGEKKNGLFGNLIALSLGLTPNFKSNFDLAEDAKLQLSKDTYDDDLDNLLAQIGDQYADLFLAAKNLSDAILLSDILRVNTEITKAPLSASMIKRYDEHHQDLTLLKALVRQQLPEKYKEIFFDQSKNGYAGYIDGGASQEEFYKFIKPILEKMDGTEELLVKLNREDLLRKQRTFDNGSIPHQIHLGELHAILRRQEDFYPFLKDNREKIEKILTFRIPYYVGPLARGNSRFAWMTRKSEETITPWNFEEVVDKGASAQSFIERMTNFDKNLPNEKVLPKHSLLYEYFTVYNELTKVKYVTEGMRKPAFLSGEQKKAIVDLLFKTNRKVTVKQLKEDYFKKIECFDSVEISGVEDRFNASLGTYHDLLKIIKDKDFLDNEENEDILEDIVLTLTLFEDREMIEERLKTYAHLFDDKVMKQLKRRRYTGWGRLSRKLINGIRDKQSGKTILDFLKSDGFANRNFMQLIHDDSLTFKEDIQKAQVSGQGDSLHEHIANLAGSPAIKKGILQTVKVVDELVKVMGRHKPENIVIEMARENQTTQKGQKNSRERMKRIEEGIKELGSQILKEHPVENTQLQNEKLYLYYLQNGRDMYVDQELDINRLSDYDVDHIVPQSFLKDDSIDNKVLTRSDKARGKSDNVPSEEVVKKMKNYWRQLLNAKLITQRKFDNLTKAERGGLSELDKAGFIKRQLVETRQITKHVAQILDSRMNTKYDENDKLIREVKVITLKSKLVSDFRKDFQFYKVREINNYHHAHDAYLNAVVGTALIKKYPKLESEFVYGDYKVYDVRKMIAKSEQEIGKATAKYFFYSNIMNFFKTEITLANGEIRKRPLIETNGETGEIVWDKGRDFATVRKVLSMPQVNIVKKTEVQTGGFSKESILPKRNSDKLIARKKDWDPKKYGGFDSPTVAYSVLVVAKVEKGKSKKLKSVKELLGITIMERSSFEKNPIDFLEAKGYKEVKKDLIIKLPKYSLFELENGRKRMLASAGELQKGNELALPSKYVNFLYLASHYEKLKGSPEDNEQKQLFVEQHKHYLDEIIEQISEFSKRVILADANLDKVLSAYNKHRDKPIREQAENIIHLFTLTNLGAPAAFKYFDTTIDRKRYTSTKEVLDATLIHQSITGLYETRIDLSQLGGDGGPAPGSSGGGGGTAPLEEEYRLFLEAPIQNVTLLEQWKREIPKVWAEINPPGLASTQAPIHVQLLSTALPVRVRQYPITLEAKRSLRETIRKFRAAGILRPVHSPWNTPLLPVRKSGTSEYRMVQDLREVNKRVETIHPTVPNPYTLLSLLPPDRIWYSVLDLKDAFFCIPLAPESQLIFAFEWADAEEGESGQLTWTRLPQGFKNSPTLFNEALNRDLQGFRLDHPSVSLLQYVDDLLIAADTQAACLSATRDLLMTLAELGYRVSGKKAQLCQEEVTYLGFKIHKGSRSLSNSRTQAILQIPVPKTKRQVREFLGKIGYCRLFIPGFAELAQPLYAATRPGNDPLVWGEKEEEAFQSLKLALTQPPALALPSLDKPFQLFVEETSGAAKGVLTQALGPWKRPVAYLSKRLDPVAAGWPRCLRAIAAAALLTREASKLTFGQDIEITSSHNLESLLRSPPDKWLTNARITQYQVLLLDPPRVRFKQTAALNPATLLPETDDTLPIHHCLDTLDSLTSTRPDLTDQPLAQAEATLFTDGSSYIRDGKRYAGAAVVTLDSVIWAEPLPIGTSAQKAELIALTKALEWSKDKSVNIYTDSRYAFATLHVHGMIYRERGWLTAGGKAIKNAPEILALLTAVWLPKRVAVMHCKGHQKDDAPTSTGNRRADEVAREVAIRPLSTQATISAGKRTADGSEFEKRTADGSEFESPKKKAKVE

SEQ ID NO: 7439 - protein, 2171 aa, synthetic construct
MPAAKRVKLDGGDKKYSIGLDIGTNSVGWAVITDEYKVPSKKFKVLGNTDRHSIKKNLIGALLFDSGETAEATRLKRTARRRYTRRKNRICYLQEIFSNEMAKVDDSFFHRLEESFLVEEDKKHERHPIFGNIVDEVAYHEKYPTIYHLRKKLVDSTDKADLRLIYLALAHMIKFRGHFLIEGDLNPDNSDVDKLFIQLVQTYNQLFEENPINASGVDAKAILSARLSKSRRLENLIAQLPGEKKNGLFGNLIALSLGLTPNFKSNFDLAEDAKLQLSKDTYDDDLDNLLAQIGDQYADLFLAAKNLSDAILLSDILRVNTEITKAPLSASMIKRYDEHHQDLTLLKALVRQQLPEKYKEIFFDQSKNGYAGYIDGGASQEEFYKFIKPILEKMDGTEELLVKLNREDLLRKQRTFDNGSIPHQIHLGELHAILRRQEDFYPFLKDNREKIEKILTFRIPYYVGPLARGNSRFAWMTRKSEETITPWNFEEVVDKGASAQSFIERMTNFDKNLPNEKVLPKHSLLYEYFTVYNELTKVKYVTEGMRKPAFLSGEQKKAIVDLLFKTNRKVTVKQLKEDYFKKIECFDSVEISGVEDRFNASLGTYHDLLKIIKDKDFLDNEENEDILEDIVLTLTLFEDREMIEERLKTYAHLFDDKVMKQLKRRRYTGWGRLSRKLINGIRDKQSGKTILDFLKSDGFANRNFMQLIHDDSLTFKEDIQKAQVSGQGDSLHEHIANLAGSPAIKKGILQTVKVVDELVKVMGRHKPENIVIEMARENQTTQKGQKNSRERMKRIEEGIKELGSQILKEHPVENTQLQNEKLYLYYLQNGRDMYVDQELDINRLSDYDVDHIVPQSFLKDDSIDNKVLTRSDKARGKSDNVPSEEVVKKMKNYWRQLLNAKLITQRKFDNLTKAERGGLSELDKAGFIKRQLVETRQITKHVAQILDSRMNTKYDENDKLIREVKVITLKSKLVSDFRKDFQFYKVREINNYHHAHDAYLNAVVGTALIKKYPKLESEFVYGDYKVYDVRKMIAKSEQEIGKATAKYFFYSNIMNFFKTEITLANGEIRKRPLIETNGETGEIVWDKGRDFATVRKVLSMPQVNIVKKTEVQTGGFSKESILPKRNSDKLIARKKDWDPKKYGGFDSPTVAYSVLVVAKVEKGKSKKLKSVKELLGITIMERSSFEKNPIDFLEAKGYKEVKKDLIIKLPKYSLFELENGRKRMLASAGELQKGNELALPSKYVNFLYLASHYEKLKGSPEDNEQKQLFVEQHKHYLDEIIEQISEFSKRVILADANLDKVLSAYNKHRDKPIREQAENIIHLFTLTNLGAPAAFKYFDTTIDRKRYTSTKEVLDATLIHQSITGLYETRIDLSQLGGDGGPAPGSSGGGGGMDLLKPLTVERKGVKIKGYWNSQADITCVPKDLLQGEEPVRQQNVTTIHGTQEGDVYYVNLKIDGRRINTEVIGTTLDYAIITPGDVPWILKKPLELTIKLDLEEQQGTLLNNSILSKKGKEELKQLFEKYSALWQSWENQVGHRRIRPHKIATGTVKPTPQKQYHINPKAKPDIQIVINDLLKQGVLIQKESTMNTPVYPVPKPNGRWRMVLDYRAVNKVTPLIAVQNQHSYGILGSLFKGRYKTTIDLSNGFWAHPIVPEDYWITAFTWQGKQYCWTVLPQGFLNSPGLFTGDVVDLLQGIPNVEVYVDDVYISHDSEKEHLEYLDILFNRLKEAGYIISLKKSNIANSIVDFLGFQITNEGRGLTDTFKEKLENITAPTTLKQLQSILGLLNFARNFIPDFTELIAPLYALIPKSTKNYVPWQIEHSTTLETLITKLNGAEYLQGRKGDKTLIMKVNASYTTGYIRYYNEGEKKPISYVSIVFSKTELKFTELEKLLTTVHKGLLKALDLSMGQNIHVYSPIVSMQNIQKTPQTAKKALASRWLSWLSYLEDPRIRFFYDPQMPALKDLPAVDTGKDNKKHPSNFQHIFYTDGSAITSPTKEGHLNAGMGIVYFINKDGNLQKQQEWSISLGNHTAQFAEIAAFEFALKKCLPLGGNILVVTDSNYVAKAYNEELDVWASNGFVNNRKKPLKHISKWKSVADLKRLRPDVVVTHEPGHQKLDSSPHAYGNNLADQLATQASFKVHAGKRTADGSEFEKRTADGSEFESPKKKAKVE

SEQ ID NO: 7440 - protein, 2174 aa, synthetic construct
MPAAKRVKLDGGDKKYSIGLDIGTNSVGWAVITDEYKVPSKKFKVLGNTDRHSIKKNLIGALLFDSGETAEATRLKRTARRRYTRRKNRICYLQEIFSNEMAKVDDSFFHRLEESFLVEEDKKHERHPIFGNIVDEVAYHEKYPTIYHLRKKLVDSTDKADLRLIYLALAHMIKFRGHFLIEGDLNPDNSDVDKLFIQLVQTYNQLFEENPINASGVDAKAILSARLSKSRRLENLIAQLPGEKKNGLFGNLIALSLGLTPNFKSNFDLAEDAKLQLSKDTYDDDLDNLLAQIGDQYADLFLAAKNLSDAILLSDILRVNTEITKAPLSASMIKRYDEHHQDLTLLKALVRQQLPEKYKEIFFDQSKNGYAGYIDGGASQEEFYKFIKPILEKMDGTEELLVKLNREDLLRKQRTFDNGSIPHQIHLGELHAILRRQEDFYPFLKDNREKIEKILTFRIPYYVGPLARGNSRFAWMTRKSEETITPWNFEEVVDKGASAQSFIERMTNFDKNLPNEKVLPKHSLLYEYFTVYNELTKVKYVTEGMRKPAFLSGEQKKAIVDLLFKTNRKVTVKQLKEDYFKKIECFDSVEISGVEDRFNASLGTYHDLLKIIKDKDFLDNEENEDILEDIVLTLTLFEDREMIEERLKTYAHLFDDKVMKQLKRRRYTGWGRLSRKLINGIRDKQSGKTILDFLKSDGFANRNFMQLIHDDSLTFKEDIQKAQVSGQGDSLHEHIANLAGSPAIKKGILQTVKVVDELVKVMGRHKPENIVIEMARENQTTQKGQKNSRERMKRIEEGIKELGSQILKEHPVENTQLQNEKLYLYYLQNGRDMYVDQELDINRLSDYDVDHIVPQSFLKDDSIDNKVLTRSDKARGKSDNVPSEEVVKKMKNYWRQLLNAKLITQRKFDNLTKAERGGLSELDKAGFIKRQLVETRQITKHVAQILDSRMNTKYDENDKLIREVKVITLKSKLVSDFRKDFQFYKVREINNYHHAHDAYLNAVVGTALIKKYPKLESEFVYGDYKVYDVRKMIAKSEQEIGKATAKYFFYSNIMNFFKTEITLANGEIRKRPLIETNGETGEIVWDKGRDFATVRKVLSMPQVNIVKKTEVQTGGFSKESILPKRNSDKLIARKKDWDPKKYGGFDSPTVAYSVLVVAKVEKGKSKKLKSVKELLGITIMERSSFEKNPIDFLEAKGYKEVKKDLIIKLPKYSLFELENGRKRMLASAGELQKGNELALPSKYVNFLYLASHYEKLKGSPEDNEQKQLFVEQHKHYLDEIIEQISEFSKRVILADANLDKVLSAYNKHRDKPIREQAENIIHLFTLTNLGAPAAFKYFDTTIDRKRYTSTKEVLDATLIHQSITGLYETRIDLSQLGGDGGPAPGSSGGGGGMNPLQLLQPLPAEIKGTKLLAHWNSGATITCIPESFLEDEQPIKKTLIKTIHGEKQQNVYYVTFKVKGRKVEAEVIASPYEYILLSPTDVPWLTQQPLQLTILVPLQEYQEKILSKTALPEDQKQQLKTLFVKYDNLWQHWENQVGHRKIRPHNIATGDYPPRPQKQYPINPKAKPSIQIVIDDLLKQGVLTPQNSTMNTPVYPVPKPDGRWRMVLDYREVNKTIPLTAAQNQHSAGILATIVRQKYKTTLDLANGFWAHPITPESYWLTAFTWQGKQYCWTRLPQGFLNSPALFNADVVDLLKEIPNVQVYVDDIYLSHDDPKEHVQQLEKVFQILLQAGYVVSLKKSEIGQKTVEFLGFNITKEGRGLTDTFKTKLLNITPPKDLKQLQSILGKLNFARNFIPNFAELVQPLYNLIAPAKGKYIEWSEENTKQLNMVIEALNTASNLEERLPEQRLVIKVNTSPSAGYVRYYNETGKKPIMYLNYVFSKAELKFSMLEKLLTTMHKALIKAMDLAMGQEILVYSPIVSMTKIQKTPLPERKALPIRWITWMTYLEDPRIQFHYDKTLPELKHIPDVYTSSQSPVKHPSQYEGVFYTDGSAIKSPDPTKSNNAGMGIVHATYKPEYQVLNQWSIPLGNHTAQMAEIAAVEFACKKALKIPGPVLVITDSFYVAESANKELPYWKSNGFVNNKKKPLKHISKWKSIAECLSMKPDITIQHEKGISLQIPVFILKGNALADKLATQGSYVVNAGKRTADGSEFEKRTADGSEFESPKKKAKVE

SEQ ID NO: 7441 - protein, 2125 aa, synthetic construct
MPAAKRVKLDGGDKKYSIGLDIGTNSVGWAVITDEYKVPSKKFKVLGNTDRHSIKKNLIGALLFDSGETAEATRLKRTARRRYTRRKNRICYLQEIFSNEMAKVDDSFFHRLEESFLVEEDKKHERHPIFGNIVDEVAYHEKYPTIYHLRKKLVDSTDKADLRLIYLALAHMIKFRGHFLIEGDLNPDNSDVDKLFIQLVQTYNQLFEENPINASGVDAKAILSARLSKSRRLENLIAQLPGEKKNGLFGNLIALSLGLTPNFKSNFDLAEDAKLQLSKDTYDDDLDNLLAQIGDQYADLFLAAKNLSDAILLSDILRVNTEITKAPLSASMIKRYDEHHQDLTLLKALVRQQLPEKYKEIFFDQSKNGYAGYIDGGASQEEFYKFIKPILEKMDGTEELLVKLNREDLLRKQRTFDNGSIPHQIHLGELHAILRRQEDFYPFLKDNREKIEKILTFRIPYYVGPLARGNSRFAWMTRKSEETITPWNFEEVVDKGASAQSFIERMTNFDKNLPNEKVLPKHSLLYEYFTVYNELTKVKYVTEGMRKPAFLSGEQKKAIVDLLFKTNRKVTVKQLKEDYFKKIECFDSVEISGVEDRFNASLGTYHDLLKIIKDKDFLDNEENEDILEDIVLTLTLFEDREMIEERLKTYAHLFDDKVMKQLKRRRYTGWGRLSRKLINGIRDKQSGKTILDFLKSDGFANRNFMQLIHDDSLTFKEDIQKAQVSGQGDSLHEHIANLAGSPAIKKGILQTVKVVDELVKVMGRHKPENIVIEMARENQTTQKGQKNSRERMKRIEEGIKELGSQILKEHPVENTQLQNEKLYLYYLQNGRDMYVDQELDINRLSDYDVDHIVPQSFLKDDSIDNKVLTRSDKARGKSDNVPSEEVVKKMKNYWRQLLNAKLITQRKFDNLTKAERGGLSELDKAGFIKRQLVETRQITKHVAQILDSRMNTKYDENDKLIREVKVITLKSKLVSDFRKDFQFYKVREINNYHHAHDAYLNAVVGTALIKKYPKLESEFVYGDYKVYDVRKMIAKSEQEIGKATAKYFFYSNIMNFFKTEITLANGEIRKRPLIETNGETGEIVWDKGRDFATVRKVLSMPQVNIVKKTEVQTGGFSKESILPKRNSDKLIARKKDWDPKKYGGFDSPTVAYSVLVVAKVEKGKSKKLKSVKELLGITIMERSSFEKNPIDFLEAKGYKEVKKDLIIKLPKYSLFELENGRKRMLASAGELQKGNELALPSKYVNFLYLASHYEKLKGSPEDNEQKQLFVEQHKHYLDEIIEQISEFSKRVILADANLDKVLSAYNKHRDKPIREQAENIIHLFTLTNLGAPAAFKYFDTTIDRKRYTSTKEVLDATLIHQSITGLYETRIDLSQLGGDGGPAPGSSGGGGGLLGRDLLTKLKAQIQFSTEGPQVTWEDRPAMCLVLNLEEEYRLHEKPVPPSIDPSWLQLFPMVWAEKAGMGLANQVPPVVVELKSDASPVAVRQYPMSKEAREGIRPHIQRFLDLGILVPCQSPWNTPLLPVKKPGTNDYRPVQDLREVNKRVQDIHPTVPNPYNLLSSLPPSHTWYSVLDLKDAFFCLKLHPNSQPLFAFEWRDPEKGNTGQLTWTRLPQGFKNSPTLFNEALHRDLASFRALNPQVVMLQYVDDLLVAAPTYRDCKEGTRRLLQELSKLGYRVSAKKAQLCREEVTYLGYLLKGGKRWLTPARKATVMKIPTPTTPRQVREFLGTAGFCRLWIPGFASLAAPLYPLTRPKVPFTWTEAHQEAFGRIKEALLSAPALALPDLTKPFALYVDEKEGVARGVLTQTLGPWRRPVAYLSKKLDPVASGWPTCLKAIAAVALLLKDADKLTLGQNVLVIAPHNLESIVRQPPDRWMTNARMTHYQSLLLNERVSFAPPAILNPATLLPVESDDTPIHICSEILAEETGTRPDLRDQPLPGVPAWYTDGSSFIMDGRRQAGAAIVDNKRTVWASNLPEGTSAQKAELIALTQALRLAEGKSINIYTDSRYAFATAHVHGAIYKQRGWLTSAGKDIKNKEEILALLEAIHLPKRVAIIHCPGHQRGTDPVATGNRKADEAAKQAAQSTRILTETTKNAGKRTADGSEFEKRTADGSEFESPKKKAKVE

SEQ ID NO: 7442 - protein, 2094 aa, synthetic construct
MPAAKRVKLDGGDKKYSIGLDIGTNSVGWAVITDEYKVPSKKFKVLGNTDRHSIKKNLIGALLFDSGETAEATRLKRTARRRYTRRKNRICYLQEIFSNEMAKVDDSFFHRLEESFLVEEDKKHERHPIFGNIVDEVAYHEKYPTIYHLRKKLVDSTDKADLRLIYLALAHMIKFRGHFLIEGDLNPDNSDVDKLFIQLVQTYNQLFEENPINASGVDAKAILSARLSKSRRLENLIAQLPGEKKNGLFGNLIALSLGLTPNFKSNFDLAEDAKLQLSKDTYDDDLDNLLAQIGDQYADLFLAAKNLSDAILLSDILRVNTEITKAPLSASMIKRYDEHHQDLTLLKALVRQQLPEKYKEIFFDQSKNGYAGYIDGGASQEEFYKFIKPILEKMDGTEELLVKLNREDLLRKQRTFDNGSIPHQIHLGELHAILRRQEDFYPFLKDNREKIEKILTFRIPYYVGPLARGNSRFAWMTRKSEETITPWNFEEVVDKGASAQSFIERMTNFDKNLPNEKVLPKHSLLYEYFTVYNELTKVKYVTEGMRKPAFLSGEQKKAIVDLLFKTNRKVTVKQLKEDYFKKIECFDSVEISGVEDRFNASLGTYHDLLKIIKDKDFLDNEENEDILEDIVLTLTLFEDREMIEERLKTYAHLFDDKVMKQLKRRRYTGWGRLSRKLINGIRDKQSGKTILDFLKSDGFANRNFMQLIHDDSLTFKEDIQKAQVSGQGDSLHEHIANLAGSPAIKKGILQTVKVVDELVKVMGRHKPENIVIEMARENQTTQKGQKNSRERMKRIEEGIKELGSQILKEHPVENTQLQNEKLYLYYLQNGRDMYVDQELDINRLSDYDVDHIVPQSFLKDDSIDNKVLTRSDKARGKSDNVPSEEVVKKMKNYWRQLLNAKLITQRKFDNLTKAERGGLSELDKAGFIKRQLVETRQITKHVAQILDSRMNTKYDENDKLIREVKVITLKSKLVSDFRKDFQFYKVREINNYHHAHDAYLNAVVGTALIKKYPKLESEFVYGDYKVYDVRKMIAKSEQEIGKATAKYFFYSNIMNFFKTEITLANGEIRKRPLIETNGETGEIVWDKGRDFATVRKVLSMPQVNIVKKTEVQTGGFSKESILPKRNSDKLIARKKDWDPKKYGGFDSPTVAYSVLVVAKVEKGKSKKLKSVKELLGITIMERSSFEKNPIDFLEAKGYKEVKKDLIIKLPKYSLFELENGRKRMLASAGELQKGNELALPSKYVNFLYLASHYEKLKGSPEDNEQKQLFVEQHKHYLDEIIEQISEFSKRVILADANLDKVLSAYNKHRDKPIREQAENIIHLFTLTNLGAPAAFKYFDTTIDRKRYTSTKEVLDATLIHQSITGLYETRIDLSQLGGDGGPAPGSSGGGGGTLNLEDEYRLYETSAEPEVSPGSTWLSDFPQAWAETGGMGLAVRQAPLIIPLKATSTPVSIKQYPMSQEAKLGIKPHIQRLLDQGILVPCQSPWNTPLLPVKKPGTNDYRPVQDLREVNKRVEDIHPTVPNPYNLLSGLPPSHRWYTVLDLKDAFFCLRLHPTSQPLFAFEWRDPGMGISGQLTWTRLPQGFKNSPTLFNEALHRDLADFRIQHPDLILLQYVDDILLAATSELDCQQGTRALLLTLGNLGYRASAKKAQLCQKQVKYLGYLLKEGQRWLTEARKETVMGQPTPKTPRQLREFLGTAGFCRLWIPGFAEMAAPLYPLTKPGTLFNWGPDQQKAYQEIKQALLTAPALGLPDLTKPFELFVDEKQGYAKGVLTQKLGPWRRPVAYLSKKLDPVAAGWPPCLRMVAAIAVLRKDAGKLTMGQPLVILAPHAVEALVKQPPDRWLSNARMTHYQAMLLDTDRVQFGPVVALNPATLLPLPEEGAPHDCLEILAETHGTRPDLTDQPIPDADHTWYTDGSSFLQEGQRKAGAAVTTETEVIWARALPAGTSAQRAELIALTQALKMAEGKRLNVYTDSRYAFATAHIHGEIYRRRGWLTSEGREIKNKSEILALLKALFLPKRLSIIHCLGHQKGDSAEARGNRLADQAAREAAIKTPPDTSTLLAGKRTADGSEFEKRTADGSEFESPKKKAKVE

SEQ ID NO: 7443 - protein, 2094 aa, synthetic construct; identical to SEQ ID NO: 4533

SEQ ID NO: 7444 - protein, 2094 aa, synthetic construct
MPAAKRVKLDGGDKKYSIGLDIGTNSVGWAVITDEYKVPSKKFKVLGNTDRHSIKKNLIGALLFDSGETAEATRLKRTARRRYTRRKNRICYLQEIFSNEMAKVDDSFFHRLEESFLVEEDKKHERHPIFGNIVDEVAYHEKYPTIYHLRKKLVDSTDKADLRLIYLALAHMIKFRGHFLIEGDLNPDNSDVDKLFIQLVQTYNQLFEENPINASGVDAKAILSARLSKSRRLENLIAQLPGEKKNGLFGNLIALSLGLTPNFKSNFDLAEDAKLQLSKDTYDDDLDNLLAQIGDQYADLFLAAKNLSDAILLSDILRVNTEITKAPLSASMIKRYDEHHQDLTLLKALVRQQLPEKYKEIFFDQSKNGYAGYIDGGASQEEFYKFIKPILEKMDGTEELLVKLNREDLLRKQRTFDNGSIPHQIHLGELHAILRRQEDFYPFLKDNREKIEKILTFRIPYYVGPLARGNSRFAWMTRKSEETITPWNFEEVVDKGASAQSFIERMTNFDKNLPNEKVLPKHSLLYEYFTVYNELTKVKYVTEGMRKPAFLSGEQKKAIVDLLFKTNRKVTVKQLKEDYFKKIECFDSVEISGVEDRFNASLGTYHDLLKIIKDKDFLDNEENEDILEDIVLTLTLFEDREMIEERLKTYAHLFDDKVMKQLKRRRYTGWGRLSRKLINGIRDKQSGKTILDFLKSDGFANRNFMQLIHDDSLTFKEDIQKAQVSGQGDSLHEHIANLAGSPAIKKGILQTVKVVDELVKVMGRHKPENIVIEMARENQTTQKGQKNSRERMKRIEEGIKELGSQILKEHPVENTQLQNEKLYLYYLQNGRDMYVDQELDINRLSDYDVDHIVPQSFLKDDSIDNKVLTRSDKARGKSDNVPSEEVVKKMKNYWRQLLNAKLITQRKFDNLTKAERGGLSELDKAGFIKRQLVETRQITKHVAQILDSRMNTKYDENDKLIREVKVITLKSKLVSDFRKDFQFYKVREINNYHHAHDAYLNAVVGTALIKKYPKLESEFVYGDYKVYDVRKMIAKSEQEIGKATAKYFFYSNIMNFFKTEITLANGEIRKRPLIETNGETGEIVWDKGRDFATVRKVLSMPQVNIVKKTEVQTGGFSKESILPKRNSDKLIARKKDWDPKKYGGFDSPTVAYSVLVVAKVEKGKSKKLKSVKELLGITIMERSSFEKNPIDFLEAKGYKEVKKDLIIKLPKYSLFELENGRKRMLASAGELQKGNELALPSKYVNFLYLASHYEKLKGSPEDNEQKQLFVEQHKHYLDEIIEQISEFSKRVILADANLDKVLSAYNKHRDKPIREQAENIIHLFTLTNLGAPAAFKYFDTTIDRKRYTSTKEVLDATLIHQSITGLYETRIDLSQLGGDGGPAPGSSGGGGGTLNIEDEHRLHETSKEPDVSLGSTWLSDFPQAWAETGGMGLAVRQAPLIIPLKATSTPVSIKQYPMSQEARLGIKPHIQRLLDQGILVPCQSPWNTPLLPVKKPGTNDYRPVQDLREVNKRVEDIHPTVPNPYNLLSGLPPSHQWYTVLDLKDAFFCLRLHPTSQPLFAFEWRDPEMGISGQLTWTRLPQGFKNSPTLFNEALHRDLADFRIQHPDLILLQYVDDLLLAATSELDCQQGTRALLQTLGNLGYRASAKKAQICQKQVKYLGYLLKEGQRWLTEARKETVMGQPTPKTPRQLREFLGTAGFCRLWIPGFAEMAAPLYPLTKPGTLFNWGPDQQKAYQEIKQALLTAPALGLPDLTKPFELFVDEKQGYAKGVLTQKLGPWRRPVAYLSKKLDPVAAGWPPCLRMVAAIAVLTKDAGKLTMGQPLVILAPHAVEALVKQPPDRWLSNARMTHYQALLLDTDRVQFGPVVALNPATLLPLPEEGLQHNCLDILAEAHGTRPDLTDQPLPDADHTWYTDGSSLLQEGQRKAGAAVTTETEVIWAKALPAGTSAQRAELIALTQALKMAEGKKLNVYTDSRYAFATAHIHGEIYRRRGWLTSEGKEIKNKDEILALLKALFLPKRLSIIHCPGHQKGHSAEARGNRMADQAARKAAITETPDTSTLLAGKRTADGSEFEKRTADGSEFESPKKKAKVE

SEQ ID NO: 7445 - protein, 2094 aa, synthetic construct; identical to SEQ ID NO: 7444

SEQ ID NO: 7446 - protein, 2174 aa, synthetic construct
MPAAKRVKLDGGDKKYSIGLDIGTNSVGWAVITDEYKVPSKKFKVLGNTDRHSIKKNLIGALLFDSGETAEATRLKRTARRRYTRRKNRICYLQEIFSNEMAKVDDSFFHRLEESFLVEEDKKHERHPIFGNIVDEVAYHEKYPTIYHLRKKLVDSTDKADLRLIYLALAHMIKFRGHFLIEGDLNPDNSDVDKLFIQLVQTYNQLFEENPINASGVDAKAILSARLSKSRRLENLIAQLPGEKKNGLFGNLIALSLGLTPNFKSNFDLAEDAKLQLSKDTYDDDLDNLLAQIGDQYADLFLAAKNLSDAILLSDILRVNTEITKAPLSASMIKRYDEHHQDLTLLKALVRQQLPEKYKEIFFDQSKNGYAGYIDGGASQEEFYKFIKPILEKMDGTEELLVKLNREDLLRKQRTFDNGSIPHQIHLGELHAILRRQEDFYPFLKDNREKIEKILTFRIPYYVGPLARGNSRFAWMTRKSEETITPWNFEEVVDKGASAQSFIERMTNFDKNLPNEKVLPKHSLLYEYFTVYNELTKVKYVTEGMRKPAFLSGEQKKAIVDLLFKTNRKVTVKQLKEDYFKKIECFDSVEISGVEDRFNASLGTYHDLLKIIKDKDFLDNEENEDILEDIVLTLTLFEDREMIEERLKTYAHLFDDKVMKQLKRRRYTGWGRLSRKLINGIRDKQSGKTILDFLKSDGFANRNFMQLIHDDSLTFKEDIQKAQVSGQGDSLHEHIANLAGSPAIKKGILQTVKVVDELVKVMGRHKPENIVIEMARENQTTQKGQKNSRERMKRIEEGIKELGSQILKEHPVENTQLQNEKLYLYYLQNGRDMYVDQELDINRLSDYDVDHIVPQSFLKDDSIDNKVLTRSDKARGKSDNVPSEEVVKKMKNYWRQLLNAKLITQRKFDNLTKAERGGLSELDKAGFIKRQLVETRQITKHVAQILDSRMNTKYDENDKLIREVKVITLKSKLVSDFRKDFQFYKVREINNYHHAHDAYLNAVVGTALIKKYPKLESEFVYGDYKVYDVRKMIAKSEQEIGKATAKYFFYSNIMNFFKTEITLANGEIRKRPLIETNGETGEIVWDKGRDFATVRKVLSMPQVNIVKKTEVQTGGFSKESILPKRNSDKLIARKKDWDPKKYGGFDSPTVAYSVLVVAKVEKGKSKKLKSVKELLGITIMERSSFEKNPIDFLEAKGYKEVKKDLIIKLPKYSLFELENGRKRMLASAGELQKGNELALPSKYVNFLYLASHYEKLKGSPEDNEQKQLFVEQHKHYLDEIIEQISEFSKRVILADANLDKVLSAYNKHRDKPIREQAENIIHLFTLTNLGAPAAFKYFDTTIDRKRYTSTKEVLDATLIHQSITGLYETRIDLSQLGGDGGPAPGSSGGGGGMDPLQLLQPLEAEIKGTKLKAHWNSGATITCVPQAFLEEEVPIKNIWIKTIHGEKEQPVYYLTFKIQGRKVEAEVISSPYDYILVSPSDIPWLMKKPLQLTTLVPLQEYEERLLKQTMLTGSYKEKLQSLFLKYDALWQHWENQVGHRRIKPHHIATGTVNPRPQKQYPINPKAKASIQTVINDLLKQGVLIQQNSIMNTPVYPVPKPDGKWRMVLDYREVNKTIPLIAAQNQHSAGILSSIFRGKYKTTLDLSNGFWAHSITPESYWLTAFTWLGQQYCWTRLPQGFLNSPALFNADVVDLLKEVPNVQVYVDDIYISHDDPREHLEQLEKVFSLLLNAGYVVSLKKSEIAQHEVEFLGFNITKEGRGLTETFKQKLLNITPPRDLKQLQSILGKLNFARNFIPNFSELVKPLYNIIATAPGKYITWTTDNSQQLQNIISMLNSAENLEERNPEVRLIMKVNTSPSAGYIRFYNEFAKRPIMYLNYVYTKAEVKFTNTEKLLTTIHKGLIKALDLGMGQEILVYSPIVSMTKIQKTPLPERKALPIRWITWMSYLEDPRIQFHYDKTLPELQQVPTVTDDIIAKIKHPSEFSMVFYTDGSAIKHPNVNKSHNAGMGIAQVQFKPEFTVINTWSIPLGDHTAQLAEVAAVEFACKKALKIDGPVLIVTDSFYVAESVNKELPYWQSNGFFNNKKKPLKHVSKWKSIADCIQLKPDIIIIHEKGHQPTASTFHTEGNNLADKLATQGSYVVNAGKRTADGSEFEKRTADGSEFESPKKKAKVE

SEQ ID NO: 7447 - protein, 2094 aa, synthetic construct
MPAAKRVKLDGGDKKYSIGLDIGTNSVGWAVITDEYKVPSKKFKVLGNTDRHSIKKNLIGALLFDSGETAEATRLKRTARRRYTRRKNRICYLQEIFSNEMAKVDDSFFHRLEESFLVEEDKKHERHPIFGNIVDEVAYHEKYPTIYHLRKKLVDSTDKADLRLIYLALAHMIKFRGHFLIEGDLNPDNSDVDKLFIQLVQTYNQLFEENPINASGVDAKAILSARLSKSRRLENLIAQLPGEKKNGLFGNLIALSLGLTPNFKSNFDLAEDAKLQLSKDTYDDDLDNLLAQIGDQYADLFLAAKNLSDAILLSDILRVNTEITKAPLSASMIKRYDEHHQDLTLLKALVRQQLPEKYKEIFFDQSKNGYAGYIDGGASQEEFYKFIKPILEKMDGTEELLVKLNREDLLRKQRTFDNGSIPHQIHLGELHAILRRQEDFYPFLKDNREKIEKILTFRIPYYVGPLARGNSRFAWMTRKSEETITPWNFEEVVDKGASAQSFIERMTNFDKNLPNEKVLPKHSLLYEYFTVYNELTKVKYVTEGMRKPAFLSGEQKKAIVDLLFKTNRKVTVKQLKEDYFKKIECFDSVEISGVEDRFNASLGTYHDLLKIIKDKDFLDNEENEDILEDIVLTLTLFEDREMIEERLKTYAHLFDDKVMKQLKRRRYTGWGRLSRKLINGIRDKQSGKTILDFLKSDGFANRNFMQLIHDDSLTFKEDIQKAQVSGQGDSLHEHIANLAGSPAIKKGILQTVKVVDELVKVMGRHKPENIVIEMARENQTTQKGQKNSRERMKRIEEGIKELGSQILKEHPVENTQLQNEKLYLYYLQNGRDMYVDQELDINRLSDYDVDHIVPQSFLKDDSIDNKVLTRSDKARGKSDNVPSEEVVKKMKNYWRQLLNAKLITQRKFDNLTKAERGGLSELDKAGFIKRQLVETRQITKHVAQILDSRMNTKYDENDKLIREVKVITLKSKLVSDFRKDFQFYKVREINNYHHAHDAYLNAVVGTALIKKYPKLESEFVYGDYKVYDVRKMIAKSEQEIGKATAKYFFYSNIMNFFKTEITLANGEIRKRPLIETNGETGEIVWDKGRDFATVRKVLSMPQVNIVKKTEVQTGGFSKESILPKRNSDKLIARKKDWDPKKYGGFDSPTVAYSVLVVAKVEKGKSKKLKSVKELLGITIMERSSFEKNPIDFLEAKGYKEVKKDLIIKLPKYSLFELENGRKRMLASAGELQKGNELALPSKYVNFLYLASHYEKLKGSPEDNEQKQLFVEQHKHYLDEIIEQISEFSKRVILADANLDKVLSAYNKHRDKPIREQAENIIHLFTLTNLGAPAAFKYFDTTIDRKRYTSTKEVLDATLIHQSITGLYETRIDLSQLGGDGGPAPGSSGGGGGTLNIEDEYRLHETSKEPDVPLGSTWLSDFPQAWAETGGMGLAVRQAPLIIPLKATSTPVSIKQYPMSQEARLGIKPHIQRLLDQGILVPCQSPWNTPLLPVKKPGTNDYRPVQDLREVNKRVEDIHPTVPNPYNLLSGLPPSHQWYTVLDLKDAFFCLRLHPTSQPLFAFEWRDPEMGISGQLTWTRLPQGFKNSPTLFNEALHRDLADFRIQHPDLILLQYVDDLLLAATSEQDCQRGTRALLQTLGNLGYRASAKKAQICQKQVKYLGYLLKEGQRWLTEARKETVMGQPTPKTPRQLREFLGTAGFCRLWIPGFAEMAAPLYPLTKPGTLFNWGPDQQKAYQEIKQALLTAPALGLPDLTKPFELFVDEKQGYAKGVLTQKLGPWRRPVAYLSKKLDPVAAGWPPCLRMVAAIAVLTKDAGKLTMGQPLVILAPHAVEALVKQPPDRWLSNARMTHYQAMLLDTDRVQFGPVVALNPATLLPLPEKEAPHDCLEILAETHGTRPDLTDQPIPDADYTWYTDGSSFLQEGQRRAGAAVTTETEVIWARALPAGTSAQRAELIALTQALKMAEGKKLNVYTDSRYAFATAHVHGEIYRRRGWLTSEGREIKNKNEILALLKALFLPKRLSIIHCPGHQKGNSAEARGNRMADQAAREAAMKAVLETSTLLAGKRTADGSEFEKRTADGSEFESPKKKAKVE

SEQ ID NO: 7448 - protein, 2087 aa, synthetic construct
MPAAKRVKLDGGDKKYSIGLDIGTNSVGWAVITDEYKVPSKKFKVLGNTDRHSIKKNLIGALLFDSGETAEATRLKRTARRRYTRRKNRICYLQEIFSNEMAKVDDSFFHRLEESFLVEEDKKHERHPIFGNIVDEVAYHEKYPTIYHLRKKLVDSTDKADLRLIYLALAHMIKFRGHFLIEGDLNPDNSDVDKLFIQLVQTYNQLFEENPINASGVDAKAILSARLSKSRRLENLIAQLPGEKKNGLFGNLIALSLGLTPNFKSNFDLAEDAKLQLSKDTYDDDLDNLLAQIGDQYADLFLAAKNLSDAILLSDILRVNTEITKAPLSASMIKRYDEHHQDLTLLKALVRQQLPEKYKEIFFDQSKNGYAGYIDGGASQEEFYKFIKPILEKMDGTEELLVKLNREDLLRKQRTFDNGSIPHQIHLGELHAILRRQEDFYPFLKDNREKIEKILTFRIPYYVGPLARGNSRFAWMTRKSEETITPWNFEEVVDKGASAQSFIERMTNFDKNLPNEKVLPKHSLLYEYFTVYNELTKVKYVTEGMRKPAFLSGEQKKAIVDLLFKTNRKVTVKQLKEDYFKKIECFDSVEISGVEDRFNASLGTYHDLLKIIKDKDFLDNEENEDILEDIVLTLTLFEDREMIEERLKTYAHLFDDKVMKQLKRRRYTGWGRLSRKLINGIRDKQSGKTILDFLKSDGFANRNFMQLIHDDSLTFKEDIQKAQVSGQGDSLHEHIANLAGSPAIKKGILQTVKVVDELVKVMGRHKPENIVIEMARENQTTQKGQKNSRERMKRIEEGIKELGSQILKEHPVENTQLQNEKLYLYYLQNGRDMYVDQELDINRLSDYDVDHIVPQSFLKDDSIDNKVLTRSDKARGKSDNVPSEEVVKKMKNYWRQLLNAKLITQRKFDNLTKAERGGLSELDKAGFIKRQLVETRQITKHVAQILDSRMNTKYDENDKLIREVKVITLKSKLVSDFRKDFQFYKVREINNYHHAHDAYLNAVVGTALIKKYPKLESEFVYGDYKVYDVRKMIAKSEQEIGKATAKYFFYSNIMNFFKTEITLANGEIRKRPLIETNGETGEIVWDKGRDFATVRKVLSMPQVNIVKKTEVQTGGFSKESILPKRNSDKLIARKKDWDPKKYGGFDSPTVAYSVLVVAKVEKGKSKKLKSVKELLGITIMERSSFEKNPIDFLEAKGYKEVKKDLIIKLPKYSLFELENGRKRMLASAGELQKGNELALPSKYVNFLYLASHYEKLKGSPEDNEQKQLFVEQHKHYLDEIIEQISEFSKRVILADANLDKVLSAYNKHRDKPIREQAENIIHLFTLTNLGAPAAFKYFDTTIDRKRYTSTKEVLDATLIHQSITGLYETRIDLSQLGGDGGGGGEAAAKPAPGGVPWILKKPLELTIKLDLEEQQGTLLNNSILSKKGKEELKQLFEKYSALWQSWENQVGHRRIRPHKIATGTVKPTPQKQYHINPKAKPDIQIVINDLLKQGVLIQKESTMNTPVYPVPKPNGRWRMVLDYRAVNKVTPLIAVQNQHSYGILGSLFKGRYKTTIDLSNGFWAHPIVPEDYWITAFTWQGKQYCWTVLPQGFLNSPGLFTGDVVDLLQGIPNVEVYVDDVYISHDSEKEHLEYLDILFNRLKEAGYIISLKKSNIANSIVDFLGFQITNEGRGLTDTFKEKLENITAPTTLKQLQSILGLLNFARNFIPDFTELIAPLYALIPKSTKNYVPWQIEHSTTLETLITKLNGAEYLQGRKGDKTLIMKVNASYTTGYIRYYNEGEKKPISYVSIVFSKTELKFTELEKLLTTVHKGLLKALDLSMGQNIHVYSPIVSMQNIQKTPQTAKKALASRWLSWLSYLEDPRIRFFYDPQMPALKDLPAVDTGKDNKKHPSNFQHIFYTDGSAITSPTKEGHLNAGMGIVYFINKDGNLQKQQEWSISLGNHTAQFAEIAAFEFALKKCLPLGGNILVVTDSNYVAKAYNEELDVWASNGFVNNRKKPLKHISKWKSVADLKRLRPDVVVTHEPGHQKLDSSPHAYGNNLADQLATQASFKVHAGKRTADGSEFEKRTADGSEFESPKKKAKVE

SEQ ID NO: 7449 - protein, 2087 aa, synthetic construct
MPAAKRVKLDGGDKKYSIGLDIGTNSVGWAVITDEYKVPSKKFKVLGNTDRHSIKKNLIGALLFDSGETAEATRLKRTARRRYTRRKNRICYLQEIFSNEMAKVDDSFFHRLEESFLVEEDKKHERHPIFGNIVDEVAYHEKYPTIYHLRKKLVDSTDKADLRLIYLALAHMIKFRGHFLIEGDLNPDNSDVDKLFIQLVQTYNQLFEENPINASGVDAKAILSARLSKSRRLENLIAQLPGEKKNGLFGNLIALSLGLTPNFKSNFDLAEDAKLQLSKDTYDDDLDNLLAQIGDQYADLFLAAKNLSDAILLSDILRVNTEITKAPLSASMIKRYDEHHQDLTLLKALVRQQLPEKYKEIFFDQSKNGYAGYIDGGASQEEFYKFIKPILEKMDGTEELLVKLNREDLLRKQRTFDNGSIPHQIHLGELHAILRRQEDFYPFLKDNREKIEKILTFRIPYYVGPLARGNSRFAWMTRKSEETITPWNFEEVVDKGASAQSFIERMTNFDKNLPNEKVLPKHSLLYEYFTVYNELTKVKYVTEGMRKPAFLSGEQKKAIVDLLFKTNRKVTVKQLKEDYFKKIECFDSVEISGVEDRFNASLGTYHDLLKIIKDKDFLDNEENEDILEDIVLTLTLFEDREMIEERLKTYAHLFDDKVMKQLKRRRYTGWGRLSRKLINGIRDKQSGKTILDFLKSDGFANRNFMQLIHDDSLTFKEDIQKAQVSGQGDSLHEHIANLAGSPAIKKGILQTVKVVDELVKVMGRHKPENIVIEMARENQTTQKGQKNSRERMKRIEEGIKELGSQILKEHPVENTQLQNEKLYLYYLQNGRDMYVDQELDINRLSDYDVDHIVPQSFLKDDSIDNKVLTRSDKARGKSDNVPSEEVVKKMKNYWRQLLNAKLITQRKFDNLTKAERGGLSELDKAGFIKRQLVETRQITKHVAQILDSRMNTKYDENDKLIREVKVITLKSKLVSDFRKDFQFYKVREINNYHHAHDAYLNAVVGTALIKKYPKLESEFVYGDYKVYDVRKMIAKSEQEIGKATAKYFFYSNIMNFFKTEITLANGEIRKRPLIETNGETGEIVWDKGRDFATVRKVLSMPQVNIVKKTEVQTGGFSKESILPKRNSDKLIARKKDWDPKKYGGFDSPTVAYSVLVVAKVEKGKSKKLKSVKELLGITIMERSSFEKNPIDFLEAKGYKEVKKDLIIKLPKYSLFELENGRKRMLASAGELQKGNELALPSKYVNFLYLASHYEKLKGSPEDNEQKQLFVEQHKHYLDEIIEQISEFSKRVILADANLDKVLSAYNKHRDKPIREQAENIIHLFTLTNLGAPAAFKYFDTTIDRKRYTSTKEVLDATLIHQSITGLYETRIDLSQLGGDGGGGGEAAAKPAPGGVPWILKKPLELTIKLDLEEQQGTLLNNSILSKKGKEELKQLFEKYSALWQSWENQVGHRRIRPHKIATGTVKPTPQKQYHINPKAKPDIQIVINDLLKQGVLIQKESTMNTPVYPVPKPNGRWRMVLDYRAVNKVTPLIAVQNQHSYGILGSLFKGRYKTTIDLSNGFWAHPIVPEDYWITAFTWQGKQYCWTVLPQGFLNSPGLFNGDVVDLLQGIPNVEVYVDDVYISHDSEKEHLEYLDILFNRLKEAGYIISLKKSNIANSIVDFLGFQITNEGRGLTDTFKEKLENITAPTTLKQLQSILGLLNFARNFIPDFTELIAPLYALIPKSPKNYVPWQIEHSTTLETLITKLNGAEYLQGRKGDKTLIMKVNASYTTGYIRYYNEGEKKPISYVSIVFSKTELKFTELEKLLTTVHKGLLKALDLSMGQNIHVYSPIVSMQNIQKTPQTAKKALASRWLSWLSYLEDPRIRFFYDPQMPALKDLPAVDTGKDNKKHPSNFQHIFYTDGSAITSPTKEGHLNAGMGIVYFINKDGNLQKQQEWSISLGNHTAQFAEIAAFEFALKKCLPLGGNILVVTDSNYVAKAYNEELDVWASNGFVNNRKKPLKHISKWKSVADLKRLRPDVVVTHEPGHQKLDSSPHAYGNNLADQLATQASFKVHAGKRTADGSEFEKRTADGSEFESPKKKAKVE

SEQ ID NO: 7450 - protein, 2176 aa, synthetic construct
MPAAKRVKLDGGDKKYSIGLDIGTNSVGWAVITDEYKVPSKKFKVLGNTDRHSIKKNLIGALLFDSGETAEATRLKRTARRRYTRRKNRICYLQEIFSNEMAKVDDSFFHRLEESFLVEEDKKHERHPIFGNIVDEVAYHEKYPTIYHLRKKLVDSTDKADLRLIYLALAHMIKFRGHFLIEGDLNPDNSDVDKLFIQLVQTYNQLFEENPINASGVDAKAILSARLSKSRRLENLIAQLPGEKKNGLFGNLIALSLGLTPNFKSNFDLAEDAKLQLSKDTYDDDLDNLLAQIGDQYADLFLAAKNLSDAILLSDILRVNTEITKAPLSASMIKRYDEHHQDLTLLKALVRQQLPEKYKEIFFDQSKNGYAGYIDGGASQEEFYKFIKPILEKMDGTEELLVKLNREDLLRKQRTFDNGSIPHQIHLGELHAILRRQEDFYPFLKDNREKIEKILTFRIPYYVGPLARGNSRFAWMTRKSEETITPWNFEEVVDKGASAQSFIERMTNFDKNLPNEKVLPKHSLLYEYFTVYNELTKVKYVTEGMRKPAFLSGEQKKAIVDLLFKTNRKVTVKQLKEDYFKKIECFDSVEISGVEDRFNASLGTYHDLLKIIKDKDFLDNEENEDILEDIVLTLTLFEDREMIEERLKTYAHLFDDKVMKQLKRRRYTGWGRLSRKLINGIRDKQSGKTILDFLKSDGFANRNFMQLIHDDSLTFKEDIQKAQVSGQGDSLHEHIANLAGSPAIKKGILQTVKVVDELVKVMGRHKPENIVIEMARENQTTQKGQKNSRERMKRIEEGIKELGSQILKEHPVENTQLQNEKLYLYYLQNGRDMYVDQELDINRLSDYDVDHIVPQSFLKDDSIDNKVLTRSDKARGKSDNVPSEEVVKKMKNYWRQLLNAKLITQRKFDNLTKAERGGLSELDKAGFIKRQLVETRQITKHVAQILDSRMNTKYDENDKLIREVKVITLKSKLVSDFRKDFQFYKVREINNYHHAHDAYLNAVVGTALIKKYPKLESEFVYGDYKVYDVRKMIAKSEQEIGKATAKYFFYSNIMNFFKTEITLANGEIRKRPLIETNGETGEIVWDKGRDFATVRKVLSMPQVNIVKKTEVQTGGFSKESILPKRNSDKLIARKKDWDPKKYGGFDSPTVAYSVLVVAKVEKGKSKKLKSVKELLGITIMERSSFEKNPIDFLEAKGYKEVKKDLIIKLPKYSLFELENGRKRMLASAGELQKGNELALPSKYVNFLYLASHYEKLKGSPEDNEQKQLFVEQHKHYLDEIIEQISEFSKRVILADANLDKVLSAYNKHRDKPIREQAENIIHLFTLTNLGAPAAFKYFDTTIDRKRYTSTKEVLDATLIHQSITGLYETRIDLSQLGGDGGGGGEAAAKPAPGGMNPLQLLQPLPAEIKGTKLLAHWNSGATITCIPESFLEDEQPIKKTLIKTIHGEKQQNVYYVTFKVKGRKVEAEVIASPYEYILLSPTDVPWLTQQPLQLTILVPLQEYQEKILSKTALPEDQKQQLKTLFVKYDNLWQHWENQVGHRKIRPHNIATGDYPPRPQKQYPINPKAKPSIQIVIDDLLKQGVLTPQNSTMNTPVYPVPKPDGRWRMVLDYREVNKTIPLTAAQNQHSAGILATIVRQKYKTTLDLANGFWAHPITPESYWLTAFTWQGKQYCWTRLPQGFLNSPALFNADVVDLLKEIPNVQVYVDDIYLSHDDPKEHVQQLEKVFQILLQAGYVVSLKKSEIGQKTVEFLGFNITKEGRGLTDTFKTKLLNITPPKDLKQLQSILGKLNFARNFIPNFAELVQPLYNLIAPAKGKYIEWSEENTKQLNMVIEALNTASNLEERLPEQRLVIKVNTSPSAGYVRYYNETGKKPIMYLNYVFSKAELKFSMLEKLLTTMHKALIKAMDLAMGQEILVYSPIVSMTKIQKTPLPERKALPIRWITWMTYLEDPRIQFHYDKTLPELKHIPDVYTSSQSPVKHPSQYEGVFYTDGSAIKSPDPTKSNNAGMGIVHATYKPEYQVLNQWSIPLGNHTAQMAEIAAVEFACKKALKIPGPVLVITDSFYVAESANKELPYWKSNGFVNNKKKPLKHISKWKSIAECLSMKPDITIQHEKGISLQIPVFILKGNALADKLATQGSYVVNAGKRTADGSEFEKRTADGSEFESPKKKAKVE

SEQ ID NO: 7451 - protein, 2127 aa, synthetic construct
MPAAKRVKLDGGDKKYSIGLDIGTNSVGWAVITDEYKVPSKKFKVLGNTDRHSIKKNLIGALLFDSGETAEATRLKRTARRRYTRRKNRICYLQEIFSNEMAKVDDSFFHRLEESFLVEEDKKHERHPIFGNIVDEVAYHEKYPTIYHLRKKLVDSTDKADLRLIYLALAHMIKFRGHFLIEGDLNPDNSDVDKLFIQLVQTYNQLFEENPINASGVDAKAILSARLSKSRRLENLIAQLPGEKKNGLFGNLIALSLGLTPNFKSNFDLAEDAKLQLSKDTYDDDLDNLLAQIGDQYADLFLAAKNLSDAILLSDILRVNTEITKAPLSASMIKRYDEHHQDLTLLKALVRQQLPEKYKEIFFDQSKNGYAGYIDGGASQEEFYKFIKPILEKMDGTEELLVKLNREDLLRKQRTFDNGSIPHQIHLGELHAILRRQEDFYPFLKDNREKIEKILTFRIPYYVGPLARGNSRFAWMTRKSEETITPWNFEEVVDKGASAQSFIERMTNFDKNLPNEKVLPKHSLLYEYFTVYNELTKVKYVTEGMRKPAFLSGEQKKAIVDLLFKTNRKVTVKQLKEDYFKKIECFDSVEISGVEDRFNASLGTYHDLLKIIKDKDFLDNEENEDILEDIVLTLTLFEDREMIEERLKTYAHLFDDKVMKQLKRRRYTGWGRLSRKLINGIRDKQSGKTILDFLKSDGFANRNFMQLIHDDSLTFKEDIQKAQVSGQGDSLHEHIANLAGSPAIKKGILQTVKVVDELVKVMGRHKPENIVIEMARENQTTQKGQKNSRERMKRIEEGIKELGSQILKEHPVENTQLQNEKLYLYYLQNGRDMYVDQELDINRLSDYDVDHIVPQSFLKDDSIDNKVLTRSDKARGKSDNVPSEEVVKKMKNYWRQLLNAKLITQRKFDNLTKAERGGLSELDKAGFIKRQLVETRQITKHVAQILDSRMNTKYDENDKLIREVKVITLKSKLVSDFRKDFQFYKVREINNYHHAHDAYLNAVVGTALIKKYPKLESEFVYGDYKVYDVRKMIAKSEQEIGKATAKYFFYSNIMNFFKTEITLANGEIRKRPLIETNGETGEIVWDKGRDFATVRKVLSMPQVNIVKKTEVQTGGFSKESILPKRNSDKLIARKKDWDPKKYGGFDSPTVAYSVLVVAKVEKGKSKKLKSVKELLGITIMERSSFEKNPIDFLEAKGYKEVKKDLIIKLPKYSLFELENGRKRMLASAGELQKGNELALPSKYVNFLYLASHYEKLKGSPEDNEQKQLFVEQHKHYLDEIIEQISEFSKRVILADANLDKVLSAYNKHRDKPIREQAENIIHLFTLTNLGAPAAFKYFDTTIDRKRYTSTKEVLDATLIHQSITGLYETRIDLSQLGGDGGGGGEAAAKPAPGGLLGRDLLTKLKAQIQFSTEGPQVTWEDRPAMCLVLNLEEEYRLHEKPVPPSIDPSWLQLFPMVWAEKAGMGLANQVPPVVVELKSDASPVAVRQYPMSKEAREGIRPHIQRFLDLGILVPCQSPWNTPLLPVKKPGTNDYRPVQDLREVNKRVQDIHPTVPNPYNLLSSLPPSHTWYSVLDLKDAFFCLKLHPNSQPLFAFEWRDPEKGNTGQLTWTRLPQGFKNSPTLFNEALHRDLASFRALNPQVVMLQYVDDLLVAAPTYRDCKEGTRRLLQELSKLGYRVSAKKAQLCREEVTYLGYLLKGGKRWLTPARKATVMKIPTPTTPRQVREFLGTAGFCRLWIPGFASLAAPLYPLTRPKVPFTWTEAHQEAFGRIKEALLSAPALALPDLTKPFALYVDEKEGVARGVLTQTLGPWRRPVAYLSKKLDPVASGWPTCLKAIAAVALLLKDADKLTLGQNVLVIAPHNLESIVRQPPDRWMTNARMTHYQSLLLNERVSFAPPAILNPATLLPVESDDTPIHICSEILAEETGTRPDLRDQPLPGVPAWYTDGSSFIMDGRRQAGAAIVDNKRTVWASNLPEGTSAQKAELIALTQALRLAEGKSINIYTDSRYAFATAHVHGAIYKQRGWLTSAGKDIKNKEEILALLEAIHLPKRVAIIHCPGHQRGTDPVATGNRKADEAAKQAAQSTRILTETTKNAGKRTADGSEFEKRTADGSEFESPKKKAKVE

SEQ ID NO: 7452 - protein, 2096 aa, synthetic construct
MPAAKRVKLDGGDKKYSIGLDIGTNSVGWAVITDEYKVPSKKFKVLGNTDRHSIKKNLIGALLFDSGETAEATRLKRTARRRYTRRKNRICYLQEIFSNEMAKVDDSFFHRLEESFLVEEDKKHERHPIFGNIVDEVAYHEKYPTIYHLRKKLVDSTDKADLRLIYLALAHMIKFRGHFLIEGDLNPDNSDVDKLFIQLVQTYNQLFEENPINASGVDAKAILSARLSKSRRLENLIAQLPGEKKNGLFGNLIALSLGLTPNFKSNFDLAEDAKLQLSKDTYDDDLDNLLAQIGDQYADLFLAAKNLSDAILLSDILRVNTEITKAPLSASMIKRYDEHHQDLTLLKALVRQQLPEKYKEIFFDQSKNGYAGYIDGGASQEEFYKFIKPILEKMDGTEELLVKLNREDLLRKQRTFDNGSIPHQIHLGELHAILRRQEDFYPFLKDNREKIEKILTFRIPYYVGPLARGNSRFAWMTRKSEETITPWNFEEVVDKGASAQSFIERMTNFDKNLPNEKVLPKHSLLYEYFTVYNELTKVKYVTEGMRKPAFLSGEQKKAIVDLLFKTNRKVTVKQLKEDYFKKIECFDSVEISGVEDRFNASLGTYHDLLKIIKDKDFLDNEENEDILEDIVLTLTLFEDREMIEERLKTYAHLFDDKVMKQLKRRRYTGWGRLSRKLINGIRDKQSGKTILDFLKSDGFANRNFMQLIHDDSLTFKEDIQKAQVSGQGDSLHEHIANLAGSPAIKKGILQTVKVVDELVKVMGRHKPENIVIEMARENQTTQKGQKNSRERMKRIEEGIKELGSQILKEHPVENTQLQNEKLYLYYLQNGRDMYVDQELDINRLSDYDVDHIVPQSFLKDDSIDNKVLTRSDKARGKSDNVPSEEVVKKMKNYWRQLLNAKLITQRKFDNLTKAERGGLSELDKAGFIKRQLVETRQITKHVAQILDSRMNTKYDENDKLIREVKVITLKSKLVSDFRKDFQFYKVREINNYHHAHDAYLNAVVGTALIKKYPKLESEFVYGDYKVYDVRKMIAKSEQEIGKATAKYFFYSNIMNFFKTEITLANGEIRKRPLIETNGETGEIVWDKGRDFATVRKVLSMPQVNIVKKTEVQTGGFSKESILPKRNSDKLIARKKDWDPKKYGGFDSPTVAYSVLVVAKVEKGKSKKLKSVKELLGITIMERSSFEKNPIDFLEAKGYKEVKKDLIIKLPKYSLFELENGRKRMLASAGELQKGNELALPSKYVNFLYLASHYEKLKGSPEDNEQKQLFVEQHKHYLDEIIEQISEFSKRVILADANLDKVLSAYNKHRDKPIREQAENIIHLFTLTNLGAPAAFKYFDTTIDRKRYTSTKEVLDATLIHQSITGLYETRIDLSQLGGDGGGGGEAAAKPAPGGTLGIEDEYRLHETSTEPDVSLGSTWLSDFPQAWAETGGMGLAVRQAPLIIPLKATSTPVSIQQYPMSHEARLGIKPHIQRLLDQGILVPCQSPWNTPLLPVKKPGTNDYRPVQDLREVNKRVEDIHPTVPNPYNLLSGLPPSHQWYTVLDLKDAFFCLRLHPTSQPLFAFEWRDPGMGISGQLTWTRLPQGFKNSPTLFDEALHRDLADFRIQHPDLILLQYVDDILLAATSELDCQQGTRALLQTLGDLGYRASAKKAQICQKQVKYLGYLLREGQRWLTEARKETVMGQPVPKTPRQLREFLGTAGFCRLWIPGFAEMAAPLYPLTKTGTLFSWGPDQQKAYQEIKQALLTAPALGLPDLTKPFELFVDEKQGYAKGVLTQKLGPWRRPVAYLSKKLDPVAAGWPPCLRMVAAIAVLTKDAGKLTMGQPLVILAPHAVEALVKQPPDRWLSNARMTHYQAMLLDTDRVQFGPVVALNPATLLPLPEEGAPHDCLEILAETHGTRPDLTDQPIPDADHTWYTDGSSFLQEGQRKAGAAVTTETEVIWAGALPAGTSAQRAELIALTQALKMAEGKRLNVYTDSRYAFATAHIHGEIYRRRGLLTSEGREIKNKSEILALLKALFLPKRLSIIHCLGHQKGDSAEARGNRLADQAAREAAIKTPPDTSTLLAGKRTADGSEFEKRTADGSEFESPKKKAKVE

SEQ ID NO: 7453 - protein, 2096 aa, synthetic construct
MPAAKRVKLDGGDKKYSIGLDIGTNSVGWAVITDEYKVPSKKFKVLGNTDRHSIKKNLIGALLFDSGETAEATRLKRTARRRYTRRKNRICYLQEIFSNEMAKVDDSFFHRLEESFLVEEDKKHERHPIFGNIVDEVAYHEKYPTIYHLRKKLVDSTDKADLRLIYLALAHMIKFRGHFLIEGDLNPDNSDVDKLFIQLVQTYNQLFEENPINASGVDAKAILSARLSKSRRLENLIAQLPGEKKNGLFGNLIALSLGLTPNFKSNFDLAEDAKLQLSKDTYDDDLDNLLAQIGDQYADLFLAAKNLSDAILLSDILRVNTEITKAPLSASMIKRYDEHHQDLTLLKALVRQQLPEKYKEIFFDQSKNGYAGYIDGGASQEEFYKFIKPILEKMDGTEELLVKLNREDLLRKQRTFDNGSIPHQIHLGELHAILRRQEDFYPFLKDNREKIEKILTFRIPYYVGPLARGNSRFAWMTRKSEETITPWNFEEVVDKGASAQSFIERMTNFDKNLPNEKVLPKHSLLYEYFTVYNELTKVKYVTEGMRKPAFLSGEQKKAIVDLLFKTNRKVTVKQLKEDYFKKIECFDSVEISGVEDRFNASLGTYHDLLKIIKDKDFLDNEENEDILEDIVLTLTLFEDREMIEERLKTYAHLFDDKVMKQLKRRRYTGWGRLSRKLINGIRDKQSGKTILDFLKSDGFANRNFMQLIHDDSLTFKEDIQKAQVSGQGDSLHEHIANLAGSPAIKKGILQTVKVVDELVKVMGRHKPENIVIEMARENQTTQKGQKNSRERMKRIEEGIKELGSQILKEHPVENTQLQNEKLYLYYLQNGRDMYVDQELDINRLSDYDVDHIVPQSFLKDDSIDNKVLTRSDKARGKSDNVPSEEVVKKMKNYWRQLLNAKLITQRKFDNLTKAERGGLSELDKAGFIKRQLVETRQITKHVAQILDSRMNTKYDENDKLIREVKVITLKSKLVSDFRKDFQFYKVREINNYHHAHDAYLNAVVGTALIKKYPKLESEFVYGDYKVYDVRKMIAKSEQEIGKATAKYFFYSNIMNFFKTEITLANGEIRKRPLIETNGETGEIVWDKGRDFATVRKVLSMPQVNIVKKTEVQTGGFSKESILPKRNSDKLIARKKDWDPKKYGGFDSPTVAYSVLVVAKVEKGKSKKLKSVKELLGITIMERSSFEKNPIDFLEAKGYKEVKKDLIIKLPKYSLFELENGRKRMLASAGELQKGNELALPSKYVNFLYLASHYEKLKGSPEDNEQKQLFVEQHKHYLDEIIEQISEFSKRVILADANLDKVLSAYNKHRDKPIREQAENIIHLFTLTNLGAPAAFKYFDTTIDRKRYTSTKEVLDATLIHQSITGLYETRIDLSQLGGDGGGGGEAAAKPAPGGTLGIEDEYRLHETSTEPDVSLGSTWLSDFPQAWAETGGMGLAVRQAPLIIPLKATSTPVSIQQYPMSHEARLGIKPHIQRLLDQGILVPCQSPWNTPLLPVKKPGTNDYRPVQDLREVNKRVEDIHPTVPNPYNLLSGLPPSHQWYTVLDLKDAFFCLRLHPTSQPLFAFEWRDPGMGISGQLTWTRLPQGFKNSPTLFNEALHRDLADFRIQHPDLILLQYVDDILLAATSELDCQQGTRALLQTLGDLGYRASAKKAQICQKQVKYLGYLLREGQRWLTEARKETVMGQPVPKTPRQLREFLGTAGFCRLWIPGFAEMAAPLYPLTKPGTLFSWGPDQQKAYQEIKQALLTAPALGLPDLTKPFELFVDEKQGYAKGVLTQKLGPWRRPVAYLSKKLDPVAAGWPPCLRMVAAIAVLTKDAGKLTMGQPLVILAPHAVEALVKQPPDRWLSNARMTHYQAMLLDTDRVQFGPVVALNPATLLPLPEEGAPHDCLEILAETHGTRPDLTDQPIPDADHTWYTDGSSFLQEGQRKAGAAVTTETEVIWAGALPAGTSAQRAELIALTQALKMAEGKRLNVYTDSRYAFATAHIHGEIYRRRGWLTSEGREIKNKSEILALLKALFLPKRLSIIHCLGHQKGDSAEARGNRLADQAAREAAIKTPPDTSTLLAGKRTADGSEFEKRTADGSEFESPKKKAKVE

SEQ ID NO: 7454 - protein, 2096 aa, synthetic construct
MPAAKRVKLDGGDKKYSIGLDIGTNSVGWAVITDEYKVPSKKFKVLGNTDRHSIKKNLIGALLFDSGETAEATRLKRTARRRYTRRKNRICYLQEIFSNEMAKVDDSFFHRLEESFLVEEDKKHERHPIFGNIVDEVAYHEKYPTIYHLRKKLVDSTDKADLRLIYLALAHMIKFRGHFLIEGDLNPDNSDVDKLFIQLVQTYNQLFEENPINASGVDAKAILSARLSKSRRLENLIAQLPGEKKNGLFGNLIALSLGLTPNFKSNFDLAEDAKLQLSKDTYDDDLDNLLAQIGDQYADLFLAAKNLSDAILLSDILRVNTEITKAPLSASMIKRYDEHHQDLTLLKALVRQQLPEKYKEIFFDQSKNGYAGYIDGGASQEEFYKFIKPILEKMDGTEELLVKLNREDLLRKQRTFDNGSIPHQIHLGELHAILRRQEDFYPFLKDNREKIEKILTFRIPYYVGPLARGNSRFAWMTRKSEETITPWNFEEVVDKGASAQSFIERMTNFDKNLPNEKVLPKHSLLYEYFTVYNELTKVKYVTEGMRKPAFLSGEQKKAIVDLLFKTNRKVTVKQLKEDYFKKIECFDSVEISGVEDRFNASLGTYHDLLKIIKDKDFLDNEENEDILEDIVLTLTLFEDREMIEERLKTYAHLFDDKVMKQLKRRRYTGWGRLSRKLINGIRDKQSGKTILDFLKSDGFANRNFMQLIHDDSLTFKEDIQKAQVSGQGDSLHEHIANLAGSPAIKKGILQTVKVVDELVKVMGRHKPENIVIEMARENQTTQKGQKNSRERMKRIEEGIKELGSQILKEHPVENTQLQNEKLYLYYLQNGRDMYVDQELDINRLSDYDVDHIVPQSFLKDDSIDNKVLTRSDKARGKSDNVPSEEVVKKMKNYWRQLLNAKLITQRKFDNLTKAERGGLSELDKAGFIKRQLVETRQITKHVAQILDSRMNTKYDENDKLIREVKVITLKSKLVSDFRKDFQFYKVREINNYHHAHDAYLNAVVGTALIKKYPKLESEFVYGDYKVYDVRKMIAKSEQEIGKATAKYFFYSNIMNFFKTEITLANGEIRKRPLIETNGETGEIVWDKGRDFATVRKVLSMPQVNIVKKTEVQTGGFSKESILPKRNSDKLIARKKDWDPKKYGGFDSPTVAYSVLVVAKVEKGKSKKLKSVKELLGITIMERSSFEKNPIDFLEAKGYKEVKKDLIIKLPKYSLFELENGRKRMLASAGELQKGNELALPSKYVNFLYLASHYEKLKGSPEDNEQKQLFVEQHKHYLDEIIEQISEFSKRVILADANLDKVLSAYNKHRDKPIREQAENIIHLFTLTNLGAPAAFKYFDTTIDRKRYTSTKEVLDATLIHQSITGLYETRIDLSQLGGDGGGGGEAAAKPAPGGTLNIEDEYRLHETSKGPDVPLGSTWLSDFPQAWAETGGMGLAVRQAPLIIPLKATSTPVSIKQYPMSQEARLGIKPHIQRLLDQGILVPCQSPWNTPLLPVKKPGTNDYRPVQDLREVNKRVEDIHPTVPNPYNLLSGLPPSHQWYTVLDLKDAFFCLRLHPTSQSLFAFEWRDPEMGISGQLTWTRLPQGFKNSPTLFNEALHRDLADFRIQHPDLILLQYVDDLLLAATSELDCQQGTRALLQTLGDLGYRASAKKAQICQKQVKYLGYLLKEGQRWLTEARKETVMGQPTPKTPRQLREFLGTAGFCRLWIPGFAEMAAPLYPLTKPGTLFEWGPDQQKAYQEIKQALLTAPALGLPDLTKPFELFVDEKQGYAKGVLTQKLGPWRRPVAYLSKKLDPVAAGWPPCLRMVAAIAVLTKDAGKLTMGQPLVILAPHAVEALVKQPPDRWLSNARMTHYQALLLDTDRVQFGPIVALNPATLLPLPEEGLQHDCLDILAEAHGTRPDLTDQPLPDADHTWYTDGSSFLQEGQRKAGAAVTTETEVVWAKALPAGTSAQRAELIALTQALKMAEGKKLNVYTDSRYAFATAHIHGEIYRRRGWLTSEGKEIKNKDEILALLKALFLPKRLSIIHCPGHQKGNRAEARGNRMADQAAREVATRETPETSTLLAGKRTADGSEFEKRTADGSEFESPKKKAKVE

SEQ ID NO: 7455 - protein, 2096 aa, synthetic construct
MPAAKRVKLDGGDKKYSIGLDIGTNSVGWAVITDEYKVPSKKFKVLGNTDRHSIKKNLIGALLFDSGETAEATRLKRTARRRYTRRKNRICYLQEIFSNEMAKVDDSFFHRLEESFLVEEDKKHERHPIFGNIVDEVAYHEKYPTIYHLRKKLVDSTDKADLRLIYLALAHMIKFRGHFLIEGDLNPDNSDVDKLFIQLVQTYNQLFEENPINASGVDAKAILSARLSKSRRLENLIAQLPGEKKNGLFGNLIALSLGLTPNFKSNFDLAEDAKLQLSKDTYDDDLDNLLAQIGDQYADLFLAAKNLSDAILLSDILRVNTEITKAPLSASMIKRYDEHHQDLTLLKALVRQQLPEKYKEIFFDQSKNGYAGYIDGGASQEEFYKFIKPILEKMDGTEELLVKLNREDLLRKQRTFDNGSIPHQIHLGELHAILRRQEDFYPFLKDNREKIEKILTFRIPYYVGPLARGNSRFAWMTRKSEETITPWNFEEVVDKGASAQSFIERMTNFDKNLPNEKVLPKHSLLYEYFTVYNELTKVKYVTEGMRKPAFLSGEQKKAIVDLLFKTNRKVTVKQLKEDYFKKIECFDSVEISGVEDRFNASLGTYHDLLKIIKDKDFLDNEENEDILEDIVLTLTLFEDREMIEERLKTYAHLFDDKVMKQLKRRRYTGWGRLSRKLINGIRDKQSGKTILDFLKSDGFANRNFMQLIHDDSLTFKEDIQKAQVSGQGDSLHEHIANLAGSPAIKKGILQTVKVVDELVKVMGRHKPENIVIEMARENQTTQKGQKNSRERMKRIEEGIKELGSQILKEHPVENTQLQNEKLYLYYLQNGRDMYVDQELDINRLSDYDVDHIVPQSFLKDDSIDNKVLTRSDKARGKSDNVPSEEVVKKMKNYWRQLLNAKLITQRKFDNLTKAERGGLSELDKAGFIKRQLVETRQITKHVAQILDSRMNTKYDENDKLIREVKVITLKSKLVSDFRKDFQFYKVREINNYHHAHDAYLNAVVGTALIKKYPKLESEFVYGDYKVYDVRKMIAKSEQEIGKATAKYFFYSNIMNFFKTEITLANGEIRKRPLIETNGETGEIVWDKGRDFATVRKVLSMPQVNIVKKTEVQTGGFSKESILPKRNSDKLIARKKDWDPKKYGGFDSPTVAYSVLVVAKVEKGKSKKLKSVKELLGITIMERSSFEKNPIDFLEAKGYKEVKKDLIIKLPKYSLFELENGRKRMLASAGELQKGNELALPSKYVNFLYLASHYEKLKGSPEDNEQKQLFVEQHKHYLDEIIEQISEFSKRVILADANLDKVLSAYNKHRDKPIREQAENIIHLFTLTNLGAPAAFKYFDTTIDRKRYTSTKEVLDATLIHQSITGLYETRIDLSQLGGDGGGGGEAAAKPAPGGTLNIEDEHRLHETSKEPDVSLGSTWLSDFPQAWAETGGMGLAVRQAPLIIPLKATSTPVSIKQYPMSQEARLGIKPHIQRLLDQGILVPCQSPWNTPLLPVKKPGTNDYRPVQDLREVNKRVEDIHPTVPNPYNLLSGLPPSHQWYTVLDLKDAFFCLRLHPTSQPLFAFEWRDPEMGISGQLTWTRLPQGFKNSPTLFDEALHRDLADFRIQHPDLILLQYVDDLLLAATSELDCQQGTRALLQTLGNLGYRASAKKAQICQKQVKYLGYLLKEGQRWLTEARKETVMGQPTPKTPRQLREFLGTAGFCRLWIPGFAEMAAPLYPLTKTGTLFNWGPDQQKAYQEIKQALLTAPALGLPDLTKPFELFVDEKQGYAKGVLTQKLGPWRRPVAYLSKKLDPVAAGWPPCLRMVAAIAVLTKDAGKLTMGQPLVILAPHAVEALVKQPPDRWLSNARMTHYQALLLDTDRVQFGPVVALNPATLLPLPEEGLQHNCLDILAEAHGTRPDLTDQPLPDADHTWYTDGSSLLQEGQRKAGAAVTTETEVIWAKALPAGTSAQRAELIALTQALKMAEGKKLNVYTDSRYAFATAHIHGEIYRRRGLLTSEGKEIKNKDEILALLKALFLPKRLSIIHCPGHQKGHSAEARGNRMADQAARKAAITETPDTSTLLAGKRTADGSEFEKRTADGSEFESPKKKAKVE

SEQ ID NO: 7456 - protein, 2087 aa, synthetic construct
MPAAKRVKLDGGDKKYSIGLDIGTNSVGWAVITDEYKVPSKKFKVLGNTDRHSIKKNLIGALLFDSGETAEATRLKRTARRRYTRRKNRICYLQEIFSNEMAKVDDSFFHRLEESFLVEEDKKHERHPIFGNIVDEVAYHEKYPTIYHLRKKLVDSTDKADLRLIYLALAHMIKFRGHFLIEGDLNPDNSDVDKLFIQLVQTYNQLFEENPINASGVDAKAILSARLSKSRRLENLIAQLPGEKKNGLFGNLIALSLGLTPNFKSNFDLAEDAKLQLSKDTYDDDLDNLLAQIGDQYADLFLAAKNLSDAILLSDILRVNTEITKAPLSASMIKRYDEHHQDLTLLKALVRQQLPEKYKEIFFDQSKNGYAGYIDGGASQEEFYKFIKPILEKMDGTEELLVKLNREDLLRKQRTFDNGSIPHQIHLGELHAILRRQEDFYPFLKDNREKIEKILTFRIPYYVGPLARGNSRFAWMTRKSEETITPWNFEEVVDKGASAQSFIERMTNFDKNLPNEKVLPKHSLLYEYFTVYNELTKVKYVTEGMRKPAFLSGEQKKAIVDLLFKTNRKVTVKQLKEDYFKKIECFDSVEISGVEDRFNASLGTYHDLLKIIKDKDFLDNEENEDILEDIVLTLTLFEDREMIEERLKTYAHLFDDKVMKQLKRRRYTGWGRLSRKLINGIRDKQSGKTILDFLKSDGFANRNFMQLIHDDSLTFKEDIQKAQVSGQGDSLHEHIANLAGSPAIKKGILQTVKVVDELVKVMGRHKPENIVIEMARENQTTQKGQKNSRERMKRIEEGIKELGSQILKEHPVENTQLQNEKLYLYYLQNGRDMYVDQELDINRLSDYDVDHIVPQSFLKDDSIDNKVLTRSDKARGKSDNVPSEEVVKKMKNYWRQLLNAKLITQRKFDNLTKAERGGLSELDKAGFIKRQLVETRQITKHVAQILDSRMNTKYDENDKLIREVKVITLKSKLVSDFRKDFQFYKVREINNYHHAHDAYLNAVVGTALIKKYPKLESEFVYGDYKVYDVRKMIAKSEQEIGKATAKYFFYSNIMNFFKTEITLANGEIRKRPLIETNGETGEIVWDKGRDFATVRKVLSMPQVNIVKKTEVQTGGFSKESILPKRNSDKLIARKKDWDPKKYGGFDSPTVAYSVLVVAKVEKGKSKKLKSVKELLGITIMERSSFEKNPIDFLEAKGYKEVKKDLIIKLPKYSLFELENGRKRMLASAGELQKGNELALPSKYVNFLYLASHYEKLKGSPEDNEQKQLFVEQHKHYLDEIIEQISEFSKRVILADANLDKVLSAYNKHRDKPIREQAENIIHLFTLTNLGAPAAFKYFDTTIDRKRYTSTKEVLDATLIHQSITGLYETRIDLSQLGGDGGGGGEAAAKPAPGGVPWLMKKPLQLTVLVPLHEYQERLLQQTALPKEQKELLQKLFLKYDALWQHWENQVGHRRIKPHNIATGTLAPRPQKQYPINPKAKPSIQIVIDDLLKQGVLIQQNSTMNTPVYPVPKPDGKWRMVLDYREVNKTIPLIAAQNQHSAGILSSIYRGKYKTTLDLTNGFWAHPITPESYWLTAFTWQGKQYCWTRLPQGFLNSPALFNADVVDLLKEIPNVQAYVDDIYISHDDPQEHLEQLEKIFSILLNAGYVVSLKKSEIAQREVEFLGFNITKEGRGLTDTFKQKLLNITPPKDLKQLQSILGKLNFARNFIPNYSELVKPLYTIVAPANGKFISWTEDNSNQLQHIISVLNQADNLEERNPETRLIIKVNSSPSAGYIRYYNEGSKRPIMYVNYIFSKAEAKFTQTEKLLTTMHKGLIKAMDLAMGQEILVYSPIVSMTKIQRTPLPERKALPVRWITWMTYLEDPRIQFHYDKSLPELQQIPNVTEDVIAKTKHPSEFAMVFYTDGSAIKHPDVNKSHSAGMGIAQVQFIPEYKIVHQWSIPLGDHTAQLAEIAAVEFACKKALKISGPVLIVTDSFYVAESANKELPYWKSNGFLNNKKKPLRHVSKWKSIAECLQLKPDIIIMHEKGHQQPMTTLHTEGNNLADKLATQGSYVVHAGKRTADGSEFEKRTADGSEFESPKKKAKVE

SEQ ID NO: 7457 - protein, 2087 aa, synthetic construct
MPAAKRVKLDGGDKKYSIGLDIGTNSVGWAVITDEYKVPSKKFKVLGNTDRHSIKKNLIGALLFDSGETAEATRLKRTARRRYTRRKNRICYLQEIFSNEMAKVDDSFFHRLEESFLVEEDKKHERHPIFGNIVDEVAYHEKYPTIYHLRKKLVDSTDKADLRLIYLALAHMIKFRGHFLIEGDLNPDNSDVDKLFIQLVQTYNQLFEENPINASGVDAKAILSARLSKSRRLENLIAQLPGEKKNGLFGNLIALSLGLTPNFKSNFDLAEDAKLQLSKDTYDDDLDNLLAQIGDQYADLFLAAKNLSDAILLSDILRVNTEITKAPLSASMIKRYDEHHQDLTLLKALVRQQLPEKYKEIFFDQSKNGYAGYIDGGASQEEFYKFIKPILEKMDGTEELLVKLNREDLLRKQRTFDNGSIPHQIHLGELHAILRRQEDFYPFLKDNREKIEKILTFRIPYYVGPLARGNSRFAWMTRKSEETITPWNFEEVVDKGASAQSFIERMTNFDKNLPNEKVLPKHSLLYEYFTVYNELTKVKYVTEGMRKPAFLSGEQKKAIVDLLFKTNRKVTVKQLKEDYFKKIECFDSVEISGVEDRFNASLGTYHDLLKIIKDKDFLDNEENEDILEDIVLTLTLFEDREMIEERLKTYAHLFDDKVMKQLKRRRYTGWGRLSRKLINGIRDKQSGKTILDFLKSDGFANRNFMQLIHDDSLTFKEDIQKAQVSGQGDSLHEHIANLAGSPAIKKGILQTVKVVDELVKVMGRHKPENIVIEMARENQTTQKGQKNSRERMKRIEEGIKELGSQILKEHPVENTQLQNEKLYLYYLQNGRDMYVDQELDINRLSDYDVDHIVPQSFLKDDSIDNKVLTRSDKARGKSDNVPSEEVVKKMKNYWRQLLNAKLITQRKFDNLTKAERGGLSELDKAGFIKRQLVETRQITKHVAQILDSRMNTKYDENDKLIREVKVITLKSKLVSDFRKDFQFYKVREINNYHHAHDAYLNAVVGTALIKKYPKLESEFVYGDYKVYDVRKMIAKSEQEIGKATAKYFFYSNIMNFFKTEITLANGEIRKRPLIETNGETGEIVWDKGRDFATVRKVLSMPQVNIVKKTEVQTGGFSKESILPKRNSDKLIARKKDWDPKKYGGFDSPTVAYSVLVVAKVEKGKSKKLKSVKELLGITIMERSSFEKNPIDFLEAKGYKEVKKDLIIKLPKYSLFELENGRKRMLASAGELQKGNELALPSKYVNFLYLASHYEKLKGSPEDNEQKQLFVEQHKHYLDEIIEQISEFSKRVILADANLDKVLSAYNKHRDKPIREQAENIIHLFTLTNLGAPAAFKYFDTTIDRKRYTSTKEVLDATLIHQSITGLYETRIDLSQLGGDGGGGGEAAAKPAPGGIPWLMKKPLQLTTLVPLQEYEERLLKQTMLTGSYKEKLQSLFLKYDALWQHWENQVGHRRIKPHHIATGTVNPRPQKQYPINPKAKASIQTVINDLLKQGVLIQQNSIMNTPVYPVPKPDGKWRMVLDYREVNKTIPLIAAQNQHSAGILSSIFRGKYKTTLDLSNGFWAHSITPESYWLTAFTWLGQQYCWTRLPQGFLNSPALFNADVVDLLKEVPNVQVYVDDIYISHDDPREHLEQLEKVFSLLLNAGYVVSLKKSEIAQHEVEFLGFNITKEGRGLTETFKQKLLNITPPRDLKQLQSILGLLNFARNFIPNFSELVKPLYNIIATAPGKYITWTTDNSQQLQNIISMLNSAENLEERNPEVRLIMKVNTSPSAGYIRFYNEFAKRPIMYLNYVYTKAEVKFTNTEKLLTTIHKGLIKALDLGMGQEILVYSPIVSMTKIQKTPLPERKALPIRWITWMSYLEDPRIQFHYDKTLPELQQVPTVTDDIIAKIKHPSEFSMVFYTDGSAIKHPNVNKSHNAGMGIAQVQFKPEFTVINTWSIPLGDHTAQLAEVAAVEFACKKALKIDGPVLIVTDSFYVAESVNKELPYWQSNGFFNNKKKPLKHVSKWKSIADCIQLKPDIIIIHEKGHQPTASTFHTEGNNLADKLATQGSYVVNAGKRTADGSEFEKRTADGSEFESPKKKAKVE

SEQ ID NO: 7458 - protein, 2176 aa, synthetic construct
MPAAKRVKLDGGDKKYSIGLDIGTNSVGWAVITDEYKVPSKKFKVLGNTDRHSIKKNLIGALLFDSGETAEATRLKRTARRRYTRRKNRICYLQEIFSNEMAKVDDSFFHRLEESFLVEEDKKHERHPIFGNIVDEVAYHEKYPTIYHLRKKLVDSTDKADLRLIYLALAHMIKFRGHFLIEGDLNPDNSDVDKLFIQLVQTYNQLFEENPINASGVDAKAILSARLSKSRRLENLIAQLPGEKKNGLFGNLIALSLGLTPNFKSNFDLAEDAKLQLSKDTYDDDLDNLLAQIGDQYADLFLAAKNLSDAILLSDILRVNTEITKAPLSASMIKRYDEHHQDLTLLKALVRQQLPEKYKEIFFDQSKNGYAGYIDGGASQEEFYKFIKPILEKMDGTEELLVKLNREDLLRKQRTFDNGSIPHQIHLGELHAILRRQEDFYPFLKDNREKIEKILTFRIPYYVGPLARGNSRFAWMTRKSEETITPWNFEEVVDKGASAQSFIERMTNFDKNLPNEKVLPKHSLLYEYFTVYNELTKVKYVTEGMRKPAFLSGEQKKAIVDLLFKTNRKVTVKQLKEDYFKKIECFDSVEISGVEDRFNASLGTYHDLLKIIKDKDFLDNEENEDILEDIVLTLTLFEDREMIEERLKTYAHLFDDKVMKQLKRRRYTGWGRLSRKLINGIRDKQSGKTILDFLKSDGFANRNFMQLIHDDSLTFKEDIQKAQVSGQGDSLHEHIANLAGSPAIKKGILQTVKVVDELVKVMGRHKPENIVIEMARENQTTQKGQKNSRERMKRIEEGIKELGSQILKEHPVENTQLQNEKLYLYYLQNGRDMYVDQELDINRLSDYDVDHIVPQSFLKDDSIDNKVLTRSDKARGKSDNVPSEEVVKKMKNYWRQLLNAKLITQRKFDNLTKAERGGLSELDKAGFIKRQLVETRQITKHVAQILDSRMNTKYDENDKLIREVKVITLKSKLVSDFRKDFQFYKVREINNYHHAHDAYLNAVVGTALIKKYPKLESEFVYGDYKVYDVRKMIAKSEQEIGKATAKYFFYSNIMNFFKTEITLANGEIRKRPLIETNGETGEIVWDKGRDFATVRKVLSMPQVNIVKKTEVQTGGFSKESILPKRNSDKLIARKKDWDPKKYGGFDSPTVAYSVLVVAKVEKGKSKKLKSVKELLGITIMERSSFEKNPIDFLEAKGYKEVKKDLIIKLPKYSLFELENGRKRMLASAGELQKGNELALPSKYVNFLYLASHYEKLKGSPEDNEQKQLFVEQHKHYLDEIIEQISEFSKRVILADANLDKVLSAYNKHRDKPIREQAENIIHLFTLTNLGAPAAFKYFDTTIDRKRYTSTKEVLDATLIHQSITGLYETRIDLSQLGGDGGGGGEAAAKPAPGGMDPLQLLQPLEAEIKGTKLKAHWNSGATITCVPQAFLEEEVPIKNIWIKTIHGEKEQPVYYLTFKIQGRKVEAEVISSPYDYILVSPSDIPWLMKKPLQLTTLVPLQEYEERLLKQTMLTGSYKEKLQSLFLKYDALWQHWENQVGHRRIKPHHIATGTVNPRPQKQYPINPKAKASIQTVINDLLKQGVLIQQNSIMNTPVYPVPKPDGKWRMVLDYREVNKTIPLIAAQNQHSAGILSSIFRGKYKTTLDLSNGFWAHSITPESYWLTAFTWLGQQYCWTRLPQGFLNSPALFNADVVDLLKEVPNVQVYVDDIYISHDDPREHLEQLEKVFSLLLNAGYVVSLKKSEIAQHEVEFLGFNITKEGRGLTETFKQKLLNITPPRDLKQLQSILGKLNFARNFIPNFSELVKPLYNIIATAPGKYITWTTDNSQQLQNIISMLNSAENLEERNPEVRLIMKVNTSPSAGYIRFYNEFAKRPIMYLNYVYTKAEVKFTNTEKLLTTIHKGLIKALDLGMGQEILVYSPIVSMTKIQKTPLPERKALPIRWITWMSYLEDPRIQFHYDKTLPELQQVPTVTDDIIAKIKHPSEFSMVFYTDGSAIKHPNVNKSHNAGMGIAQVQFKPEFTVINTWSIPLGDHTAQLAEVAAVEFACKKALKIDGPVLIVTDSFYVAESVNKELPYWQSNGFFNNKKKPLKHVSKWKSIADCIQLKPDIIIIHEKGHQPTASTFHTEGNNLADKLATQGSYVVNAGKRTADGSEFEKRTADGSEFESPKKKAKVE

SEQ ID NO: 7459 - protein, 2094 aa, synthetic construct
MPAAKRVKLDGGDKKYSIGLDIGTNSVGWAVITDEYKVPSKKFKVLGNTDRHSIKKNLIGALLFDSGETAEATRLKRTARRRYTRRKNRICYLQEIFSNEMAKVDDSFFHRLEESFLVEEDKKHERHPIFGNIVDEVAYHEKYPTIYHLRKKLVDSTDKADLRLIYLALAHMIKFRGHFLIEGDLNPDNSDVDKLFIQLVQTYNQLFEENPINASGVDAKAILSARLSKSRRLENLIAQLPGEKKNGLFGNLIALSLGLTPNFKSNFDLAEDAKLQLSKDTYDDDLDNLLAQIGDQYADLFLAAKNLSDAILLSDILRVNTEITKAPLSASMIKRYDEHHQDLTLLKALVRQQLPEKYKEIFFDQSKNGYAGYIDGGASQEEFYKFIKPILEKMDGTEELLVKLNREDLLRKQRTFDNGSIPHQIHLGELHAILRRQEDFYPFLKDNREKIEKILTFRIPYYVGPLARGNSRFAWMTRKSEETITPWNFEEVVDKGASAQSFIERMTNFDKNLPNEKVLPKHSLLYEYFTVYNELTKVKYVTEGMRKPAFLSGEQKKAIVDLLFKTNRKVTVKQLKEDYFKKIECFDSVEISGVEDRFNASLGTYHDLLKIIKDKDFLDNEENEDILEDIVLTLTLFEDREMIEERLKTYAHLFDDKVMKQLKRRRYTGWGRLSRKLINGIRDKQSGKTILDFLKSDGFANRNFMQLIHDDSLTFKEDIQKAQVSGQGDSLHEHIANLAGSPAIKKGILQTVKVVDELVKVMGRHKPENIVIEMARENQTTQKGQKNSRERMKRIEEGIKELGSQILKEHPVENTQLQNEKLYLYYLQNGRDMYVDQELDINRLSDYDVDHIVPQSFLKDDSIDNKVLTRSDKARGKSDNVPSEEVVKKMKNYWRQLLNAKLITQRKFDNLTKAERGGLSELDKAGFIKRQLVETRQITKHVAQILDSRMNTKYDENDKLIREVKVITLKSKLVSDFRKDFQFYKVREINNYHHAHDAYLNAVVGTALIKKYPKLESEFVYGDYKVYDVRKMIAKSEQEIGKATAKYFFYSNIMNFFKTEITLANGEIRKRPLIETNGETGEIVWDKGRDFATVRKVLSMPQVNIVKKTEVQTGGFSKESILPKRNSDKLIARKKDWDPKKYGGFDSPTVAYSVLVVAKVEKGKSKKLKSVKELLGITIMERSSFEKNPIDFLEAKGYKEVKKDLIIKLPKYSLFELENGRKRMLASAGELQKGNELALPSKYVNFLYLASHYEKLKGSPEDNEQKQLFVEQHKHYLDEIIEQISEFSKRVILADANLDKVLSAYNKHRDKPIREQAENIIHLFTLTNLGAPAAFKYFDTTIDRKRYTSTKEVLDATLIHQSITGLYETRIDLSQLGGDGGGGGEAAAKPAPGGVLNLEEEYRLHEKPVPSSIDPSWLQLFPTVWAERAGMGLANQVPPVVVELRSGASPVAVRQYPMSKEAREGIRPHIQRFLDLGVLVPCQSPWNTPLLPVKKPGTNDYRPVQDLREINKRVQDIHPTVPNPYNLLSSLPPSHTWYSVLDLKDAFFCLKLHPNSQPLFAFEWRDPEKGNTGQLTWTRLPQGFKNSPTLFNEALHRDLAPFRALNPQVVLLQYVDDLLVAAPTYRDCKEGTQKLLQELSKLGYRVSAKKAQLCQKEVTYLGYLLKEGKRWLTPARKATVMKIPPPTTPRQVREFLGTAGFCRLWIPGFASLAAPLYPLTKPSIPFIWTEEHQKAFDRIKEALLSAPALALPDLTKPFTLYVDERAGVARGVLTQTLGPWRRPVAYLSKKLDPVASGWPTCLKAVAAVALLLKDADKLTLGQNVTVIASHSLESIVRQPPDRWMTNARMTHYQSLLLNERVSFAPPAVLNPATLLPVESEATPVHRCSEILAEETGTRRDLKDQPLPGVPAWYTDGSSFIAEGKRRAGAAIVDGKRTVWASSLPEGTSAQKAELVALTQALRLAEGKDINIYTDSRYAFATAHIHGAIYKQRGWLTSAGKDIKNKEEILALLEAIHLPKRVAIIHCPGHQKGNDPVATGNRRADEAAKQAALSTRVLAETTKPAGKRTADGSEFEKRTADGSEFESPKKKAKVE

SEQ ID NO: 7460 - protein, 2096 aa, synthetic construct
MPAAKRVKLDGGDKKYSIGLDIGTNSVGWAVITDEYKVPSKKFKVLGNTDRHSIKKNLIGALLFDSGETAEATRLKRTARRRYTRRKNRICYLQEIFSNEMAKVDDSFFHRLEESFLVEEDKKHERHPIFGNIVDEVAYHEKYPTIYHLRKKLVDSTDKADLRLIYLALAHMIKFRGHFLIEGDLNPDNSDVDKLFIQLVQTYNQLFEENPINASGVDAKAILSARLSKSRRLENLIAQLPGEKKNGLFGNLIALSLGLTPNFKSNFDLAEDAKLQLSKDTYDDDLDNLLAQIGDQYADLFLAAKNLSDAILLSDILRVNTEITKAPLSASMIKRYDEHHQDLTLLKALVRQQLPEKYKEIFFDQSKNGYAGYIDGGASQEEFYKFIKPILEKMDGTEELLVKLNREDLLRKQRTFDNGSIPHQIHLGELHAILRRQEDFYPFLKDNREKIEKILTFRIPYYVGPLARGNSRFAWMTRKSEETITPWNFEEVVDKGASAQSFIERMTNFDKNLPNEKVLPKHSLLYEYFTVYNELTKVKYVTEGMRKPAFLSGEQKKAIVDLLFKTNRKVTVKQLKEDYFKKIECFDSVEISGVEDRFNASLGTYHDLLKIIKDKDFLDNEENEDILEDIVLTLTLFEDREMIEERLKTYAHLFDDKVMKQLKRRRYTGWGRLSRKLINGIRDKQSGKTILDFLKSDGFANRNFMQLIHDDSLTFKEDIQKAQVSGQGDSLHEHIANLAGSPAIKKGILQTVKVVDELVKVMGRHKPENIVIEMARENQTTQKGQKNSRERMKRIEEGIKELGSQILKEHPVENTQLQNEKLYLYYLQNGRDMYVDQELDINRLSDYDVDHIVPQSFLKDDSIDNKVLTRSDKARGKSDNVPSEEVVKKMKNYWRQLLNAKLITQRKFDNLTKAERGGLSELDKAGFIKRQLVETRQITKHVAQILDSRMNTKYDENDKLIREVKVITLKSKLVSDFRKDFQFYKVREINNYHHAHDAYLNAVVGTALIKKYPKLESEFVYGDYKVYDVRKMIAKSEQEIGKATAKYFFYSNIMNFFKTEITLANGEIRKRPLIETNGETGEIVWDKGRDFATVRKVLSMPQVNIVKKTEVQTGGFSKESILPKRNSDKLIARKKDWDPKKYGGFDSPTVAYSVLVVAKVEKGKSKKLKSVKELLGITIMERSSFEKNPIDFLEAKGYKEVKKDLIIKLPKYSLFELENGRKRMLASAGELQKGNELALPSKYVNFLYLASHYEKLKGSPEDNEQKQLFVEQHKHYLDEIIEQISEFSKRVILADANLDKVLSAYNKHRDKPIREQAENIIHLFTLTNLGAPAAFKYFDTTIDRKRYTSTKEVLDATLIHQSITGLYETRIDLSQLGGDGGGGGEAAAKPAPGGTLNIEDEYRLHETSKEPDVPLGSTWLSDFPQAWAETGGMGLAVRQAPLIIPLKATSTPVSIKQYPMSQEARLGIKPHIQRLLDQGILVPCQSPWNTPLLPVKKPGTNDYRPVQDLREVNKRVEDIHPTVPNPYNLLSGLPPSHQWYTVLDLKDAFFCLRLHPTSQPLFAFEWRDPEMGISGQLTWTRLPQGFKNSPTLFDEALHRDLADFRIQHPDLILLQYVDDLLLAATSEQDCQRGTRALLQTLGNLGYRASAKKAQICQKQVKYLGYLLKEGQRWLTEARKETVMGQPTPKTPRQLREFLGTAGFCRLWIPGFAEMAAPLYPLTKTGTLFNWGPDQQKAYQEIKQALLTAPALGLPDLTKPFELFVDEKQGYAKGVLTQKLGPWRRPVAYLSKKLDPVAAGWPPCLRMVAAIAVLTKDAGKLTMGQPLVILAPHAVEALVKQPPDRWLSNARMTHYQAMLLDTDRVQFGPVVALNPATLLPLPEKEAPHDCLEILAETHGTRPDLTDQPIPDADYTWYTDGSSFLQEGQRRAGAAVTTETEVIWARALPAGTSAQRAELIALTQALKMAEGKKLNVYTDSRYAFATAHVHGEIYRRRGLLTSEGREIKNKNEILALLKALFLPKRLSIIHCPGHQKGNSAEARGNRMADQAAREAAMKAVLETSTLLAGKRTADGSEFEKRTADGSEFESPKKKAKVE

SEQ ID NO: 7461 - protein, 2096 aa, synthetic construct
MPAAKRVKLDGGDKKYSIGLDIGTNSVGWAVITDEYKVPSKKFKVLGNTDRHSIKKNLIGALLFDSGETAEATRLKRTARRRYTRRKNRICYLQEIFSNEMAKVDDSFFHRLEESFLVEEDKKHERHPIFGNIVDEVAYHEKYPTIYHLRKKLVDSTDKADLRLIYLALAHMIKFRGHFLIEGDLNPDNSDVDKLFIQLVQTYNQLFEENPINASGVDAKAILSARLSKSRRLENLIAQLPGEKKNGLFGNLIALSLGLTPNFKSNFDLAEDAKLQLSKDTYDDDLDNLLAQIGDQYADLFLAAKNLSDAILLSDILRVNTEITKAPLSASMIKRYDEHHQDLTLLKALVRQQLPEKYKEIFFDQSKNGYAGYIDGGASQEEFYKFIKPILEKMDGTEELLVKLNREDLLRKQRTFDNGSIPHQIHLGELHAILRRQEDFYPFLKDNREKIEKILTFRIPYYVGPLARGNSRFAWMTRKSEETITPWNFEEVVDKGASAQSFIERMTNFDKNLPNEKVLPKHSLLYEYFTVYNELTKVKYVTEGMRKPAFLSGEQKKAIVDLLFKTNRKVTVKQLKEDYFKKIECFDSVEISGVEDRFNASLGTYHDLLKIIKDKDFLDNEENEDILEDIVLTLTLFEDREMIEERLKTYAHLFDDKVMKQLKRRRYTGWGRLSRKLINGIRDKQSGKTILDFLKSDGFANRNFMQLIHDDSLTFKEDIQKAQVSGQGDSLHEHIANLAGSPAIKKGILQTVKVVDELVKVMGRHKPENIVIEMARENQTTQKGQKNSRERMKRIEEGIKELGSQILKEHPVENTQLQNEKLYLYYLQNGRDMYVDQELDINRLSDYDVDHIVPQSFLKDDSIDNKVLTRSDKARGKSDNVPSEEVVKKMKNYWRQLLNAKLITQRKFDNLTKAERGGLSELDKAGFIKRQLVETRQITKHVAQILDSRMNTKYDENDKLIREVKVITLKSKLVSDFRKDFQFYKVREINNYHHAHDAYLNAVVGTALIKKYPKLESEFVYGDYKVYDVRKMIAKSEQEIGKATAKYFFYSNIMNFFKTEITLANGEIRKRPLIETNGETGEIVWDKGRDFATVRKVLSMPQVNIVKKTEVQTGGFSKESILPKRNSDKLIARKKDWDPKKYGGFDSPTVAYSVLVVAKVEKGKSKKLKSVKELLGITIMERSSFEKNPIDFLEAKGYKEVKKDLIIKLPKYSLFELENGRKRMLASAGELQKGNELALPSKYVNFLYLASHYEKLKGSPEDNEQKQLFVEQHKHYLDEIIEQISEFSKRVILADANLDKVLSAYNKHRDKPIREQAENIIHLFTLTNLGAPAAFKYFDTTIDRKRYTSTKEVLDATLIHQSITGLYETRIDLSQLGGDGGGGGEAAAKPAPGGTLNIEDEYRLHETSKEPDVPLGSTWLSDFPQAWAETGGMGLAVRQAPLIIPLKATSTPVSIKQYPMSQEARLGIKPHIQRLLDQGILVPCQSPWNTPLLPVKKPGTNDYRPVQDLREVNKRVEDIHPTVPNPYNLLSGLPPSHQWYTVLDLKDAFFCLRLHPTSQPLFAFEWRDPEMGISGQLTWTRLPQGFKNSPTLFNEALHRDLADFRIQHPDLILLQYVDDLLLAATSEQDCQRGTRALLQTLGNLGYRASAKKAQICQKQVKYLGYLLKEGQRWLTEARKETVMGQPTPKTPRQLREFLGKAGFCRLFIPGFAEMAAPLYPLTKPGTLFNWGPDQQKAYQEIKQALLTAPALGLPDLTKPFELFVDEKQGYAKGVLTQKLGPWRRPVAYLSKKLDPVAAGWPPCLRMVAAIAVLTKDAGKLTMGQPLVILAPHAVEALVKQPPDRWLSNARMTHYQAMLLDTDRVQFGPVVALNPATLLPLPEKEAPHDCLEILAETHGTRPDLTDQPIPDADYTWYTDGSSFLQEGQRRAGAAVTTETEVIWARALPAGTSAQRAELIALTQALKMAEGKKLNVYTDSRYAFATAHVHGEIYRRRGWLTSEGREIKNKNEILALLKALFLPKRLSIIHCPGHQKGNSAEARGNRMADQAAREAAMKAVLETSTLLAGKRTADGSEFEKRTADGSEFESPKKKAKVE

SEQ ID NO: 7462 - protein, 2098 aa, synthetic construct
MPAAKRVKLDGGDKKYSIGLDIGTNSVGWAVITDEYKVPSKKFKVLGNTDRHSIKKNLIGALLFDSGETAEATRLKRTARRRYTRRKNRICYLQEIFSNEMAKVDDSFFHRLEESFLVEEDKKHERHPIFGNIVDEVAYHEKYPTIYHLRKKLVDSTDKADLRLIYLALAHMIKFRGHFLIEGDLNPDNSDVDKLFIQLVQTYNQLFEENPINASGVDAKAILSARLSKSRRLENLIAQLPGEKKNGLFGNLIALSLGLTPNFKSNFDLAEDAKLQLSKDTYDDDLDNLLAQIGDQYADLFLAAKNLSDAILLSDILRVNTEITKAPLSASMIKRYDEHHQDLTLLKALVRQQLPEKYKEIFFDQSKNGYAGYIDGGASQEEFYKFIKPILEKMDGTEELLVKLNREDLLRKQRTFDNGSIPHQIHLGELHAILRRQEDFYPFLKDNREKIEKILTFRIPYYVGPLARGNSRFAWMTRKSEETITPWNFEEVVDKGASAQSFIERMTNFDKNLPNEKVLPKHSLLYEYFTVYNELTKVKYVTEGMRKPAFLSGEQKKAIVDLLFKTNRKVTVKQLKEDYFKKIECFDSVEISGVEDRFNASLGTYHDLLKIIKDKDFLDNEENEDILEDIVLTLTLFEDREMIEERLKTYAHLFDDKVMKQLKRRRYTGWGRLSRKLINGIRDKQSGKTILDFLKSDGFANRNFMQLIHDDSLTFKEDIQKAQVSGQGDSLHEHIANLAGSPAIKKGILQTVKVVDELVKVMGRHKPENIVIEMARENQTTQKGQKNSRERMKRIEEGIKELGSQILKEHPVENTQLQNEKLYLYYLQNGRDMYVDQELDINRLSDYDVDHIVPQSFLKDDSIDNKVLTRSDKARGKSDNVPSEEVVKKMKNYWRQLLNAKLITQRKFDNLTKAERGGLSELDKAGFIKRQLVETRQITKHVAQILDSRMNTKYDENDKLIREVKVITLKSKLVSDFRKDFQFYKVREINNYHHAHDAYLNAVVGTALIKKYPKLESEFVYGDYKVYDVRKMIAKSEQEIGKATAKYFFYSNIMNFFKTEITLANGEIRKRPLIETNGETGEIVWDKGRDFATVRKVLSMPQVNIVKKTEVQTGGFSKESILPKRNSDKLIARKKDWDPKKYGGFDSPTVAYSVLVVAKVEKGKSKKLKSVKELLGITIMERSSFEKNPIDFLEAKGYKEVKKDLIIKLPKYSLFELENGRKRMLASAGELQKGNELALPSKYVNFLYLASHYEKLKGSPEDNEQKQLFVEQHKHYLDEIIEQISEFSKRVILADANLDKVLSAYNKHRDKPIREQAENIIHLFTLTNLGAPAAFKYFDTTIDRKRYTSTKEVLDATLIHQSITGLYETRIDLSQLGGDGGGGGPAPEAAAKGGTAPLEEEYRLFLEAPIQNVTLLEQWKREIPKVWAEINPPGLASTQAPIHVQLLSTALPVRVRQYPITLEAKRSLRETIRKFRAAGILRPVHSPWNTPLLPVRKSGTSEYRMVQDLREVNKRVETIHPTVPNPYTLLSLLPPDRIWYSVLDLKDAFFCIPLAPESQLIFAFEWADAEEGESGQLTWTRLPQGFKNSPTLFNEALNRDLQGFRLDHPSVSLLQYVDDLLIAADTQAACLSATRDLLMTLAELGYRVSGKKAQLCQEEVTYLGFKIHKGSRSLSNSRTQAILQIPVPKTKRQVREFLGTIGYCRLWIPGFAELAQPLYAATRPGNDPLVWGEKEEEAFQSLKLALTQPPALALPSLDKPFQLFVEETSGAAKGVLTQALGPWKRPVAYLSKRLDPVAAGWPRCLRAIAAAALLTREASKLTFGQDIEITSSHNLESLLRSPPDKWLTNARITQYQVLLLDPPRVRFKQTAALNPATLLPETDDTLPIHHCLDTLDSLTSTRPDLTDQPLAQAEATLFTDGSSYIRDGKRYAGAAVVTLDSVIWAEPLPIGTSAQKAELIALTKALEWSKDKSVNIYTDSRYAFATLHVHGMIYRERGWLTAGGKAIKNAPEILALLTAVWLPKRVAVMHCKGHQKDDAPTSTGNRRADEVAREVAIRPLSTQATISAGKRTADGSEFEKRTADGSEFESPKKKAKVE

SEQ ID NO: 7463 - protein, 2102 aa, synthetic construct
MPAAKRVKLDGGDKKYSIGLDIGTNSVGWAVITDEYKVPSKKFKVLGNTDRHSIKKNLIGALLFDSGETAEATRLKRTARRRYTRRKNRICYLQEIFSNEMAKVDDSFFHRLEESFLVEEDKKHERHPIFGNIVDEVAYHEKYPTIYHLRKKLVDSTDKADLRLIYLALAHMIKFRGHFLIEGDLNPDNSDVDKLFIQLVQTYNQLFEENPINASGVDAKAILSARLSKSRRLENLIAQLPGEKKNGLFGNLIALSLGLTPNFKSNFDLAEDAKLQLSKDTYDDDLDNLLAQIGDQYADLFLAAKNLSDAILLSDILRVNTEITKAPLSASMIKRYDEHHQDLTLLKALVRQQLPEKYKEIFFDQSKNGYAGYIDGGASQEEFYKFIKPILEKMDGTEELLVKLNREDLLRKQRTFDNGSIPHQIHLGELHAILRRQEDFYPFLKDNREKIEKILTFRIPYYVGPLARGNSRFAWMTRKSEETITPWNFEEVVDKGASAQSFIERMTNFDKNLPNEKVLPKHSLLYEYFTVYNELTKVKYVTEGMRKPAFLSGEQKKAIVDLLFKTNRKVTVKQLKEDYFKKIECFDSVEISGVEDRFNASLGTYHDLLKIIKDKDFLDNEENEDILEDIVLTLTLFEDREMIEERLKTYAHLFDDKVMKQLKRRRYTGWGRLSRKLINGIRDKQSGKTILDFLKSDGFANRNFMQLIHDDSLTFKEDIQKAQVSGQGDSLHEHIANLAGSPAIKKGILQTVKVVDELVKVMGRHKPENIVIEMARENQTTQKGQKNSRERMKRIEEGIKELGSQILKEHPVENTQLQNEKLYLYYLQNGRDMYVDQELDINRLSDYDVDHIVPQSFLKDDSIDNKVLTRSDKARGKSDNVPSEEVVKKMKNYWRQLLNAKLITQRKFDNLTKAERGGLSELDKAGFIKRQLVETRQITKHVAQILDSRMNTKYDENDKLIREVKVITLKSKLVSDFRKDFQFYKVREINNYHHAHDAYLNAVVGTALIKKYPKLESEFVYGDYKVYDVRKMIAKSEQEIGKATAKYFFYSNIMNFFKTEITLANGEIRKRPLIETNGETGEIVWDKGRDFATVRKVLSMPQVNIVKKTEVQTGGFSKESILPKRNSDKLIARKKDWDPKKYGGFDSPTVAYSVLVVAKVEKGKSKKLKSVKELLGITIMERSSFEKNPIDFLEAKGYKEVKKDLIIKLPKYSLFELENGRKRMLASAGELQKGNELALPSKYVNFLYLASHYEKLKGSPEDNEQKQLFVEQHKHYLDEIIEQISEFSKRVILADANLDKVLSAYNKHRDKPIREQAENIIHLFTLTNLGAPAAFKYFDTTIDRKRYTSTKEVLDATLIHQSITGLYETRIDLSQLGGDGGGGGPAPEAAAKGGTVSLQDEHRLFDIPVTTSLPDVWLQDFPQAWAETGGLGRAKCQAPIIIDLKPTAVPVSIKQYPMSLEAHMGIRQHIIKFLELGVLRPCRSPWNTPLLPVKKPGTQDYRPVQDLREINKRTVDIHPTVPNPYNLLSTLKPDYSWYTVLDLKDAFFCLPLAPQSQELFAFEWKDPERGISGQLTWTRLPQGFKNSPTLFNEALHRDLTDFRTQHPEVTLLQYVDDLLLAAPTKKACTQGTRHLLQELGEKGYRASAKKAQICQTKVTYLGYILSEGKRWLTPGRIETVARIPPPRNPREVREFLGTAGFCRLWIPGFAELAAPLYALTKPSTPFTWQTEHQLAFEALKKALLSAPALGLPDTSKPFTLFLDERQGIAKGVLTQKLGPWKRPVAYLSKKLDPVAAGWPPCLRIMAATAMLVKDSAKLTLGQPLTVITPHTLEAIVRQPPDRWITNARLTHYQALLLDTDRVQFGPPVTLNPATLLPVPENQPSPHDCRQVLAETHGTREDLKDQELPDADHTWYTDGSSYLDSGTRRAGAAVVDGHNTIWAQSLPPGTSAQKAELIALTKALELSKGKKANIYTDSRYAFATAHTHGSIYERRGWLTSEGKEIKNKAEIIALLKALFLPQEVAIIHCPGHQKGQDPVAVGNRQADRVARQAAMAEVLTLATEPDNTSHITAGKRTADGSEFEKRTADGSEFESPKKKAKVE

SEQ ID NO: 7464 - protein, 2173 aa, synthetic construct
MPAAKRVKLDGGDKKYSIGLDIGTNSVGWAVITDEYKVPSKKFKVLGNTDRHSIKKNLIGALLFDSGETAEATRLKRTARRRYTRRKNRICYLQEIFSNEMAKVDDSFFHRLEESFLVEEDKKHERHPIFGNIVDEVAYHEKYPTIYHLRKKLVDSTDKADLRLIYLALAHMIKFRGHFLIEGDLNPDNSDVDKLFIQLVQTYNQLFEENPINASGVDAKAILSARLSKSRRLENLIAQLPGEKKNGLFGNLIALSLGLTPNFKSNFDLAEDAKLQLSKDTYDDDLDNLLAQIGDQYADLFLAAKNLSDAILLSDILRVNTEITKAPLSASMIKRYDEHHQDLTLLKALVRQQLPEKYKEIFFDQSKNGYAGYIDGGASQEEFYKFIKPILEKMDGTEELLVKLNREDLLRKQRTFDNGSIPHQIHLGELHAILRRQEDFYPFLKDNREKIEKILTFRIPYYVGPLARGNSRFAWMTRKSEETITPWNFEEVVDKGASAQSFIERMTNFDKNLPNEKVLPKHSLLYEYFTVYNELTKVKYVTEGMRKPAFLSGEQKKAIVDLLFKTNRKVTVKQLKEDYFKKIECFDSVEISGVEDRFNASLGTYHDLLKIIKDKDFLDNEENEDILEDIVLTLTLFEDREMIEERLKTYAHLFDDKVMKQLKRRRYTGWGRLSRKLINGIRDKQSGKTILDFLKSDGFANRNFMQLIHDDSLTFKEDIQKAQVSGQGDSLHEHIANLAGSPAIKKGILQTVKVVDELVKVMGRHKPENIVIEMARENQTTQKGQKNSRERMKRIEEGIKELGSQILKEHPVENTQLQNEKLYLYYLQNGRDMYVDQELDINRLSDYDVDHIVPQSFLKDDSIDNKVLTRSDKARGKSDNVPSEEVVKKMKNYWRQLLNAKLITQRKFDNLTKAERGGLSELDKAGFIKRQLVETRQITKHVAQILDSRMNTKYDENDKLIREVKVITLKSKLVSDFRKDFQFYKVREINNYHHAHDAYLNAVVGTALIKKYPKLESEFVYGDYKVYDVRKMIAKSEQEIGKATAKYFFYSNIMNFFKTEITLANGEIRKRPLIETNGETGEIVWDKGRDFATVRKVLSMPQVNIVKKTEVQTGGFSKESILPKRNSDKLIARKKDWDPKKYGGFDSPTVAYSVLVVAKVEKGKSKKLKSVKELLGITIMERSSFEKNPIDFLEAKGYKEVKKDLIIKLPKYSLFELENGRKRMLASAGELQKGNELALPSKYVNFLYLASHYEKLKGSPEDNEQKQLFVEQHKHYLDEIIEQISEFSKRVILADANLDKVLSAYNKHRDKPIREQAENIIHLFTLTNLGAPAAFKYFDTTIDRKRYTSTKEVLDATLIHQSITGLYETRIDLSQLGGDGGGGGPAPEAAAKGGMDLLKPLTVERKGVKIKGYWNSQADITCVPKDLLQGEEPVRQQNVTTIHGTQEGDVYYVNLKIDGRRINTEVIGTTLDYAIITPGDVPWILKKPLELTIKLDLEEQQGTLLNNSILSKKGKEELKQLFEKYSALWQSWENQVGHRRIRPHKIATGTVKPTPQKQYHINPKAKPDIQIVINDLLKQGVLIQKESTMNTPVYPVPKPNGRWRMVLDYRAVNKVTPLIAVQNQHSYGILGSLFKGRYKTTIDLSNGFWAHPIVPEDYWITAFTWQGKQYCWTVLPQGFLNSPGLFTGDVVDLLQGIPNVEVYVDDVYISHDSEKEHLEYLDILFNRLKEAGYIISLKKSNIANSIVDFLGFQITNEGRGLTDTFKEKLENITAPTTLKQLQSILGLLNFARNFIPDFTELIAPLYALIPKSTKNYVPWQIEHSTTLETLITKLNGAEYLQGRKGDKTLIMKVNASYTTGYIRYYNEGEKKPISYVSIVFSKTELKFTELEKLLTTVHKGLLKALDLSMGQNIHVYSPIVSMQNIQKTPQTAKKALASRWLSWLSYLEDPRIRFFYDPQMPALKDLPAVDTGKDNKKHPSNFQHIFYTDGSAITSPTKEGHLNAGMGIVYFINKDGNLQKQQEWSISLGNHTAQFAEIAAFEFALKKCLPLGGNILVVTDSNYVAKAYNEELDVWASNGFVNNRKKPLKHISKWKSVADLKRLRPDVVVTHEPGHQKLDSSPHAYGNNLADQLATQASFKVHAGKRTADGSEFEKRTADGSEFESPKKKAKVE

SEQ ID NO: 7465 - protein, 2087 aa, synthetic construct
MPAAKRVKLDGGDKKYSIGLDIGTNSVGWAVITDEYKVPSKKFKVLGNTDRHSIKKNLIGALLFDSGETAEATRLKRTARRRYTRRKNRICYLQEIFSNEMAKVDDSFFHRLEESFLVEEDKKHERHPIFGNIVDEVAYHEKYPTIYHLRKKLVDSTDKADLRLIYLALAHMIKFRGHFLIEGDLNPDNSDVDKLFIQLVQTYNQLFEENPINASGVDAKAILSARLSKSRRLENLIAQLPGEKKNGLFGNLIALSLGLTPNFKSNFDLAEDAKLQLSKDTYDDDLDNLLAQIGDQYADLFLAAKNLSDAILLSDILRVNTEITKAPLSASMIKRYDEHHQDLTLLKALVRQQLPEKYKEIFFDQSKNGYAGYIDGGASQEEFYKFIKPILEKMDGTEELLVKLNREDLLRKQRTFDNGSIPHQIHLGELHAILRRQEDFYPFLKDNREKIEKILTFRIPYYVGPLARGNSRFAWMTRKSEETITPWNFEEVVDKGASAQSFIERMTNFDKNLPNEKVLPKHSLLYEYFTVYNELTKVKYVTEGMRKPAFLSGEQKKAIVDLLFKTNRKVTVKQLKEDYFKKIECFDSVEISGVEDRFNASLGTYHDLLKIIKDKDFLDNEENEDILEDIVLTLTLFEDREMIEERLKTYAHLFDDKVMKQLKRRRYTGWGRLSRKLINGIRDKQSGKTILDFLKSDGFANRNFMQLIHDDSLTFKEDIQKAQVSGQGDSLHEHIANLAGSPAIKKGILQTVKVVDELVKVMGRHKPENIVIEMARENQTTQKGQKNSRERMKRIEEGIKELGSQILKEHPVENTQLQNEKLYLYYLQNGRDMYVDQELDINRLSDYDVDHIVPQSFLKDDSIDNKVLTRSDKARGKSDNVPSEEVVKKMKNYWRQLLNAKLITQRKFDNLTKAERGGLSELDKAGFIKRQLVETRQITKHVAQILDSRMNTKYDENDKLIREVKVITLKSKLVSDFRKDFQFYKVREINNYHHAHDAYLNAVVGTALIKKYPKLESEFVYGDYKVYDVRKMIAKSEQEIGKATAKYFFYSNIMNFFKTEITLANGEIRKRPLIETNGETGEIVWDKGRDFATVRKVLSMPQVNIVKKTEVQTGGFSKESILPKRNSDKLIARKKDWDPKKYGGFDSPTVAYSVLVVAKVEKGKSKKLKSVKELLGITIMERSSFEKNPIDFLEAKGYKEVKKDLIIKLPKYSLFELENGRKRMLASAGELQKGNELALPSKYVNFLYLASHYEKLKGSPEDNEQKQLFVEQHKHYLDEIIEQISEFSKRVILADANLDKVLSAYNKHRDKPIREQAENIIHLFTLTNLGAPAAFKYFDTTIDRKRYTSTKEVLDATLIHQSITGLYETRIDLSQLGGDGGGGGPAPEAAAKGGVPWILKKPLELTIKLDLEEQQGTLLNNSILSKKGKEELKQLFEKYSALWQSWENQVGHRRIRPHKIATGTVKPTPQKQYHINPKAKPDIQIVINDLLKQGVLIQKESTMNTPVYPVPKPNGRWRMVLDYRAVNKVTPLIAVQNQHSYGILGSLFKGRYKTTIDLSNGFWAHPIVPEDYWITAFTWQGKQYCWTVLPQGFLNSPGLFNGDVVDLLQGIPNVEVYVDDVYISHDSEKEHLEYLDILFNRLKEAGYIISLKKSNIANSIVDFLGFQITNEGRGLTDTFKEKLENITAPTTLKQLQSILGLLNFARNFIPDFTELIAPLYALIPKSPKNYVPWQIEHSTTLETLITKLNGAEYLQGRKGDKTLIMKVNASYTTGYIRYYNEGEKKPISYVSIVFSKTELKFTELEKLLTTVHKGLLKALDLSMGQNIHVYSPIVSMQNIQKTPQTAKKALASRWLSWLSYLEDPRIRFFYDPQMPALKDLPAVDTGKDNKKHPSNFQHIFYTDGSAITSPTKEGHLNAGMGIVYFINKDGNLQKQQEWSISLGNHTAQFAEIAAFEFALKKCLPLGGNILVVTDSNYVAKAYNEELDVWASNGFVNNRKKPLKHISKWKSVADLKRLRPDVVVTHEPGHQKLDSSPHAYGNNLADQLATQASFKVHAGKRTADGSEFEKRTADGSEFESPKKKAKVE

SEQ ID NO: 7466 - protein, 2173 aa, synthetic construct
MPAAKRVKLDGGDKKYSIGLDIGTNSVGWAVITDEYKVPSKKFKVLGNTDRHSIKKNLIGALLFDSGETAEATRLKRTARRRYTRRKNRICYLQEIFSNEMAKVDDSFFHRLEESFLVEEDKKHERHPIFGNIVDEVAYHEKYPTIYHLRKKLVDSTDKADLRLIYLALAHMIKFRGHFLIEGDLNPDNSDVDKLFIQLVQTYNQLFEENPINASGVDAKAILSARLSKSRRLENLIAQLPGEKKNGLFGNLIALSLGLTPNFKSNFDLAEDAKLQLSKDTYDDDLDNLLAQIGDQYADLFLAAKNLSDAILLSDILRVNTEITKAPLSASMIKRYDEHHQDLTLLKALVRQQLPEKYKEIFFDQSKNGYAGYIDGGASQEEFYKFIKPILEKMDGTEELLVKLNREDLLRKQRTFDNGSIPHQIHLGELHAILRRQEDFYPFLKDNREKIEKILTFRIPYYVGPLARGNSRFAWMTRKSEETITPWNFEEVVDKGASAQSFIERMTNFDKNLPNEKVLPKHSLLYEYFTVYNELTKVKYVTEGMRKPAFLSGEQKKAIVDLLFKTNRKVTVKQLKEDYFKKIECFDSVEISGVEDRFNASLGTYHDLLKIIKDKDFLDNEENEDILEDIVLTLTLFEDREMIEERLKTYAHLFDDKVMKQLKRRRYTGWGRLSRKLINGIRDKQSGKTILDFLKSDGFANRNFMQLIHDDSLTFKEDIQKAQVSGQGDSLHEHIANLAGSPAIKKGILQTVKVVDELVKVMGRHKPENIVIEMARENQTTQKGQKNSRERMKRIEEGIKELGSQILKEHPVENTQLQNEKLYLYYLQNGRDMYVDQELDINRLSDYDVDHIVPQSFLKDDSIDNKVLTRSDKARGKSDNVPSEEVVKKMKNYWRQLLNAKLITQRKFDNLTKAERGGLSELDKAGFIKRQLVETRQITKHVAQILDSRMNTKYDENDKLIREVKVITLKSKLVSDFRKDFQFYKVREINNYHHAHDAYLNAVVGTALIKKYPKLESEFVYGDYKVYDVRKMIAKSEQEIGKATAKYFFYSNIMNFFKTEITLANGEIRKRPLIETNGETGEIVWDKGRDFATVRKVLSMPQVNIVKKTEVQTGGFSKESILPKRNSDKLIARKKDWDPKKYGGFDSPTVAYSVLVVAKVEKGKSKKLKSVKELLGITIMERSSFEKNPIDFLEAKGYKEVKKDLIIKLPKYSLFELENGRKRMLASAGELQKGNELALPSKYVNFLYLASHYEKLKGSPEDNEQKQLFVEQHKHYLDEIIEQISEFSKRVILADANLDKVLSAYNKHRDKPIREQAENIIHLFTLTNLGAPAAFKYFDTTIDRKRYTSTKEVLDATLIHQSITGLYETRIDLSQLGGDGGGGGPAPEAAAKGGMDLLKPLTVERKGVKIKGYWNSQADITCVPKDLLQGEEPVRQQNVTTIHGTQEGDVYYVNLKIDGRRINTEVIGTTLDYAIITPGDVPWILKKPLELTIKLDLEEQQGTLLNNSILSKKGKEELKQLFEKYSALWQSWENQVGHRRIRPHKIATGTVKPTPQKQYHINPKAKPDIQIVINDLLKQGVLIQKESTMNTPVYPVPKPNGRWRMVLDYRAVNKVTPLIAVQNQHSYGILGSLFKGRYKTTIDLSNGFWAHPIVPEDYWITAFTWQGKQYCWTVLPQGFLNSPGLFNGDVVDLLQGIPNVEVYVDDVYISHDSEKEHLEYLDILFNRLKEAGYIISLKKSNIANSIVDFLGFQITNEGRGLTDTFKEKLENITAPTTLKQLQSILGLLNFARNFIPDFTELIAPLYALIPKSPKNYVPWQIEHSTTLETLITKLNGAEYLQGRKGDKTLIMKVNASYTTGYIRYYNEGEKKPISYVSIVFSKTELKFTELEKLLTTVHKGLLKALDLSMGQNIHVYSPIVSMQNIQKTPQTAKKALASRWLSWLSYLEDPRIRFFYDPQMPALKDLPAVDTGKDNKKHPSNFQHIFYTDGSAITSPTKEGHLNAGMGIVYFINKDGNLQKQQEWSISLGNHTAQFAEIAAFEFALKKCLPLGGNILVVTDSNYVAKAYNEELDVWASNGFVNNRKKPLKHISKWKSVADLKRLRPDVVVTHEPGHQKLDSSPHAYGNNLADQLATQASFKVHAGKRTADGSEFEKRTADGSEFESPKKKAKVE

SEQ ID NO: 7467 - protein, 2094 aa, synthetic construct
MPAAKRVKLDGGDKKYSIGLDIGTNSVGWAVITDEYKVPSKKFKVLGNTDRHSIKKNLIGALLFDSGETAEATRLKRTARRRYTRRKNRICYLQEIFSNEMAKVDDSFFHRLEESFLVEEDKKHERHPIFGNIVDEVAYHEKYPTIYHLRKKLVDSTDKADLRLIYLALAHMIKFRGHFLIEGDLNPDNSDVDKLFIQLVQTYNQLFEENPINASGVDAKAILSARLSKSRRLENLIAQLPGEKKNGLFGNLIALSLGLTPNFKSNFDLAEDAKLQLSKDTYDDDLDNLLAQIGDQYADLFLAAKNLSDAILLSDILRVNTEITKAPLSASMIKRYDEHHQDLTLLKALVRQQLPEKYKEIFFDQSKNGYAGYIDGGASQEEFYKFIKPILEKMDGTEELLVKLNREDLLRKQRTFDNGSIPHQIHLGELHAILRRQEDFYPFLKDNREKIEKILTFRIPYYVGPLARGNSRFAWMTRKSEETITPWNFEEVVDKGASAQSFIERMTNFDKNLPNEKVLPKHSLLYEYFTVYNELTKVKYVTEGMRKPAFLSGEQKKAIVDLLFKTNRKVTVKQLKEDYFKKIECFDSVEISGVEDRFNASLGTYHDLLKIIKDKDFLDNEENEDILEDIVLTLTLFEDREMIEERLKTYAHLFDDKVMKQLKRRRYTGWGRLSRKLINGIRDKQSGKTILDFLKSDGFANRNFMQLIHDDSLTFKEDIQKAQVSGQGDSLHEHIANLAGSPAIKKGILQTVKVVDELVKVMGRHKPENIVIEMARENQTTQKGQKNSRERMKRIEEGIKELGSQILKEHPVENTQLQNEKLYLYYLQNGRDMYVDQELDINRLSDYDVDHIVPQSFLKDDSIDNKVLTRSDKARGKSDNVPSEEVVKKMKNYWRQLLNAKLITQRKFDNLTKAERGGLSELDKAGFIKRQLVETRQITKHVAQILDSRMNTKYDENDKLIREVKVITLKSKLVSDFRKDFQFYKVREINNYHHAHDAYLNAVVGTALIKKYPKLESEFVYGDYKVYDVRKMIAKSEQEIGKATAKYFFYSNIMNFFKTEITLANGEIRKRPLIETNGETGEIVWDKGRDFATVRKVLSMPQVNIVKKTEVQTGGFSKESILPKRNSDKLIARKKDWDPKKYGGFDSPTVAYSVLVVAKVEKGKSKKLKSVKELLGITIMERSSFEKNPIDFLEAKGYKEVKKDLIIKLPKYSLFELENGRKRMLASAGELQKGNELALPSKYVNFLYLASHYEKLKGSPEDNEQKQLFVEQHKHYLDEIIEQISEFSKRVILADANLDKVLSAYNKHRDKPIREQAENIIHLFTLTNLGAPAAFKYFDTTIDRKRYTSTKEVLDATLIHQSITGLYETRIDLSQLGGDGGGGGPAPEAAAKGGVLNLEEEYRLHEKPVPSSIDPSWLQLFPTVWAERAGMGLANQVPPVVVELRSGASPVAVRQYPMSKEAREGIRPHIQKFLDLGVLVPCRSPWNTPLLPVKKPGTNDYRPVQDLREINKRVQDIHPTVPNPYNLLSSLPPSYTWYSVLDLKDAFFCLRLHPNSQPLFAFEWKDPEKGNTGQLTWTRLPQGFKNSPTLFNEALHRDLAPFRALNPQVVLLQYVDDLLVAAPTYEDCKKGTQKLLQELSKLGYRVSAKKAQLCQREVTYLGYLLKEGKRWLTPARKATVMKIPVPTTPRQVREFLGKAGFCRLFIPGFASLAAPLYPLTKPSIPFIWTEEHQQAFDHIKKALLSAPALALPDLTKPFTLYIDERAGVARGVLTQTLGPWRRPVAYLSKKLDPVASGWPTCLKAVAAVALLLKDADKLTLGQNVTVIASHSLESIVRQPPDRWMTNARMTHYQSLLLNERVSFAPPAVLNPATLLPVESEATPVHRCSEILAEETGTRRDLEDQPLPGVPTWYTDGSSFITEGKRRAGAPIVDGKRTVWASSLPEGTSAQKAELVALTQALRLAEGKNINIYTDSRYAFATAHIHGAIYKQRGWLTSAGKDIKNKEEILALLEAIHLPRRVAIIHCPGHQRGSNPVATGNRRADEAAKQAALSTRVLAGTTKPAGKRTADGSEFEKRTADGSEFESPKKKAKVE

SEQ ID NO: 7468 - protein, 2009 aa, synthetic construct
MPAAKRVKLDGGDKKYSIGLDIGTNSVGWAVITDEYKVPSKKFKVLGNTDRHSIKKNLIGALLFDSGETAEATRLKRTARRRYTRRKNRICYLQEIFSNEMAKVDDSFFHRLEESFLVEEDKKHERHPIFGNIVDEVAYHEKYPTIYHLRKKLVDSTDKADLRLIYLALAHMIKFRGHFLIEGDLNPDNSDVDKLFIQLVQTYNQLFEENPINASGVDAKAILSARLSKSRRLENLIAQLPGEKKNGLFGNLIALSLGLTPNFKSNFDLAEDAKLQLSKDTYDDDLDNLLAQIGDQYADLFLAAKNLSDAILLSDILRVNTEITKAPLSASMIKRYDEHHQDLTLLKALVRQQLPEKYKEIFFDQSKNGYAGYIDGGASQEEFYKFIKPILEKMDGTEELLVKLNREDLLRKQRTFDNGSIPHQIHLGELHAILRRQEDFYPFLKDNREKIEKILTFRIPYYVGPLARGNSRFAWMTRKSEETITPWNFEEVVDKGASAQSFIERMTNFDKNLPNEKVLPKHSLLYEYFTVYNELTKVKYVTEGMRKPAFLSGEQKKAIVDLLFKTNRKVTVKQLKEDYFKKIECFDSVEISGVEDRFNASLGTYHDLLKIIKDKDFLDNEENEDILEDIVLTLTLFEDREMIEERLKTYAHLFDDKVMKQLKRRRYTGWGRLSRKLINGIRDKQSGKTILDFLKSDGFANRNFMQLIHDDSLTFKEDIQKAQVSGQGDSLHEHIANLAGSPAIKKGILQTVKVVDELVKVMGRHKPENIVIEMARENQTTQKGQKNSRERMKRIEEGIKELGSQILKEHPVENTQLQNEKLYLYYLQNGRDMYVDQELDINRLSDYDVDHIVPQSFLKDDSIDNKVLTRSDKARGKSDNVPSEEVVKKMKNYWRQLLNAKLITQRKFDNLTKAERGGLSELDKAGFIKRQLVETRQITKHVAQILDSRMNTKYDENDKLIREVKVITLKSKLVSDFRKDFQFYKVREINNYHHAHDAYLNAVVGTALIKKYPKLESEFVYGDYKVYDVRKMIAKSEQEIGKATAKYFFYSNIMNFFKTEITLANGEIRKRPLIETNGETGEIVWDKGRDFATVRKVLSMPQVNIVKKTEVQTGGFSKESILPKRNSDKLIARKKDWDPKKYGGFDSPTVAYSVLVVAKVEKGKSKKLKSVKELLGITIMERSSFEKNPIDFLEAKGYKEVKKDLIIKLPKYSLFELENGRKRMLASAGELQKGNELALPSKYVNFLYLASHYEKLKGSPEDNEQKQLFVEQHKHYLDEIIEQISEFSKRVILADANLDKVLSAYNKHRDKPIREQAENIIHLFTLTNLGAPAAFKYFDTTIDRKRYTSTKEVLDATLIHQSITGLYETRIDLSQLGGDGGGGGPAPEAAAKGGHLPPPPQVDQFPLNLPERLQALNDLVSKALEAGHIEPYSGPGNNPVFPVKKPNGKWRFIHDLRATNAITTTLTSPSPGPPDLTSLPTALPHLQTIDLTDAFFQIPLPKQYQPYFAFTIPQPCNYGPGTRYAWTVLPQGFKNSPTLFQQQLAAVLNPMRKMFPTSTIVQYMDDILLASPTNEELQQLSQLTLQALTTHGLPISQEKTQQTPGQIRFLGQVISPNHITYESTPTIPIKSQWTLTELQVILGEIQWVSKGTPILRKHLQSLYSALHPYRDPRACITLTPQQLHALHAIQQALQHNCRGRLNPALPLLGLISLSTSGTTSVIFQPKQNWPLAWLHTPHPPTSLCPWGHLLACTILTLDKYTLQHYGQLCQSFHHNMSKQALCDFLRNSPHPSVGILIHHMGRFHNLGSQPSGPWKTLLHLPTLLQEPRLLRPIFTLSPVVLDTAPCLFSDGSPQKAAYVLWDQTILQQDITPLPSHETHSAQKGELLALICGLRAAKPWPSLNIFLDSKYLIKYLHSLAIGAFLGTSAHQTLQAALPPLLQGKTIYLHHVRSHTNLPDPISTFNEYTDSLILAPLVPLAGKRTADGSEFEKRTADGSEFESPKKKAKVE

SEQ ID NO: 7469 - protein, 2127 aa, synthetic construct
MPAAKRVKLDGGDKKYSIGLDIGTNSVGWAVITDEYKVPSKKFKVLGNTDRHSIKKNLIGALLFDSGETAEATRLKRTARRRYTRRKNRICYLQEIFSNEMAKVDDSFFHRLEESFLVEEDKKHERHPIFGNIVDEVAYHEKYPTIYHLRKKLVDSTDKADLRLIYLALAHMIKFRGHFLIEGDLNPDNSDVDKLFIQLVQTYNQLFEENPINASGVDAKAILSARLSKSRRLENLIAQLPGEKKNGLFGNLIALSLGLTPNFKSNFDLAEDAKLQLSKDTYDDDLDNLLAQIGDQYADLFLAAKNLSDAILLSDILRVNTEITKAPLSASMIKRYDEHHQDLTLLKALVRQQLPEKYKEIFFDQSKNGYAGYIDGGASQEEFYKFIKPILEKMDGTEELLVKLNREDLLRKQRTFDNGSIPHQIHLGELHAILRRQEDFYPFLKDNREKIEKILTFRIPYYVGPLARGNSRFAWMTRKSEETITPWNFEEVVDKGASAQSFIERMTNFDKNLPNEKVLPKHSLLYEYFTVYNELTKVKYVTEGMRKPAFLSGEQKKAIVDLLFKTNRKVTVKQLKEDYFKKIECFDSVEISGVEDRFNASLGTYHDLLKIIKDKDFLDNEENEDILEDIVLTLTLFEDREMIEERLKTYAHLFDDKVMKQLKRRRYTGWGRLSRKLINGIRDKQSGKTILDFLKSDGFANRNFMQLIHDDSLTFKEDIQKAQVSGQGDSLHEHIANLAGSPAIKKGILQTVKVVDELVKVMGRHKPENIVIEMARENQTTQKGQKNSRERMKRIEEGIKELGSQILKEHPVENTQLQNEKLYLYYLQNGRDMYVDQELDINRLSDYDVDHIVPQSFLKDDSIDNKVLTRSDKARGKSDNVPSEEVVKKMKNYWRQLLNAKLITQRKFDNLTKAERGGLSELDKAGFIKRQLVETRQITKHVAQILDSRMNTKYDENDKLIREVKVITLKSKLVSDFRKDFQFYKVREINNYHHAHDAYLNAVVGTALIKKYPKLESEFVYGDYKVYDVRKMIAKSEQEIGKATAKYFFYSNIMNFFKTEITLANGEIRKRPLIETNGETGEIVWDKGRDFATVRKVLSMPQVNIVKKTEVQTGGFSKESILPKRNSDKLIARKKDWDPKKYGGFDSPTVAYSVLVVAKVEKGKSKKLKSVKELLGITIMERSSFEKNPIDFLEAKGYKEVKKDLIIKLPKYSLFELENGRKRMLASAGELQKGNELALPSKYVNFLYLASHYEKLKGSPEDNEQKQLFVEQHKHYLDEIIEQISEFSKRVILADANLDKVLSAYNKHRDKPIREQAENIIHLFTLTNLGAPAAFKYFDTTIDRKRYTSTKEVLDATLIHQSITGLYETRIDLSQLGGDGGGGGPAPEAAAKGGLLGRDLLTKLKAQIQFSTEGPQVTWEDRPAMCLVLNLEEEYRLHEKPVPPSIDPSWLQLFPMVWAEKAGMGLANQVPPVVVELKSDASPVAVRQYPMSKEAREGIRPHIQRFLDLGILVPCQSPWNTPLLPVKKPGTNDYRPVQDLREVNKRVQDIHPTVPNPYNLLSSLPPSHTWYSVLDLKDAFFCLKLHPNSQPLFAFEWRDPEKGNTGQLTWTRLPQGFKNSPTLFNEALHRDLASFRALNPQVVMLQYVDDLLVAAPTYRDCKEGTRRLLQELSKLGYRVSAKKAQLCREEVTYLGYLLKGGKRWLTPARKATVMKIPTPTTPRQVREFLGTAGFCRLWIPGFASLAAPLYPLTRPKVPFTWTEAHQEAFGRIKEALLSAPALALPDLTKPFALYVDEKEGVARGVLTQTLGPWRRPVAYLSKKLDPVASGWPTCLKAIAAVALLLKDADKLTLGQNVLVIAPHNLESIVRQPPDRWMTNARMTHYQSLLLNERVSFAPPAILNPATLLPVESDDTPIHICSEILAEETGTRPDLRDQPLPGVPAWYTDGSSFIMDGRRQAGAAIVDNKRTVWASNLPEGTSAQKAELIALTQALRLAEGKSINIYTDSRYAFATAHVHGAIYKQRGWLTSAGKDIKNKEEILALLEAIHLPKRVAIIHCPGHQRGTDPVATGNRKADEAAKQAAQSTRILTETTKNAGKRTADGSEFEKRTADGSEFESPKKKAKVE

SEQ ID NO: 7470 - protein, 2127 aa, synthetic construct
MPAAKRVKLDGGDKKYSIGLDIGTNSVGWAVITDEYKVPSKKFKVLGNTDRHSIKKNLIGALLFDSGETAEATRLKRTARRRYTRRKNRICYLQEIFSNEMAKVDDSFFHRLEESFLVEEDKKHERHPIFGNIVDEVAYHEKYPTIYHLRKKLVDSTDKADLRLIYLALAHMIKFRGHFLIEGDLNPDNSDVDKLFIQLVQTYNQLFEENPINASGVDAKAILSARLSKSRRLENLIAQLPGEKKNGLFGNLIALSLGLTPNFKSNFDLAEDAKLQLSKDTYDDDLDNLLAQIGDQYADLFLAAKNLSDAILLSDILRVNTEITKAPLSASMIKRYDEHHQDLTLLKALVRQQLPEKYKEIFFDQSKNGYAGYIDGGASQEEFYKFIKPILEKMDGTEELLVKLNREDLLRKQRTFDNGSIPHQIHLGELHAILRRQEDFYPFLKDNREKIEKILTFRIPYYVGPLARGNSRFAWMTRKSEETITPWNFEEVVDKGASAQSFIERMTNFDKNLPNEKVLPKHSLLYEYFTVYNELTKVKYVTEGMRKPAFLSGEQKKAIVDLLFKTNRKVTVKQLKEDYFKKIECFDSVEISGVEDRFNASLGTYHDLLKIIKDKDFLDNEENEDILEDIVLTLTLFEDREMIEERLKTYAHLFDDKVMKQLKRRRYTGWGRLSRKLINGIRDKQSGKTILDFLKSDGFANRNFMQLIHDDSLTFKEDIQKAQVSGQGDSLHEHIANLAGSPAIKKGILQTVKVVDELVKVMGRHKPENIVIEMARENQTTQKGQKNSRERMKRIEEGIKELGSQILKEHPVENTQLQNEKLYLYYLQNGRDMYVDQELDINRLSDYDVDHIVPQSFLKDDSIDNKVLTRSDKARGKSDNVPSEEVVKKMKNYWRQLLNAKLITQRKFDNLTKAERGGLSELDKAGFIKRQLVETRQITKHVAQILDSRMNTKYDENDKLIREVKVITLKSKLVSDFRKDFQFYKVREINNYHHAHDAYLNAVVGTALIKKYPKLESEFVYGDYKVYDVRKMIAKSEQEIGKATAKYFFYSNIMNFFKTEITLANGEIRKRPLIETNGETGEIVWDKGRDFATVRKVLSMPQVNIVKKTEVQTGGFSKESILPKRNSDKLIARKKDWDPKKYGGFDSPTVAYSVLVVAKVEKGKSKKLKSVKELLGITIMERSSFEKNPIDFLEAKGYKEVKKDLIIKLPKYSLFELENGRKRMLASAGELQKGNELALPSKYVNFLYLASHYEKLKGSPEDNEQKQLFVEQHKHYLDEIIEQISEFSKRVILADANLDKVLSAYNKHRDKPIREQAENIIHLFTLTNLGAPAAFKYFDTTIDRKRYTSTKEVLDATLIHQSITGLYETRIDLSQLGGDGGGGGPAPEAAAKGGLLGRDLLTKLKAQIQFSTEGPQVTWEDRPAMCLVLNLEEEYRLHEKPVPPSIDPSWLQLFPMVWAEKAGMGLANQVPPVVVELKSDASPVAVRQYPMSKEAREGIRPHIQRFLDLGILVPCQSPWNTPLLPVKKPGTNDYRPVQDLREVNKRVQDIHPTVPNPYNLLSSLPPSHTWYSVLDLKDAFFCLKLHPNSQPLFAFEWRDPEKGNTGQLTWTRLPQGFKNSPTLFNEALHRDLASFRALNPQVVMLQYVDDLLVAAPTYRDCKEGTRRLLQELSKLGYRVSAKKAQLCREEVTYLGYLLKGGKRWLTPARKATVMKIPTPTTPRQVREFLGKAGFCRLFIPGFASLAAPLYPLTRPKVPFTWTEAHQEAFGRIKEALLSAPALALPDLTKPFALYVDEKEGVARGVLTQTLGPWRRPVAYLSKKLDPVASGWPTCLKAIAAVALLLKDADKLTLGQNVLVIAPHNLESIVRQPPDRWMTNARMTHYQSLLLNERVSFAPPAILNPATLLPVESDDTPIHICSEILAEETGTRPDLRDQPLPGVPAWYTDGSSFIMDGRRQAGAAIVDNKRTVWASNLPEGTSAQKAELIALTQALRLAEGKSINIYTDSRYAFATAHVHGAIYKQRGWLTSAGKDIKNKEEILALLEAIHLPKRVAIIHCPGHQRGTDPVATGNRKADEAAKQAAQSTRILTETTKNAGKRTADGSEFEKRTADGSEFESPKKKAKVE

SEQ ID NO: 7471 - protein, 2096 aa, synthetic construct
MPAAKRVKLDGGDKKYSIGLDIGTNSVGWAVITDEYKVPSKKFKVLGNTDRHSIKKNLIGALLFDSGETAEATRLKRTARRRYTRRKNRICYLQEIFSNEMAKVDDSFFHRLEESFLVEEDKKHERHPIFGNIVDEVAYHEKYPTIYHLRKKLVDSTDKADLRLIYLALAHMIKFRGHFLIEGDLNPDNSDVDKLFIQLVQTYNQLFEENPINASGVDAKAILSARLSKSRRLENLIAQLPGEKKNGLFGNLIALSLGLTPNFKSNFDLAEDAKLQLSKDTYDDDLDNLLAQIGDQYADLFLAAKNLSDAILLSDILRVNTEITKAPLSASMIKRYDEHHQDLTLLKALVRQQLPEKYKEIFFDQSKNGYAGYIDGGASQEEFYKFIKPILEKMDGTEELLVKLNREDLLRKQRTFDNGSIPHQIHLGELHAILRRQEDFYPFLKDNREKIEKILTFRIPYYVGPLARGNSRFAWMTRKSEETITPWNFEEVVDKGASAQSFIERMTNFDKNLPNEKVLPKHSLLYEYFTVYNELTKVKYVTEGMRKPAFLSGEQKKAIVDLLFKTNRKVTVKQLKEDYFKKIECFDSVEISGVEDRFNASLGTYHDLLKIIKDKDFLDNEENEDILEDIVLTLTLFEDREMIEERLKTYAHLFDDKVMKQLKRRRYTGWGRLSRKLINGIRDKQSGKTILDFLKSDGFANRNFMQLIHDDSLTFKEDIQKAQVSGQGDSLHEHIANLAGSPAIKKGILQTVKVVDELVKVMGRHKPENIVIEMARENQTTQKGQKNSRERMKRIEEGIKELGSQILKEHPVENTQLQNEKLYLYYLQNGRDMYVDQELDINRLSDYDVDHIVPQSFLKDDSIDNKVLTRSDKARGKSDNVPSEEVVKKMKNYWRQLLNAKLITQRKFDNLTKAERGGLSELDKAGFIKRQLVETRQITKHVAQILDSRMNTKYDENDKLIREVKVITLKSKLVSDFRKDFQFYKVREINNYHHAHDAYLNAVVGTALIKKYPKLESEFVYGDYKVYDVRKMIAKSEQEIGKATAKYFFYSNIMNFFKTEITLANGEIRKRPLIETNGETGEIVWDKGRDFATVRKVLSMPQVNIVKKTEVQTGGFSKESILPKRNSDKLIARKKDWDPKKYGGFDSPTVAYSVLVVAKVEKGKSKKLKSVKELLGITIMERSSFEKNPIDFLEAKGYKEVKKDLIIKLPKYSLFELENGRKRMLASAGELQKGNELALPSKYVNFLYLASHYEKLKGSPEDNEQKQLFVEQHKHYLDEIIEQISEFSKRVILADANLDKVLSAYNKHRDKPIREQAENIIHLFTLTNLGAPAAFKYFDTTIDRKRYTSTKEVLDATLIHQSITGLYETRIDLSQLGGDGGGGGPAPEAAAKGGLGIEDEYRLHETSTEPDVSLGSTWLSDFPQAWAETGGMGLAVRQAPLIIPLKATSTPVSIQQYPMSHEARLGIKPHIQRLLDQGILVPCQSPWNTPLLPVKKPGTNDYRPVQDLREVNKRVEDIHPTVPNPYNLLSGLPPSHQWYTVLDLKDAFFCLRLHPTSQPLFAFEWRDPGMGISGQLTWTRLPQGFKNSPTLFNEALHRDLADFRIQHPDLILLQYVDDILLAATSELDCQQGTRALLQTLGDLGYRASAKKAQICQKQVKYLGYLLREGQRWLTEARKETVMGQPVPKTPRQLREFLGKAGFCRLFIPGFAEMAAPLYPLTKPGTLFSWGPDQQKAYQEIKQALLTAPALGLPDLTKPFELFVDEKQGYAKGVLTQKLGPWRRPVAYLSKKLDPVAAGWPPCLRMVAAIAVLTKDAGKLTMGQPLVILAPHAVEALVKQPPDRWLSNARMTHYQAMLLDTDRVQFGPVVALNPATLLPLPEEGAPHDCLEILAETHGTRPDLTDQPIPDADHTWYTDGSSFLQEGQRKAGAAVTTETEVIWAGALPAGTSAQRAELIALTQALKMAEGKRLNVYTDSRYAFATAHIHGEIYRRRGWLTSEGREIKNKSEILALLKALFLPKRLSIIHCLGHQKGDSAEARGNRLADQAAREAAIKTPPDTSTLLIAGKRTADGSEFEKRTADGSEFESPKKKAKVE

SEQ ID NO: 7472 - protein, 2096 aa, synthetic construct
MPAAKRVKLDGGDKKYSIGLDIGTNSVGWAVITDEYKVPSKKFKVLGNTDRHSIKKNLIGALLFDSGETAEATRLKRTARRRYTRRKNRICYLQEIFSNEMAKVDDSFFHRLEESFLVEEDKKHERHPIFGNIVDEVAYHEKYPTIYHLRKKLVDSTDKADLRLIYLALAHMIKFRGHFLIEGDLNPDNSDVDKLFIQLVQTYNQLFEENPINASGVDAKAILSARLSKSRRLENLIAQLPGEKKNGLFGNLIALSLGLTPNFKSNFDLAEDAKLQLSKDTYDDDLDNLLAQIGDQYADLFLAAKNLSDAILLSDILRVNTEITKAPLSASMIKRYDEHHQDLTLLKALVRQQLPEKYKEIFFDQSKNGYAGYIDGGASQEEFYKFIKPILEKMDGTEELLVKLNREDLLRKQRTFDNGSIPHQIHLGELHAILRRQEDFYPFLKDNREKIEKILTFRIPYYVGPLARGNSRFAWMTRKSEETITPWNFEEVVDKGASAQSFIERMTNFDKNLPNEKVLPKHSLLYEYFTVYNELTKVKYVTEGMRKPAFLSGEQKKAIVDLLFKTNRKVTVKQLKEDYFKKIECFDSVEISGVEDRFNASLGTYHDLLKIIKDKDFLDNEENEDILEDIVLTLTLFEDREMIEERLKTYAHLFDDKVMKQLKRRRYTGWGRLSRKLINGIRDKQSGKTILDFLKSDGFANRNFMQLIHDDSLTFKEDIQKAQVSGQGDSLHEHIANLAGSPAIKKGILQTVKVVDELVKVMGRHKPENIVIEMARENQTTQKGQKNSRERMKRIEEGIKELGSQILKEHPVENTQLQNEKLYLYYLQNGRDMYVDQELDINRLSDYDVDHIVPQSFLKDDSIDNKVLTRSDKARGKSDNVPSEEVVKKMKNYWRQLLNAKLITQRKFDNLTKAERGGLSELDKAGFIKRQLVETRQITKHVAQILDSRMNTKYDENDKLIREVKVITLKSKLVSDFRKDFQFYKVREINNYHHAHDAYLNAVVGTALIKKYPKLESEFVYGDYKVYDVRKMIAKSEQEIGKATAKYFFYSNIMNFFKTEITLANGEIRKRPLIETNGETGEIVWDKGRDFATVRKVLSMPQVNIVKKTEVQTGGFSKESILPKRNSDKLIARKKDWDPKKYGGFDSPTVAYSVLVVAKVEKGKSKKLKSVKELLGITIMERSSFEKNPIDFLEAKGYKEVKKDLIIKLPKYSLFELENGRKRMLASAGELQKGNELALPSKYVNFLYLASHYEKLKGSPEDNEQKQLFVEQHKHYLDEIIEQISEFSKRVILADANLDKVLSAYNKHRDKPIREQAENIIHLFTLTNLGAPAAFKYFDTTIDRKRYTSTKEVLDATLIHQSITGLYETRIDLSQLGGDGGGGGPAPEAAAKGGTLGIEDEYRLHETSTEPDVSLGSTWLSDFPQAWAETGGMGLAVRQAPLIIPLKATSTPVSIQQYPMSHEARLGIKPHIQRLLDQGILVPCQSPWNTPLLPVKKPGTNDYRPVQDLREVNKRVEDIHPTVPNPYNLLSGLPPSHQWYTVLDLKDAFFCLRLHPTSQPLFAFEWRDPGMGISGQLTWTRLPQGFKNSPTLFNEALHRDLADFRIQHPDLILLQYVDDILLAATSELDCQQGTRALLQTLGDLGYRASAKKAQICQKQVKYLGYLLREGQRWLTEARKETVMGQPVPKTPRQLREFLGTAGFCRLWIPGFAEMAAPLYPLTKPGTLFSWGPDQQKAYQEIKQALLTAPALGLPDLTKPFELFVDEKQGYAKGVLTQKLGPWRRPVAYLSKKLDPVAAGWPPCLRMVAAIAVLTKDAGKLTMGQPLVILAPHAVEALVKQPPDRWLSNARMTHYQAMLLDTDRVQFGPVVALNPATLLPLPEEGAPHDCLEILAETHGTRPDLTDQPIPDADHTWYTDGSSFLQEGQRKAGAAVTTETEVIWAGALPAGTSAQRAELIALTQALKMAEGKRLNVYTDSRYAFATAHIHGEIYRRRGWLTSEGREIKNKSEILALLKALFLPKRLSIIHCLGHQKGDSAEARGNRLADQAAREAAIKTPPDTSTLLAGKRTADGSEFEKRTADGSEFESPKKKAKVE

SEQ ID NO: 7473 - protein, 2096 aa, synthetic construct; identical to SEQ ID NO: 7471

SEQ ID NO: 7474 - protein, 2096 aa, synthetic construct; identical to SEQ ID NO: 7472

SEQ ID NO: 7475 - protein, 2096 aa, synthetic construct
MPAAKRVKLDGGDKKYSIGLDIGTNSVGWAVITDEYKVPSKKFKVLGNTDRHSIKKNLIGALLFDSGETAEATRLKRTARRRYTRRKNRICYLQEIFSNEMAKVDDSFFHRLEESFLVEEDKKHERHPIFGNIVDEVAYHEKYPTIYHLRKKLVDSTDKADLRLIYLALAHMIKFRGHFLIEGDLNPDNSDVDKLFIQLVQTYNQLFEENPINASGVDAKAILSARLSKSRRLENLIAQLPGEKKNGLFGNLIALSLGLTPNFKSNFDLAEDAKLQLSKDTYDDDLDNLLAQIGDQYADLFLAAKNLSDAILLSDILRVNTEITKAPLSASMIKRYDEHHQDLTLLKALVRQQLPEKYKEIFFDQSKNGYAGYIDGGASQEEFYKFIKPILEKMDGTEELLVKLNREDLLRKQRTFDNGSIPHQIHLGELHAILRRQEDFYPFLKDNREKIEKILTFRIPYYVGPLARGNSRFAWMTRKSEETITPWNFEEVVDKGASAQSFIERMTNFDKNLPNEKVLPKHSLLYEYFTVYNELTKVKYVTEGMRKPAFLSGEQKKAIVDLLFKTNRKVTVKQLKEDYFKKIECFDSVEISGVEDRFNASLGTYHDLLKIIKDKDFLDNEENEDILEDIVLTLTLFEDREMIEERLKTYAHLFDDKVMKQLKRRRYTGWGRLSRKLINGIRDKQSGKTILDFLKSDGFANRNFMQLIHDDSLTFKEDIQKAQVSGQGDSLHEHIANLAGSPAIKKGILQTVKVVDELVKVMGRHKPENIVIEMARENQTTQKGQKNSRERMKRIEEGIKELGSQILKEHPVENTQLQNEKLYLYYLQNGRDMYVDQELDINRLSDYDVDHIVPQSFLKDDSIDNKVLTRSDKARGKSDNVPSEEVVKKMKNYWRQLLNAKLITQRKFDNLTKAERGGLSELDKAGFIKRQLVETRQITKHVAQILDSRMNTKYDENDKLIREVKVITLKSKLVSDFRKDFQFYKVREINNYHHAHDAYLNAVVGTALIKKYPKLESEFVYGDYKVYDVRKMIAKSEQEIGKATAKYFFYSNIMNFFKTEITLANGEIRKRPLIETNGETGEIVWDKGRDFATVRKVLSMPQVNIVKKTEVQTGGFSKESILPKRNSDKLIARKKDWDPKKYGGFDSPTVAYSVLVVAKVEKGKSKKLKSVKELLGITIMERSSFEKNPIDFLEAKGYKEVKKDLIIKLPKYSLFELENGRKRMLASAGELQKGNELALPSKYVNFLYLASHYEKLKGSPEDNEQKQLFVEQHKHYLDEIIEQISEFSKRVILADANLDKVLSAYNKHRDKPIREQAENIIHLFTLTNLGAPAAFKYFDTTIDRKRYTSTKEVLDATLIHQSITGLYETRIDLSQLGGDGGGGGPAPEAAAKGGTLNIEDEYRLHETSKEPDVSLGSTWLSDFPQAWAETGGMGLAVRQAPLIIPLKATSTPVSIKQYPMSQEARLGIKPHIQRLLDQGILVPCQSPWNTPLLPVKKPGTNDYRPVQDLREVNKRVEDIHPTVPNPYNLLSGLPPSHQWYTVLDLKDAFFCLRLHPTSQPLFAFEWRDPEMGISGQLTWTRLPQGFKNSPTLFNEALHRDLAGFRIQHPDLILLQYVDDLLLAATSELDCQQGTRALLQTLGDLGYRASAKKAQICQKQVKYLGYLLKEGQRWLTEARKETVMGQPIPKTPRQLREFLGTAGFCRLWIPGFAEMAAPLYPLTKPGTLFNWGPDQQKAFQEIKQALLTAPALGLPDLTKPFELFVDEKQGYAKGVLTQKLGPWRRPVAYLSKKLDPVAAGWPPCLRMVAAIAVLTKDAGKLTMGQPLVILAPHAVEALVKQPPDRWLSNARMTHYQALLLDTDRVQFGPVVALNPATLLPLPEEGLQHDCLDILAEAHGTRSDLMDQPLPDADHTWYTDGSSFLQEGQRKAGAAVTTETEVIWARALPAGTSAQRAELIALTQALKMAEGKKLNVYTDSRYAFATAHIHGEIYRRRGWLTSEGKEIKNKDEILALLKALFLPKRLSIIHCPGHQKGNSAEARGNRMADQAAREVATRETPETSTLLAGKRTADGSEFEKRTADGSEFESPKKKAKVE

SEQ ID NO: 7476 - protein, 2096 aa, synthetic construct; identical to SEQ ID NO: 4534

SEQ ID NO: 7477 - protein, 2096 aa, synthetic construct
MPAAKRVKLDGGDKKYSIGLDIGTNSVGWAVITDEYKVPSKKFKVLGNTDRHSIKKNLIGALLFDSGETAEATRLKRTARRRYTRRKNRICYLQEIFSNEMAKVDDSFFHRLEESFLVEEDKKHERHPIFGNIVDEVAYHEKYPTIYHLRKKLVDSTDKADLRLIYLALAHMIKFRGHFLIEGDLNPDNSDVDKLFIQLVQTYNQLFEENPINASGVDAKAILSARLSKSRRLENLIAQLPGEKKNGLFGNLIALSLGLTPNFKSNFDLAEDAKLQLSKDTYDDDLDNLLAQIGDQYADLFLAAKNLSDAILLSDILRVNTEITKAPLSASMIKRYDEHHQDLTLLKALVRQQLPEKYKEIFFDQSKNGYAGYIDGGASQEEFYKFIKPILEKMDGTEELLVKLNREDLLRKQRTFDNGSIPHQIHLGELHAILRRQEDFYPFLKDNREKIEKILTFRIPYYVGPLARGNSRFAWMTRKSEETITPWNFEEVVDKGASAQSFIERMTNFDKNLPNEKVLPKHSLLYEYFTVYNELTKVKYVTEGMRKPAFLSGEQKKAIVDLLFKTNRKVTVKQLKEDYFKKIECFDSVEISGVEDRFNASLGTYHDLLKIIKDKDFLDNEENEDILEDIVLTLTLFEDREMIEERLKTYAHLFDDKVMKQLKRRRYTGWGRLSRKLINGIRDKQSGKTILDFLKSDGFANRNFMQLIHDDSLTFKEDIQKAQVSGQGDSLHEHIANLAGSPAIKKGILQTVKVVDELVKVMGRHKPENIVIEMARENQTTQKGQKNSRERMKRIEEGIKELGSQILKEHPVENTQLQNEKLYLYYLQNGRDMYVDQELDINRLSDYDVDHIVPQSFLKDDSIDNKVLTRSDKARGKSDNVPSEEVVKKMKNYWRQLLNAKLITQRKFDNLTKAERGGLSELDKAGFIKRQLVETRQITKHVAQILDSRMNTKYDENDKLIREVKVITLKSKLVSDFRKDFQFYKVREINNYHHAHDAYLNAVVGTALIKKYPKLESEFVYGDYKVYDVRKMIAKSEQEIGKATAKYFFYSNIMNFFKTEITLANGEIRKRPLIETNGETGEIVWDKGRDFATVRKVLSMPQVNIVKKTEVQTGGFSKESILPKRNSDKLIARKKDWDPKKYGGFDSPTVAYSVLVVAKVEKGKSKKLKSVKELLGITIMERSSFEKNPIDFLEAKGYKEVKKDLIIKLPKYSLFELENGRKRMLASAGELQKGNELALPSKYVNFLYLASHYEKLKGSPEDNEQKQLFVEQHKHYLDEIIEQISEFSKRVILADANLDKVLSAYNKHRDKPIREQAENIIHLFTLTNLGAPAAFKYFDTTIDRKRYTSTKEVLDATLIHQSITGLYETRIDLSQLGGDGGGGGPAPEAAAKGGTLNIEDEHRLHETSKEPDVSLGSTWLSDFPQAWAETGGMGLAVRQAPLIIPLKATSTPVSIKQYPMSQEARLGIKPHIQRLLDQGILVPCQSPWNTPLLPVKKPGTNDYRPVQDLREVNKRVEDIHPTVPNPYNLLSGLPPSHQWYTVLDLKDAFFCLRLHPTSQPLFAFEWRDPEMGISGQLTWTRLPQGFKNSPTLFDEALHRDLADFRIQHPDLILLQYVDDLLLAATSELDCQQGTRALLQTLGNLGYRASAKKAQICQKQVKYLGYLLKEGQRWLTEARKETVMGQPTPKTPRQLREFLGTAGFCRLWIPGFAEMAAPLYPLTKTGTLFNWGPDQQKAYQEIKQALLTAPALGLPDLTKPFELFVDEKQGYAKGVLTQKLGPWRRPVAYLSKKLDPVAAGWPPCLRMVAAIAVLTKDAGKLTMGQPLVILAPHAVEALVKQPPDRWLSNARMTHYQALLLDTDRVQFGPVVALNPATLLPLPEEGLQHNCLDILAEAHGTRPDLTDQPLPDADHTWYTDGSSLLQEGQRKAGAAVTTETEVIWAKALPAGTSAQRAELIALTQALKMAEGKKLNVYTDSRYAFATAHIHGEIYRRRGLLTSEGKEIKNKDEILALLKALFLPKRLSIIHCPGHQKGHSAEARGNRMADQAARKAAITETPDTSTLLAGKRTADGSEFEKRTADGSEFESPKKKAKVE

SEQ ID NO: 7478 - protein, 2096 aa, synthetic construct; identical to SEQ ID NO: 4534

SEQ ID NO: 7479 - protein, 2088 aa, synthetic construct
MPAAKRVKLDGGDKKYSIGLDIGTNSVGWAVITDEYKVPSKKFKVLGNTDRHSIKKNLIGALLFDSGETAEATRLKRTARRRYTRRKNRICYLQEIFSNEMAKVDDSFFHRLEESFLVEEDKKHERHPIFGNIVDEVAYHEKYPTIYHLRKKLVDSTDKADLRLIYLALAHMIKFRGHFLIEGDLNPDNSDVDKLFIQLVQTYNQLFEENPINASGVDAKAILSARLSKSRRLENLIAQLPGEKKNGLFGNLIALSLGLTPNFKSNFDLAEDAKLQLSKDTYDDDLDNLLAQIGDQYADLFLAAKNLSDAILLSDILRVNTEITKAPLSASMIKRYDEHHQDLTLLKALVRQQLPEKYKEIFFDQSKNGYAGYIDGGASQEEFYKFIKPILEKMDGTEELLVKLNREDLLRKQRTFDNGSIPHQIHLGELHAILRRQEDFYPFLKDNREKIEKILTFRIPYYVGPLARGNSRFAWMTRKSEETITPWNFEEVVDKGASAQSFIERMTNFDKNLPNEKVLPKHSLLYEYFTVYNELTKVKYVTEGMRKPAFLSGEQKKAIVDLLFKTNRKVTVKQLKEDYFKKIECFDSVEISGVEDRFNASLGTYHDLLKIIKDKDFLDNEENEDILEDIVLTLTLFEDREMIEERLKTYAHLFDDKVMKQLKRRRYTGWGRLSRKLINGIRDKQSGKTILDFLKSDGFANRNFMQLIHDDSLTFKEDIQKAQVSGQGDSLHEHIANLAGSPAIKKGILQTVKVVDELVKVMGRHKPENIVIEMARENQTTQKGQKNSRERMKRIEEGIKELGSQILKEHPVENTQLQNEKLYLYYLQNGRDMYVDQELDINRLSDYDVDHIVPQSFLKDDSIDNKVLTRSDKARGKSDNVPSEEVVKKMKNYWRQLLNAKLITQRKFDNLTKAERGGLSELDKAGFIKRQLVETRQITKHVAQILDSRMNTKYDENDKLIREVKVITLKSKLVSDFRKDFQFYKVREINNYHHAHDAYLNAVVGTALIKKYPKLESEFVYGDYKVYDVRKMIAKSEQEIGKATAKYFFYSNIMNFFKTEITLANGEIRKRPLIETNGETGEIVWDKGRDFATVRKVLSMPQVNIVKKTEVQTGGFSKESILPKRNSDKLIARKKDWDPKKYGGFDSPTVAYSVLVVAKVEKGKSKKLKSVKELLGITIMERSSFEKNPIDFLEAKGYKEVKKDLIIKLPKYSLFELENGRKRMLASAGELQKGNELALPSKYVNFLYLASHYEKLKGSPEDNEQKQLFVEQHKHYLDEIIEQISEFSKRVILADANLDKVLSAYNKHRDKPIREQAENIIHLFTLTNLGAPAAFKYFDTTIDRKRYTSTKEVLDATLIHQSITGLYETRIDLSQLGGDGGGGGPAPEAAAKGGLDDEYRLYSPLVKPDQNIQFWLEQFPQAWAETAGMGLAKQVPPQVIQLKASATPVSVRQYPLSKEAQEGIRPHVQRLIQQGILVPVQSPWNTPLLPVRKPGTNDYRPVQDLREVNKRVQDIHPTVPNPYNLLCALPPQRSWYTVLDLKDAFFCLRLHPTSQPLFAFEWRDPGTGRTGQLTWTRLPQGFKNSPTIFNEALHRDLANFRIQHPQVTLLQYVDDLLLAGATKQDCLEGTKALLLELSDLGYRASAKKAQICRREVTYLGYSLRDGQRWLTEARKKTVVQIPAPTTAKQVREFLGKAGFCRLFIPGFATLAAPLYPLTKPKGEFSWAPEHQKAFDAIKKALLSAPALALPDVTKPFTLYVDERKGVARGVLTQTLGPWRRPVAYLSKKLDPVASGWPVCLKAIAAVAILVKDADKLTLGQNITVIAPHALENIVRQPPDRWMTNARMTHYQSLLLTERVTFAPPAALNPATLLPEETDEPVTHDCHQLLIEETGVRKDLTDIPLTGEVLTWFTDGSSYVVEGKRMAGAAVVDGTRTIWASSLPEGTSAQKAELMALTQALRLAEGKSINIYTDSRYAFATAHVHGAIYKQRGWLTSAGREIKNKEEILSLLEALHLPKRLAIIHCPGHQKAKDPISRGNQMADRVAKQAAQGVNLLPAGKRTADGSEFEKRTADGSEFESPKKKAKVE

SEQ ID NO: 7480 - protein, 2088 aa, synthetic construct; identical to SEQ ID NO: 7479

SEQ ID NO: 7481 - protein, 2090 aa, synthetic construct
MPAAKRVKLDGGDKKYSIGLDIGTNSVGWAVITDEYKVPSKKFKVLGNTDRHSIKKNLIGALLFDSGETAEATRLKRTARRRYTRRKNRICYLQEIFSNEMAKVDDSFFHRLEESFLVEEDKKHERHPIFGNIVDEVAYHEKYPTIYHLRKKLVDSTDKADLRLIYLALAHMIKFRGHFLIEGDLNPDNSDVDKLFIQLVQTYNQLFEENPINASGVDAKAILSARLSKSRRLENLIAQLPGEKKNGLFGNLIALSLGLTPNFKSNFDLAEDAKLQLSKDTYDDDLDNLLAQIGDQYADLFLAAKNLSDAILLSDILRVNTEITKAPLSASMIKRYDEHHQDLTLLKALVRQQLPEKYKEIFFDQSKNGYAGYIDGGASQEEFYKFIKPILEKMDGTEELLVKLNREDLLRKQRTFDNGSIPHQIHLGELHAILRRQEDFYPFLKDNREKIEKILTFRIPYYVGPLARGNSRFAWMTRKSEETITPWNFEEVVDKGASAQSFIERMTNFDKNLPNEKVLPKHSLLYEYFTVYNELTKVKYVTEGMRKPAFLSGEQKKAIVDLLFKTNRKVTVKQLKEDYFKKIECFDSVEISGVEDRFNASLGTYHDLLKIIKDKDFLDNEENEDILEDIVLTLTLFEDREMIEERLKTYAHLFDDKVMKQLKRRRYTGWGRLSRKLINGIRDKQSGKTILDFLKSDGFANRNFMQLIHDDSLTFKEDIQKAQVSGQGDSLHEHIANLAGSPAIKKGILQTVKVVDELVKVMGRHKPENIVIEMARENQTTQKGQKNSRERMKRIEEGIKELGSQILKEHPVENTQLQNEKLYLYYLQNGRDMYVDQELDINRLSDYDVDHIVPQSFLKDDSIDNKVLTRSDKARGKSDNVPSEEVVKKMKNYWRQLLNAKLITQRKFDNLTKAERGGLSELDKAGFIKRQLVETRQITKHVAQILDSRMNTKYDENDKLIREVKVITLKSKLVSDFRKDFQFYKVREINNYHHAHDAYLNAVVGTALIKKYPKLESEFVYGDYKVYDVRKMIAKSEQEIGKATAKYFFYSNIMNFFKTEITLANGEIRKRPLIETNGETGEIVWDKGRDFATVRKVLSMPQVNIVKKTEVQTGGFSKESILPKRNSDKLIARKKDWDPKKYGGFDSPTVAYSVLVVAKVEKGKSKKLKSVKELLGITIMERSSFEKNPIDFLEAKGYKEVKKDLIIKLPKYSLFELENGRKRMLASAGELQKGNELALPSKYVNFLYLASHYEKLKGSPEDNEQKQLFVEQHKHYLDEIIEQISEFSKRVILADANLDKVLSAYNKHRDKPIREQAENIIHLFTLTNLGAPAAFKYFDTTIDRKRYTSTKEVLDATLIHQSITGLYETRIDLSQLGGDGGGGGPAPEAAAKGGTLQLDDEYRLYSPLVKPDQNIQFWLEQFPQAWAETAGMGLAKQVPPQVIQLKASATPVSVRQYPLSKEAQEGIRPHVQRLIQQGILVPVQSPWNTPLLPVRKPGTNDYRPVQDLREVNKRVQDIHPTVPNPYNLLCALPPQRSWYTVLDLKDAFFCLRLHPTSQPLFAFEWRDPGTGRTGQLTWTRLPQGFKNSPTIFDEALHRDLANFRIQHPQVTLLQYVDDLLLAGATKQDCLEGTKALLLELSDLGYRASAKKAQICRREVTYLGYSLRDGQRWLTEARKKTVVQIPAPTTAKQVREFLGTAGFCRLWIPGFATLAAPLYPLTKEKGEFSWAPEHQKAFDAIKKALLSAPALALPDVTKPFTLYVDERKGVARGVLTQTLGPWRRPVAYLSKKLDPVASGWPVCLKAIAAVAILVKDADKLTLGQNITVIAPHALENIVRQPPDRWMTNARMTHYQSLLLTERVTFAPPAALNPATLLPEETDEPVTHDCHQLLIEETGVRKDLTDIPLTGEVLTWFTDGSSYVVEGKRMAGAAVVDGTRTIWASSLPEGTSAQKAELMALTQALRLAEGKSINIYTDSRYAFATAHVHGAIYKQRGLLTSAGREIKNKEEILSLLEALHLPKRLAIIHCPGHQKAKDPISRGNQMADRVAKQAAQGVNLLAGKRTADGSEFEKRTADGSEFESPKKKAKVE

SEQ ID NO: 7482 - protein, 2176 aa, synthetic construct
MPAAKRVKLDGGDKKYSIGLDIGTNSVGWAVITDEYKVPSKKFKVLGNTDRHSIKKNLIGALLFDSGETAEATRLKRTARRRYTRRKNRICYLQEIFSNEMAKVDDSFFHRLEESFLVEEDKKHERHPIFGNIVDEVAYHEKYPTIYHLRKKLVDSTDKADLRLIYLALAHMIKFRGHFLIEGDLNPDNSDVDKLFIQLVQTYNQLFEENPINASGVDAKAILSARLSKSRRLENLIAQLPGEKKNGLFGNLIALSLGLTPNFKSNFDLAEDAKLQLSKDTYDDDLDNLLAQIGDQYADLFLAAKNLSDAILLSDILRVNTEITKAPLSASMIKRYDEHHQDLTLLKALVRQQLPEKYKEIFFDQSKNGYAGYIDGGASQEEFYKFIKPILEKMDGTEELLVKLNREDLLRKQRTFDNGSIPHQIHLGELHAILRRQEDFYPFLKDNREKIEKILTFRIPYYVGPLARGNSRFAWMTRKSEETITPWNFEEVVDKGASAQSFIERMTNFDKNLPNEKVLPKHSLLYEYFTVYNELTKVKYVTEGMRKPAFLSGEQKKAIVDLLFKTNRKVTVKQLKEDYFKKIECFDSVEISGVEDRFNASLGTYHDLLKIIKDKDFLDNEENEDILEDIVLTLTLFEDREMIEERLKTYAHLFDDKVMKQLKRRRYTGWGRLSRKLINGIRDKQSGKTILDFLKSDGFANRNFMQLIHDDSLTFKEDIQKAQVSGQGDSLHEHIANLAGSPAIKKGILQTVKVVDELVKVMGRHKPENIVIEMARENQTTQKGQKNSRERMKRIEEGIKELGSQILKEHPVENTQLQNEKLYLYYLQNGRDMYVDQELDINRLSDYDVDHIVPQSFLKDDSIDNKVLTRSDKARGKSDNVPSEEVVKKMKNYWRQLLNAKLITQRKFDNLTKAERGGLSELDKAGFIKRQLVETRQITKHVAQILDSRMNTKYDENDKLIREVKVITLKSKLVSDFRKDFQFYKVREINNYHHAHDAYLNAVVGTALIKKYPKLESEFVYGDYKVYDVRKMIAKSEQEIGKATAKYFFYSNIMNFFKTEITLANGEIRKRPLIETNGETGEIVWDKGRDFATVRKVLSMPQVNIVKKTEVQTGGFSKESILPKRNSDKLIARKKDWDPKKYGGFDSPTVAYSVLVVAKVEKGKSKKLKSVKELLGITIMERSSFEKNPIDFLEAKGYKEVKKDLIIKLPKYSLFELENGRKRMLASAGELQKGNELALPSKYVNFLYLASHYEKLKGSPEDNEQKQLFVEQHKHYLDEIIEQISEFSKRVILADANLDKVLSAYNKHRDKPIREQAENIIHLFTLTNLGAPAAFKYFDTTIDRKRYTSTKEVLDATLIHQSITGLYETRIDLSQLGGDGGGGGPAPEAAAKGGMDPLQLLQPLEAEIKGTKLKAHWNSGATITCVPEAFLEDERPIQTMLIKTIHGEKQQDVYYLTFKVQGRKVEAEVLASPYDYILLNPSDVPWLMKKPLQLTVLVPLHEYQERLLQQTALPKEQKELLQKLFLKYDALWQHWENQVGHRRIKPHNIATGTLAPRPQKQYPINPKAKPSIQIVIDDLLKQGVLIQQNSTMNTPVYPVPKPDGKWRMVLDYREVNKTIPLIAAQNQHSAGILSSIYRGKYKTTLDLTNGFWAHPITPESYWLTAFTWQGKQYCWTRLPQGFLNSPALFNADVVDLLKEIPNVQAYVDDIYISHDDPQEHLEQLEKIFSILLNAGYVVSLKKSEIAQREVEFLGFNITKEGRGLTDTFKQKLLNITPPKDLKQLQSILGKLNFARNFIPNYSELVKPLYTIVAPANGKFISWTEDNSNQLQHIISVLNQADNLEERNPETRLIIKVNSSPSAGYIRYYNEGSKRPIMYVNYIFSKAEAKFTQTEKLLTTMHKGLIKAMDLAMGQEILVYSPIVSMTKIQRTPLPERKALPVRWITWMTYLEDPRIQFHYDKSLPELQQIPNVTEDVIAKTKHPSEFAMVFYTDGSAIKHPDVNKSHSAGMGIAQVQFIPEYKIVHQWSIPLGDHTAQLAEIAAVEFACKKALKISGPVLIVTDSFYVAESANKELPYWKSNGFLNNKKKPLRHVSKWKSIAECLQLKPDIIIMHEKGHQQPMTTLHTEGNNLADKLATQGSYVVHAGKRTADGSEFEKRTADGSEFESPKKKAKVE

SEQ ID NO: 7483 - protein, 2176 aa, synthetic construct
MPAAKRVKLDGGDKKYSIGLDIGTNSVGWAVITDEYKVPSKKFKVLGNTDRHSIKKNLIGALLFDSGETAEATRLKRTARRRYTRRKNRICYLQEIFSNEMAKVDDSFFHRLEESFLVEEDKKHERHPIFGNIVDEVAYHEKYPTIYHLRKKLVDSTDKADLRLIYLALAHMIKFRGHFLIEGDLNPDNSDVDKLFIQLVQTYNQLFEENPINASGVDAKAILSARLSKSRRLENLIAQLPGEKKNGLFGNLIALSLGLTPNFKSNFDLAEDAKLQLSKDTYDDDLDNLLAQIGDQYADLFLAAKNLSDAILLSDILRVNTEITKAPLSASMIKRYDEHHQDLTLLKALVRQQLPEKYKEIFFDQSKNGYAGYIDGGASQEEFYKFIKPILEKMDGTEELLVKLNREDLLRKQRTFDNGSIPHQIHLGELHAILRRQEDFYPFLKDNREKIEKILTFRIPYYVGPLARGNSRFAWMTRKSEETITPWNFEEVVDKGASAQSFIERMTNFDKNLPNEKVLPKHSLLYEYFTVYNELTKVKYVTEGMRKPAFLSGEQKKAIVDLLFKTNRKVTVKQLKEDYFKKIECFDSVEISGVEDRFNASLGTYHDLLKIIKDKDFLDNEENEDILEDIVLTLTLFEDREMIEERLKTYAHLFDDKVMKQLKRRRYTGWGRLSRKLINGIRDKQSGKTILDFLKSDGFANRNFMQLIHDDSLTFKEDIQKAQVSGQGDSLHEHIANLAGSPAIKKGILQTVKVVDELVKVMGRHKPENIVIEMARENQTTQKGQKNSRERMKRIEEGIKELGSQILKEHPVENTQLQNEKLYLYYLQNGRDMYVDQELDINRLSDYDVDHIVPQSFLKDDSIDNKVLTRSDKARGKSDNVPSEEVVKKMKNYWRQLLNAKLITQRKFDNLTKAERGGLSELDKAGFIKRQLVETRQITKHVAQILDSRMNTKYDENDKLIREVKVITLKSKLVSDFRKDFQFYKVREINNYHHAHDAYLNAVVGTALIKKYPKLESEFVYGDYKVYDVRKMIAKSEQEIGKATAKYFFYSNIMNFFKTEITLANGEIRKRPLIETNGETGEIVWDKGRDFATVRKVLSMPQVNIVKKTEVQTGGFSKESILPKRNSDKLIARKKDWDPKKYGGFDSPTVAYSVLVVAKVEKGKSKKLKSVKELLGITIMERSSFEKNPIDFLEAKGYKEVKKDLIIKLPKYSLFELENGRKRMLASAGELQKGNELALPSKYVNFLYLASHYEKLKGSPEDNEQKQLFVEQHKHYLDEIIEQISEFSKRVILADANLDKVLSAYNKHRDKPIREQAENIIHLFTLTNLGAPAAFKYFDTTIDRKRYTSTKEVLDATLIHQSITGLYETRIDLSQLGGDGGGGGPAPEAAAKGGMNPLQLLQPLPAEVKGTKLLAHWNSGATITCIPESFLEDEQPIKQTLIKTIHGEKQQNVYYLTFKVKGRKVEAEVIASPYEYILLSPTDVPWLTQQPLQLTILVPLQEYQDRILNKTALPEEQKQQLKALFTKYDNLWQHWENQVGHRKIRPHNIATGDYPPRPQKQYPINPKAKPSIQIVIDDLLKQGVLTPQNSTMNTPVYPVPKPDGRWRMVLDYREVNKTIPLTAAQNQHSAGILATIVRQKYKTTLDLANGFWAHPITPDSYWLTAFTWQGKQYCWTRLPQGFLNSPALFNADAVDLLKEVPNVQVYVDDIYLSHDNPHEHIQQLEKVFQILLQAGYVVSLKKSEIGQRTVEFLGFNITKEGRGLTDTFKTKLLNVTPPKDLKQLQSILGLLNFARNFIPNFAELVQTLYNLIASSPGKYIEWTEDNTKQLNKVIEALNTASNLEERLPDQRLVIKVNTSPSAGYVRYYNESGKKPIMYLNYVFSKAELKFSMLEKLLTTMHKALIKAMDLAMGQEILVYSPIVSMTKIQKTPLPERKALPIRWITWMTYLEDPRIQFHYDKTLPELKHIPDVYTSSIPPLKHPSQYEGVFCTDGSAIKSPDPTKSNNAGMGIVHAIYNPEYKILNQWSIPLGHHTAQMAEIAAVEFACKKALKVPGPVLVITDSFYVAESANKELPYWKSNGFVNNKKEPLKHISKWKSIAECLSIKPDITIQHEKGHQPINTSIHTEGNALADKLATQGSYVVNAGKRTADGSEFEKRTADGSEFESPKKKAKVE

SEQ ID NO: 7484 - protein, 2094 aa, synthetic construct
MPAAKRVKLDGGDKKYSIGLDIGTNSVGWAVITDEYKVPSKKFKVLGNTDRHSIKKNLIGALLFDSGETAEATRLKRTARRRYTRRKNRICYLQEIFSNEMAKVDDSFFHRLEESFLVEEDKKHERHPIFGNIVDEVAYHEKYPTIYHLRKKLVDSTDKADLRLIYLALAHMIKFRGHFLIEGDLNPDNSDVDKLFIQLVQTYNQLFEENPINASGVDAKAILSARLSKSRRLENLIAQLPGEKKNGLFGNLIALSLGLTPNFKSNFDLAEDAKLQLSKDTYDDDLDNLLAQIGDQYADLFLAAKNLSDAILLSDILRVNTEITKAPLSASMIKRYDEHHQDLTLLKALVRQQLPEKYKEIFFDQSKNGYAGYIDGGASQEEFYKFIKPILEKMDGTEELLVKLNREDLLRKQRTFDNGSIPHQIHLGELHAILRRQEDFYPFLKDNREKIEKILTFRIPYYVGPLARGNSRFAWMTRKSEETITPWNFEEVVDKGASAQSFIERMTNFDKNLPNEKVLPKHSLLYEYFTVYNELTKVKYVTEGMRKPAFLSGEQKKAIVDLLFKTNRKVTVKQLKEDYFKKIECFDSVEISGVEDRFNASLGTYHDLLKIIKDKDFLDNEENEDILEDIVLTLTLFEDREMIEERLKTYAHLFDDKVMKQLKRRRYTGWGRLSRKLINGIRDKQSGKTILDFLKSDGFANRNFMQLIHDDSLTFKEDIQKAQVSGQGDSLHEHIANLAGSPAIKKGILQTVKVVDELVKVMGRHKPENIVIEMARENQTTQKGQKNSRERMKRIEEGIKELGSQILKEHPVENTQLQNEKLYLYYLQNGRDMYVDQELDINRLSDYDVDHIVPQSFLKDDSIDNKVLTRSDKARGKSDNVPSEEVVKKMKNYWRQLLNAKLITQRKFDNLTKAERGGLSELDKAGFIKRQLVETRQITKHVAQILDSRMNTKYDENDKLIREVKVITLKSKLVSDFRKDFQFYKVREINNYHHAHDAYLNAVVGTALIKKYPKLESEFVYGDYKVYDVRKMIAKSEQEIGKATAKYFFYSNIMNFFKTEITLANGEIRKRPLIETNGETGEIVWDKGRDFATVRKVLSMPQVNIVKKTEVQTGGFSKESILPKRNSDKLIARKKDWDPKKYGGFDSPTVAYSVLVVAKVEKGKSKKLKSVKELLGITIMERSSFEKNPIDFLEAKGYKEVKKDLIIKLPKYSLFELENGRKRMLASAGELQKGNELALPSKYVNFLYLASHYEKLKGSPEDNEQKQLFVEQHKHYLDEIIEQISEFSKRVILADANLDKVLSAYNKHRDKPIREQAENIIHLFTLTNLGAPAAFKYFDTTIDRKRYTSTKEVLDATLIHQSITGLYETRIDLSQLGGDGGGGGPAPEAAAKGGVLNLEEEYRLHEKPVPSSIDPSWLQLFPTVWAERAGMGLANQVPPVVVELRSGASPVAVRQYPMSKEAREGIRPHIQRFLDLGVLVPCQSPWNTPLLPVKKPGTNDYRPVQDLREINKRVQDIHPTVPNPYNLLSSLPPSHTWYSVLDLKDAFFCLKLHPNSQPLFAFEWRDPEKGNTGQLTWTRLPQGFKNSPTLFNEALHRDLAPFRALNPQVVLLQYVDDLLVAAPTYRDCKEGTQKLLQELSKLGYRVSAKKAQLCQKEVTYLGYLLKEGKRWLTPARKATVMKIPPPTTPRQVREFLGKAGFCRLFIPGFASLAAPLYPLTKPSIPFIWTEEHQKAFDRIKEALLSAPALALPDLTKPFTLYVDERAGVARGVLTQTLGPWRRPVAYLSKKLDPVASGWPTCLKAVAAVALLLKDADKLTLGQNVTVIASHSLESIVRQPPDRWMTNARMTHYQSLLLNERVSFAPPAVLNPATLLPVESEATPVHRCSEILAEETGTRRDLKDQPLPGVPAWYTDGSSFIAEGKRRAGAAIVDGKRTVWASSLPEGTSAQKAELVALTQALRLAEGKDINIYTDSRYAFATAHIHGAIYKQRGWLTSAGKDIKNKEEILALLEAIHLPKRVAIIHCPGHQKGNDPVATGNRRADEAAKQAALSTRVLAETTKPAGKRTADGSEFEKRTADGSEFESPKKKAKVE

SEQ ID NO: 7485 - protein, 2096 aa, synthetic construct
MPAAKRVKLDGGDKKYSIGLDIGTNSVGWAVITDEYKVPSKKFKVLGNTDRHSIKKNLIGALLFDSGETAEATRLKRTARRRYTRRKNRICYLQEIFSNEMAKVDDSFFHRLEESFLVEEDKKHERHPIFGNIVDEVAYHEKYPTIYHLRKKLVDSTDKADLRLIYLALAHMIKFRGHFLIEGDLNPDNSDVDKLFIQLVQTYNQLFEENPINASGVDAKAILSARLSKSRRLENLIAQLPGEKKNGLFGNLIALSLGLTPNFKSNFDLAEDAKLQLSKDTYDDDLDNLLAQIGDQYADLFLAAKNLSDAILLSDILRVNTEITKAPLSASMIKRYDEHHQDLTLLKALVRQQLPEKYKEIFFDQSKNGYAGYIDGGASQEEFYKFIKPILEKMDGTEELLVKLNREDLLRKQRTFDNGSIPHQIHLGELHAILRRQEDFYPFLKDNREKIEKILTFRIPYYVGPLARGNSRFAWMTRKSEETITPWNFEEVVDKGASAQSFIERMTNFDKNLPNEKVLPKHSLLYEYFTVYNELTKVKYVTEGMRKPAFLSGEQKKAIVDLLFKTNRKVTVKQLKEDYFKKIECFDSVEISGVEDRFNASLGTYHDLLKIIKDKDFLDNEENEDILEDIVLTLTLFEDREMIEERLKTYAHLFDDKVMKQLKRRRYTGWGRLSRKLINGIRDKQSGKTILDFLKSDGFANRNFMQLIHDDSLTFKEDIQKAQVSGQGDSLHEHIANLAGSPAIKKGILQTVKVVDELVKVMGRHKPENIVIEMARENQTTQKGQKNSRERMKRIEEGIKELGSQILKEHPVENTQLQNEKLYLYYLQNGRDMYVDQELDINRLSDYDVDHIVPQSFLKDDSIDNKVLTRSDKARGKSDNVPSEEVVKKMKNYWRQLLNAKLITQRKFDNLTKAERGGLSELDKAGFIKRQLVETRQITKHVAQILDSRMNTKYDENDKLIREVKVITLKSKLVSDFRKDFQFYKVREINNYHHAHDAYLNAVVGTALIKKYPKLESEFVYGDYKVYDVRKMIAKSEQEIGKATAKYFFYSNIMNFFKTEITLANGEIRKRPLIETNGETGEIVWDKGRDFATVRKVLSMPQVNIVKKTEVQTGGFSKESILPKRNSDKLIARKKDWDPKKYGGFDSPTVAYSVLVVAKVEKGKSKKLKSVKELLGITIMERSSFEKNPIDFLEAKGYKEVKKDLIIKLPKYSLFELENGRKRMLASAGELQKGNELALPSKYVNFLYLASHYEKLKGSPEDNEQKQLFVEQHKHYLDEIIEQISEFSKRVILADANLDKVLSAYNKHRDKPIREQAENIIHLFTLTNLGAPAAFKYFDTTIDRKRYTSTKEVLDATLIHQSITGLYETRIDLSQLGGDGGGGGPAPEAAAKGGTLNIEDEYRLHETSKEPDVPLGSTWLSDFPQAWAETGGMGLAVRQAPLIIPLKATSTPVSIKQYPMSQEARLGIKPHIQRLLDQGILVPCQSPWNTPLLPVKKPGTNDYRPVQDLREVNKRVEDIHPTVPNPYNLLSGLPPSHQWYTVLDLKDAFFCLRLHPTSQPLFAFEWRDPEMGISGQLTWTRLPQGFKNSPTLFNEALHRDLADFRIQHPDLILLQYVDDLLLAATSEQDCQRGTRALLQTLGNLGYRASAKKAQICQKQVKYLGYLLKEGQRWLTEARKETVMGQPTPKTPRQLREFLGTAGFCRLWIPGFAEMAAPLYPLTKPGTLFNWGPDQQKAYQEIKQALLTAPALGLPDLTKPFELFVDEKQGYAKGVLTQKLGPWRRPVAYLSKKLDPVAAGWPPCLRMVAAIAVLTKDAGKLTMGQPLVILAPHAVEALVKQPPDRWLSNARMTHYQAMLLDTDRVQFGPVVALNPATLLPLPEKEAPHDCLEILAETHGTRPDLTDQPIPDADYTWYTDGSSFLQEGQRRAGAAVTTETEVIWARALPAGTSAQRAELIALTQALKMAEGKKLNVYTDSRYAFATAHVHGEIYRRRGWLTSEGREIKNKNEILALLKALFLPKRLSIIHCPGHQKGNSAEARGNRMADQAAREAAMKAVLETSTLLAGKRTADGSEFEKRTADGSEFESPKKKAKVE

SEQ ID NO: 7486 - protein, 2098 aa, synthetic construct
MPAAKRVKLDGGDKKYSIGLDIGTNSVGWAVITDEYKVPSKKFKVLGNTDRHSIKKNLIGALLFDSGETAEATRLKRTARRRYTRRKNRICYLQEIFSNEMAKVDDSFFHRLEESFLVEEDKKHERHPIFGNIVDEVAYHEKYPTIYHLRKKLVDSTDKADLRLIYLALAHMIKFRGHFLIEGDLNPDNSDVDKLFIQLVQTYNQLFEENPINASGVDAKAILSARLSKSRRLENLIAQLPGEKKNGLFGNLIALSLGLTPNFKSNFDLAEDAKLQLSKDTYDDDLDNLLAQIGDQYADLFLAAKNLSDAILLSDILRVNTEITKAPLSASMIKRYDEHHQDLTLLKALVRQQLPEKYKEIFFDQSKNGYAGYIDGGASQEEFYKFIKPILEKMDGTEELLVKLNREDLLRKQRTFDNGSIPHQIHLGELHAILRRQEDFYPFLKDNREKIEKILTFRIPYYVGPLARGNSRFAWMTRKSEETITPWNFEEVVDKGASAQSFIERMTNFDKNLPNEKVLPKHSLLYEYFTVYNELTKVKYVTEGMRKPAFLSGEQKKAIVDLLFKTNRKVTVKQLKEDYFKKIECFDSVEISGVEDRFNASLGTYHDLLKIIKDKDFLDNEENEDILEDIVLTLTLFEDREMIEERLKTYAHLFDDKVMKQLKRRRYTGWGRLSRKLINGIRDKQSGKTILDFLKSDGFANRNFMQLIHDDSLTFKEDIQKAQVSGQGDSLHEHIANLAGSPAIKKGILQTVKVVDELVKVMGRHKPENIVIEMARENQTTQKGQKNSRERMKRIEEGIKELGSQILKEHPVENTQLQNEKLYLYYLQNGRDMYVDQELDINRLSDYDVDHIVPQSFLKDDSIDNKVLTRSDKARGKSDNVPSEEVVKKMKNYWRQLLNAKLITQRKFDNLTKAERGGLSELDKAGFIKRQLVETRQITKHVAQILDSRMNTKYDENDKLIREVKVITLKSKLVSDFRKDFQFYKVREINNYHHAHDAYLNAVVGTALIKKYPKLESEFVYGDYKVYDVRKMIAKSEQEIGKATAKYFFYSNIMNFFKTEITLANGEIRKRPLIETNGETGEIVWDKGRDFATVRKVLSMPQVNIVKKTEVQTGGFSKESILPKRNSDKLIARKKDWDPKKYGGFDSPTVAYSVLVVAKVEKGKSKKLKSVKELLGITIMERSSFEKNPIDFLEAKGYKEVKKDLIIKLPKYSLFELENGRKRMLASAGELQKGNELALPSKYVNFLYLASHYEKLKGSPEDNEQKQLFVEQHKHYLDEIIEQISEFSKRVILADANLDKVLSAYNKHRDKPIREQAENIIHLFTLTNLGAPAAFKYFDTTIDRKRYTSTKEVLDATLIHQSITGLYETRIDLSQLGGDGGEAAAKGGGPAPGGTAPLEEEYRLFLEAPIQNVTLLEQWKREIPKVWAEINPPGLASTQAPIHVQLLSTALPVRVRQYPITLEAKRSLRETIRKFRAAGILRPVHSPWNTPLLPVRKSGTSEYRMVQDLREVNKRVETIHPTVPNPYTLLSLLPPDRIWYSVLDLKDAFFCIPLAPESQLIFAFEWADAEEGESGQLTWTRLPQGFKNSPTLFDEALNRDLQGFRLDHPSVSLLQYVDDLLIAADTQAACLSATRDLLMTLAELGYRVSGKKAQLCQEEVTYLGFKIHKGSRSLSNSRTQAILQIPVPKTKRQVREFLGTIGYCRLWIPGFAELAQPLYAATRGGNDPLVWGEKEEEAFQSLKLALTQPPALALPSLDKPFQLFVEETSGAAKGVLTQALGPWKRPVAYLSKRLDPVAAGWPRCLRAIAAAALLTREASKLTFGQDIEITSSHNLESLLRSPPDKWLTNARITQYQVLLLDPPRVRFKQTAALNPATLLPETDDTLPIHHCLDTLDSLTSTRPDLTDQPLAQAEATLFTDGSSYIRDGKRYAGAAVVTLDSVIWAEPLPIGTSAQKAELIALTKALEWSKDKSVNIYTDSRYAFATLHVHGMIYRERGLLTAGGKAIKNAPEILALLTAVWLPKRVAVMHCKGHQKDDAPTSTGNRRADEVAREVAIRPLSTQATISAGKRTADGSEFEKRTADGSEFESPKKKAKVE

SEQ ID NO: 7487 - protein, 2098 aa, synthetic construct
MPAAKRVKLDGGDKKYSIGLDIGTNSVGWAVITDEYKVPSKKFKVLGNTDRHSIKKNLIGALLFDSGETAEATRLKRTARRRYTRRKNRICYLQEIFSNEMAKVDDSFFHRLEESFLVEEDKKHERHPIFGNIVDEVAYHEKYPTIYHLRKKLVDSTDKADLRLIYLALAHMIKFRGHFLIEGDLNPDNSDVDKLFIQLVQTYNQLFEENPINASGVDAKAILSARLSKSRRLENLIAQLPGEKKNGLFGNLIALSLGLTPNFKSNFDLAEDAKLQLSKDTYDDDLDNLLAQIGDQYADLFLAAKNLSDAILLSDILRVNTEITKAPLSASMIKRYDEHHQDLTLLKALVRQQLPEKYKEIFFDQSKNGYAGYIDGGASQEEFYKFIKPILEKMDGTEELLVKLNREDLLRKQRTFDNGSIPHQIHLGELHAILRRQEDFYPFLKDNREKIEKILTFRIPYYVGPLARGNSRFAWMTRKSEETITPWNFEEVVDKGASAQSFIERMTNFDKNLPNEKVLPKHSLLYEYFTVYNELTKVKYVTEGMRKPAFLSGEQKKAIVDLLFKTNRKVTVKQLKEDYFKKIECFDSVEISGVEDRFNASLGTYHDLLKIIKDKDFLDNEENEDILEDIVLTLTLFEDREMIEERLKTYAHLFDDKVMKQLKRRRYTGWGRLSRKLINGIRDKQSGKTILDFLKSDGFANRNFMQLIHDDSLTFKEDIQKAQVSGQGDSLHEHIANLAGSPAIKKGILQTVKVVDELVKVMGRHKPENIVIEMARENQTTQKGQKNSRERMKRIEEGIKELGSQILKEHPVENTQLQNEKLYLYYLQNGRDMYVDQELDINRLSDYDVDHIVPQSFLKDDSIDNKVLTRSDKARGKSDNVPSEEVVKKMKNYWRQLLNAKLITQRKFDNLTKAERGGLSELDKAGFIKRQLVETRQITKHVAQILDSRMNTKYDENDKLIREVKVITLKSKLVSDFRKDFQFYKVREINNYHHAHDAYLNAVVGTALIKKYPKLESEFVYGDYKVYDVRKMIAKSEQEIGKATAKYFFYSNIMNFFKTEITLANGEIRKRPLIETNGETGEIVWDKGRDFATVRKVLSMPQVNIVKKTEVQTGGFSKESILPKRNSDKLIARKKDWDPKKYGGFDSPTVAYSVLVVAKVEKGKSKKLKSVKELLGITIMERSSFEKNPIDFLEAKGYKEVKKDLIIKLPKYSLFELENGRKRMLASAGELQKGNELALPSKYVNFLYLASHYEKLKGSPEDNEQKQLFVEQHKHYLDEIIEQISEFSKRVILADANLDKVLSAYNKHRDKPIREQAENIIHLFTLTNLGAPAAFKYFDTTIDRKRYTSTKEVLDATLIHQSITGLYETRIDLSQLGGDGGEAAAKGGGPAPGGTAPLEEEYRLFLEAPIQNVTLLEQWKREIPKVWAEINPPGLASTQAPIHVQLLSTALPVRVRQYPITLEAKRSLRETIRKFRAAGILRPVHSPWNTPLLPVRKSGTSEYRMVQDLREVNKRVETIHPTVPNPYTLLSLLPPDRIWYSVLDLKDAFFCIPLAPESQLIFAFEWADAEEGESGQLTWTRLPQGFKNSPTLFNEALNRDLQGFRLDHPSVSLLQYVDDLLIAADTQAACLSATRDLLMTLAELGYRVSGKKAQLCQEEVTYLGFKIHKGSRSLSNSRTQAILQIPVPKTKRQVREFLGTIGYCRLWIPGFAELAQPLYAATRPGNDPLVWGEKEEEAFQSLKLALTQPPALALPSLDKPFQLFVEETSGAAKGVLTQALGPWKRPVAYLSKRLDPVAAGWPRCLRAIAAAALLTREASKLTFGQDIEITSSHNLESLLRSPPDKWLTNARITQYQVLLLDPPRVRFKQTAALNPATLLPETDDTLPIHHCLDTLDSLTSTRPDLTDQPLAQAEATLFTDGSSYIRDGKRYAGAAVVTLDSVIWAEPLPIGTSAQKAELIALTKALEWSKDKSVNIYTDSRYAFATLHVHGMIYRERGWLTAGGKAIKNAPEILALLTAVWLPKRVAVMHCKGHQKDDAPTSTGNRRADEVAREVAIRPLSTQATISAGKRTADGSEFEKRTADGSEFESPKKKAKVE

SEQ ID NO: 7488 - protein, 2098 aa, synthetic construct
MPAAKRVKLDGGDKKYSIGLDIGTNSVGWAVITDEYKVPSKKFKVLGNTDRHSIKKNLIGALLFDSGETAEATRLKRTARRRYTRRKNRICYLQEIFSNEMAKVDDSFFHRLEESFLVEEDKKHERHPIFGNIVDEVAYHEKYPTIYHLRKKLVDSTDKADLRLIYLALAHMIKFRGHFLIEGDLNPDNSDVDKLFIQLVQTYNQLFEENPINASGVDAKAILSARLSKSRRLENLIAQLPGEKKNGLFGNLIALSLGLTPNFKSNFDLAEDAKLQLSKDTYDDDLDNLLAQIGDQYADLFLAAKNLSDAILLSDILRVNTEITKAPLSASMIKRYDEHHQDLTLLKALVRQQLPEKYKEIFFDQSKNGYAGYIDGGASQEEFYKFIKPILEKMDGTEELLVKLNREDLLRKQRTFDNGSIPHQIHLGELHAILRRQEDFYPFLKDNREKIEKILTFRIPYYVGPLARGNSRFAWMTRKSEETITPWNFEEVVDKGASAQSFIERMTNFDKNLPNEKVLPKHSLLYEYFTVYNELTKVKYVTEGMRKPAFLSGEQKKAIVDLLFKTNRKVTVKQLKEDYFKKIECFDSVEISGVEDRFNASLGTYHDLLKIIKDKDFLDNEENEDILEDIVLTLTLFEDREMIEERLKTYAHLFDDKVMKQLKRRRYTGWGRLSRKLINGIRDKQSGKTILDFLKSDGFANRNFMQLIHDDSLTFKEDIQKAQVSGQGDSLHEHIANLAGSPAIKKGILQTVKVVDELVKVMGRHKPENIVIEMARENQTTQKGQKNSRERMKRIEEGIKELGSQILKEHPVENTQLQNEKLYLYYLQNGRDMYVDQELDINRLSDYDVDHIVPQSFLKDDSIDNKVLTRSDKARGKSDNVPSEEVVKKMKNYWRQLLNAKLITQRKFDNLTKAERGGLSELDKAGFIKRQLVETRQITKHVAQILDSRMNTKYDENDKLIREVKVITLKSKLVSDFRKDFQFYKVREINNYHHAHDAYLNAVVGTALIKKYPKLESEFVYGDYKVYDVRKMIAKSEQEIGKATAKYFFYSNIMNFFKTEITLANGEIRKRPLIETNGETGEIVWDKGRDFATVRKVLSMPQVNIVKKTEVQTGGFSKESILPKRNSDKLIARKKDWDPKKYGGFDSPTVAYSVLVVAKVEKGKSKKLKSVKELLGITIMERSSFEKNPIDFLEAKGYKEVKKDLIIKLPKYSLFELENGRKRMLASAGELQKGNELALPSKYVNFLYLASHYEKLKGSPEDNEQKQLFVEQHKHYLDEIIEQISEFSKRVILADANLDKVLSAYNKHRDKPIREQAENIIHLFTLTNLGAPAAFKYFDTTIDRKRYTSTKEVLDATLIHQSITGLYETRIDLSQLGGDGGEAAAKGGGPAPGGTAPLEEEYRLFLEAPIQNVTLLEQWKREIPKVWAEINPPGLASTQAPIHVQLLSTALPVRVRQYPITLEAKRSLRETIRKFRAAGILRPVHSPWNTPLLPVRKSGTSEYRMVQDLREVNKRVETIHPTVPNPYTLLSLLPPDRIWYSVLDLKDAFFCIPLAPESQLIFAFEWADAEEGESGQLTWTRLPQGFKNSPTLFNEALNRDLQGFRLDHPSVSLLQYVDDLLIAADTQAACLSATRDLLMTLAELGYRVSGKKAQLCQEEVTYLGFKIHKGSRSLSNSRTQAILQIPVPKTKRQVREFLGKIGYCRLFIPGFAELAQPLYAATRPGNDPLVWGEKEEEAFQSLKLALTQPPALALPSLDKPFQLFVEETSGAAKGVLTQALGPWKRPVAYLSKRLDPVAAGWPRCLRAIAAAALLTREASKLTFGQDIEITSSHNLESLLRSPPDKWLTNARITQYQVLLLDPPRVRFKQTAALNPATLLPETDDTLPIHHCLDTLDSLTSTRPDLTDQPLAQAEATLFTDGSSYIRDGKRYAGAAVVTLDSVIWAEPLPIGTSAQKAELIALTKALEWSKDKSVNIYTDSRYAFATLHVHGMIYRERGWLTAGGKAIKNAPEILALLTAVWLPKRVAVMHCKGHQKDDAPTSTGNRRADEVAREVAIRPLSTQATISAGKRTADGSEFEKRTADGSEFESPKKKAKVE

SEQ ID NO: 7489 - protein, 2102 aa, synthetic construct
MPAAKRVKLDGGDKKYSIGLDIGTNSVGWAVITDEYKVPSKKFKVLGNTDRHSIKKNLIGALLFDSGETAEATRLKRTARRRYTRRKNRICYLQEIFSNEMAKVDDSFFHRLEESFLVEEDKKHERHPIFGNIVDEVAYHEKYPTIYHLRKKLVDSTDKADLRLIYLALAHMIKFRGHFLIEGDLNPDNSDVDKLFIQLVQTYNQLFEENPINASGVDAKAILSARLSKSRRLENLIAQLPGEKKNGLFGNLIALSLGLTPNFKSNFDLAEDAKLQLSKDTYDDDLDNLLAQIGDQYADLFLAAKNLSDAILLSDILRVNTEITKAPLSASMIKRYDEHHQDLTLLKALVRQQLPEKYKEIFFDQSKNGYAGYIDGGASQEEFYKFIKPILEKMDGTEELLVKLNREDLLRKQRTFDNGSIPHQIHLGELHAILRRQEDFYPFLKDNREKIEKILTFRIPYYVGPLARGNSRFAWMTRKSEETITPWNFEEVVDKGASAQSFIERMTNFDKNLPNEKVLPKHSLLYEYFTVYNELTKVKYVTEGMRKPAFLSGEQKKAIVDLLFKTNRKVTVKQLKEDYFKKIECFDSVEISGVEDRFNASLGTYHDLLKIIKDKDFLDNEENEDILEDIVLTLTLFEDREMIEERLKTYAHLFDDKVMKQLKRRRYTGWGRLSRKLINGIRDKQSGKTILDFLKSDGFANRNFMQLIHDDSLTFKEDIQKAQVSGQGDSLHEHIANLAGSPAIKKGILQTVKVVDELVKVMGRHKPENIVIEMARENQTTQKGQKNSRERMKRIEEGIKELGSQILKEHPVENTQLQNEKLYLYYLQNGRDMYVDQELDINRLSDYDVDHIVPQSFLKDDSIDNKVLTRSDKARGKSDNVPSEEVVKKMKNYWRQLLNAKLITQRKFDNLTKAERGGLSELDKAGFIKRQLVETRQITKHVAQILDSRMNTKYDENDKLIREVKVITLKSKLVSDFRKDFQFYKVREINNYHHAHDAYLNAVVGTALIKKYPKLESEFVYGDYKVYDVRKMIAKSEQEIGKATAKYFFYSNIMNFFKTEITLANGEIRKRPLIETNGETGEIVWDKGRDFATVRKVLSMPQVNIVKKTEVQTGGFSKESILPKRNSDKLIARKKDWDPKKYGGFDSPTVAYSVLVVAKVEKGKSKKLKSVKELLGITIMERSSFEKNPIDFLEAKGYKEVKKDLIIKLPKYSLFELENGRKRMLASAGELQKGNELALPSKYVNFLYLASHYEKLKGSPEDNEQKQLFVEQHKHYLDEIIEQISEFSKRVILADANLDKVLSAYNKHRDKPIREQAENIIHLFTLTNLGAPAAFKYFDTTIDRKRYTSTKEVLDATLIHQSITGLYETRIDLSQLGGDGGEAAAKGGGPAPGGTVSLQDEHRLFDIPVTTSLPDVWLQDFPQAWAETGGLGRAKCQAPIIIDLKPTAVPVSIKQYPMSLEAHMGIRQHIIKFLELGVLRPCRSPWNTPLLPVKKPGTQDYRPVQDLREINKRTVDIHPTVPNPYNLLSTLKPDYSWYTVLDLKDAFFCLPLAPQSQELFAFEWKDPERGISGQLTWTRLPQGFKNSPTLFDEALHRDLTDFRTQHPEVTLLQYVDDLLLAAPTKKACTQGTRHLLQELGEKGYRASAKKAQICQTKVTYLGYILSEGKRWLTPGRIETVARIPPPRNPREVREFLGTAGFCRLWIPGFAELAAPLYALTKESTPFTWQTEHQLAFEALKKALLSAPALGLPDTSKPFTLFLDERQGIAKGVLTQKLGPWKRPVAYLSKKLDPVAAGWPPCLRIMAATAMLVKDSAKLTLGQPLTVITPHTLEAIVRQPPDRWITNARLTHYQALLLDTDRVQFGPPVTLNPATLLPVPENQPSPHDCRQVLAETHGTREDLKDQELPDADHTWYTDGSSYLDSGTRRAGAAVVDGHNTIWAQSLPPGTSAQKAELIALTKALELSKGKKANIYTDSRYAFATAHTHGSIYERRGLLTSEGKEIKNKAEIIALLKALFLPQEVAIIHCPGHQKGQDPVAVGNRQADRVARQAAMAEVLTLATEPDNTSHITAGKRTADGSEFEKRTADGSEFESPKKKAKVE

SEQ ID NO: 7490 - protein, 2102 aa, synthetic construct
MPAAKRVKLDGGDKKYSIGLDIGTNSVGWAVITDEYKVPSKKFKVLGNTDRHSIKKNLIGALLFDSGETAEATRLKRTARRRYTRRKNRICYLQEIFSNEMAKVDDSFFHRLEESFLVEEDKKHERHPIFGNIVDEVAYHEKYPTIYHLRKKLVDSTDKADLRLIYLALAHMIKFRGHFLIEGDLNPDNSDVDKLFIQLVQTYNQLFEENPINASGVDAKAILSARLSKSRRLENLIAQLPGEKKNGLFGNLIALSLGLTPNFKSNFDLAEDAKLQLSKDTYDDDLDNLLAQIGDQYADLFLAAKNLSDAILLSDILRVNTEITKAPLSASMIKRYDEHHQDLTLLKALVRQQLPEKYKEIFFDQSKNGYAGYIDGGASQEEFYKFIKPILEKMDGTEELLVKLNREDLLRKQRTFDNGSIPHQIHLGELHAILRRQEDFYPFLKDNREKIEKILTFRIPYYVGPLARGNSRFAWMTRKSEETITPWNFEEVVDKGASAQSFIERMTNFDKNLPNEKVLPKHSLLYEYFTVYNELTKVKYVTEGMRKPAFLSGEQKKAIVDLLFKTNRKVTVKQLKEDYFKKIECFDSVEISGVEDRFNASLGTYHDLLKIIKDKDFLDNEENEDILEDIVLTLTLFEDREMIEERLKTYAHLFDDKVMKQLKRRRYTGWGRLSRKLINGIRDKQSGKTILDFLKSDGFANRNFMQLIHDDSLTFKEDIQKAQVSGQGDSLHEHIANLAGSPAIKKGILQTVKVVDELVKVMGRHKPENIVIEMARENQTTQKGQKNSRERMKRIEEGIKELGSQILKEHPVENTQLQNEKLYLYYLQNGRDMYVDQELDINRLSDYDVDHIVPQSFLKDDSIDNKVLTRSDKARGKSDNVPSEEVVKKMKNYWRQLLNAKLITQRKFDNLTKAERGGLSELDKAGFIKRQLVETRQITKHVAQILDSRMNTKYDENDKLIREVKVITLKSKLVSDFRKDFQFYKVREINNYHHAHDAYLNAVVGTALIKKYPKLESEFVYGDYKVYDVRKMIAKSEQEIGKATAKYFFYSNIMNFFKTEITLANGEIRKRPLIETNGETGEIVWDKGRDFATVRKVLSMPQVNIVKKTEVQTGGFSKESILPKRNSDKLIARKKDWDPKKYGGFDSPTVAYSVLVVAKVEKGKSKKLKSVKELLGITIMERSSFEKNPIDFLEAKGYKEVKKDLIIKLPKYSLFELENGRKRMLASAGELQKGNELALPSKYVNFLYLASHYEKLKGSPEDNEQKQLFVEQHKHYLDEIIEQISEFSKRVILADANLDKVLSAYNKHRDKPIREQAENIIHLFTLTNLGAPAAFKYFDTTIDRKRYTSTKEVLDATLIHQSITGLYETRIDLSQLGGDGGEAAAKGGGPAPGGTVSLQDEHRLFDIPVTTSLPDVWLQDFPQAWAETGGLGRAKCQAPIIIDLKPTAVPVSIKQYPMSLEAHMGIRQHIIKFLELGVLRPCRSPWNTPLLPVKKPGTQDYRPVQDLREINKRTVDIHPTVPNPYNLLSTLKPDYSWYTVLDLKDAFFCLPLAPQSQELFAFEWKDPERGISGQLTWTRLPQGFKNSPTLFNEALHRDLTDFRTQHPEVTLLQYVDDLLLAAPTKKACTQGTRHLLQELGEKGYRASAKKAQICQTKVTYLGYILSEGKRWLTPGRIETVARIPPPRNPREVREFLGTAGFCRLWIPGFAELAAPLYALTKPSTPFTWQTEHQLAFEALKKALLSAPALGLPDTSKPFTLFLDERQGIAKGVLTQKLGPWKRPVAYLSKKLDPVAAGWPPCLRIMAATAMLVKDSAKLTLGQPLTVITPHTLEAIVRQPPDRWITNARLTHYQALLLDTDRVQFGPPVTLNPATLLPVPENQPSPHDCRQVLAETHGTREDLKDQELPDADHTWYTDGSSYLDSGTRRAGAAVVDGHNTIWAQSLPPGTSAQKAELIALTKALELSKGKKANIYTDSRYAFATAHTHGSIYERRGWLTSEGKEIKNKAEIIALLKALFLPQEVAIIHCPGHQKGQDPVAVGNRQADRVARQAAMAEVLTLATEPDNTSHITAGKRTADGSEFEKRTADGSEFESPKKKAKVE

SEQ ID NO: 7491 - protein, 2173 aa, synthetic construct
MPAAKRVKLDGGDKKYSIGLDIGTNSVGWAVITDEYKVPSKKFKVLGNTDRHSIKKNLIGALLFDSGETAEATRLKRTARRRYTRRKNRICYLQEIFSNEMAKVDDSFFHRLEESFLVEEDKKHERHPIFGNIVDEVAYHEKYPTIYHLRKKLVDSTDKADLRLIYLALAHMIKFRGHFLIEGDLNPDNSDVDKLFIQLVQTYNQLFEENPINASGVDAKAILSARLSKSRRLENLIAQLPGEKKNGLFGNLIALSLGLTPNFKSNFDLAEDAKLQLSKDTYDDDLDNLLAQIGDQYADLFLAAKNLSDAILLSDILRVNTEITKAPLSASMIKRYDEHHQDLTLLKALVRQQLPEKYKEIFFDQSKNGYAGYIDGGASQEEFYKFIKPILEKMDGTEELLVKLNREDLLRKQRTFDNGSIPHQIHLGELHAILRRQEDFYPFLKDNREKIEKILTFRIPYYVGPLARGNSRFAWMTRKSEETITPWNFEEVVDKGASAQSFIERMTNFDKNLPNEKVLPKHSLLYEYFTVYNELTKVKYVTEGMRKPAFLSGEQKKAIVDLLFKTNRKVTVKQLKEDYFKKIECFDSVEISGVEDRFNASLGTYHDLLKIIKDKDFLDNEENEDILEDIVLTLTLFEDREMIEERLKTYAHLFDDKVMKQLKRRRYTGWGRLSRKLINGIRDKQSGKTILDFLKSDGFANRNFMQLIHDDSLTFKEDIQKAQVSGQGDSLHEHIANLAGSPAIKKGILQTVKVVDELVKVMGRHKPENIVIEMARENQTTQKGQKNSRERMKRIEEGIKELGSQILKEHPVENTQLQNEKLYLYYLQNGRDMYVDQELDINRLSDYDVDHIVPQSFLKDDSIDNKVLTRSDKARGKSDNVPSEEVVKKMKNYWRQLLNAKLITQRKFDNLTKAERGGLSELDKAGFIKRQLVETRQITKHVAQILDSRMNTKYDENDKLIREVKVITLKSKLVSDFRKDFQFYKVREINNYHHAHDAYLNAVVGTALIKKYPKLESEFVYGDYKVYDVRKMIAKSEQEIGKATAKYFFYSNIMNFFKTEITLANGEIRKRPLIETNGETGEIVWDKGRDFATVRKVLSMPQVNIVKKTEVQTGGFSKESILPKRNSDKLIARKKDWDPKKYGGFDSPTVAYSVLVVAKVEKGKSKKLKSVKELLGITIMERSSFEKNPIDFLEAKGYKEVKKDLIIKLPKYSLFELENGRKRMLASAGELQKGNELALPSKYVNFLYLASHYEKLKGSPEDNEQKQLFVEQHKHYLDEIIEQISEFSKRVILADANLDKVLSAYNKHRDKPIREQAENIIHLFTLTNLGAPAAFKYFDTTIDRKRYTSTKEVLDATLIHQSITGLYETRIDLSQLGGDGGEAAAKGGGPAPGGMDLLKPLTVERKGVKIKGYWNSQADITCVPKDLLQGEEPVRQQNVTTIHGTQEGDVYYVNLKIDGRRINTEVIGTTLDYAIITPGDVPWILKKPLELTIKLDLEEQQGTLLNNSILSKKGKEELKQLFEKYSALWQSWENQVGHRRIRPHKIATGTVKPTPQKQYHINPKAKPDIQIVINDLLKQGVLIQKESTMNTPVYPVPKPNGRWRMVLDYRAVNKVTPLIAVQNQHSYGILGSLFKGRYKTTIDLSNGFWAHPIVPEDYWITAFTWQGKQYCWTVLPQGFLNSPGLFTGDVVDLLQGIPNVEVYVDDVYISHDSEKEHLEYLDILFNRLKEAGYIISLKKSNIANSIVDFLGFQITNEGRGLTDTFKEKLENITAPTTLKQLQSILGLLNFARNFIPDFTELIAPLYALIPKSTKNYVPWQIEHSTTLETLITKLNGAEYLQGRKGDKTLIMKVNASYTTGYIRYYNEGEKKPISYVSIVFSKTELKFTELEKLLTTVHKGLLKALDLSMGQNIHVYSPIVSMQNIQKTPQTAKKALASRWLSWLSYLEDPRIRFFYDPQMPALKDLPAVDTGKDNKKHPSNFQHIFYTDGSAITSPTKEGHLNAGMGIVYFINKDGNLQKQQEWSISLGNHTAQFAEIAAFEFALKKCLPLGGNILVVTDSNYVAKAYNEELDVWASNGFVNNRKKPLKHISKWKSVADLKRLRPDVVVTHEPGHQKLDSSPHAYGNNLADQLATQASFKVHAGKRTADGSEFEKRTADGSEFESPKKKAKVE

SEQ ID NO: 7492 - protein, 2094 aa, synthetic construct
MPAAKRVKLDGGDKKYSIGLDIGTNSVGWAVITDEYKVPSKKFKVLGNTDRHSIKKNLIGALLFDSGETAEATRLKRTARRRYTRRKNRICYLQEIFSNEMAKVDDSFFHRLEESFLVEEDKKHERHPIFGNIVDEVAYHEKYPTIYHLRKKLVDSTDKADLRLIYLALAHMIKFRGHFLIEGDLNPDNSDVDKLFIQLVQTYNQLFEENPINASGVDAKAILSARLSKSRRLENLIAQLPGEKKNGLFGNLIALSLGLTPNFKSNFDLAEDAKLQLSKDTYDDDLDNLLAQIGDQYADLFLAAKNLSDAILLSDILRVNTEITKAPLSASMIKRYDEHHQDLTLLKALVRQQLPEKYKEIFFDQSKNGYAGYIDGGASQEEFYKFIKPILEKMDGTEELLVKLNREDLLRKQRTFDNGSIPHQIHLGELHAILRRQEDFYPFLKDNREKIEKILTFRIPYYVGPLARGNSRFAWMTRKSEETITPWNFEEVVDKGASAQSFIERMTNFDKNLPNEKVLPKHSLLYEYFTVYNELTKVKYVTEGMRKPAFLSGEQKKAIVDLLFKTNRKVTVKQLKEDYFKKIECFDSVEISGVEDRFNASLGTYHDLLKIIKDKDFLDNEENEDILEDIVLTLTLFEDREMIEERLKTYAHLFDDKVMKQLKRRRYTGWGRLSRKLINGIRDKQSGKTILDFLKSDGFANRNFMQLIHDDSLTFKEDIQKAQVSGQGDSLHEHIANLAGSPAIKKGILQTVKVVDELVKVMGRHKPENIVIEMARENQTTQKGQKNSRERMKRIEEGIKELGSQILKEHPVENTQLQNEKLYLYYLQNGRDMYVDQELDINRLSDYDVDHIVPQSFLKDDSIDNKVLTRSDKARGKSDNVPSEEVVKKMKNYWRQLLNAKLITQRKFDNLTKAERGGLSELDKAGFIKRQLVETRQITKHVAQILDSRMNTKYDENDKLIREVKVITLKSKLVSDFRKDFQFYKVREINNYHHAHDAYLNAVVGTALIKKYPKLESEFVYGDYKVYDVRKMIAKSEQEIGKATAKYFFYSNIMNFFKTEITLANGEIRKRPLIETNGETGEIVWDKGRDFATVRKVLSMPQVNIVKKTEVQTGGFSKESILPKRNSDKLIARKKDWDPKKYGGFDSPTVAYSVLVVAKVEKGKSKKLKSVKELLGITIMERSSFEKNPIDFLEAKGYKEVKKDLIIKLPKYSLFELENGRKRMLASAGELQKGNELALPSKYVNFLYLASHYEKLKGSPEDNEQKQLFVEQHKHYLDEIIEQISEFSKRVILADANLDKVLSAYNKHRDKPIREQAENIIHLFTLTNLGAPAAFKYFDTTIDRKRYTSTKEVLDATLIHQSITGLYETRIDLSQLGGDGGEAAAKGGGPAPGGVLNLEEEYRLHEKPVPSSIDPSWLQLFPTVWAERAGMGLANQVPPVVVELRSGASPVAVRQYPMSKEAREGIRPHIQKFLDLGVLVPCRSPWNTPLLPVKKPGTNDYRPVQDLREINKRVQDIHPTVPNPYNLLSSLPPSYTWYSVLDLKDAFFCLRLHPNSQPLFAFEWKDPEKGNTGQLTWTRLPQGFKNSPTLFDEALHRDLAPFRALNPQVVLLQYVDDLLVAAPTYEDCKKGTQKLLQELSKLGYRVSAKKAQLCQREVTYLGYLLKEGKRWLTPARKATVMKIPVPTTPRQVREFLGTAGFCRLWIPGFASLAAPLYPLTKESIPFIWTEEHQQAFDHIKKALLSAPALALPDLTKPFTLYIDERAGVARGVLTQTLGPWRRPVAYLSKKLDPVASGWPTCLKAVAAVALLLKDADKLTLGQNVTVIASHSLESIVRQPPDRWMTNARMTHYQSLLLNERVSFAPPAVLNPATLLPVESEATPVHRCSEILAEETGTRRDLEDQPLPGVPTWYTDGSSFITEGKRRAGAPIVDGKRTVWASSLPEGTSAQKAELVALTQALRLAEGKNINIYTDSRYAFATAHIHGAIYKQRGLLTSAGKDIKNKEEILALLEAIHLPRRVAIIHCPGHQRGSNPVATGNRRADEAAKQAALSTRVLAGTTKPAGKRTADGSEFEKRTADGSEFESPKKKAKVE

SEQ ID NO: 7493 - protein, 2218 aa, synthetic construct
MPAAKRVKLDGGDKKYSIGLDIGTNSVGWAVITDEYKVPSKKFKVLGNTDRHSIKKNLIGALLFDSGETAEATRLKRTARRRYTRRKNRICYLQEIFSNEMAKVDDSFFHRLEESFLVEEDKKHERHPIFGNIVDEVAYHEKYPTIYHLRKKLVDSTDKADLRLIYLALAHMIKFRGHFLIEGDLNPDNSDVDKLFIQLVQTYNQLFEENPINASGVDAKAILSARLSKSRRLENLIAQLPGEKKNGLFGNLIALSLGLTPNFKSNFDLAEDAKLQLSKDTYDDDLDNLLAQIGDQYADLFLAAKNLSDAILLSDILRVNTEITKAPLSASMIKRYDEHHQDLTLLKALVRQQLPEKYKEIFFDQSKNGYAGYIDGGASQEEFYKFIKPILEKMDGTEELLVKLNREDLLRKQRTFDNGSIPHQIHLGELHAILRRQEDFYPFLKDNREKIEKILTFRIPYYVGPLARGNSRFAWMTRKSEETITPWNFEEVVDKGASAQSFIERMTNFDKNLPNEKVLPKHSLLYEYFTVYNELTKVKYVTEGMRKPAFLSGEQKKAIVDLLFKTNRKVTVKQLKEDYFKKIECFDSVEISGVEDRFNASLGTYHDLLKIIKDKDFLDNEENEDILEDIVLTLTLFEDREMIEERLKTYAHLFDDKVMKQLKRRRYTGWGRLSRKLINGIRDKQSGKTILDFLKSDGFANRNFMQLIHDDSLTFKEDIQKAQVSGQGDSLHEHIANLAGSPAIKKGILQTVKVVDELVKVMGRHKPENIVIEMARENQTTQKGQKNSRERMKRIEEGIKELGSQILKEHPVENTQLQNEKLYLYYLQNGRDMYVDQELDINRLSDYDVDHIVPQSFLKDDSIDNKVLTRSDKARGKSDNVPSEEVVKKMKNYWRQLLNAKLITQRKFDNLTKAERGGLSELDKAGFIKRQLVETRQITKHVAQILDSRMNTKYDENDKLIREVKVITLKSKLVSDFRKDFQFYKVREINNYHHAHDAYLNAVVGTALIKKYPKLESEFVYGDYKVYDVRKMIAKSEQEIGKATAKYFFYSNIMNFFKTEITLANGEIRKRPLIETNGETGEIVWDKGRDFATVRKVLSMPQVNIVKKTEVQTGGFSKESILPKRNSDKLIARKKDWDPKKYGGFDSPTVAYSVLVVAKVEKGKSKKLKSVKELLGITIMERSSFEKNPIDFLEAKGYKEVKKDLIIKLPKYSLFELENGRKRMLASAGELQKGNELALPSKYVNFLYLASHYEKLKGSPEDNEQKQLFVEQHKHYLDEIIEQISEFSKRVILADANLDKVLSAYNKHRDKPIREQAENIIHLFTLTNLGAPAAFKYFDTTIDRKRYTSTKEVLDATLIHQSITGLYETRIDLSQLGGDGGEAAAKGGGPAPGGTLGDQGSRGSDPLPEPRVTLTVEGIPTEFLVNTGAEHSVLTKPMGKMGSKRTVVAGATGSKVYPWTTKRLLKIGQKQVTHSFLVIPECPAPLLGRDLLTKLKAQIQFSTEGPQVTWEDRPAMCLVLNLEEEYRLHEKPVPPSIDPSWLQLFPMVWAEKAGMGLANQVPPVVVELKSDASPVAVRQYPMSKEAREGIRPHIQRFLDLGILVPCQSPWNTPLLPVKKPGTNDYRPVQDLREVNKRVQDIHPTVPNPYNLLSSLPPSHTWYSVLDLKDAFFCLKLHPNSQPLFAFEWRDPEKGNTGQLTWTRLPQGFKNSPTLFDEALHRDLASFRALNPQVVMLQYVDDLLVAAPTYRDCKEGTRRLLQELSKLGYRVSAKKAQLCREEVTYLGYLLKGGKRWLTPARKATVMKIPTPTTPRQVREFLGTAGFCRLWIPGFASLAAPLYPLTREKVPFTWTEAHQEAFGRIKEALLSAPALALPDLTKPFALYVDEKEGVARGVLTQTLGPWRRPVAYLSKKLDPVASGWPTCLKAIAAVALLLKDADKLTLGQNVLVIAPHNLESIVRQPPDRWMTNARMTHYQSLLLNERVSFAPPAILNPATLLPVESDDTPIHICSEILAEETGTRPDLRDQPLPGVPAWYTDGSSFIMDGRRQAGAAIVDNKRTVWASNLPEGTSAQKAELIALTQALRLAEGKSINIYTDSRYAFATAHVHGAIYKQRGLLTSAGKDIKNKEEILALLEAIHLPKRVAIIHCPGHQRGTDPVATGNRKADEAAKQAAQSTRILTETTKNAGKRTADGSEFEKRTADGSEFESPKKKAKVE

SEQ ID NO: 7494 - protein, 2127 aa, synthetic construct
MPAAKRVKLDGGDKKYSIGLDIGTNSVGWAVITDEYKVPSKKFKVLGNTDRHSIKKNLIGALLFDSGETAEATRLKRTARRRYTRRKNRICYLQEIFSNEMAKVDDSFFHRLEESFLVEEDKKHERHPIFGNIVDEVAYHEKYPTIYHLRKKLVDSTDKADLRLIYLALAHMIKFRGHFLIEGDLNPDNSDVDKLFIQLVQTYNQLFEENPINASGVDAKAILSARLSKSRRLENLIAQLPGEKKNGLFGNLIALSLGLTPNFKSNFDLAEDAKLQLSKDTYDDDLDNLLAQIGDQYADLFLAAKNLSDAILLSDILRVNTEITKAPLSASMIKRYDEHHQDLTLLKALVRQQLPEKYKEIFFDQSKNGYAGYIDGGASQEEFYKFIKPILEKMDGTEELLVKLNREDLLRKQRTFDNGSIPHQIHLGELHAILRRQEDFYPFLKDNREKIEKILTFRIPYYVGPLARGNSRFAWMTRKSEETITPWNFEEVVDKGASAQSFIERMTNFDKNLPNEKVLPKHSLLYEYFTVYNELTKVKYVTEGMRKPAFLSGEQKKAIVDLLFKTNRKVTVKQLKEDYFKKIECFDSVEISGVEDRFNASLGTYHDLLKIIKDKDFLDNEENEDILEDIVLTLTLFEDREMIEERLKTYAHLFDDKVMKQLKRRRYTGWGRLSRKLINGIRDKQSGKTILDFLKSDGFANRNFMQLIHDDSLTFKEDIQKAQVSGQGDSLHEHIANLAGSPAIKKGILQTVKVVDELVKVMGRHKPENIVIEMARENQTTQKGQKNSRERMKRIEEGIKELGSQILKEHPVENTQLQNEKLYLYYLQNGRDMYVDQELDINRLSDYDVDHIVPQSFLKDDSIDNKVLTRSDKARGKSDNVPSEEVVKKMKNYWRQLLNAKLITQRKFDNLTKAERGGLSELDKAGFIKRQLVETRQITKHVAQILDSRMNTKYDENDKLIREVKVITLKSKLVSDFRKDFQFYKVREINNYHHAHDAYLNAVVGTALIKKYPKLESEFVYGDYKVYDVRKMIAKSEQEIGKATAKYFFYSNIMNFFKTEITLANGEIRKRPLIETNGETGEIVWDKGRDFATVRKVLSMPQVNIVKKTEVQTGGFSKESILPKRNSDKLIARKKDWDPKKYGGFDSPTVAYSVLVVAKVEKGKSKKLKSVKELLGITIMERSSFEKNPIDFLEAKGYKEVKKDLIIKLPKYSLFELENGRKRMLASAGELQKGNELALPSKYVNFLYLASHYEKLKGSPEDNEQKQLFVEQHKHYLDEIIEQISEFSKRVILADANLDKVLSAYNKHRDKPIREQAENIIHLFTLTNLGAPAAFKYFDTTIDRKRYTSTKEVLDATLIHQSITGLYETRIDLSQLGGDGGEAAAKGGGPAPGGLLGRDLLTKLKAQIQFSTEGPQVTWEDRPAMCLVLNLEEEYRLHEKPVPPSIDPSWLQLFPMVWAEKAGMGLANQVPPVVVELKSDASPVAVRQYPMSKEAREGIRPHIQRFLDLGILVPCQSPWNTPLLPVKKPGTNDYRPVQDLREVNKRVQDIHPTVPNPYNLLSSLPPSHTWYSVLDLKDAFFCLKLHPNSQPLFAFEWRDPEKGNTGQLTWTRLPQGFKNSPTLFNEALHRDLASFRALNPQVVMLQYVDDLLVAAPTYRDCKEGTRRLLQELSKLGYRVSAKKAQLCREEVTYLGYLLKGGKRWLTPARKATVMKIPTPTTPRQVREFLGKAGFCRLFIPGFASLAAPLYPLTRPKVPFTWTEAHQEAFGRIKEALLSAPALALPDLTKPFALYVDEKEGVARGVLTQTLGPWRRPVAYLSKKLDPVASGWPTCLKAIAAVALLLKDADKLTLGQNVLVIAPHNLESIVRQPPDRWMTNARMTHYQSLLLNERVSFAPPAILNPATLLPVESDDTPIHICSEILAEETGTRPDLRDQPLPGVPAWYTDGSSFIMDGRRQAGAAIVDNKRTVWASNLPEGTSAQKAELIALTQALRLAEGKSINIYTDSRYAFATAHVHGAIYKQRGWLTSAGKDIKNKEEILALLEAIHLPKRVAIIHCPGHQRGTDPVATGNRKADEAAKQAAQSTRILTETTKNAGKRTADGSEFEKRTADGSEFESPKKKAKVE

SEQ ID NO: 7495 - protein, 2096 aa, synthetic construct
MPAAKRVKLDGGDKKYSIGLDIGTNSVGWAVITDEYKVPSKKFKVLGNTDRHSIKKNLIGALLFDSGETAEATRLKRTARRRYTRRKNRICYLQEIFSNEMAKVDDSFFHRLEESFLVEEDKKHERHPIFGNIVDEVAYHEKYPTIYHLRKKLVDSTDKADLRLIYLALAHMIKFRGHFLIEGDLNPDNSDVDKLFIQLVQTYNQLFEENPINASGVDAKAILSARLSKSRRLENLIAQLPGEKKNGLFGNLIALSLGLTPNFKSNFDLAEDAKLQLSKDTYDDDLDNLLAQIGDQYADLFLAAKNLSDAILLSDILRVNTEITKAPLSASMIKRYDEHHQDLTLLKALVRQQLPEKYKEIFFDQSKNGYAGYIDGGASQEEFYKFIKPILEKMDGTEELLVKLNREDLLRKQRTFDNGSIPHQIHLGELHAILRRQEDFYPFLKDNREKIEKILTFRIPYYVGPLARGNSRFAWMTRKSEETITPWNFEEVVDKGASAQSFIERMTNFDKNLPNEKVLPKHSLLYEYFTVYNELTKVKYVTEGMRKPAFLSGEQKKAIVDLLFKTNRKVTVKQLKEDYFKKIECFDSVEISGVEDRFNASLGTYHDLLKIIKDKDFLDNEENEDILEDIVLTLTLFEDREMIEERLKTYAHLFDDKVMKQLKRRRYTGWGRLSRKLINGIRDKQSGKTILDFLKSDGFANRNFMQLIHDDSLTFKEDIQKAQVSGQGDSLHEHIANLAGSPAIKKGILQTVKVVDELVKVMGRHKPENIVIEMARENQTTQKGQKNSRERMKRIEEGIKELGSQILKEHPVENTQLQNEKLYLYYLQNGRDMYVDQELDINRLSDYDVDHIVPQSFLKDDSIDNKVLTRSDKARGKSDNVPSEEVVKKMKNYWRQLLNAKLITQRKFDNLTKAERGGLSELDKAGFIKRQLVETRQITKHVAQILDSRMNTKYDENDKLIREVKVITLKSKLVSDFRKDFQFYKVREINNYHHAHDAYLNAVVGTALIKKYPKLESEFVYGDYKVYDVRKMIAKSEQEIGKATAKYFFYSNIMNFFKTEITLANGEIRKRPLIETNGETGEIVWDKGRDFATVRKVLSMPQVNIVKKTEVQTGGFSKESILPKRNSDKLIARKKDWDPKKYGGFDSPTVAYSVLVVAKVEKGKSKKLKSVKELLGITIMERSSFEKNPIDFLEAKGYKEVKKDLIIKLPKYSLFELENGRKRMLASAGELQKGNELALPSKYVNFLYLASHYEKLKGSPEDNEQKQLFVEQHKHYLDEIIEQISEFSKRVILADANLDKVLSAYNKHRDKPIREQAENIIHLFTLTNLGAPAAFKYFDTTIDRKRYTSTKEVLDATLIHQSITGLYETRIDLSQLGGDGGEAAAKGGGPAPGGTLGIEDEYRLHETSTEPDVSLGSTWLSDFPQAWAETGGMGLAVRQAPLIIPLKATSTPVSIQQYPMSHEARLGIKPHIQRLLDQGILVPCQSPWNTPLLPVKKPGTNDYRPVQDLREVNKRVEDIHPTVPNPYNLLSGLPPSHQWYTVLDLKDAFFCLRLHPTSQPLFAFEWRDPGMGISGQLTWTRLPQGFKNSPTLFNEALHRDLADFRIQHPDLILLQYVDDILLAATSELDCQQGTRALLQTLGDLGYRASAKKAQICQKQVKYLGYLLREGQRWLTEARKETVMGQPVPKTPRQLREFLGTAGFCRLWIPGFAEMAAPLYPLTKPGTLFSWGPDQQKAYQEIKQALLTAPALGLPDLTKPFELFVDEKQGYAKGVLTQKLGPWRRPVAYLSKKLDPVAAGWPPCLRMVAAIAVLTKDAGKLTMGQPLVILAPHAVEALVKQPPDRWLSNARMTHYQAMLLDTDRVQFGPVVALNPATLLPLPEEGAPHDCLEILAETHGTRPDLTDQPIPDADHTWYTDGSSFLQEGQRKAGAAVTTETEVIWAGALPAGTSAQRAELIALTQALKMAEGKRLNVYTDSRYAFATAHIHGEIYRRRGWLTSEGREIKNKSEILALLKALFLPKRLSIIHCLGHQKGDSAEARGNRLADQAAREAAIKTPPDTSTLLAGKRTADGSEFEKRTADGSEFESPKKKAKVE

SEQ ID NO: 7496 - protein, 2096 aa, synthetic construct; identical to SEQ ID NO: 4535

SEQ ID NO: 7497 - protein, 2096 aa, synthetic construct; identical to SEQ ID NO: 4535

SEQ ID NO: 7498 - protein, 2176 aa, synthetic construct
MPAAKRVKLDGGDKKYSIGLDIGTNSVGWAVITDEYKVPSKKFKVLGNTDRHSIKKNLIGALLFDSGETAEATRLKRTARRRYTRRKNRICYLQEIFSNEMAKVDDSFFHRLEESFLVEEDKKHERHPIFGNIVDEVAYHEKYPTIYHLRKKLVDSTDKADLRLIYLALAHMIKFRGHFLIEGDLNPDNSDVDKLFIQLVQTYNQLFEENPINASGVDAKAILSARLSKSRRLENLIAQLPGEKKNGLFGNLIALSLGLTPNFKSNFDLAEDAKLQLSKDTYDDDLDNLLAQIGDQYADLFLAAKNLSDAILLSDILRVNTEITKAPLSASMIKRYDEHHQDLTLLKALVRQQLPEKYKEIFFDQSKNGYAGYIDGGASQEEFYKFIKPILEKMDGTEELLVKLNREDLLRKQRTFDNGSIPHQIHLGELHAILRRQEDFYPFLKDNREKIEKILTFRIPYYVGPLARGNSRFAWMTRKSEETITPWNFEEVVDKGASAQSFIERMTNFDKNLPNEKVLPKHSLLYEYFTVYNELTKVKYVTEGMRKPAFLSGEQKKAIVDLLFKTNRKVTVKQLKEDYFKKIECFDSVEISGVEDRFNASLGTYHDLLKIIKDKDFLDNEENEDILEDIVLTLTLFEDREMIEERLKTYAHLFDDKVMKQLKRRRYTGWGRLSRKLINGIRDKQSGKTILDFLKSDGFANRNFMQLIHDDSLTFKEDIQKAQVSGQGDSLHEHIANLAGSPAIKKGILQTVKVVDELVKVMGRHKPENIVIEMARENQTTQKGQKNSRERMKRIEEGIKELGSQILKEHPVENTQLQNEKLYLYYLQNGRDMYVDQELDINRLSDYDVDHIVPQSFLKDDSIDNKVLTRSDKARGKSDNVPSEEVVKKMKNYWRQLLNAKLITQRKFDNLTKAERGGLSELDKAGFIKRQLVETRQITKHVAQILDSRMNTKYDENDKLIREVKVITLKSKLVSDFRKDFQFYKVREINNYHHAHDAYLNAVVGTALIKKYPKLESEFVYGDYKVYDVRKMIAKSEQEIGKATAKYFFYSNIMNFFKTEITLANGEIRKRPLIETNGETGEIVWDKGRDFATVRKVLSMPQVNIVKKTEVQTGGFSKESILPKRNSDKLIARKKDWDPKKYGGFDSPTVAYSVLVVAKVEKGKSKKLKSVKELLGITIMERSSFEKNPIDFLEAKGYKEVKKDLIIKLPKYSLFELENGRKRMLASAGELQKGNELALPSKYVNFLYLASHYEKLKGSPEDNEQKQLFVEQHKHYLDEIIEQISEFSKRVILADANLDKVLSAYNKHRDKPIREQAENIIHLFTLTNLGAPAAFKYFDTTIDRKRYTSTKEVLDATLIHQSITGLYETRIDLSQLGGDGGEAAAKGGGPAPGGMNPLQLLQPLPAEVKGTKLLAHWNSGATITCIPESFLEDEQPIKQTLIKTIHGEKQQNVYYLTFKVKGRKVEAEVIASPYEYILLSPTDVPWLTQQPLQLTILVPLQEYQDRILNKTALPEEQKQQLKALFTKYDNLWQHWENQVGHRKIRPHNIATGDYPPRPQKQYPINPKAKPSIQIVIDDLLKQGVLTPQNSTMNTPVYPVPKPDGRWRMVLDYREVNKTIPLTAAQNQHSAGILATIVRQKYKTTLDLANGFWAHPITPDSYWLTAFTWQGKQYCWTRLPQGFLNSPALFTADAVDLLKEVPNVQVYVDDIYLSHDNPHEHIQQLEKVFQILLQAGYVVSLKKSEIGQRTVEFLGFNITKEGRGLTDTFKTKLLNVTPPKDLKQLQSILGLLNFARNFIPNFAELVQTLYNLIASSKGKYIEWTEDNTKQLNKVIEALNTASNLEERLPDQRLVIKVNTSPSAGYVRYYNESGKKPIMYLNYVFSKAELKFSMLEKLLTTMHKALIKAMDLAMGQEILVYSPIVSMTKIQKTPLPERKALPIRWITWMTYLEDPRIQFHYDKTLPELKHIPDVYTSSIPPLKHPSQYEGVFCTDGSAIKSPDPTKSNNAGMGIVHAIYNPEYKILNQWSIPLGHHTAQMAEIAAVEFACKKALKVPGPVLVITDSFYVAESANKELPYWKSNGFVNNKKEPLKHISKWKSIAECLSIKPDITIQHEKGHQPINTSIHTEGNALADKLATQGSYVVNAGKRTADGSEFEKRTADGSEFESPKKKAKVE

SEQ ID NO: 7499 - protein, 2094 aa, synthetic construct
MPAAKRVKLDGGDKKYSIGLDIGTNSVGWAVITDEYKVPSKKFKVLGNTDRHSIKKNLIGALLFDSGETAEATRLKRTARRRYTRRKNRICYLQEIFSNEMAKVDDSFFHRLEESFLVEEDKKHERHPIFGNIVDEVAYHEKYPTIYHLRKKLVDSTDKADLRLIYLALAHMIKFRGHFLIEGDLNPDNSDVDKLFIQLVQTYNQLFEENPINASGVDAKAILSARLSKSRRLENLIAQLPGEKKNGLFGNLIALSLGLTPNFKSNFDLAEDAKLQLSKDTYDDDLDNLLAQIGDQYADLFLAAKNLSDAILLSDILRVNTEITKAPLSASMIKRYDEHHQDLTLLKALVRQQLPEKYKEIFFDQSKNGYAGYIDGGASQEEFYKFIKPILEKMDGTEELLVKLNREDLLRKQRTFDNGSIPHQIHLGELHAILRRQEDFYPFLKDNREKIEKILTFRIPYYVGPLARGNSRFAWMTRKSEETITPWNFEEVVDKGASAQSFIERMTNFDKNLPNEKVLPKHSLLYEYFTVYNELTKVKYVTEGMRKPAFLSGEQKKAIVDLLFKTNRKVTVKQLKEDYFKKIECFDSVEISGVEDRFNASLGTYHDLLKIIKDKDFLDNEENEDILEDIVLTLTLFEDREMIEERLKTYAHLFDDKVMKQLKRRRYTGWGRLSRKLINGIRDKQSGKTILDFLKSDGFANRNFMQLIHDDSLTFKEDIQKAQVSGQGDSLHEHIANLAGSPAIKKGILQTVKVVDELVKVMGRHKPENIVIEMARENQTTQKGQKNSRERMKRIEEGIKELGSQILKEHPVENTQLQNEKLYLYYLQNGRDMYVDQELDINRLSDYDVDHIVPQSFLKDDSIDNKVLTRSDKARGKSDNVPSEEVVKKMKNYWRQLLNAKLITQRKFDNLTKAERGGLSELDKAGFIKRQLVETRQITKHVAQILDSRMNTKYDENDKLIREVKVITLKSKLVSDFRKDFQFYKVREINNYHHAHDAYLNAVVGTALIKKYPKLESEFVYGDYKVYDVRKMIAKSEQEIGKATAKYFFYSNIMNFFKTEITLANGEIRKRPLIETNGETGEIVWDKGRDFATVRKVLSMPQVNIVKKTEVQTGGFSKESILPKRNSDKLIARKKDWDPKKYGGFDSPTVAYSVLVVAKVEKGKSKKLKSVKELLGITIMERSSFEKNPIDFLEAKGYKEVKKDLIIKLPKYSLFELENGRKRMLASAGELQKGNELALPSKYVNFLYLASHYEKLKGSPEDNEQKQLFVEQHKHYLDEIIEQISEFSKRVILADANLDKVLSAYNKHRDKPIREQAENIIHLFTLTNLGAPAAFKYFDTTIDRKRYTSTKEVLDATLIHQSITGLYETRIDLSQLGGDGGEAAAKGGGPAPGGVLNLEEEYRLHEKPVPSSIDPSWLQLFPTVWAERAGMGLANQVPPVVVELRSGASPVAVRQYPMSKEAREGIRPHIQRFLDLGVLVPCQSPWNTPLLPVKKPGTNDYRPVQDLREINKRVQDIHPTVPNPYNLLSSLPPSHTWYSVLDLKDAFFCLKLHPNSQPLFAFEWRDPEKGNTGQLTWTRLPQGFKNSPTLFNEALHRDLAPFRALNPQVVLLQYVDDLLVAAPTYRDCKEGTQKLLQELSKLGYRVSAKKAQLCQKEVTYLGYLLKEGKRWLTPARKATVMKIPPPTTPRQVREFLGKAGFCRLFIPGFASLAAPLYPLTKPSIPFIWTEEHQKAFDRIKEALLSAPALALPDLTKPFTLYVDERAGVARGVLTQTLGPWRRPVAYLSKKLDPVASGWPTCLKAVAAVALLLKDADKLTLGQNVTVIASHSLESIVRQPPDRWMTNARMTHYQSLLLNERVSFAPPAVLNPATLLPVESEATPVHRCSEILAEETGTRRDLKDQPLPGVPAWYTDGSSFIAEGKRRAGAAIVDGKRTVWASSLPEGTSAQKAELVALTQALRLAEGKDINIYTDSRYAFATAHIHGAIYKQRGWLTSAGKDIKNKEEILALLEAIHLPKRVAIIHCPGHQKGNDPVATGNRRADEAAKQAALSTRVLAETTKPAGKRTADGSEFEKRTADGSEFESPKKKAKVE

SEQ ID NO: 7500 - protein, 2098 aa, synthetic construct
MPAAKRVKLDGGDKKYSIGLDIGTNSVGWAVITDEYKVPSKKFKVLGNTDRHSIKKNLIGALLFDSGETAEATRLKRTARRRYTRRKNRICYLQEIFSNEMAKVDDSFFHRLEESFLVEEDKKHERHPIFGNIVDEVAYHEKYPTIYHLRKKLVDSTDKADLRLIYLALAHMIKFRGHFLIEGDLNPDNSDVDKLFIQLVQTYNQLFEENPINASGVDAKAILSARLSKSRRLENLIAQLPGEKKNGLFGNLIALSLGLTPNFKSNFDLAEDAKLQLSKDTYDDDLDNLLAQIGDQYADLFLAAKNLSDAILLSDILRVNTEITKAPLSASMIKRYDEHHQDLTLLKALVRQQLPEKYKEIFFDQSKNGYAGYIDGGASQEEFYKFIKPILEKMDGTEELLVKLNREDLLRKQRTFDNGSIPHQIHLGELHAILRRQEDFYPFLKDNREKIEKILTFRIPYYVGPLARGNSRFAWMTRKSEETITPWNFEEVVDKGASAQSFIERMTNFDKNLPNEKVLPKHSLLYEYFTVYNELTKVKYVTEGMRKPAFLSGEQKKAIVDLLFKTNRKVTVKQLKEDYFKKIECFDSVEISGVEDRFNASLGTYHDLLKIIKDKDFLDNEENEDILEDIVLTLTLFEDREMIEERLKTYAHLFDDKVMKQLKRRRYTGWGRLSRKLINGIRDKQSGKTILDFLKSDGFANRNFMQLIHDDSLTFKEDIQKAQVSGQGDSLHEHIANLAGSPAIKKGILQTVKVVDELVKVMGRHKPENIVIEMARENQTTQKGQKNSRERMKRIEEGIKELGSQILKEHPVENTQLQNEKLYLYYLQNGRDMYVDQELDINRLSDYDVDHIVPQSFLKDDSIDNKVLTRSDKARGKSDNVPSEEVVKKMKNYWRQLLNAKLITQRKFDNLTKAERGGLSELDKAGFIKRQLVETRQITKHVAQILDSRMNTKYDENDKLIREVKVITLKSKLVSDFRKDFQFYKVREINNYHHAHDAYLNAVVGTALIKKYPKLESEFVYGDYKVYDVRKMIAKSEQEIGKATAKYFFYSNIMNFFKTEITLANGEIRKRPLIETNGETGEIVWDKGRDFATVRKVLSMPQVNIVKKTEVQTGGFSKESILPKRNSDKLIARKKDWDPKKYGGFDSPTVAYSVLVVAKVEKGKSKKLKSVKELLGITIMERSSFEKNPIDFLEAKGYKEVKKDLIIKLPKYSLFELENGRKRMLASAGELQKGNELALPSKYVNFLYLASHYEKLKGSPEDNEQKQLFVEQHKHYLDEIIEQISEFSKRVILADANLDKVLSAYNKHRDKPIREQAENIIHLFTLTNLGAPAAFKYFDTTIDRKRYTSTKEVLDATLIHQSITGLYETRIDLSQLGGDGGEAAAKPAPGGGGGTAPLEEEYRLFLEAPIQNVTLLEQWKREIPKVWAEINPPGLASTQAPIHVQLLSTALPVRVRQYPITLEAKRSLRETIRKFRAAGILRPVHSPWNTPLLPVRKSGTSEYRMVQDLREVNKRVETIHPTVPNPYTLLSLLPPDRIWYSVLDLKDAFFCIPLAPESQLIFAFEWADAEEGESGQLTWTRLPQGFKNSPTLFNEALNRDLQGFRLDHPSVSLLQYVDDLLIAADTQAACLSATRDLLMTLAELGYRVSGKKAQLCQEEVTYLGFKIHKGSRSLSNSRTQAILQIPVPKTKRQVREFLGKIGYCRLFIPGFAELAQPLYAATRPGNDPLVWGEKEEEAFQSLKLALTQPPALALPSLDKPFQLFVEETSGAAKGVLTQALGPWKRPVAYLSKRLDPVAAGWPRCLRAIAAAALLTREASKLTFGQDIEITSSHNLESLLRSPPDKWLTNARITQYQVLLLDPPRVRFKQTAALNPATLLPETDDTLPIHHCLDTLDSLTSTRPDLTDQPLAQAEATLFTDGSSYIRDGKRYAGAAVVTLDSVIWAEPLPIGTSAQKAELIALTKALEWSKDKSVNIYTDSRYAFATLHVHGMIYRERGWLTAGGKAIKNAPEILALLTAVWLPKRVAVMHCKGHQKDDAPTSTGNRRADEVAREVAIRPLSTQATISAGKRTADGSEFEKRTADGSEFESPKKKAKVE

SEQ ID NO: 7501 - protein, 2102 aa, synthetic construct
MPAAKRVKLDGGDKKYSIGLDIGTNSVGWAVITDEYKVPSKKFKVLGNTDRHSIKKNLIGALLFDSGETAEATRLKRTARRRYTRRKNRICYLQEIFSNEMAKVDDSFFHRLEESFLVEEDKKHERHPIFGNIVDEVAYHEKYPTIYHLRKKLVDSTDKADLRLIYLALAHMIKFRGHFLIEGDLNPDNSDVDKLFIQLVQTYNQLFEENPINASGVDAKAILSARLSKSRRLENLIAQLPGEKKNGLFGNLIALSLGLTPNFKSNFDLAEDAKLQLSKDTYDDDLDNLLAQIGDQYADLFLAAKNLSDAILLSDILRVNTEITKAPLSASMIKRYDEHHQDLTLLKALVRQQLPEKYKEIFFDQSKNGYAGYIDGGASQEEFYKFIKPILEKMDGTEELLVKLNREDLLRKQRTFDNGSIPHQIHLGELHAILRRQEDFYPFLKDNREKIEKILTFRIPYYVGPLARGNSRFAWMTRKSEETITPWNFEEVVDKGASAQSFIERMTNFDKNLPNEKVLPKHSLLYEYFTVYNELTKVKYVTEGMRKPAFLSGEQKKAIVDLLFKTNRKVTVKQLKEDYFKKIECFDSVEISGVEDRFNASLGTYHDLLKIIKDKDFLDNEENEDILEDIVLTLTLFEDREMIEERLKTYAHLFDDKVMKQLKRRRYTGWGRLSRKLINGIRDKQSGKTILDFLKSDGFANRNFMQLIHDDSLTFKEDIQKAQVSGQGDSLHEHIANLAGSPAIKKGILQTVKVVDELVKVMGRHKPENIVIEMARENQTTQKGQKNSRERMKRIEEGIKELGSQILKEHPVENTQLQNEKLYLYYLQNGRDMYVDQELDINRLSDYDVDHIVPQSFLKDDSIDNKVLTRSDKARGKSDNVPSEEVVKKMKNYWRQLLNAKLITQRKFDNLTKAERGGLSELDKAGFIKRQLVETRQITKHVAQILDSRMNTKYDENDKLIREVKVITLKSKLVSDFRKDFQFYKVREINNYHHAHDAYLNAVVGTALIKKYPKLESEFVYGDYKVYDVRKMIAKSEQEIGKATAKYFFYSNIMNFFKTEITLANGEIRKRPLIETNGETGEIVWDKGRDFATVRKVLSMPQVNIVKKTEVQTGGFSKESILPKRNSDKLIARKKDWDPKKYGGFDSPTVAYSVLVVAKVEKGKSKKLKSVKELLGITIMERSSFEKNPIDFLEAKGYKEVKKDLIIKLPKYSLFELENGRKRMLASAGELQKGNELALPSKYVNFLYLASHYEKLKGSPEDNEQKQLFVEQHKHYLDEIIEQISEFSKRVILADANLDKVLSAYNKHRDKPIREQAENIIHLFTLTNLGAPAAFKYFDTTIDRKRYTSTKEVLDATLIHQSITGLYETRIDLSQLGGDGGEAAAKPAPGGGGGTVSLQDEHRLFDIPVTTSLPDVWLQDFPQAWAETGGLGRAKCQAPIIIDLKPTAVPVSIKQYPMSLEAHMGIRQHIIKFLELGVLRPCRSPWNTPLLPVKKPGTQDYRPVQDLREINKRTVDIHPTVPNPYNLLSTLKPDYSWYTVLDLKDAFFCLPLAPQSQELFAFEWKDPERGISGQLTWTRLPQGFKNSPTLFNEALHRDLTDFRTQHPEVTLLQYVDDLLLAAPTKKACTQGTRHLLQELGEKGYRASAKKAQICQTKVTYLGYILSEGKRWLTPGRIETVARIPPPRNPREVREFLGKAGFCRLFIPGFAELAAPLYALTKPSTPFTWQTEHQLAFEALKKALLSAPALGLPDTSKPFTLFLDERQGIAKGVLTQKLGPWKRPVAYLSKKLDPVAAGWPPCLRIMAATAMLVKDSAKLTLGQPLTVITPHTLEAIVRQPPDRWITNARLTHYQALLLDTDRVQFGPPVTLNPATLLPVPENQPSPHDCRQVLAETHGTREDLKDQELPDADHTWYTDGSSYLDSGTRRAGAAVVDGHNTIWAQSLPPGTSAQKAELIALTKALELSKGKKANIYTDSRYAFATAHTHGSIYERRGWLTSEGKEIKNKAEIIALLKALFLPQEVAIIHCPGHQKGQDPVAVGNRQADRVARQAAMAEVLTLATEPDNTSHITAGKRTADGSEFEKRTADGSEFESPKKKAKVE

SEQ ID NO: 7502 - protein, 2095 aa, synthetic construct
MPAAKRVKLDGGDKKYSIGLDIGTNSVGWAVITDEYKVPSKKFKVLGNTDRHSIKKNLIGALLFDSGETAEATRLKRTARRRYTRRKNRICYLQEIFSNEMAKVDDSFFHRLEESFLVEEDKKHERHPIFGNIVDEVAYHEKYPTIYHLRKKLVDSTDKADLRLIYLALAHMIKFRGHFLIEGDLNPDNSDVDKLFIQLVQTYNQLFEENPINASGVDAKAILSARLSKSRRLENLIAQLPGEKKNGLFGNLIALSLGLTPNFKSNFDLAEDAKLQLSKDTYDDDLDNLLAQIGDQYADLFLAAKNLSDAILLSDILRVNTEITKAPLSASMIKRYDEHHQDLTLLKALVRQQLPEKYKEIFFDQSKNGYAGYIDGGASQEEFYKFIKPILEKMDGTEELLVKLNREDLLRKQRTFDNGSIPHQIHLGELHAILRRQEDFYPFLKDNREKIEKILTFRIPYYVGPLARGNSRFAWMTRKSEETITPWNFEEVVDKGASAQSFIERMTNFDKNLPNEKVLPKHSLLYEYFTVYNELTKVKYVTEGMRKPAFLSGEQKKAIVDLLFKTNRKVTVKQLKEDYFKKIECFDSVEISGVEDRFNASLGTYHDLLKIIKDKDFLDNEENEDILEDIVLTLTLFEDREMIEERLKTYAHLFDDKVMKQLKRRRYTGWGRLSRKLINGIRDKQSGKTILDFLKSDGFANRNFMQLIHDDSLTFKEDIQKAQVSGQGDSLHEHIANLAGSPAIKKGILQTVKVVDELVKVMGRHKPENIVIEMARENQTTQKGQKNSRERMKRIEEGIKELGSQILKEHPVENTQLQNEKLYLYYLQNGRDMYVDQELDINRLSDYDVDHIVPQSFLKDDSIDNKVLTRSDKARGKSDNVPSEEVVKKMKNYWRQLLNAKLITQRKFDNLTKAERGGLSELDKAGFIKRQLVETRQITKHVAQILDSRMNTKYDENDKLIREVKVITLKSKLVSDFRKDFQFYKVREINNYHHAHDAYLNAVVGTALIKKYPKLESEFVYGDYKVYDVRKMIAKSEQEIGKATAKYFFYSNIMNFFKTEITLANGEIRKRPLIETNGETGEIVWDKGRDFATVRKVLSMPQVNIVKKTEVQTGGFSKESILPKRNSDKLIARKKDWDPKKYGGFDSPTVAYSVLVVAKVEKGKSKKLKSVKELLGITIMERSSFEKNPIDFLEAKGYKEVKKDLIIKLPKYSLFELENGRKRMLASAGELQKGNELALPSKYVNFLYLASHYEKLKGSPEDNEQKQLFVEQHKHYLDEIIEQISEFSKRVILADANLDKVLSAYNKHRDKPIREQAENIIHLFTLTNLGAPAAFKYFDTTIDRKRYTSTKEVLDATLIHQSITGLYETRIDLSQLGGDGGEAAAKPAPGGGGGTLQLEEEYRLFEPESTQKQEMDIWLKNFPQAWAETGGMGTAHCQAPVLIQLKATATPISIRQYPMPHEAYQGIKPHIRRMLDQGILKPCQSPWNTPLLPVKKPGTEDYRPVQDLREVNKRVEDIHPTVPNPYNLLSTLPPSHPWYTVLDLKDAFFCLRLHSESQLLFAFEWRDPEIGLSGQLTWTRLPQGFKNSPTLFNEALHSDLADFRVRYPALVLLQYVDDLLLAAATRTECLEGTKALLETLGNKGYRASAKKAQICLQEVTYLGYSLKDGQRWLTKARKEAILSIPVPKNSRQVREFLGKAGYCRLFIPGFAELAAPLYPLTRPGTLFQWGTEQQLAFEDIKKALLSSPALGLPDITKPFELFIDENSGFAKGVLVQKLGPWKRPVAYLSKKLDTVASGWPPCLRMVAAIAILVKDAGKLTLGQPLTILTSHPVEALVRQPPNKWLSNARMTHYQAMLLDAERVHFGPTVSLNPATLLPLPSGGNHHDCLQILAETHGTRPDLTDQPLPDADLTWYTDGSSFIRNGEREAGAAVTTESEVIWAAPLPPGTSAQRAELIALTQALKMAEGKKLTVYTDSRYAFATTHVHGEIYRRRGWLTSEGKEIKNKNEILALLEALFLPKRLSIIHCPGHQKGDSPQAKGNRLADDTAKKAATETHSSLTVLPAGKRTADGSEFEKRTADGSEFESPKKKAKVE

SEQ ID NO: 7503 - protein, 2176 aa, synthetic construct
MPAAKRVKLDGGDKKYSIGLDIGTNSVGWAVITDEYKVPSKKFKVLGNTDRHSIKKNLIGALLFDSGETAEATRLKRTARRRYTRRKNRICYLQEIFSNEMAKVDDSFFHRLEESFLVEEDKKHERHPIFGNIVDEVAYHEKYPTIYHLRKKLVDSTDKADLRLIYLALAHMIKFRGHFLIEGDLNPDNSDVDKLFIQLVQTYNQLFEENPINASGVDAKAILSARLSKSRRLENLIAQLPGEKKNGLFGNLIALSLGLTPNFKSNFDLAEDAKLQLSKDTYDDDLDNLLAQIGDQYADLFLAAKNLSDAILLSDILRVNTEITKAPLSASMIKRYDEHHQDLTLLKALVRQQLPEKYKEIFFDQSKNGYAGYIDGGASQEEFYKFIKPILEKMDGTEELLVKLNREDLLRKQRTFDNGSIPHQIHLGELHAILRRQEDFYPFLKDNREKIEKILTFRIPYYVGPLARGNSRFAWMTRKSEETITPWNFEEVVDKGASAQSFIERMTNFDKNLPNEKVLPKHSLLYEYFTVYNELTKVKYVTEGMRKPAFLSGEQKKAIVDLLFKTNRKVTVKQLKEDYFKKIECFDSVEISGVEDRFNASLGTYHDLLKIIKDKDFLDNEENEDILEDIVLTLTLFEDREMIEERLKTYAHLFDDKVMKQLKRRRYTGWGRLSRKLINGIRDKQSGKTILDFLKSDGFANRNFMQLIHDDSLTFKEDIQKAQVSGQGDSLHEHIANLAGSPAIKKGILQTVKVVDELVKVMGRHKPENIVIEMARENQTTQKGQKNSRERMKRIEEGIKELGSQILKEHPVENTQLQNEKLYLYYLQNGRDMYVDQELDINRLSDYDVDHIVPQSFLKDDSIDNKVLTRSDKARGKSDNVPSEEVVKKMKNYWRQLLNAKLITQRKFDNLTKAERGGLSELDKAGFIKRQLVETRQITKHVAQILDSRMNTKYDENDKLIREVKVITLKSKLVSDFRKDFQFYKVREINNYHHAHDAYLNAVVGTALIKKYPKLESEFVYGDYKVYDVRKMIAKSEQEIGKATAKYFFYSNIMNFFKTEITLANGEIRKRPLIETNGETGEIVWDKGRDFATVRKVLSMPQVNIVKKTEVQTGGFSKESILPKRNSDKLIARKKDWDPKKYGGFDSPTVAYSVLVVAKVEKGKSKKLKSVKELLGITIMERSSFEKNPIDFLEAKGYKEVKKDLIIKLPKYSLFELENGRKRMLASAGELQKGNELALPSKYVNFLYLASHYEKLKGSPEDNEQKQLFVEQHKHYLDEIIEQISEFSKRVILADANLDKVLSAYNKHRDKPIREQAENIIHLFTLTNLGAPAAFKYFDTTIDRKRYTSTKEVLDATLIHQSITGLYETRIDLSQLGGDGGEAAAKPAPGGGGGMNPLQLLQPLPAEIKGTKLLAHWNSGATITCIPESFLEDEQPIKKTLIKTIHGEKQQNVYYVTFKVKGRKVEAEVIASPYEYILLSPTDVPWLTQQPLQLTILVPLQEYQEKILSKTALPEDQKQQLKTLFVKYDNLWQHWENQVGHRKIRPHNIATGDYPPRPQKQYPINPKAKPSIQIVIDDLLKQGVLTPQNSTMNTPVYPVPKPDGRWRMVLDYREVNKTIPLTAAQNQHSAGILATIVRQKYKTTLDLANGFWAHPITPESYWLTAFTWQGKQYCWTRLPQGFLNSPALFNADVVDLLKEIPNVQVYVDDIYLSHDDPKEHVQQLEKVFQILLQAGYVVSLKKSEIGQKTVEFLGFNITKEGRGLTDTFKTKLLNITPPKDLKQLQSILGLLNFARNFIPNFAELVQPLYNLIAPAKGKYIEWSEENTKQLNMVIEALNTASNLEERLPEQRLVIKVNTSPSAGYVRYYNETGKKPIMYLNYVFSKAELKFSMLEKLLTTMHKALIKAMDLAMGQEILVYSPIVSMTKIQKTPLPERKALPIRWITWMTYLEDPRIQFHYDKTLPELKHIPDVYTSSQSPVKHPSQYEGVFYTDGSAIKSPDPTKSNNAGMGIVHATYKPEYQVLNQWSIPLGNHTAQMAEIAAVEFACKKALKIPGPVLVITDSFYVAESANKELPYWKSNGFVNNKKKPLKHISKWKSIAECLSMKPDITIQHEKGISLQIPVFILKGNALADKLATQGSYVVNAGKRTADGSEFEKRTADGSEFESPKKKAKVE

SEQ ID NO: 7504 - protein, 2094 aa, synthetic construct
MPAAKRVKLDGGDKKYSIGLDIGTNSVGWAVITDEYKVPSKKFKVLGNTDRHSIKKNLIGALLFDSGETAEATRLKRTARRRYTRRKNRICYLQEIFSNEMAKVDDSFFHRLEESFLVEEDKKHERHPIFGNIVDEVAYHEKYPTIYHLRKKLVDSTDKADLRLIYLALAHMIKFRGHFLIEGDLNPDNSDVDKLFIQLVQTYNQLFEENPINASGVDAKAILSARLSKSRRLENLIAQLPGEKKNGLFGNLIALSLGLTPNFKSNFDLAEDAKLQLSKDTYDDDLDNLLAQIGDQYADLFLAAKNLSDAILLSDILRVNTEITKAPLSASMIKRYDEHHQDLTLLKALVRQQLPEKYKEIFFDQSKNGYAGYIDGGASQEEFYKFIKPILEKMDGTEELLVKLNREDLLRKQRTFDNGSIPHQIHLGELHAILRRQEDFYPFLKDNREKIEKILTFRIPYYVGPLARGNSRFAWMTRKSEETITPWNFEEVVDKGASAQSFIERMTNFDKNLPNEKVLPKHSLLYEYFTVYNELTKVKYVTEGMRKPAFLSGEQKKAIVDLLFKTNRKVTVKQLKEDYFKKIECFDSVEISGVEDRFNASLGTYHDLLKIIKDKDFLDNEENEDILEDIVLTLTLFEDREMIEERLKTYAHLFDDKVMKQLKRRRYTGWGRLSRKLINGIRDKQSGKTILDFLKSDGFANRNFMQLIHDDSLTFKEDIQKAQVSGQGDSLHEHIANLAGSPAIKKGILQTVKVVDELVKVMGRHKPENIVIEMARENQTTQKGQKNSRERMKRIEEGIKELGSQILKEHPVENTQLQNEKLYLYYLQNGRDMYVDQELDINRLSDYDVDHIVPQSFLKDDSIDNKVLTRSDKARGKSDNVPSEEVVKKMKNYWRQLLNAKLITQRKFDNLTKAERGGLSELDKAGFIKRQLVETRQITKHVAQILDSRMNTKYDENDKLIREVKVITLKSKLVSDFRKDFQFYKVREINNYHHAHDAYLNAVVGTALIKKYPKLESEFVYGDYKVYDVRKMIAKSEQEIGKATAKYFFYSNIMNFFKTEITLANGEIRKRPLIETNGETGEIVWDKGRDFATVRKVLSMPQVNIVKKTEVQTGGFSKESILPKRNSDKLIARKKDWDPKKYGGFDSPTVAYSVLVVAKVEKGKSKKLKSVKELLGITIMERSSFEKNPIDFLEAKGYKEVKKDLIIKLPKYSLFELENGRKRMLASAGELQKGNELALPSKYVNFLYLASHYEKLKGSPEDNEQKQLFVEQHKHYLDEIIEQISEFSKRVILADANLDKVLSAYNKHRDKPIREQAENIIHLFTLTNLGAPAAFKYFDTTIDRKRYTSTKEVLDATLIHQSITGLYETRIDLSQLGGDGGEAAAKPAPGGGGGVLNLEEEYRLHEKPVPSSIDPSWLQLFPTVWAERAGMGLANQVPPVVVELRSGASPVAVRQYPMSKEAREGIRPHIQKFLDLGVLVPCRSPWNTPLLPVKKPGTNDYRPVQDLREINKRVQDIHPTVPNPYNLLSSLPPSYTWYSVLDLKDAFFCLRLHPNSQPLFAFEWKDPEKGNTGQLTWTRLPQGFKNSPTLFNEALHRDLAPFRALNPQVVLLQYVDDLLVAAPTYEDCKKGTQKLLQELSKLGYRVSAKKAQLCQREVTYLGYLLKEGKRWLTPARKATVMKIPVPTTPRQVREFLGKAGFCRLFIPGFASLAAPLYPLTKPSIPFIWTEEHQQAFDHIKKALLSAPALALPDLTKPFTLYIDERAGVARGVLTQTLGPWRRPVAYLSKKLDPVASGWPTCLKAVAAVALLLKDADKLTLGQNVTVIASHSLESIVRQPPDRWMTNARMTHYQSLLLNERVSFAPPAVLNPATLLPVESEATPVHRCSEILAEETGTRRDLEDQPLPGVPTWYTDGSSFITEGKRRAGAPIVDGKRTVWASSLPEGTSAQKAELVALTQALRLAEGKNINIYTDSRYAFATAHIHGAIYKQRGWLTSAGKDIKNKEEILALLEAIHLPRRVAIIHCPGHQRGSNPVATGNRRADEAAKQAALSTRVLAGTTKPAGKRTADGSEFEKRTADGSEFESPKKKAKVE

SEQ ID NO: 7505 - protein, 2218 aa, synthetic construct
MPAAKRVKLDGGDKKYSIGLDIGTNSVGWAVITDEYKVPSKKFKVLGNTDRHSIKKNLIGALLFDSGETAEATRLKRTARRRYTRRKNRICYLQEIFSNEMAKVDDSFFHRLEESFLVEEDKKHERHPIFGNIVDEVAYHEKYPTIYHLRKKLVDSTDKADLRLIYLALAHMIKFRGHFLIEGDLNPDNSDVDKLFIQLVQTYNQLFEENPINASGVDAKAILSARLSKSRRLENLIAQLPGEKKNGLFGNLIALSLGLTPNFKSNFDLAEDAKLQLSKDTYDDDLDNLLAQIGDQYADLFLAAKNLSDAILLSDILRVNTEITKAPLSASMIKRYDEHHQDLTLLKALVRQQLPEKYKEIFFDQSKNGYAGYIDGGASQEEFYKFIKPILEKMDGTEELLVKLNREDLLRKQRTFDNGSIPHQIHLGELHAILRRQEDFYPFLKDNREKIEKILTFRIPYYVGPLARGNSRFAWMTRKSEETITPWNFEEVVDKGASAQSFIERMTNFDKNLPNEKVLPKHSLLYEYFTVYNELTKVKYVTEGMRKPAFLSGEQKKAIVDLLFKTNRKVTVKQLKEDYFKKIECFDSVEISGVEDRFNASLGTYHDLLKIIKDKDFLDNEENEDILEDIVLTLTLFEDREMIEERLKTYAHLFDDKVMKQLKRRRYTGWGRLSRKLINGIRDKQSGKTILDFLKSDGFANRNFMQLIHDDSLTFKEDIQKAQVSGQGDSLHEHIANLAGSPAIKKGILQTVKVVDELVKVMGRHKPENIVIEMARENQTTQKGQKNSRERMKRIEEGIKELGSQILKEHPVENTQLQNEKLYLYYLQNGRDMYVDQELDINRLSDYDVDHIVPQSFLKDDSIDNKVLTRSDKARGKSDNVPSEEVVKKMKNYWRQLLNAKLITQRKFDNLTKAERGGLSELDKAGFIKRQLVETRQITKHVAQILDSRMNTKYDENDKLIREVKVITLKSKLVSDFRKDFQFYKVREINNYHHAHDAYLNAVVGTALIKKYPKLESEFVYGDYKVYDVRKMIAKSEQEIGKATAKYFFYSNIMNFFKTEITLANGEIRKRPLIETNGETGEIVWDKGRDFATVRKVLSMPQVNIVKKTEVQTGGFSKESILPKRNSDKLIARKKDWDPKKYGGFDSPTVAYSVLVVAKVEKGKSKKLKSVKELLGITIMERSSFEKNPIDFLEAKGYKEVKKDLIIKLPKYSLFELENGRKRMLASAGELQKGNELALPSKYVNFLYLASHYEKLKGSPEDNEQKQLFVEQHKHYLDEIIEQISEFSKRVILADANLDKVLSAYNKHRDKPIREQAENIIHLFTLTNLGAPAAFKYFDTTIDRKRYTSTKEVLDATLIHQSITGLYETRIDLSQLGGDGGEAAAKPAPGGGGGTLGDQGSRGSDPLPEPRVTLTVEGIPTEFLVNTGAEHSVLTKPMGKMGSKRTVVAGATGSKVYPWTTKRLLKIGQKQVTHSFLVIPECPAPLLGRDLLTKLKAQIQFSTEGPQVTWEDRPAMCLVLNLEEEYRLHEKPVPPSIDPSWLQLFPMVWAEKAGMGLANQVPPVVVELKSDASPVAVRQYPMSKEAREGIRPHIQRFLDLGILVPCQSPWNTPLLPVKKPGTNDYRPVQDLREVNKRVQDIHPTVPNPYNLLSSLPPSHTWYSVLDLKDAFFCLKLHPNSQPLFAFEWRDPEKGNTGQLTWTRLPQGFKNSPTLFNEALHRDLASFRALNPQVVMLQYVDDLLVAAPTYRDCKEGTRRLLQELSKLGYRVSAKKAQLCREEVTYLGYLLKGGKRWLTPARKATVMKIPTPTTPRQVREFLGKAGFCRLFIPGFASLAAPLYPLTRPKVPFTWTEAHQEAFGRIKEALLSAPALALPDLTKPFALYVDEKEGVARGVLTQTLGPWRRPVAYLSKKLDPVASGWPTCLKAIAAVALLLKDADKLTLGQNVLVIAPHNLESIVRQPPDRWMTNARMTHYQSLLLNERVSFAPPAILNPATLLPVESDDTPIHICSEILAEETGTRPDLRDQPLPGVPAWYTDGSSFIMDGRRQAGAAIVDNKRTVWASNLPEGTSAQKAELIALTQALRLAEGKSINIYTDSRYAFATAHVHGAIYKQRGWLTSAGKDIKNKEEILALLEAIHLPKRVAIIHCPGHQRGTDPVATGNRKADEAAKQAAQSTRILTETTKNAGKRTADGSEFEKRTADGSEFESPKKKAKVE

SEQ ID NO: 7506 - protein, 2096 aa, synthetic construct
MPAAKRVKLDGGDKKYSIGLDIGTNSVGWAVITDEYKVPSKKFKVLGNTDRHSIKKNLIGALLFDSGETAEATRLKRTARRRYTRRKNRICYLQEIFSNEMAKVDDSFFHRLEESFLVEEDKKHERHPIFGNIVDEVAYHEKYPTIYHLRKKLVDSTDKADLRLIYLALAHMIKFRGHFLIEGDLNPDNSDVDKLFIQLVQTYNQLFEENPINASGVDAKAILSARLSKSRRLENLIAQLPGEKKNGLFGNLIALSLGLTPNFKSNFDLAEDAKLQLSKDTYDDDLDNLLAQIGDQYADLFLAAKNLSDAILLSDILRVNTEITKAPLSASMIKRYDEHHQDLTLLKALVRQQLPEKYKEIFFDQSKNGYAGYIDGGASQEEFYKFIKPILEKMDGTEELLVKLNREDLLRKQRTFDNGSIPHQIHLGELHAILRRQEDFYPFLKDNREKIEKILTFRIPYYVGPLARGNSRFAWMTRKSEETITPWNFEEVVDKGASAQSFIERMTNFDKNLPNEKVLPKHSLLYEYFTVYNELTKVKYVTEGMRKPAFLSGEQKKAIVDLLFKTNRKVTVKQLKEDYFKKIECFDSVEISGVEDRFNASLGTYHDLLKIIKDKDFLDNEENEDILEDIVLTLTLFEDREMIEERLKTYAHLFDDKVMKQLKRRRYTGWGRLSRKLINGIRDKQSGKTILDFLKSDGFANRNFMQLIHDDSLTFKEDIQKAQVSGQGDSLHEHIANLAGSPAIKKGILQTVKVVDELVKVMGRHKPENIVIEMARENQTTQKGQKNSRERMKRIEEGIKELGSQILKEHPVENTQLQNEKLYLYYLQNGRDMYVDQELDINRLSDYDVDHIVPQSFLKDDSIDNKVLTRSDKARGKSDNVPSEEVVKKMKNYWRQLLNAKLITQRKFDNLTKAERGGLSELDKAGFIKRQLVETRQITKHVAQILDSRMNTKYDENDKLIREVKVITLKSKLVSDFRKDFQFYKVREINNYHHAHDAYLNAVVGTALIKKYPKLESEFVYGDYKVYDVRKMIAKSEQEIGKATAKYFFYSNIMNFFKTEITLANGEIRKRPLIETNGETGEIVWDKGRDFATVRKVLSMPQVNIVKKTEVQTGGFSKESILPKRNSDKLIARKKDWDPKKYGGFDSPTVAYSVLVVAKVEKGKSKKLKSVKELLGITIMERSSFEKNPIDFLEAKGYKEVKKDLIIKLPKYSLFELENGRKRMLASAGELQKGNELALPSKYVNFLYLASHYEKLKGSPEDNEQKQLFVEQHKHYLDEIIEQISEFSKRVILADANLDKVLSAYNKHRDKPIREQAENIIHLFTLTNLGAPAAFKYFDTTIDRKRYTSTKEVLDATLIHQSITGLYETRIDLSQLGGDGGEAAAKPAPGGGGGTLNLEDEYRLYETSAEPEVSPGSTWLSDFPQAWAETGGMGLAVRQAPLIIPLKATSTPVSIKQYPMSQEAKLGIKPHIQRLLDQGILVPCQSPWNTPLLPVKKPGTNDYRPVQDLREVNKRVEDIHPTVPNPYNLLSGLPPSHRWYTVLDLKDAFFCLRLHPTSQPLFAFEWRDPGMGISGQLTWTRLPQGFKNSPTLFDEALHRDLADFRIQHPDLILLQYVDDILLAATSELDCQQGTRALLLTLGNLGYRASAKKAQLCQKQVKYLGYLLKEGQRWLTEARKETVMGQPTPKTPRQLREFLGTAGFCRLWIPGFAEMAAPLYPLTKTGTLFNWGPDQQKAYQEIKQALLTAPALGLPDLTKPFELFVDEKQGYAKGVLTQKLGPWRRPVAYLSKKLDPVAAGWPPCLRMVAAIAVLRKDAGKLTMGQPLVILAPHAVEALVKQPPDRWLSNARMTHYQAMLLDTDRVQFGPVVALNPATLLPLPEEGAPHDCLEILAETHGTRPDLTDQPIPDADHTWYTDGSSFLQEGQRKAGAAVTTETEVIWARALPAGTSAQRAELIALTQALKMAEGKRLNVYTDSRYAFATAHIHGEIYRRRGLLTSEGREIKNKSEILALLKALFLPKRLSIIHCLGHQKGDSAEARGNRLADQAAREAAIKTPPDTSTLLAGKRTADGSEFEKRTADGSEFESPKKKAKVE

SEQ ID NO: 7507 - protein, 2096 aa, synthetic construct
MPAAKRVKLDGGDKKYSIGLDIGTNSVGWAVITDEYKVPSKKFKVLGNTDRHSIKKNLIGALLFDSGETAEATRLKRTARRRYTRRKNRICYLQEIFSNEMAKVDDSFFHRLEESFLVEEDKKHERHPIFGNIVDEVAYHEKYPTIYHLRKKLVDSTDKADLRLIYLALAHMIKFRGHFLIEGDLNPDNSDVDKLFIQLVQTYNQLFEENPINASGVDAKAILSARLSKSRRLENLIAQLPGEKKNGLFGNLIALSLGLTPNFKSNFDLAEDAKLQLSKDTYDDDLDNLLAQIGDQYADLFLAAKNLSDAILLSDILRVNTEITKAPLSASMIKRYDEHHQDLTLLKALVRQQLPEKYKEIFFDQSKNGYAGYIDGGASQEEFYKFIKPILEKMDGTEELLVKLNREDLLRKQRTFDNGSIPHQIHLGELHAILRRQEDFYPFLKDNREKIEKILTFRIPYYVGPLARGNSRFAWMTRKSEETITPWNFEEVVDKGASAQSFIERMTNFDKNLPNEKVLPKHSLLYEYFTVYNELTKVKYVTEGMRKPAFLSGEQKKAIVDLLFKTNRKVTVKQLKEDYFKKIECFDSVEISGVEDRFNASLGTYHDLLKIIKDKDFLDNEENEDILEDIVLTLTLFEDREMIEERLKTYAHLFDDKVMKQLKRRRYTGWGRLSRKLINGIRDKQSGKTILDFLKSDGFANRNFMQLIHDDSLTFKEDIQKAQVSGQGDSLHEHIANLAGSPAIKKGILQTVKVVDELVKVMGRHKPENIVIEMARENQTTQKGQKNSRERMKRIEEGIKELGSQILKEHPVENTQLQNEKLYLYYLQNGRDMYVDQELDINRLSDYDVDHIVPQSFLKDDSIDNKVLTRSDKARGKSDNVPSEEVVKKMKNYWRQLLNAKLITQRKFDNLTKAERGGLSELDKAGFIKRQLVETRQITKHVAQILDSRMNTKYDENDKLIREVKVITLKSKLVSDFRKDFQFYKVREINNYHHAHDAYLNAVVGTALIKKYPKLESEFVYGDYKVYDVRKMIAKSEQEIGKATAKYFFYSNIMNFFKTEITLANGEIRKRPLIETNGETGEIVWDKGRDFATVRKVLSMPQVNIVKKTEVQTGGFSKESILPKRNSDKLIARKKDWDPKKYGGFDSPTVAYSVLVVAKVEKGKSKKLKSVKELLGITIMERSSFEKNPIDFLEAKGYKEVKKDLIIKLPKYSLFELENGRKRMLASAGELQKGNELALPSKYVNFLYLASHYEKLKGSPEDNEQKQLFVEQHKHYLDEIIEQISEFSKRVILADANLDKVLSAYNKHRDKPIREQAENIIHLFTLTNLGAPAAFKYFDTTIDRKRYTSTKEVLDATLIHQSITGLYETRIDLSQLGGDGGEAAAKPAPGGGGGTLNLEDEYRLYETSAEPEVSPGSTWLSDFPQAWAETGGMGLAVRQAPLIIPLKATSTPVSIKQYPMSQEAKLGIKPHIQRLLDQGILVPCQSPWNTPLLPVKKPGTNDYRPVQDLREVNKRVEDIHPTVPNPYNLLSGLPPSHRWYTVLDLKDAFFCLRLHPTSQPLFAFEWRDPGMGISGQLTWTRLPQGFKNSPTLFNEALHRDLADFRIQHPDLILLQYVDDILLAATSELDCQQGTRALLLTLGNLGYRASAKKAQLCQKQVKYLGYLLKEGQRWLTEARKETVMGQPTPKTPRQLREFLGTAGFCRLWIPGFAEMAAPLYPLTKPGTLFNWGPDQQKAYQEIKQALLTAPALGLPDLTKPFELFVDEKQGYAKGVLTQKLGPWRRPVAYLSKKLDPVAAGWPPCLRMVAAIAVLRKDAGKLTMGQPLVILAPHAVEALVKQPPDRWLSNARMTHYQAMLLDTDRVQFGPVVALNPATLLPLPEEGAPHDCLEILAETHGTRPDLTDQPIPDADHTWYTDGSSFLQEGQRKAGAAVTTETEVIWARALPAGTSAQRAELIALTQALKMAEGKRLNVYTDSRYAFATAHIHGEIYRRRGWLTSEGREIKNKSEILALLKALFLPKRLSIIHCLGHQKGDSAEARGNRLADQAAREAAIKTPPDTSTLLAGKRTADGSEFEKRTADGSEFESPKKKAKVE

SEQ ID NO: 7508 - protein, 2096 aa, synthetic construct
MPAAKRVKLDGGDKKYSIGLDIGTNSVGWAVITDEYKVPSKKFKVLGNTDRHSIKKNLIGALLFDSGETAEATRLKRTARRRYTRRKNRICYLQEIFSNEMAKVDDSFFHRLEESFLVEEDKKHERHPIFGNIVDEVAYHEKYPTIYHLRKKLVDSTDKADLRLIYLALAHMIKFRGHFLIEGDLNPDNSDVDKLFIQLVQTYNQLFEENPINASGVDAKAILSARLSKSRRLENLIAQLPGEKKNGLFGNLIALSLGLTPNFKSNFDLAEDAKLQLSKDTYDDDLDNLLAQIGDQYADLFLAAKNLSDAILLSDILRVNTEITKAPLSASMIKRYDEHHQDLTLLKALVRQQLPEKYKEIFFDQSKNGYAGYIDGGASQEEFYKFIKPILEKMDGTEELLVKLNREDLLRKQRTFDNGSIPHQIHLGELHAILRRQEDFYPFLKDNREKIEKILTFRIPYYVGPLARGNSRFAWMTRKSEETITPWNFEEVVDKGASAQSFIERMTNFDKNLPNEKVLPKHSLLYEYFTVYNELTKVKYVTEGMRKPAFLSGEQKKAIVDLLFKTNRKVTVKQLKEDYFKKIECFDSVEISGVEDRFNASLGTYHDLLKIIKDKDFLDNEENEDILEDIVLTLTLFEDREMIEERLKTYAHLFDDKVMKQLKRRRYTGWGRLSRKLINGIRDKQSGKTILDFLKSDGFANRNFMQLIHDDSLTFKEDIQKAQVSGQGDSLHEHIANLAGSPAIKKGILQTVKVVDELVKVMGRHKPENIVIEMARENQTTQKGQKNSRERMKRIEEGIKELGSQILKEHPVENTQLQNEKLYLYYLQNGRDMYVDQELDINRLSDYDVDHIVPQSFLKDDSIDNKVLTRSDKARGKSDNVPSEEVVKKMKNYWRQLLNAKLITQRKFDNLTKAERGGLSELDKAGFIKRQLVETRQITKHVAQILDSRMNTKYDENDKLIREVKVITLKSKLVSDFRKDFQFYKVREINNYHHAHDAYLNAVVGTALIKKYPKLESEFVYGDYKVYDVRKMIAKSEQEIGKATAKYFFYSNIMNFFKTEITLANGEIRKRPLIETNGETGEIVWDKGRDFATVRKVLSMPQVNIVKKTEVQTGGFSKESILPKRNSDKLIARKKDWDPKKYGGFDSPTVAYSVLVVAKVEKGKSKKLKSVKELLGITIMERSSFEKNPIDFLEAKGYKEVKKDLIIKLPKYSLFELENGRKRMLASAGELQKGNELALPSKYVNFLYLASHYEKLKGSPEDNEQKQLFVEQHKHYLDEIIEQISEFSKRVILADANLDKVLSAYNKHRDKPIREQAENIIHLFTLTNLGAPAAFKYFDTTIDRKRYTSTKEVLDATLIHQSITGLYETRIDLSQLGGDGGEAAAKPAPGGGGGTLGIEDEYRLHETSTEPDVSLGSTWLSDFPQAWAETGGMGLAVRQAPLIIPLKATSTPVSIQQYPMSHEARLGIKPHIQRLLDQGILVPCQSPWNTPLLPVKKPGTNDYRPVQDLREVNKRVEDIHPTVPNPYNLLSGLPPSHQWYTVLDLKDAFFCLRLHPTSQPLFAFEWRDPGMGISGQLTWTRLPQGFKNSPTLFNEALHRDLADFRIQHPDLILLQYVDDILLAATSELDCQQGTRALLQTLGDLGYRASAKKAQICQKQVKYLGYLLREGQRWLTEARKETVMGQPVPKTPRQLREFLGTAGFCRLWIPGFAEMAAPLYPLTKPGTLFSWGPDQQKAYQEIKQALLTAPALGLPDLTKPFELFVDEKQGYAKGVLTQKLGPWRRPVAYLSKKLDPVAAGWPPCLRMVAAIAVLTKDAGKLTMGQPLVILAPHAVEALVKQPPDRWLSNARMTHYQAMLLDTDRVQFGPVVALNPATLLPLPEEGAPHDCLEILAETHGTRPDLTDQPIPDADHTWYTDGSSFLQEGQRKAGAAVTTETEVIWAGALPAGTSAQRAELIALTQALKMAEGKRLNVYTDSRYAFATAHIHGEIYRRRGWLTSEGREIKNKSEILALLKALFLPKRLSIIHCLGHQKGDSAEARGNRLADQAAREAAIKTPPDTSTLLAGKRTADGSEFEKRTADGSEFESPKKKAKVE

SEQ ID NO: 7509 - protein, 2096 aa, synthetic construct; identical to SEQ ID NO: 4536

SEQ ID NO: 7510 - protein, 2096 aa, synthetic construct
MPAAKRVKLDGGDKKYSIGLDIGTNSVGWAVITDEYKVPSKKFKVLGNTDRHSIKKNLIGALLFDSGETAEATRLKRTARRRYTRRKNRICYLQEIFSNEMAKVDDSFFHRLEESFLVEEDKKHERHPIFGNIVDEVAYHEKYPTIYHLRKKLVDSTDKADLRLIYLALAHMIKFRGHFLIEGDLNPDNSDVDKLFIQLVQTYNQLFEENPINASGVDAKAILSARLSKSRRLENLIAQLPGEKKNGLFGNLIALSLGLTPNFKSNFDLAEDAKLQLSKDTYDDDLDNLLAQIGDQYADLFLAAKNLSDAILLSDILRVNTEITKAPLSASMIKRYDEHHQDLTLLKALVRQQLPEKYKEIFFDQSKNGYAGYIDGGASQEEFYKFIKPILEKMDGTEELLVKLNREDLLRKQRTFDNGSIPHQIHLGELHAILRRQEDFYPFLKDNREKIEKILTFRIPYYVGPLARGNSRFAWMTRKSEETITPWNFEEVVDKGASAQSFIERMTNFDKNLPNEKVLPKHSLLYEYFTVYNELTKVKYVTEGMRKPAFLSGEQKKAIVDLLFKTNRKVTVKQLKEDYFKKIECFDSVEISGVEDRFNASLGTYHDLLKIIKDKDFLDNEENEDILEDIVLTLTLFEDREMIEERLKTYAHLFDDKVMKQLKRRRYTGWGRLSRKLINGIRDKQSGKTILDFLKSDGFANRNFMQLIHDDSLTFKEDIQKAQVSGQGDSLHEHIANLAGSPAIKKGILQTVKVVDELVKVMGRHKPENIVIEMARENQTTQKGQKNSRERMKRIEEGIKELGSQILKEHPVENTQLQNEKLYLYYLQNGRDMYVDQELDINRLSDYDVDHIVPQSFLKDDSIDNKVLTRSDKARGKSDNVPSEEVVKKMKNYWRQLLNAKLITQRKFDNLTKAERGGLSELDKAGFIKRQLVETRQITKHVAQILDSRMNTKYDENDKLIREVKVITLKSKLVSDFRKDFQFYKVREINNYHHAHDAYLNAVVGTALIKKYPKLESEFVYGDYKVYDVRKMIAKSEQEIGKATAKYFFYSNIMNFFKTEITLANGEIRKRPLIETNGETGEIVWDKGRDFATVRKVLSMPQVNIVKKTEVQTGGFSKESILPKRNSDKLIARKKDWDPKKYGGFDSPTVAYSVLVVAKVEKGKSKKLKSVKELLGITIMERSSFEKNPIDFLEAKGYKEVKKDLIIKLPKYSLFELENGRKRMLASAGELQKGNELALPSKYVNFLYLASHYEKLKGSPEDNEQKQLFVEQHKHYLDEIIEQISEFSKRVILADANLDKVLSAYNKHRDKPIREQAENIIHLFTLTNLGAPAAFKYFDTTIDRKRYTSTKEVLDATLIHQSITGLYETRIDLSQLGGDGGEAAAKPAPGGGGGTLNIEDEYRLHETSKGPDVPLGSTWLSDFPQAWAETGGMGLAVRQAPLIIPLKATSTPVSIKQYPMSQEARLGIKPHIQRLLDQGILVPCQSPWNTPLLPVKKPGTNDYRPVQDLREVNKRVEDIHPTVPNPYNLLSGLPPSHQWYTVLDLKDAFFCLRLHPTSQSLFAFEWRDPEMGISGQLTWTRLPQGFKNSPTLFNEALHRDLADFRIQHPDLILLQYVDDLLLAATSELDCQQGTRALLQTLGDLGYRASAKKAQICQKQVKYLGYLLKEGQRWLTEARKETVMGQPTPKTPRQLREFLGTAGFCRLWIPGFAEMAAPLYPLTKPGTLFEWGPDQQKAYQEIKQALLTAPALGLPDLTKPFELFVDEKQGYAKGVLTQKLGPWRRPVAYLSKKLDPVAAGWPPCLRMVAAIAVLTKDAGKLTMGQPLVILAPHAVEALVKQPPDRWLSNARMTHYQALLLDTDRVQFGPIVALNPATLLPLPEEGLQHDCLDILAEAHGTRPDLTDQPLPDADHTWYTDGSSFLQEGQRKAGAAVTTETEVVWAKALPAGTSAQRAELIALTQALKMAEGKKLNVYTDSRYAFATAHIHGEIYRRRGWLTSEGKEIKNKDEILALLKALFLPKRLSIIHCPGHQKGNRAEARGNRMADQAAREVATRETPETSTLLAGKRTADGSEFEKRTADGSEFESPKKKAKVE

SEQ ID NO: 7511 - protein, 2096 aa, synthetic construct
MPAAKRVKLDGGDKKYSIGLDIGTNSVGWAVITDEYKVPSKKFKVLGNTDRHSIKKNLIGALLFDSGETAEATRLKRTARRRYTRRKNRICYLQEIFSNEMAKVDDSFFHRLEESFLVEEDKKHERHPIFGNIVDEVAYHEKYPTIYHLRKKLVDSTDKADLRLIYLALAHMIKFRGHFLIEGDLNPDNSDVDKLFIQLVQTYNQLFEENPINASGVDAKAILSARLSKSRRLENLIAQLPGEKKNGLFGNLIALSLGLTPNFKSNFDLAEDAKLQLSKDTYDDDLDNLLAQIGDQYADLFLAAKNLSDAILLSDILRVNTEITKAPLSASMIKRYDEHHQDLTLLKALVRQQLPEKYKEIFFDQSKNGYAGYIDGGASQEEFYKFIKPILEKMDGTEELLVKLNREDLLRKQRTFDNGSIPHQIHLGELHAILRRQEDFYPFLKDNREKIEKILTFRIPYYVGPLARGNSRFAWMTRKSEETITPWNFEEVVDKGASAQSFIERMTNFDKNLPNEKVLPKHSLLYEYFTVYNELTKVKYVTEGMRKPAFLSGEQKKAIVDLLFKTNRKVTVKQLKEDYFKKIECFDSVEISGVEDRFNASLGTYHDLLKIIKDKDFLDNEENEDILEDIVLTLTLFEDREMIEERLKTYAHLFDDKVMKQLKRRRYTGWGRLSRKLINGIRDKQSGKTILDFLKSDGFANRNFMQLIHDDSLTFKEDIQKAQVSGQGDSLHEHIANLAGSPAIKKGILQTVKVVDELVKVMGRHKPENIVIEMARENQTTQKGQKNSRERMKRIEEGIKELGSQILKEHPVENTQLQNEKLYLYYLQNGRDMYVDQELDINRLSDYDVDHIVPQSFLKDDSIDNKVLTRSDKARGKSDNVPSEEVVKKMKNYWRQLLNAKLITQRKFDNLTKAERGGLSELDKAGFIKRQLVETRQITKHVAQILDSRMNTKYDENDKLIREVKVITLKSKLVSDFRKDFQFYKVREINNYHHAHDAYLNAVVGTALIKKYPKLESEFVYGDYKVYDVRKMIAKSEQEIGKATAKYFFYSNIMNFFKTEITLANGEIRKRPLIETNGETGEIVWDKGRDFATVRKVLSMPQVNIVKKTEVQTGGFSKESILPKRNSDKLIARKKDWDPKKYGGFDSPTVAYSVLVVAKVEKGKSKKLKSVKELLGITIMERSSFEKNPIDFLEAKGYKEVKKDLIIKLPKYSLFELENGRKRMLASAGELQKGNELALPSKYVNFLYLASHYEKLKGSPEDNEQKQLFVEQHKHYLDEIIEQISEFSKRVILADANLDKVLSAYNKHRDKPIREQAENIIHLFTLTNLGAPAAFKYFDTTIDRKRYTSTKEVLDATLIHQSITGLYETRIDLSQLGGDGGEAAAKPAPGGGGGTLNIEDEHRLHETSKEPDVSLGSTWLSDFPQAWAETGGMGLAVRQAPLIIPLKATSTPVSIKQYPMSQEARLGIKPHIQRLLDQGILVPCQSPWNTPLLPVKKPGTNDYRPVQDLREVNKRVEDIHPTVPNPYNLLSGLPPSHQWYTVLDLKDAFFCLRLHPTSQPLFAFEWRDPEMGISGQLTWTRLPQGFKNSPTLFDEALHRDLADFRIQHPDLILLQYVDDLLLAATSELDCQQGTRALLQTLGNLGYRASAKKAQICQKQVKYLGYLLKEGQRWLTEARKETVMGQPTPKTPRQLREFLGTAGFCRLWIPGFAEMAAPLYPLTKTGTLFNWGPDQQKAYQEIKQALLTAPALGLPDLTKPFELFVDEKQGYAKGVLTQKLGPWRRPVAYLSKKLDPVAAGWPPCLRMVAAIAVLTKDAGKLTMGQPLVILAPHAVEALVKQPPDRWLSNARMTHYQALLLDTDRVQFGPVVALNPATLLPLPEEGLQHNCLDILAEAHGTRPDLTDQPLPDADHTWYTDGSSLLQEGQRKAGAAVTTETEVIWAKALPAGTSAQRAELIALTQALKMAEGKKLNVYTDSRYAFATAHIHGEIYRRRGLLTSEGKEIKNKDEILALLKALFLPKRLSIIHCPGHQKGHSAEARGNRMADQAARKAAITETPDTSTLLAGKRTADGSEFEKRTADGSEFESPKKKAKVE

SEQ ID NO: 7512 - protein, 2024 aa, synthetic construct
MPAAKRVKLDGGDKKYSIGLDIGTNSVGWAVITDEYKVPSKKFKVLGNTDRHSIKKNLIGALLFDSGETAEATRLKRTARRRYTRRKNRICYLQEIFSNEMAKVDDSFFHRLEESFLVEEDKKHERHPIFGNIVDEVAYHEKYPTIYHLRKKLVDSTDKADLRLIYLALAHMIKFRGHFLIEGDLNPDNSDVDKLFIQLVQTYNQLFEENPINASGVDAKAILSARLSKSRRLENLIAQLPGEKKNGLFGNLIALSLGLTPNFKSNFDLAEDAKLQLSKDTYDDDLDNLLAQIGDQYADLFLAAKNLSDAILLSDILRVNTEITKAPLSASMIKRYDEHHQDLTLLKALVRQQLPEKYKEIFFDQSKNGYAGYIDGGASQEEFYKFIKPILEKMDGTEELLVKLNREDLLRKQRTFDNGSIPHQIHLGELHAILRRQEDFYPFLKDNREKIEKILTFRIPYYVGPLARGNSRFAWMTRKSEETITPWNFEEVVDKGASAQSFIERMTNFDKNLPNEKVLPKHSLLYEYFTVYNELTKVKYVTEGMRKPAFLSGEQKKAIVDLLFKTNRKVTVKQLKEDYFKKIECFDSVEISGVEDRFNASLGTYHDLLKIIKDKDFLDNEENEDILEDIVLTLTLFEDREMIEERLKTYAHLFDDKVMKQLKRRRYTGWGRLSRKLINGIRDKQSGKTILDFLKSDGFANRNFMQLIHDDSLTFKEDIQKAQVSGQGDSLHEHIANLAGSPAIKKGILQTVKVVDELVKVMGRHKPENIVIEMARENQTTQKGQKNSRERMKRIEEGIKELGSQILKEHPVENTQLQNEKLYLYYLQNGRDMYVDQELDINRLSDYDVDHIVPQSFLKDDSIDNKVLTRSDKARGKSDNVPSEEVVKKMKNYWRQLLNAKLITQRKFDNLTKAERGGLSELDKAGFIKRQLVETRQITKHVAQILDSRMNTKYDENDKLIREVKVITLKSKLVSDFRKDFQFYKVREINNYHHAHDAYLNAVVGTALIKKYPKLESEFVYGDYKVYDVRKMIAKSEQEIGKATAKYFFYSNIMNFFKTEITLANGEIRKRPLIETNGETGEIVWDKGRDFATVRKVLSMPQVNIVKKTEVQTGGFSKESILPKRNSDKLIARKKDWDPKKYGGFDSPTVAYSVLVVAKVEKGKSKKLKSVKELLGITIMERSSFEKNPIDFLEAKGYKEVKKDLIIKLPKYSLFELENGRKRMLASAGELQKGNELALPSKYVNFLYLASHYEKLKGSPEDNEQKQLFVEQHKHYLDEIIEQISEFSKRVILADANLDKVLSAYNKHRDKPIREQAENIIHLFTLTNLGAPAAFKYFDTTIDRKRYTSTKEVLDATLIHQSITGLYETRIDLSQLGGDGGEAAAKPAPGGGGGGRDIMKDIKVRLMTDSPDDSQDLMIGAIESNLFADQISWKSDQPVWLNQWPLKQEKLQALQQLVTEQLQLGHLEESNSPWNTPVFVIKKKSGKWRLLQDLRAVNATMHDMGALQPGLPSPVAVPKGWEIIIIDLQDCFFNIKLHPEDCKRFAFSVPSPNFKRPYQRFQWKVLPQGMKNSPTLCQKFVDKAILTVRDKYQDSYIVHYMDDILLAHPSRSIVDEILTSMIQALNKHGLVVSTEKIQKYDNLKYLGTHIQGDSVSYQKLQIRTDKLRTLNDFQKLLGNINWIRPFLKLTTGELKPLFEILNGDSNPISTRKLTPEACKALQLMNERLSTARVKRLDLSQPWSLCILKTEYTPTACLWQDGVVEWIHLPHISPKVITPYDIFCTQLIIKGRHRSKELFSKDPDYIVVPYTKVQFDLLLQEKEDWPISLLGFLGEVHFHLPKDPLLTFTLQTAIIFPHMTSTTPLEKGIVIFTDGSANGRSVTYIQGREPIIKENTQNTAQQAEIVAVITAFEEVSQPFNLYTDSKYVTGLFPEIETATLSPRTKIYTELKHLQRLIHKRQEKFYIGHIRGHTGLPGPLAQGNAYADSLTRILTAGKRTADGSEFEKRTADGSEFESPKKKAKVE

SEQ ID NO: 7513 - protein, 2088 aa, synthetic construct
MPAAKRVKLDGGDKKYSIGLDIGTNSVGWAVITDEYKVPSKKFKVLGNTDRHSIKKNLIGALLFDSGETAEATRLKRTARRRYTRRKNRICYLQEIFSNEMAKVDDSFFHRLEESFLVEEDKKHERHPIFGNIVDEVAYHEKYPTIYHLRKKLVDSTDKADLRLIYLALAHMIKFRGHFLIEGDLNPDNSDVDKLFIQLVQTYNQLFEENPINASGVDAKAILSARLSKSRRLENLIAQLPGEKKNGLFGNLIALSLGLTPNFKSNFDLAEDAKLQLSKDTYDDDLDNLLAQIGDQYADLFLAAKNLSDAILLSDILRVNTEITKAPLSASMIKRYDEHHQDLTLLKALVRQQLPEKYKEIFFDQSKNGYAGYIDGGASQEEFYKFIKPILEKMDGTEELLVKLNREDLLRKQRTFDNGSIPHQIHLGELHAILRRQEDFYPFLKDNREKIEKILTFRIPYYVGPLARGNSRFAWMTRKSEETITPWNFEEVVDKGASAQSFIERMTNFDKNLPNEKVLPKHSLLYEYFTVYNELTKVKYVTEGMRKPAFLSGEQKKAIVDLLFKTNRKVTVKQLKEDYFKKIECFDSVEISGVEDRFNASLGTYHDLLKIIKDKDFLDNEENEDILEDIVLTLTLFEDREMIEERLKTYAHLFDDKVMKQLKRRRYTGWGRLSRKLINGIRDKQSGKTILDFLKSDGFANRNFMQLIHDDSLTFKEDIQKAQVSGQGDSLHEHIANLAGSPAIKKGILQTVKVVDELVKVMGRHKPENIVIEMARENQTTQKGQKNSRERMKRIEEGIKELGSQILKEHPVENTQLQNEKLYLYYLQNGRDMYVDQELDINRLSDYDVDHIVPQSFLKDDSIDNKVLTRSDKARGKSDNVPSEEVVKKMKNYWRQLLNAKLITQRKFDNLTKAERGGLSELDKAGFIKRQLVETRQITKHVAQILDSRMNTKYDENDKLIREVKVITLKSKLVSDFRKDFQFYKVREINNYHHAHDAYLNAVVGTALIKKYPKLESEFVYGDYKVYDVRKMIAKSEQEIGKATAKYFFYSNIMNFFKTEITLANGEIRKRPLIETNGETGEIVWDKGRDFATVRKVLSMPQVNIVKKTEVQTGGFSKESILPKRNSDKLIARKKDWDPKKYGGFDSPTVAYSVLVVAKVEKGKSKKLKSVKELLGITIMERSSFEKNPIDFLEAKGYKEVKKDLIIKLPKYSLFELENGRKRMLASAGELQKGNELALPSKYVNFLYLASHYEKLKGSPEDNEQKQLFVEQHKHYLDEIIEQISEFSKRVILADANLDKVLSAYNKHRDKPIREQAENIIHLFTLTNLGAPAAFKYFDTTIDRKRYTSTKEVLDATLIHQSITGLYETRIDLSQLGGDGGEAAAKPAPGGGGGLDDEYRLYSPLVKPDQNIQFWLEQFPQAWAETAGMGLAKQVPPQVIQLKASATPVSVRQYPLSKEAQEGIRPHVQRLIQQGILVPVQSPWNTPLLPVRKPGTNDYRPVQDLREVNKRVQDIHPTVPNPYNLLCALPPQRSWYTVLDLKDAFFCLRLHPTSQPLFAFEWRDPGTGRTGQLTWTRLPQGFKNSPTIFNEALHRDLANFRIQHPQVTLLQYVDDLLLAGATKQDCLEGTKALLLELSDLGYRASAKKAQICRREVTYLGYSLRDGQRWLTEARKKTVVQIPAPTTAKQVREFLGKAGFCRLFIPGFATLAAPLYPLTKPKGEFSWAPEHQKAFDAIKKALLSAPALALPDVTKPFTLYVDERKGVARGVLTQTLGPWRRPVAYLSKKLDPVASGWPVCLKAIAAVAILVKDADKLTLGQNITVIAPHALENIVRQPPDRWMTNARMTHYQSLLLTERVTFAPPAALNPATLLPEETDEPVTHDCHQLLIEETGVRKDLTDIPLTGEVLTWFTDGSSYVVEGKRMAGAAVVDGTRTIWASSLPEGTSAQKAELMALTQALRLAEGKSINIYTDSRYAFATAHVHGAIYKQRGWLTSAGREIKNKEEILSLLEALHLPKRLAIIHCPGHQKAKDPISRGNQMADRVAKQAAQGVNLLPAGKRTADGSEFEKRTADGSEFESPKKKAKVE

SEQ ID NO: 7514 - protein, 2090 aa, synthetic construct
MPAAKRVKLDGGDKKYSIGLDIGTNSVGWAVITDEYKVPSKKFKVLGNTDRHSIKKNLIGALLFDSGETAEATRLKRTARRRYTRRKNRICYLQEIFSNEMAKVDDSFFHRLEESFLVEEDKKHERHPIFGNIVDEVAYHEKYPTIYHLRKKLVDSTDKADLRLIYLALAHMIKFRGHFLIEGDLNPDNSDVDKLFIQLVQTYNQLFEENPINASGVDAKAILSARLSKSRRLENLIAQLPGEKKNGLFGNLIALSLGLTPNFKSNFDLAEDAKLQLSKDTYDDDLDNLLAQIGDQYADLFLAAKNLSDAILLSDILRVNTEITKAPLSASMIKRYDEHHQDLTLLKALVRQQLPEKYKEIFFDQSKNGYAGYIDGGASQEEFYKFIKPILEKMDGTEELLVKLNREDLLRKQRTFDNGSIPHQIHLGELHAILRRQEDFYPFLKDNREKIEKILTFRIPYYVGPLARGNSRFAWMTRKSEETITPWNFEEVVDKGASAQSFIERMTNFDKNLPNEKVLPKHSLLYEYFTVYNELTKVKYVTEGMRKPAFLSGEQKKAIVDLLFKTNRKVTVKQLKEDYFKKIECFDSVEISGVEDRFNASLGTYHDLLKIIKDKDFLDNEENEDILEDIVLTLTLFEDREMIEERLKTYAHLFDDKVMKQLKRRRYTGWGRLSRKLINGIRDKQSGKTILDFLKSDGFANRNFMQLIHDDSLTFKEDIQKAQVSGQGDSLHEHIANLAGSPAIKKGILQTVKVVDELVKVMGRHKPENIVIEMARENQTTQKGQKNSRERMKRIEEGIKELGSQILKEHPVENTQLQNEKLYLYYLQNGRDMYVDQELDINRLSDYDVDHIVPQSFLKDDSIDNKVLTRSDKARGKSDNVPSEEVVKKMKNYWRQLLNAKLITQRKFDNLTKAERGGLSELDKAGFIKRQLVETRQITKHVAQILDSRMNTKYDENDKLIREVKVITLKSKLVSDFRKDFQFYKVREINNYHHAHDAYLNAVVGTALIKKYPKLESEFVYGDYKVYDVRKMIAKSEQEIGKATAKYFFYSNIMNFFKTEITLANGEIRKRPLIETNGETGEIVWDKGRDFATVRKVLSMPQVNIVKKTEVQTGGFSKESILPKRNSDKLIARKKDWDPKKYGGFDSPTVAYSVLVVAKVEKGKSKKLKSVKELLGITIMERSSFEKNPIDFLEAKGYKEVKKDLIIKLPKYSLFELENGRKRMLASAGELQKGNELALPSKYVNFLYLASHYEKLKGSPEDNEQKQLFVEQHKHYLDEIIEQISEFSKRVILADANLDKVLSAYNKHRDKPIREQAENIIHLFTLTNLGAPAAFKYFDTTIDRKRYTSTKEVLDATLIHQSITGLYETRIDLSQLGGDGGEAAAKPAPGGGGGTLQLDDEYRLYSPLVKPDQNIQFWLEQFPQAWAETAGMGLAKQVPPQVIQLKASATPVSVRQYPLSKEAQEGIRPHVQRLIQQGILVPVQSPWNTPLLPVRKPGTNDYRPVQDLREVNKRVQDIHPTVPNPYNLLCALPPQRSWYTVLDLKDAFFCLRLHPTSQPLFAFEWRDPGTGRTGQLTWTRLPQGFKNSPTIFDEALHRDLANFRIQHPQVTLLQYVDDLLLAGATKQDCLEGTKALLLELSDLGYRASAKKAQICRREVTYLGYSLRDGQRWLTEARKKTVVQIPAPTTAKQVREFLGTAGFCRLWIPGFATLAAPLYPLTKEKGEFSWAPEHQKAFDAIKKALLSAPALALPDVTKPFTLYVDERKGVARGVLTQTLGPWRRPVAYLSKKLDPVASGWPVCLKAIAAVAILVKDADKLTLGQNITVIAPHALENIVRQPPDRWMTNARMTHYQSLLLTERVTFAPPAALNPATLLPEETDEPVTHDCHQLLIEETGVRKDLTDIPLTGEVLTWFTDGSSYVVEGKRMAGAAVVDGTRTIWASSLPEGTSAQKAELMALTQALRLAEGKSINIYTDSRYAFATAHVHGAIYKQRGLLTSAGREIKNKEEILSLLEALHLPKRLAIIHCPGHQKAKDPISRGNQMADRVAKQAAQGVNLLAGKRTADGSEFEKRTADGSEFESPKKKAKVE

SEQ ID NO: 7515 - protein, 2088 aa, synthetic construct; identical to SEQ ID NO: 7513

SEQ ID NO: 7516 - protein, 2176 aa, synthetic construct
MPAAKRVKLDGGDKKYSIGLDIGTNSVGWAVITDEYKVPSKKFKVLGNTDRHSIKKNLIGALLFDSGETAEATRLKRTARRRYTRRKNRICYLQEIFSNEMAKVDDSFFHRLEESFLVEEDKKHERHPIFGNIVDEVAYHEKYPTIYHLRKKLVDSTDKADLRLIYLALAHMIKFRGHFLIEGDLNPDNSDVDKLFIQLVQTYNQLFEENPINASGVDAKAILSARLSKSRRLENLIAQLPGEKKNGLFGNLIALSLGLTPNFKSNFDLAEDAKLQLSKDTYDDDLDNLLAQIGDQYADLFLAAKNLSDAILLSDILRVNTEITKAPLSASMIKRYDEHHQDLTLLKALVRQQLPEKYKEIFFDQSKNGYAGYIDGGASQEEFYKFIKPILEKMDGTEELLVKLNREDLLRKQRTFDNGSIPHQIHLGELHAILRRQEDFYPFLKDNREKIEKILTFRIPYYVGPLARGNSRFAWMTRKSEETITPWNFEEVVDKGASAQSFIERMTNFDKNLPNEKVLPKHSLLYEYFTVYNELTKVKYVTEGMRKPAFLSGEQKKAIVDLLFKTNRKVTVKQLKEDYFKKIECFDSVEISGVEDRFNASLGTYHDLLKIIKDKDFLDNEENEDILEDIVLTLTLFEDREMIEERLKTYAHLFDDKVMKQLKRRRYTGWGRLSRKLINGIRDKQSGKTILDFLKSDGFANRNFMQLIHDDSLTFKEDIQKAQVSGQGDSLHEHIANLAGSPAIKKGILQTVKVVDELVKVMGRHKPENIVIEMARENQTTQKGQKNSRERMKRIEEGIKELGSQILKEHPVENTQLQNEKLYLYYLQNGRDMYVDQELDINRLSDYDVDHIVPQSFLKDDSIDNKVLTRSDKARGKSDNVPSEEVVKKMKNYWRQLLNAKLITQRKFDNLTKAERGGLSELDKAGFIKRQLVETRQITKHVAQILDSRMNTKYDENDKLIREVKVITLKSKLVSDFRKDFQFYKVREINNYHHAHDAYLNAVVGTALIKKYPKLESEFVYGDYKVYDVRKMIAKSEQEIGKATAKYFFYSNIMNFFKTEITLANGEIRKRPLIETNGETGEIVWDKGRDFATVRKVLSMPQVNIVKKTEVQTGGFSKESILPKRNSDKLIARKKDWDPKKYGGFDSPTVAYSVLVVAKVEKGKSKKLKSVKELLGITIMERSSFEKNPIDFLEAKGYKEVKKDLIIKLPKYSLFELENGRKRMLASAGELQKGNELALPSKYVNFLYLASHYEKLKGSPEDNEQKQLFVEQHKHYLDEIIEQISEFSKRVILADANLDKVLSAYNKHRDKPIREQAENIIHLFTLTNLGAPAAFKYFDTTIDRKRYTSTKEVLDATLIHQSITGLYETRIDLSQLGGDGGEAAAKPAPGGGGGMDPLQLLQPLEAEIKGTKLKAHWNSGATITCVPEAFLEDERPIQTMLIKTIHGEKQQDVYYLTFKVQGRKVEAEVLASPYDYILLNPSDVPWLMKKPLQLTVLVPLHEYQERLLQQTALPKEQKELLQKLFLKYDALWQHWENQVGHRRIKPHNIATGTLAPRPQKQYPINPKAKPSIQIVIDDLLKQGVLIQQNSTMNTPVYPVPKPDGKWRMVLDYREVNKTIPLIAAQNQHSAGILSSIYRGKYKTTLDLTNGFWAHPITPESYWLTAFTWQGKQYCWTRLPQGFLNSPALFNADVVDLLKEIPNVQAYVDDIYISHDDPQEHLEQLEKIFSILLNAGYVVSLKKSEIAQREVEFLGFNITKEGRGLTDTFKQKLLNITPPKDLKQLQSILGKLNFARNFIPNYSELVKPLYTIVAPANGKFISWTEDNSNQLQHIISVLNQADNLEERNPETRLIIKVNSSPSAGYIRYYNEGSKRPIMYVNYIFSKAEAKFTQTEKLLTTMHKGLIKAMDLAMGQEILVYSPIVSMTKIQRTPLPERKALPVRWITWMTYLEDPRIQFHYDKSLPELQQIPNVTEDVIAKTKHPSEFAMVFYTDGSAIKHPDVNKSHSAGMGIAQVQFIPEYKIVHQWSIPLGDHTAQLAEIAAVEFACKKALKISGPVLIVTDSFYVAESANKELPYWKSNGFLNNKKKPLRHVSKWKSIAECLQLKPDIIIMHEKGHQQPMTTLHTEGNNLADKLATQGSYVVHAGKRTADGSEFEKRTADGSEFESPKKKAKVE

SEQ ID NO: 7517 - protein, 2176 aa, synthetic construct
MPAAKRVKLDGGDKKYSIGLDIGTNSVGWAVITDEYKVPSKKFKVLGNTDRHSIKKNLIGALLFDSGETAEATRLKRTARRRYTRRKNRICYLQEIFSNEMAKVDDSFFHRLEESFLVEEDKKHERHPIFGNIVDEVAYHEKYPTIYHLRKKLVDSTDKADLRLIYLALAHMIKFRGHFLIEGDLNPDNSDVDKLFIQLVQTYNQLFEENPINASGVDAKAILSARLSKSRRLENLIAQLPGEKKNGLFGNLIALSLGLTPNFKSNFDLAEDAKLQLSKDTYDDDLDNLLAQIGDQYADLFLAAKNLSDAILLSDILRVNTEITKAPLSASMIKRYDEHHQDLTLLKALVRQQLPEKYKEIFFDQSKNGYAGYIDGGASQEEFYKFIKPILEKMDGTEELLVKLNREDLLRKQRTFDNGSIPHQIHLGELHAILRRQEDFYPFLKDNREKIEKILTFRIPYYVGPLARGNSRFAWMTRKSEETITPWNFEEVVDKGASAQSFIERMTNFDKNLPNEKVLPKHSLLYEYFTVYNELTKVKYVTEGMRKPAFLSGEQKKAIVDLLFKTNRKVTVKQLKEDYFKKIECFDSVEISGVEDRFNASLGTYHDLLKIIKDKDFLDNEENEDILEDIVLTLTLFEDREMIEERLKTYAHLFDDKVMKQLKRRRYTGWGRLSRKLINGIRDKQSGKTILDFLKSDGFANRNFMQLIHDDSLTFKEDIQKAQVSGQGDSLHEHIANLAGSPAIKKGILQTVKVVDELVKVMGRHKPENIVIEMARENQTTQKGQKNSRERMKRIEEGIKELGSQILKEHPVENTQLQNEKLYLYYLQNGRDMYVDQELDINRLSDYDVDHIVPQSFLKDDSIDNKVLTRSDKARGKSDNVPSEEVVKKMKNYWRQLLNAKLITQRKFDNLTKAERGGLSELDKAGFIKRQLVETRQITKHVAQILDSRMNTKYDENDKLIREVKVITLKSKLVSDFRKDFQFYKVREINNYHHAHDAYLNAVVGTALIKKYPKLESEFVYGDYKVYDVRKMIAKSEQEIGKATAKYFFYSNIMNFFKTEITLANGEIRKRPLIETNGETGEIVWDKGRDFATVRKVLSMPQVNIVKKTEVQTGGFSKESILPKRNSDKLIARKKDWDPKKYGGFDSPTVAYSVLVVAKVEKGKSKKLKSVKELLGITIMERSSFEKNPIDFLEAKGYKEVKKDLIIKLPKYSLFELENGRKRMLASAGELQKGNELALPSKYVNFLYLASHYEKLKGSPEDNEQKQLFVEQHKHYLDEIIEQISEFSKRVILADANLDKVLSAYNKHRDKPIREQAENIIHLFTLTNLGAPAAFKYFDTTIDRKRYTSTKEVLDATLIHQSITGLYETRIDLSQLGGDGGEAAAKPAPGGGGGMDPLQLLQPLEAEIKGTKLKAHWNSGATITCVPQAFLEEEVPIKNIWIKTIHGEKEQPVYYLTFKIQGRKVEAEVISSPYDYILVSPSDIPWLMKKPLQLTTLVPLQEYEERLLKQTMLTGSYKEKLQSLFLKYDALWQHWENQVGHRRIKPHHIATGTVNPRPQKQYPINPKAKASIQTVINDLLKQGVLIQQNSIMNTPVYPVPKPDGKWRMVLDYREVNKTIPLIAAQNQHSAGILSSIFRGKYKTTLDLSNGFWAHSITPESYWLTAFTWLGQQYCWTRLPQGFLNSPALFTADVVDLLKEVPNVQVYVDDIYISHDDPREHLEQLEKVFSLLLNAGYVVSLKKSEIAQHEVEFLGFNITKEGRGLTETFKQKLLNITPPRDLKQLQSILGLLNFARNFIPNFSELVKPLYNIIATANGKYITWTTDNSQQLQNIISMLNSAENLEERNPEVRLIMKVNTSPSAGYIRFYNEFAKRPIMYLNYVYTKAEVKFTNTEKLLTTIHKGLIKALDLGMGQEILVYSPIVSMTKIQKTPLPERKALPIRWITWMSYLEDPRIQFHYDKTLPELQQVPTVTDDIIAKIKHPSEFSMVFYTDGSAIKHPNVNKSHNAGMGIAQVQFKPEFTVINTWSIPLGDHTAQLAEVAAVEFACKKALKIDGPVLIVTDSFYVAESVNKELPYWQSNGFFNNKKKPLKHVSKWKSIADCIQLKPDIIIIHEKGHQPTASTFHTEGNNLADKLATQGSYVVNAGKRTADGSEFEKRTADGSEFESPKKKAKVE

SEQ ID NO: 7518 - protein, 2087 aa, synthetic construct
MPAAKRVKLDGGDKKYSIGLDIGTNSVGWAVITDEYKVPSKKFKVLGNTDRHSIKKNLIGALLFDSGETAEATRLKRTARRRYTRRKNRICYLQEIFSNEMAKVDDSFFHRLEESFLVEEDKKHERHPIFGNIVDEVAYHEKYPTIYHLRKKLVDSTDKADLRLIYLALAHMIKFRGHFLIEGDLNPDNSDVDKLFIQLVQTYNQLFEENPINASGVDAKAILSARLSKSRRLENLIAQLPGEKKNGLFGNLIALSLGLTPNFKSNFDLAEDAKLQLSKDTYDDDLDNLLAQIGDQYADLFLAAKNLSDAILLSDILRVNTEITKAPLSASMIKRYDEHHQDLTLLKALVRQQLPEKYKEIFFDQSKNGYAGYIDGGASQEEFYKFIKPILEKMDGTEELLVKLNREDLLRKQRTFDNGSIPHQIHLGELHAILRRQEDFYPFLKDNREKIEKILTFRIPYYVGPLARGNSRFAWMTRKSEETITPWNFEEVVDKGASAQSFIERMTNFDKNLPNEKVLPKHSLLYEYFTVYNELTKVKYVTEGMRKPAFLSGEQKKAIVDLLFKTNRKVTVKQLKEDYFKKIECFDSVEISGVEDRFNASLGTYHDLLKIIKDKDFLDNEENEDILEDIVLTLTLFEDREMIEERLKTYAHLFDDKVMKQLKRRRYTGWGRLSRKLINGIRDKQSGKTILDFLKSDGFANRNFMQLIHDDSLTFKEDIQKAQVSGQGDSLHEHIANLAGSPAIKKGILQTVKVVDELVKVMGRHKPENIVIEMARENQTTQKGQKNSRERMKRIEEGIKELGSQILKEHPVENTQLQNEKLYLYYLQNGRDMYVDQELDINRLSDYDVDHIVPQSFLKDDSIDNKVLTRSDKARGKSDNVPSEEVVKKMKNYWRQLLNAKLITQRKFDNLTKAERGGLSELDKAGFIKRQLVETRQITKHVAQILDSRMNTKYDENDKLIREVKVITLKSKLVSDFRKDFQFYKVREINNYHHAHDAYLNAVVGTALIKKYPKLESEFVYGDYKVYDVRKMIAKSEQEIGKATAKYFFYSNIMNFFKTEITLANGEIRKRPLIETNGETGEIVWDKGRDFATVRKVLSMPQVNIVKKTEVQTGGFSKESILPKRNSDKLIARKKDWDPKKYGGFDSPTVAYSVLVVAKVEKGKSKKLKSVKELLGITIMERSSFEKNPIDFLEAKGYKEVKKDLIIKLPKYSLFELENGRKRMLASAGELQKGNELALPSKYVNFLYLASHYEKLKGSPEDNEQKQLFVEQHKHYLDEIIEQISEFSKRVILADANLDKVLSAYNKHRDKPIREQAENIIHLFTLTNLGAPAAFKYFDTTIDRKRYTSTKEVLDATLIHQSITGLYETRIDLSQLGGDGGEAAAKPAPGGGGGIPWLMKKPLQLTTLVPLQEYEERLLKQTMLTGSYKEKLQSLFLKYDALWQHWENQVGHRRIKPHHIATGTVNPRPQKQYPINPKAKASIQTVINDLLKQGVLIQQNSIMNTPVYPVPKPDGKWRMVLDYREVNKTIPLIAAQNQHSAGILSSIFRGKYKTTLDLSNGFWAHSITPESYWLTAFTWLGQQYCWTRLPQGFLNSPALFNADVVDLLKEVPNVQVYVDDIYISHDDPREHLEQLEKVFSLLLNAGYVVSLKKSEIAQHEVEFLGFNITKEGRGLTETFKQKLLNITPPRDLKQLQSILGLLNFARNFIPNFSELVKPLYNIIATAPGKYITWTTDNSQQLQNIISMLNSAENLEERNPEVRLIMKVNTSPSAGYIRFYNEFAKRPIMYLNYVYTKAEVKFTNTEKLLTTIHKGLIKALDLGMGQEILVYSPIVSMTKIQKTPLPERKALPIRWITWMSYLEDPRIQFHYDKTLPELQQVPTVTDDIIAKIKHPSEFSMVFYTDGSAIKHPNVNKSHNAGMGIAQVQFKPEFTVINTWSIPLGDHTAQLAEVAAVEFACKKALKIDGPVLIVTDSFYVAESVNKELPYWQSNGFFNNKKKPLKHVSKWKSIADCIQLKPDIIIIHEKGHQPTASTFHTEGNNLADKLATQGSYVVNAGKRTADGSEFEKRTADGSEFESPKKKAKVE

SEQ ID NO: 7519 - protein, 2176 aa, synthetic construct
MPAAKRVKLDGGDKKYSIGLDIGTNSVGWAVITDEYKVPSKKFKVLGNTDRHSIKKNLIGALLFDSGETAEATRLKRTARRRYTRRKNRICYLQEIFSNEMAKVDDSFFHRLEESFLVEEDKKHERHPIFGNIVDEVAYHEKYPTIYHLRKKLVDSTDKADLRLIYLALAHMIKFRGHFLIEGDLNPDNSDVDKLFIQLVQTYNQLFEENPINASGVDAKAILSARLSKSRRLENLIAQLPGEKKNGLFGNLIALSLGLTPNFKSNFDLAEDAKLQLSKDTYDDDLDNLLAQIGDQYADLFLAAKNLSDAILLSDILRVNTEITKAPLSASMIKRYDEHHQDLTLLKALVRQQLPEKYKEIFFDQSKNGYAGYIDGGASQEEFYKFIKPILEKMDGTEELLVKLNREDLLRKQRTFDNGSIPHQIHLGELHAILRRQEDFYPFLKDNREKIEKILTFRIPYYVGPLARGNSRFAWMTRKSEETITPWNFEEVVDKGASAQSFIERMTNFDKNLPNEKVLPKHSLLYEYFTVYNELTKVKYVTEGMRKPAFLSGEQKKAIVDLLFKTNRKVTVKQLKEDYFKKIECFDSVEISGVEDRFNASLGTYHDLLKIIKDKDFLDNEENEDILEDIVLTLTLFEDREMIEERLKTYAHLFDDKVMKQLKRRRYTGWGRLSRKLINGIRDKQSGKTILDFLKSDGFANRNFMQLIHDDSLTFKEDIQKAQVSGQGDSLHEHIANLAGSPAIKKGILQTVKVVDELVKVMGRHKPENIVIEMARENQTTQKGQKNSRERMKRIEEGIKELGSQILKEHPVENTQLQNEKLYLYYLQNGRDMYVDQELDINRLSDYDVDHIVPQSFLKDDSIDNKVLTRSDKARGKSDNVPSEEVVKKMKNYWRQLLNAKLITQRKFDNLTKAERGGLSELDKAGFIKRQLVETRQITKHVAQILDSRMNTKYDENDKLIREVKVITLKSKLVSDFRKDFQFYKVREINNYHHAHDAYLNAVVGTALIKKYPKLESEFVYGDYKVYDVRKMIAKSEQEIGKATAKYFFYSNIMNFFKTEITLANGEIRKRPLIETNGETGEIVWDKGRDFATVRKVLSMPQVNIVKKTEVQTGGFSKESILPKRNSDKLIARKKDWDPKKYGGFDSPTVAYSVLVVAKVEKGKSKKLKSVKELLGITIMERSSFEKNPIDFLEAKGYKEVKKDLIIKLPKYSLFELENGRKRMLASAGELQKGNELALPSKYVNFLYLASHYEKLKGSPEDNEQKQLFVEQHKHYLDEIIEQISEFSKRVILADANLDKVLSAYNKHRDKPIREQAENIIHLFTLTNLGAPAAFKYFDTTIDRKRYTSTKEVLDATLIHQSITGLYETRIDLSQLGGDGGEAAAKPAPGGGGGMDPLQLLQPLEAEIKGTKLKAHWNSGATITCVPQAFLEEEVPIKNIWIKTIHGEKEQPVYYLTFKIQGRKVEAEVISSPYDYILVSPSDIPWLMKKPLQLTTLVPLQEYEERLLKQTMLTGSYKEKLQSLFLKYDALWQHWENQVGHRRIKPHHIATGTVNPRPQKQYPINPKAKASIQTVINDLLKQGVLIQQNSIMNTPVYPVPKPDGKWRMVLDYREVNKTIPLIAAQNQHSAGILSSIFRGKYKTTLDLSNGFWAHSITPESYWLTAFTWLGQQYCWTRLPQGFLNSPALFNADVVDLLKEVPNVQVYVDDIYISHDDPREHLEQLEKVFSLLLNAGYVVSLKKSEIAQHEVEFLGFNITKEGRGLTETFKQKLLNITPPRDLKQLQSILGLLNFARNFIPNFSELVKPLYNIIATAPGKYITWTTDNSQQLQNIISMLNSAENLEERNPEVRLIMKVNTSPSAGYIRFYNEFAKRPIMYLNYVYTKAEVKFTNTEKLLTTIHKGLIKALDLGMGQEILVYSPIVSMTKIQKTPLPERKALPIRWITWMSYLEDPRIQFHYDKTLPELQQVPTVTDDIIAKIKHPSEFSMVFYTDGSAIKHPNVNKSHNAGMGIAQVQFKPEFTVINTWSIPLGDHTAQLAEVAAVEFACKKALKIDGPVLIVTDSFYVAESVNKELPYWQSNGFFNNKKKPLKHVSKWKSIADCIQLKPDIIIIHEKGHQPTASTFHTEGNNLADKLATQGSYVVNAGKRTADGSEFEKRTADGSEFESPKKKAKVE

SEQ ID NO: 7520 - protein, 2017 aa, synthetic construct
MPAAKRVKLDGGDKKYSIGLDIGTNSVGWAVITDEYKVPSKKFKVLGNTDRHSIKKNLIGALLFDSGETAEATRLKRTARRRYTRRKNRICYLQEIFSNEMAKVDDSFFHRLEESFLVEEDKKHERHPIFGNIVDEVAYHEKYPTIYHLRKKLVDSTDKADLRLIYLALAHMIKFRGHFLIEGDLNPDNSDVDKLFIQLVQTYNQLFEENPINASGVDAKAILSARLSKSRRLENLIAQLPGEKKNGLFGNLIALSLGLTPNFKSNFDLAEDAKLQLSKDTYDDDLDNLLAQIGDQYADLFLAAKNLSDAILLSDILRVNTEITKAPLSASMIKRYDEHHQDLTLLKALVRQQLPEKYKEIFFDQSKNGYAGYIDGGASQEEFYKFIKPILEKMDGTEELLVKLNREDLLRKQRTFDNGSIPHQIHLGELHAILRRQEDFYPFLKDNREKIEKILTFRIPYYVGPLARGNSRFAWMTRKSEETITPWNFEEVVDKGASAQSFIERMTNFDKNLPNEKVLPKHSLLYEYFTVYNELTKVKYVTEGMRKPAFLSGEQKKAIVDLLFKTNRKVTVKQLKEDYFKKIECFDSVEISGVEDRFNASLGTYHDLLKIIKDKDFLDNEENEDILEDIVLTLTLFEDREMIEERLKTYAHLFDDKVMKQLKRRRYTGWGRLSRKLINGIRDKQSGKTILDFLKSDGFANRNFMQLIHDDSLTFKEDIQKAQVSGQGDSLHEHIANLAGSPAIKKGILQTVKVVDELVKVMGRHKPENIVIEMARENQTTQKGQKNSRERMKRIEEGIKELGSQILKEHPVENTQLQNEKLYLYYLQNGRDMYVDQELDINRLSDYDVDHIVPQSFLKDDSIDNKVLTRSDKARGKSDNVPSEEVVKKMKNYWRQLLNAKLITQRKFDNLTKAERGGLSELDKAGFIKRQLVETRQITKHVAQILDSRMNTKYDENDKLIREVKVITLKSKLVSDFRKDFQFYKVREINNYHHAHDAYLNAVVGTALIKKYPKLESEFVYGDYKVYDVRKMIAKSEQEIGKATAKYFFYSNIMNFFKTEITLANGEIRKRPLIETNGETGEIVWDKGRDFATVRKVLSMPQVNIVKKTEVQTGGFSKESILPKRNSDKLIARKKDWDPKKYGGFDSPTVAYSVLVVAKVEKGKSKKLKSVKELLGITIMERSSFEKNPIDFLEAKGYKEVKKDLIIKLPKYSLFELENGRKRMLASAGELQKGNELALPSKYVNFLYLASHYEKLKGSPEDNEQKQLFVEQHKHYLDEIIEQISEFSKRVILADANLDKVLSAYNKHRDKPIREQAENIIHLFTLTNLGAPAAFKYFDTTIDRKRYTSTKEVLDATLIHQSITGLYETRIDLSQLGGDGGEAAAKPAPGGGGGPRSRAIDIPVPHADKISWKITDPVWVDQWPLTYEKTLAAIALVQEQLAAGHIEPTNSPWNTPIFIIKKKSGSWRLLQDLRAVNKVMVPMGALQPGLPSPVAPPLNYHKIVIDLKDCFFTIPLHPEDRPYFAFSVPQINFQSPMPRYQWKVLPQGMANSPTLCQKFVAAAIAPVRSQWPEAYILHYMDDILLACDSAEAAKACYAHIISCLTSYGLKIAPDKVQVSEPFSYLGFELHHQQVFTPRVCLKTDHLKTLNDFQKLLGDIQWLRPYLKLPTSALVPLNNILKPDPNPLSVRALTPEAKQSLALINKAIQNQSVQQISYNLPLVLLLLPTPHTPTAVFWQPNGTDPTKNGSPLLWLHLPASPSKVLLTYPSLLAMLIIKGRYTGRQLFGRDPHSIIIPYTQDQLTWLLQTSDEWAIALSSFTGDIDNHYPSDPVIQFAKLHQFIFPKITKCAPIPQATLVFTDGSSNGIAAYVIDNQPISIKSPYLSAQLVELYAILQVFTVLAHQPFNLYTDSAYIAQSVPLLETVPFIKSSTNATPLFSKLQQLILNRQHPFFIGHLRAHLNLPGPLAEGNALADAATQIFPIISDAGKRTADGSEFEKRTADGSEFESPKKKAKVE

SEQ ID NO: 7521 - protein, 2094 aa, synthetic construct
MPAAKRVKLDGGDKKYSIGLDIGTNSVGWAVITDEYKVPSKKFKVLGNTDRHSIKKNLIGALLFDSGETAEATRLKRTARRRYTRRKNRICYLQEIFSNEMAKVDDSFFHRLEESFLVEEDKKHERHPIFGNIVDEVAYHEKYPTIYHLRKKLVDSTDKADLRLIYLALAHMIKFRGHFLIEGDLNPDNSDVDKLFIQLVQTYNQLFEENPINASGVDAKAILSARLSKSRRLENLIAQLPGEKKNGLFGNLIALSLGLTPNFKSNFDLAEDAKLQLSKDTYDDDLDNLLAQIGDQYADLFLAAKNLSDAILLSDILRVNTEITKAPLSASMIKRYDEHHQDLTLLKALVRQQLPEKYKEIFFDQSKNGYAGYIDGGASQEEFYKFIKPILEKMDGTEELLVKLNREDLLRKQRTFDNGSIPHQIHLGELHAILRRQEDFYPFLKDNREKIEKILTFRIPYYVGPLARGNSRFAWMTRKSEETITPWNFEEVVDKGASAQSFIERMTNFDKNLPNEKVLPKHSLLYEYFTVYNELTKVKYVTEGMRKPAFLSGEQKKAIVDLLFKTNRKVTVKQLKEDYFKKIECFDSVEISGVEDRFNASLGTYHDLLKIIKDKDFLDNEENEDILEDIVLTLTLFEDREMIEERLKTYAHLFDDKVMKQLKRRRYTGWGRLSRKLINGIRDKQSGKTILDFLKSDGFANRNFMQLIHDDSLTFKEDIQKAQVSGQGDSLHEHIANLAGSPAIKKGILQTVKVVDELVKVMGRHKPENIVIEMARENQTTQKGQKNSRERMKRIEEGIKELGSQILKEHPVENTQLQNEKLYLYYLQNGRDMYVDQELDINRLSDYDVDHIVPQSFLKDDSIDNKVLTRSDKARGKSDNVPSEEVVKKMKNYWRQLLNAKLITQRKFDNLTKAERGGLSELDKAGFIKRQLVETRQITKHVAQILDSRMNTKYDENDKLIREVKVITLKSKLVSDFRKDFQFYKVREINNYHHAHDAYLNAVVGTALIKKYPKLESEFVYGDYKVYDVRKMIAKSEQEIGKATAKYFFYSNIMNFFKTEITLANGEIRKRPLIETNGETGEIVWDKGRDFATVRKVLSMPQVNIVKKTEVQTGGFSKESILPKRNSDKLIARKKDWDPKKYGGFDSPTVAYSVLVVAKVEKGKSKKLKSVKELLGITIMERSSFEKNPIDFLEAKGYKEVKKDLIIKLPKYSLFELENGRKRMLASAGELQKGNELALPSKYVNFLYLASHYEKLKGSPEDNEQKQLFVEQHKHYLDEIIEQISEFSKRVILADANLDKVLSAYNKHRDKPIREQAENIIHLFTLTNLGAPAAFKYFDTTIDRKRYTSTKEVLDATLIHQSITGLYETRIDLSQLGGDGGEAAAKPAPGGGGGVLNLEEEYRLHEKPVPSSIDPSWLQLFPTVWAERAGMGLANQVPPVVVELRSGASPVAVRQYPMSKEAREGIRPHIQRFLDLGVLVPCQSPWNTPLLPVKKPGTNDYRPVQDLREINKRVQDIHPTVPNPYNLLSSLPPSHTWYSVLDLKDAFFCLKLHPNSQPLFAFEWRDPEKGNTGQLTWTRLPQGFKNSPTLFNEALHRDLAPFRALNPQVVLLQYVDDLLVAAPTYRDCKEGTQKLLQELSKLGYRVSAKKAQLCQKEVTYLGYLLKEGKRWLTPARKATVMKIPPPTTPRQVREFLGKAGFCRLFIPGFASLAAPLYPLTKPSIPFIWTEEHQKAFDRIKEALLSAPALALPDLTKPFTLYVDERAGVARGVLTQTLGPWRRPVAYLSKKLDPVASGWPTCLKAVAAVALLLKDADKLTLGQNVTVIASHSLESIVRQPPDRWMTNARMTHYQSLLLNERVSFAPPAVLNPATLLPVESEATPVHRCSEILAEETGTRRDLKDQPLPGVPAWYTDGSSFIAEGKRRAGAAIVDGKRTVWASSLPEGTSAQKAELVALTQALRLAEGKDINIYTDSRYAFATAHIHGAIYKQRGWLTSAGKDIKNKEEILALLEAIHLPKRVAIIHCPGHQKGNDPVATGNRRADEAAKQAALSTRVLAETTKPAGKRTADGSEFEKRTADGSEFESPKKKAKVE

SEQ ID NO: 7522 - protein, 2096 aa, synthetic construct
MPAAKRVKLDGGDKKYSIGLDIGTNSVGWAVITDEYKVPSKKFKVLGNTDRHSIKKNLIGALLFDSGETAEATRLKRTARRRYTRRKNRICYLQEIFSNEMAKVDDSFFHRLEESFLVEEDKKHERHPIFGNIVDEVAYHEKYPTIYHLRKKLVDSTDKADLRLIYLALAHMIKFRGHFLIEGDLNPDNSDVDKLFIQLVQTYNQLFEENPINASGVDAKAILSARLSKSRRLENLIAQLPGEKKNGLFGNLIALSLGLTPNFKSNFDLAEDAKLQLSKDTYDDDLDNLLAQIGDQYADLFLAAKNLSDAILLSDILRVNTEITKAPLSASMIKRYDEHHQDLTLLKALVRQQLPEKYKEIFFDQSKNGYAGYIDGGASQEEFYKFIKPILEKMDGTEELLVKLNREDLLRKQRTFDNGSIPHQIHLGELHAILRRQEDFYPFLKDNREKIEKILTFRIPYYVGPLARGNSRFAWMTRKSEETITPWNFEEVVDKGASAQSFIERMTNFDKNLPNEKVLPKHSLLYEYFTVYNELTKVKYVTEGMRKPAFLSGEQKKAIVDLLFKTNRKVTVKQLKEDYFKKIECFDSVEISGVEDRFNASLGTYHDLLKIIKDKDFLDNEENEDILEDIVLTLTLFEDREMIEERLKTYAHLFDDKVMKQLKRRRYTGWGRLSRKLINGIRDKQSGKTILDFLKSDGFANRNFMQLIHDDSLTFKEDIQKAQVSGQGDSLHEHIANLAGSPAIKKGILQTVKVVDELVKVMGRHKPENIVIEMARENQTTQKGQKNSRERMKRIEEGIKELGSQILKEHPVENTQLQNEKLYLYYLQNGRDMYVDQELDINRLSDYDVDHIVPQSFLKDDSIDNKVLTRSDKARGKSDNVPSEEVVKKMKNYWRQLLNAKLITQRKFDNLTKAERGGLSELDKAGFIKRQLVETRQITKHVAQILDSRMNTKYDENDKLIREVKVITLKSKLVSDFRKDFQFYKVREINNYHHAHDAYLNAVVGTALIKKYPKLESEFVYGDYKVYDVRKMIAKSEQEIGKATAKYFFYSNIMNFFKTEITLANGEIRKRPLIETNGETGEIVWDKGRDFATVRKVLSMPQVNIVKKTEVQTGGFSKESILPKRNSDKLIARKKDWDPKKYGGFDSPTVAYSVLVVAKVEKGKSKKLKSVKELLGITIMERSSFEKNPIDFLEAKGYKEVKKDLIIKLPKYSLFELENGRKRMLASAGELQKGNELALPSKYVNFLYLASHYEKLKGSPEDNEQKQLFVEQHKHYLDEIIEQISEFSKRVILADANLDKVLSAYNKHRDKPIREQAENIIHLFTLTNLGAPAAFKYFDTTIDRKRYTSTKEVLDATLIHQSITGLYETRIDLSQLGGDGGEAAAKPAPGGGGGTLNIEDEYRLHETSKEPDVPLGSTWLSDFPQAWAETGGMGLAVRQAPLIIPLKATSTPVSIKQYPMSQEARLGIKPHIQRLLDQGILVPCQSPWNTPLLPVKKPGTNDYRPVQDLREVNKRVEDIHPTVPNPYNLLSGLPPSHQWYTVLDLKDAFFCLRLHPTSQPLFAFEWRDPEMGISGQLTWTRLPQGFKNSPTLFNEALHRDLADFRIQHPDLILLQYVDDLLLAATSEQDCQRGTRALLQTLGNLGYRASAKKAQICQKQVKYLGYLLKEGQRWLTEARKETVMGQPTPKTPRQLREFLGTAGFCRLWIPGFAEMAAPLYPLTKPGTLFNWGPDQQKAYQEIKQALLTAPALGLPDLTKPFELFVDEKQGYAKGVLTQKLGPWRRPVAYLSKKLDPVAAGWPPCLRMVAAIAVLTKDAGKLTMGQPLVILAPHAVEALVKQPPDRWLSNARMTHYQAMLLDTDRVQFGPVVALNPATLLPLPEKEAPHDCLEILAETHGTRPDLTDQPIPDADYTWYTDGSSFLQEGQRRAGAAVTTETEVIWARALPAGTSAQRAELIALTQALKMAEGKKLNVYTDSRYAFATAHVHGEIYRRRGWLTSEGREIKNKNEILALLKALFLPKRLSIIHCPGHQKGNSAEARGNRMADQAAREAAMKAVLETSTLLAGKRTADGSEFEKRTADGSEFESPKKKAKVE

SEQ ID NO: 7523 - protein, 2096 aa, synthetic construct
MPAAKRVKLDGGDKKYSIGLDIGTNSVGWAVITDEYKVPSKKFKVLGNTDRHSIKKNLIGALLFDSGETAEATRLKRTARRRYTRRKNRICYLQEIFSNEMAKVDDSFFHRLEESFLVEEDKKHERHPIFGNIVDEVAYHEKYPTIYHLRKKLVDSTDKADLRLIYLALAHMIKFRGHFLIEGDLNPDNSDVDKLFIQLVQTYNQLFEENPINASGVDAKAILSARLSKSRRLENLIAQLPGEKKNGLFGNLIALSLGLTPNFKSNFDLAEDAKLQLSKDTYDDDLDNLLAQIGDQYADLFLAAKNLSDAILLSDILRVNTEITKAPLSASMIKRYDEHHQDLTLLKALVRQQLPEKYKEIFFDQSKNGYAGYIDGGASQEEFYKFIKPILEKMDGTEELLVKLNREDLLRKQRTFDNGSIPHQIHLGELHAILRRQEDFYPFLKDNREKIEKILTFRIPYYVGPLARGNSRFAWMTRKSEETITPWNFEEVVDKGASAQSFIERMTNFDKNLPNEKVLPKHSLLYEYFTVYNELTKVKYVTEGMRKPAFLSGEQKKAIVDLLFKTNRKVTVKQLKEDYFKKIECFDSVEISGVEDRFNASLGTYHDLLKIIKDKDFLDNEENEDILEDIVLTLTLFEDREMIEERLKTYAHLFDDKVMKQLKRRRYTGWGRLSRKLINGIRDKQSGKTILDFLKSDGFANRNFMQLIHDDSLTFKEDIQKAQVSGQGDSLHEHIANLAGSPAIKKGILQTVKVVDELVKVMGRHKPENIVIEMARENQTTQKGQKNSRERMKRIEEGIKELGSQILKEHPVENTQLQNEKLYLYYLQNGRDMYVDQELDINRLSDYDVDHIVPQSFLKDDSIDNKVLTRSDKARGKSDNVPSEEVVKKMKNYWRQLLNAKLITQRKFDNLTKAERGGLSELDKAGFIKRQLVETRQITKHVAQILDSRMNTKYDENDKLIREVKVITLKSKLVSDFRKDFQFYKVREINNYHHAHDAYLNAVVGTALIKKYPKLESEFVYGDYKVYDVRKMIAKSEQEIGKATAKYFFYSNIMNFFKTEITLANGEIRKRPLIETNGETGEIVWDKGRDFATVRKVLSMPQVNIVKKTEVQTGGFSKESILPKRNSDKLIARKKDWDPKKYGGFDSPTVAYSVLVVAKVEKGKSKKLKSVKELLGITIMERSSFEKNPIDFLEAKGYKEVKKDLIIKLPKYSLFELENGRKRMLASAGELQKGNELALPSKYVNFLYLASHYEKLKGSPEDNEQKQLFVEQHKHYLDEIIEQISEFSKRVILADANLDKVLSAYNKHRDKPIREQAENIIHLFTLTNLGAPAAFKYFDTTIDRKRYTSTKEVLDATLIHQSITGLYETRIDLSQLGGDGGEAAAKPAPGGGGGTLNIEDEYRLHETSKEPDVPLGSTWLSDFPQAWAETGGMGLAVRQAPLIIPLKATSTPVSIKQYPMSQEARLGIKPHIQRLLDQGILVPCQSPWNTPLLPVKKPGTNDYRPVQDLREVNKRVEDIHPTVPNPYNLLSGLPPSHQWYTVLDLKDAFFCLRLHPTSQPLFAFEWRDPEMGISGQLTWTRLPQGFKNSPTLFNEALHRDLADFRIQHPDLILLQYVDDLLLAATSEQDCQRGTRALLQTLGNLGYRASAKKAQICQKQVKYLGYLLKEGQRWLTEARKETVMGQPTPKTPRQLREFLGKAGFCRLFIPGFAEMAAPLYPLTKPGTLFNWGPDQQKAYQEIKQALLTAPALGLPDLTKPFELFVDEKQGYAKGVLTQKLGPWRRPVAYLSKKLDPVAAGWPPCLRMVAAIAVLTKDAGKLTMGQPLVILAPHAVEALVKQPPDRWLSNARMTHYQAMLLDTDRVQFGPVVALNPATLLPLPEKEAPHDCLEILAETHGTRPDLTDQPIPDADYTWYTDGSSFLQEGQRRAGAAVTTETEVIWARALPAGTSAQRAELIALTQALKMAEGKKLNVYTDSRYAFATAHVHGEIYRRRGWLTSEGREIKNKNEILALLKALFLPKRLSIIHCPGHQKGNSAEARGNRMADQAAREAAMKAVLETSTLLAGKRTADGSEFEKRTADGSEFESPKKKAKVE

SEQ ID NO: 7524 - protein, 2098 aa, synthetic construct
MPAAKRVKLDGGDKKYSIGLDIGTNSVGWAVITDEYKVPSKKFKVLGNTDRHSIKKNLIGALLFDSGETAEATRLKRTARRRYTRRKNRICYLQEIFSNEMAKVDDSFFHRLEESFLVEEDKKHERHPIFGNIVDEVAYHEKYPTIYHLRKKLVDSTDKADLRLIYLALAHMIKFRGHFLIEGDLNPDNSDVDKLFIQLVQTYNQLFEENPINASGVDAKAILSARLSKSRRLENLIAQLPGEKKNGLFGNLIALSLGLTPNFKSNFDLAEDAKLQLSKDTYDDDLDNLLAQIGDQYADLFLAAKNLSDAILLSDILRVNTEITKAPLSASMIKRYDEHHQDLTLLKALVRQQLPEKYKEIFFDQSKNGYAGYIDGGASQEEFYKFIKPILEKMDGTEELLVKLNREDLLRKQRTFDNGSIPHQIHLGELHAILRRQEDFYPFLKDNREKIEKILTFRIPYYVGPLARGNSRFAWMTRKSEETITPWNFEEVVDKGASAQSFIERMTNFDKNLPNEKVLPKHSLLYEYFTVYNELTKVKYVTEGMRKPAFLSGEQKKAIVDLLFKTNRKVTVKQLKEDYFKKIECFDSVEISGVEDRFNASLGTYHDLLKIIKDKDFLDNEENEDILEDIVLTLTLFEDREMIEERLKTYAHLFDDKVMKQLKRRRYTGWGRLSRKLINGIRDKQSGKTILDFLKSDGFANRNFMQLIHDDSLTFKEDIQKAQVSGQGDSLHEHIANLAGSPAIKKGILQTVKVVDELVKVMGRHKPENIVIEMARENQTTQKGQKNSRERMKRIEEGIKELGSQILKEHPVENTQLQNEKLYLYYLQNGRDMYVDQELDINRLSDYDVDHIVPQSFLKDDSIDNKVLTRSDKARGKSDNVPSEEVVKKMKNYWRQLLNAKLITQRKFDNLTKAERGGLSELDKAGFIKRQLVETRQITKHVAQILDSRMNTKYDENDKLIREVKVITLKSKLVSDFRKDFQFYKVREINNYHHAHDAYLNAVVGTALIKKYPKLESEFVYGDYKVYDVRKMIAKSEQEIGKATAKYFFYSNIMNFFKTEITLANGEIRKRPLIETNGETGEIVWDKGRDFATVRKVLSMPQVNIVKKTEVQTGGFSKESILPKRNSDKLIARKKDWDPKKYGGFDSPTVAYSVLVVAKVEKGKSKKLKSVKELLGITIMERSSFEKNPIDFLEAKGYKEVKKDLIIKLPKYSLFELENGRKRMLASAGELQKGNELALPSKYVNFLYLASHYEKLKGSPEDNEQKQLFVEQHKHYLDEIIEQISEFSKRVILADANLDKVLSAYNKHRDKPIREQAENIIHLFTLTNLGAPAAFKYFDTTIDRKRYTSTKEVLDATLIHQSITGLYETRIDLSQLGGDGGPAPGGGEAAAKGGTAPLEEEYRLFLEAPIQNVTLLEQWKREIPKVWAEINPPGLASTQAPIHVQLLSTALPVRVRQYPITLEAKRSLRETIRKFRAAGILRPVHSPWNTPLLPVRKSGTSEYRMVQDLREVNKRVETIHPTVPNPYTLLSLLPPDRIWYSVLDLKDAFFCIPLAPESQLIFAFEWADAEEGESGQLTWTRLPQGFKNSPTLFDEALNRDLQGFRLDHPSVSLLQYVDDLLIAADTQAACLSATRDLLMTLAELGYRVSGKKAQLCQEEVTYLGFKIHKGSRSLSNSRTQAILQIPVPKTKRQVREFLGTIGYCRLWIPGFAELAQPLYAATRGGNDPLVWGEKEEEAFQSLKLALTQPPALALPSLDKPFQLFVEETSGAAKGVLTQALGPWKRPVAYLSKRLDPVAAGWPRCLRAIAAAALLTREASKLTFGQDIEITSSHNLESLLRSPPDKWLTNARITQYQVLLLDPPRVRFKQTAALNPATLLPETDDTLPIHHCLDTLDSLTSTRPDLTDQPLAQAEATLFTDGSSYIRDGKRYAGAAVVTLDSVIWAEPLPIGTSAQKAELIALTKALEWSKDKSVNIYTDSRYAFATLHVHGMIYRERGLLTAGGKAIKNAPEILALLTAVWLPKRVAVMHCKGHQKDDAPTSTGNRRADEVAREVAIRPLSTQATISAGKRTADGSEFEKRTADGSEFESPKKKAKVE

SEQ ID NO: 7525 - protein, 2098 aa, synthetic construct
MPAAKRVKLDGGDKKYSIGLDIGTNSVGWAVITDEYKVPSKKFKVLGNTDRHSIKKNLIGALLFDSGETAEATRLKRTARRRYTRRKNRICYLQEIFSNEMAKVDDSFFHRLEESFLVEEDKKHERHPIFGNIVDEVAYHEKYPTIYHLRKKLVDSTDKADLRLIYLALAHMIKFRGHFLIEGDLNPDNSDVDKLFIQLVQTYNQLFEENPINASGVDAKAILSARLSKSRRLENLIAQLPGEKKNGLFGNLIALSLGLTPNFKSNFDLAEDAKLQLSKDTYDDDLDNLLAQIGDQYADLFLAAKNLSDAILLSDILRVNTEITKAPLSASMIKRYDEHHQDLTLLKALVRQQLPEKYKEIFFDQSKNGYAGYIDGGASQEEFYKFIKPILEKMDGTEELLVKLNREDLLRKQRTFDNGSIPHQIHLGELHAILRRQEDFYPFLKDNREKIEKILTFRIPYYVGPLARGNSRFAWMTRKSEETITPWNFEEVVDKGASAQSFIERMTNFDKNLPNEKVLPKHSLLYEYFTVYNELTKVKYVTEGMRKPAFLSGEQKKAIVDLLFKTNRKVTVKQLKEDYFKKIECFDSVEISGVEDRFNASLGTYHDLLKIIKDKDFLDNEENEDILEDIVLTLTLFEDREMIEERLKTYAHLFDDKVMKQLKRRRYTGWGRLSRKLINGIRDKQSGKTILDFLKSDGFANRNFMQLIHDDSLTFKEDIQKAQVSGQGDSLHEHIANLAGSPAIKKGILQTVKVVDELVKVMGRHKPENIVIEMARENQTTQKGQKNSRERMKRIEEGIKELGSQILKEHPVENTQLQNEKLYLYYLQNGRDMYVDQELDINRLSDYDVDHIVPQSFLKDDSIDNKVLTRSDKARGKSDNVPSEEVVKKMKNYWRQLLNAKLITQRKFDNLTKAERGGLSELDKAGFIKRQLVETRQITKHVAQILDSRMNTKYDENDKLIREVKVITLKSKLVSDFRKDFQFYKVREINNYHHAHDAYLNAVVGTALIKKYPKLESEFVYGDYKVYDVRKMIAKSEQEIGKATAKYFFYSNIMNFFKTEITLANGEIRKRPLIETNGETGEIVWDKGRDFATVRKVLSMPQVNIVKKTEVQTGGFSKESILPKRNSDKLIARKKDWDPKKYGGFDSPTVAYSVLVVAKVEKGKSKKLKSVKELLGITIMERSSFEKNPIDFLEAKGYKEVKKDLIIKLPKYSLFELENGRKRMLASAGELQKGNELALPSKYVNFLYLASHYEKLKGSPEDNEQKQLFVEQHKHYLDEIIEQISEFSKRVILADANLDKVLSAYNKHRDKPIREQAENIIHLFTLTNLGAPAAFKYFDTTIDRKRYTSTKEVLDATLIHQSITGLYETRIDLSQLGGDGGPAPGGGEAAAKGGTAPLEEEYRLFLEAPIQNVTLLEQWKREIPKVWAEINPPGLASTQAPIHVQLLSTALPVRVRQYPITLEAKRSLRETIRKFRAAGILRPVHSPWNTPLLPVRKSGTSEYRMVQDLREVNKRVETIHPTVPNPYTLLSLLPPDRIWYSVLDLKDAFFCIPLAPESQLIFAFEWADAEEGESGQLTWTRLPQGFKNSPTLFNEALNRDLQGFRLDHPSVSLLQYVDDLLIAADTQAACLSATRDLLMTLAELGYRVSGKKAQLCQEEVTYLGFKIHKGSRSLSNSRTQAILQIPVPKTKRQVREFLGTIGYCRLWIPGFAELAQPLYAATRPGNDPLVWGEKEEEAFQSLKLALTQPPALALPSLDKPFQLFVEETSGAAKGVLTQALGPWKRPVAYLSKRLDPVAAGWPRCLRAIAAAALLTREASKLTFGQDIEITSSHNLESLLRSPPDKWLTNARITQYQVLLLDPPRVRFKQTAALNPATLLPETDDTLPIHHCLDTLDSLTSTRPDLTDQPLAQAEATLFTDGSSYIRDGKRYAGAAVVTLDSVIWAEPLPIGTSAQKAELIALTKALEWSKDKSVNIYTDSRYAFATLHVHGMIYRERGWLTAGGKAIKNAPEILALLTAVWLPKRVAVMHCKGHQKDDAPTSTGNRRADEVAREVAIRPLSTQATISAGKRTADGSEFEKRTADGSEFESPKKKAKVE

SEQ ID NO: 7526 - protein, 2098 aa, synthetic construct
MPAAKRVKLDGGDKKYSIGLDIGTNSVGWAVITDEYKVPSKKFKVLGNTDRHSIKKNLIGALLFDSGETAEATRLKRTARRRYTRRKNRICYLQEIFSNEMAKVDDSFFHRLEESFLVEEDKKHERHPIFGNIVDEVAYHEKYPTIYHLRKKLVDSTDKADLRLIYLALAHMIKFRGHFLIEGDLNPDNSDVDKLFIQLVQTYNQLFEENPINASGVDAKAILSARLSKSRRLENLIAQLPGEKKNGLFGNLIALSLGLTPNFKSNFDLAEDAKLQLSKDTYDDDLDNLLAQIGDQYADLFLAAKNLSDAILLSDILRVNTEITKAPLSASMIKRYDEHHQDLTLLKALVRQQLPEKYKEIFFDQSKNGYAGYIDGGASQEEFYKFIKPILEKMDGTEELLVKLNREDLLRKQRTFDNGSIPHQIHLGELHAILRRQEDFYPFLKDNREKIEKILTFRIPYYVGPLARGNSRFAWMTRKSEETITPWNFEEVVDKGASAQSFIERMTNFDKNLPNEKVLPKHSLLYEYFTVYNELTKVKYVTEGMRKPAFLSGEQKKAIVDLLFKTNRKVTVKQLKEDYFKKIECFDSVEISGVEDRFNASLGTYHDLLKIIKDKDFLDNEENEDILEDIVLTLTLFEDREMIEERLKTYAHLFDDKVMKQLKRRRYTGWGRLSRKLINGIRDKQSGKTILDFLKSDGFANRNFMQLIHDDSLTFKEDIQKAQVSGQGDSLHEHIANLAGSPAIKKGILQTVKVVDELVKVMGRHKPENIVIEMARENQTTQKGQKNSRERMKRIEEGIKELGSQILKEHPVENTQLQNEKLYLYYLQNGRDMYVDQELDINRLSDYDVDHIVPQSFLKDDSIDNKVLTRSDKARGKSDNVPSEEVVKKMKNYWRQLLNAKLITQRKFDNLTKAERGGLSELDKAGFIKRQLVETRQITKHVAQILDSRMNTKYDENDKLIREVKVITLKSKLVSDFRKDFQFYKVREINNYHHAHDAYLNAVVGTALIKKYPKLESEFVYGDYKVYDVRKMIAKSEQEIGKATAKYFFYSNIMNFFKTEITLANGEIRKRPLIETNGETGEIVWDKGRDFATVRKVLSMPQVNIVKKTEVQTGGFSKESILPKRNSDKLIARKKDWDPKKYGGFDSPTVAYSVLVVAKVEKGKSKKLKSVKELLGITIMERSSFEKNPIDFLEAKGYKEVKKDLIIKLPKYSLFELENGRKRMLASAGELQKGNELALPSKYVNFLYLASHYEKLKGSPEDNEQKQLFVEQHKHYLDEIIEQISEFSKRVILADANLDKVLSAYNKHRDKPIREQAENIIHLFTLTNLGAPAAFKYFDTTIDRKRYTSTKEVLDATLIHQSITGLYETRIDLSQLGGDGGPAPGGGEAAAKGGTAPLEEEYRLFLEAPIQNVTLLEQWKREIPKVWAEINPPGLASTQAPIHVQLLSTALPVRVRQYPITLEAKRSLRETIRKFRAAGILRPVHSPWNTPLLPVRKSGTSEYRMVQDLREVNKRVETIHPTVPNPYTLLSLLPPDRIWYSVLDLKDAFFCIPLAPESQLIFAFEWADAEEGESGQLTWTRLPQGFKNSPTLFNEALNRDLQGFRLDHPSVSLLQYVDDLLIAADTQAACLSATRDLLMTLAELGYRVSGKKAQLCQEEVTYLGFKIHKGSRSLSNSRTQAILQIPVPKTKRQVREFLGKIGYCRLFIPGFAELAQPLYAATRPGNDPLVWGEKEEEAFQSLKLALTQPPALALPSLDKPFQLFVEETSGAAKGVLTQALGPWKRPVAYLSKRLDPVAAGWPRCLRAIAAAALLTREASKLTFGQDIEITSSHNLESLLRSPPDKWLTNARITQYQVLLLDPPRVRFKQTAALNPATLLPETDDTLPIHHCLDTLDSLTSTRPDLTDQPLAQAEATLFTDGSSYIRDGKRYAGAAVVTLDSVIWAEPLPIGTSAQKAELIALTKALEWSKDKSVNIYTDSRYAFATLHVHGMIYRERGWLTAGGKAIKNAPEILALLTAVWLPKRVAVMHCKGHQKDDAPTSTGNRRADEVAREVAIRPLSTQATISAGKRTADGSEFEKRTADGSEFESPKKKAKVE

SEQ ID NO: 7527 - protein, 2173 aa, synthetic construct
MPAAKRVKLDGGDKKYSIGLDIGTNSVGWAVITDEYKVPSKKFKVLGNTDRHSIKKNLIGALLFDSGETAEATRLKRTARRRYTRRKNRICYLQEIFSNEMAKVDDSFFHRLEESFLVEEDKKHERHPIFGNIVDEVAYHEKYPTIYHLRKKLVDSTDKADLRLIYLALAHMIKFRGHFLIEGDLNPDNSDVDKLFIQLVQTYNQLFEENPINASGVDAKAILSARLSKSRRLENLIAQLPGEKKNGLFGNLIALSLGLTPNFKSNFDLAEDAKLQLSKDTYDDDLDNLLAQIGDQYADLFLAAKNLSDAILLSDILRVNTEITKAPLSASMIKRYDEHHQDLTLLKALVRQQLPEKYKEIFFDQSKNGYAGYIDGGASQEEFYKFIKPILEKMDGTEELLVKLNREDLLRKQRTFDNGSIPHQIHLGELHAILRRQEDFYPFLKDNREKIEKILTFRIPYYVGPLARGNSRFAWMTRKSEETITPWNFEEVVDKGASAQSFIERMTNFDKNLPNEKVLPKHSLLYEYFTVYNELTKVKYVTEGMRKPAFLSGEQKKAIVDLLFKTNRKVTVKQLKEDYFKKIECFDSVEISGVEDRFNASLGTYHDLLKIIKDKDFLDNEENEDILEDIVLTLTLFEDREMIEERLKTYAHLFDDKVMKQLKRRRYTGWGRLSRKLINGIRDKQSGKTILDFLKSDGFANRNFMQLIHDDSLTFKEDIQKAQVSGQGDSLHEHIANLAGSPAIKKGILQTVKVVDELVKVMGRHKPENIVIEMARENQTTQKGQKNSRERMKRIEEGIKELGSQILKEHPVENTQLQNEKLYLYYLQNGRDMYVDQELDINRLSDYDVDHIVPQSFLKDDSIDNKVLTRSDKARGKSDNVPSEEVVKKMKNYWRQLLNAKLITQRKFDNLTKAERGGLSELDKAGFIKRQLVETRQITKHVAQILDSRMNTKYDENDKLIREVKVITLKSKLVSDFRKDFQFYKVREINNYHHAHDAYLNAVVGTALIKKYPKLESEFVYGDYKVYDVRKMIAKSEQEIGKATAKYFFYSNIMNFFKTEITLANGEIRKRPLIETNGETGEIVWDKGRDFATVRKVLSMPQVNIVKKTEVQTGGFSKESILPKRNSDKLIARKKDWDPKKYGGFDSPTVAYSVLVVAKVEKGKSKKLKSVKELLGITIMERSSFEKNPIDFLEAKGYKEVKKDLIIKLPKYSLFELENGRKRMLASAGELQKGNELALPSKYVNFLYLASHYEKLKGSPEDNEQKQLFVEQHKHYLDEIIEQISEFSKRVILADANLDKVLSAYNKHRDKPIREQAENIIHLFTLTNLGAPAAFKYFDTTIDRKRYTSTKEVLDATLIHQSITGLYETRIDLSQLGGDGGPAPGGGEAAAKGGMDLLKPLTVERKGVKIKGYWNSQADITCVPKDLLQGEEPVRQQNVTTIHGTQEGDVYYVNLKIDGRRINTEVIGTTLDYAIITPGDVPWILKKPLELTIKLDLEEQQGTLLNNSILSKKGKEELKQLFEKYSALWQSWENQVGHRRIRPHKIATGTVKPTPQKQYHINPKAKPDIQIVINDLLKQGVLIQKESTMNTPVYPVPKPNGRWRMVLDYRAVNKVTPLIAVQNQHSYGILGSLFKGRYKTTIDLSNGFWAHPIVPEDYWITAFTWQGKQYCWTVLPQGFLNSPGLFTGDVVDLLQGIPNVEVYVDDVYISHDSEKEHLEYLDILFNRLKEAGYIISLKKSNIANSIVDFLGFQITNEGRGLTDTFKEKLENITAPTTLKQLQSILGLLNFARNFIPDFTELIAPLYALIPKSTKNYVPWQIEHSTTLETLITKLNGAEYLQGRKGDKTLIMKVNASYTTGYIRYYNEGEKKPISYVSIVFSKTELKFTELEKLLTTVHKGLLKALDLSMGQNIHVYSPIVSMQNIQKTPQTAKKALASRWLSWLSYLEDPRIRFFYDPQMPALKDLPAVDTGKDNKKHPSNFQHIFYTDGSAITSPTKEGHLNAGMGIVYFINKDGNLQKQQEWSISLGNHTAQFAEIAAFEFALKKCLPLGGNILVVTDSNYVAKAYNEELDVWASNGFVNNRKKPLKHISKWKSVADLKRLRPDVVVTHEPGHQKLDSSPHAYGNNLADQLATQASFKVHAGKRTADGSEFEKRTADGSEFESPKKKAKVE

SEQ ID NO: 7528 - protein, 2095 aa, synthetic construct
MPAAKRVKLDGGDKKYSIGLDIGTNSVGWAVITDEYKVPSKKFKVLGNTDRHSIKKNLIGALLFDSGETAEATRLKRTARRRYTRRKNRICYLQEIFSNEMAKVDDSFFHRLEESFLVEEDKKHERHPIFGNIVDEVAYHEKYPTIYHLRKKLVDSTDKADLRLIYLALAHMIKFRGHFLIEGDLNPDNSDVDKLFIQLVQTYNQLFEENPINASGVDAKAILSARLSKSRRLENLIAQLPGEKKNGLFGNLIALSLGLTPNFKSNFDLAEDAKLQLSKDTYDDDLDNLLAQIGDQYADLFLAAKNLSDAILLSDILRVNTEITKAPLSASMIKRYDEHHQDLTLLKALVRQQLPEKYKEIFFDQSKNGYAGYIDGGASQEEFYKFIKPILEKMDGTEELLVKLNREDLLRKQRTFDNGSIPHQIHLGELHAILRRQEDFYPFLKDNREKIEKILTFRIPYYVGPLARGNSRFAWMTRKSEETITPWNFEEVVDKGASAQSFIERMTNFDKNLPNEKVLPKHSLLYEYFTVYNELTKVKYVTEGMRKPAFLSGEQKKAIVDLLFKTNRKVTVKQLKEDYFKKIECFDSVEISGVEDRFNASLGTYHDLLKIIKDKDFLDNEENEDILEDIVLTLTLFEDREMIEERLKTYAHLFDDKVMKQLKRRRYTGWGRLSRKLINGIRDKQSGKTILDFLKSDGFANRNFMQLIHDDSLTFKEDIQKAQVSGQGDSLHEHIANLAGSPAIKKGILQTVKVVDELVKVMGRHKPENIVIEMARENQTTQKGQKNSRERMKRIEEGIKELGSQILKEHPVENTQLQNEKLYLYYLQNGRDMYVDQELDINRLSDYDVDHIVPQSFLKDDSIDNKVLTRSDKARGKSDNVPSEEVVKKMKNYWRQLLNAKLITQRKFDNLTKAERGGLSELDKAGFIKRQLVETRQITKHVAQILDSRMNTKYDENDKLIREVKVITLKSKLVSDFRKDFQFYKVREINNYHHAHDAYLNAVVGTALIKKYPKLESEFVYGDYKVYDVRKMIAKSEQEIGKATAKYFFYSNIMNFFKTEITLANGEIRKRPLIETNGETGEIVWDKGRDFATVRKVLSMPQVNIVKKTEVQTGGFSKESILPKRNSDKLIARKKDWDPKKYGGFDSPTVAYSVLVVAKVEKGKSKKLKSVKELLGITIMERSSFEKNPIDFLEAKGYKEVKKDLIIKLPKYSLFELENGRKRMLASAGELQKGNELALPSKYVNFLYLASHYEKLKGSPEDNEQKQLFVEQHKHYLDEIIEQISEFSKRVILADANLDKVLSAYNKHRDKPIREQAENIIHLFTLTNLGAPAAFKYFDTTIDRKRYTSTKEVLDATLIHQSITGLYETRIDLSQLGGDGGPAPGGGEAAAKGGTLQLEEEYRLFEPESTQKQEMDIWLKNFPQAWAETGGMGTAHCQAPVLIQLKATATPISIRQYPMPHEAYQGIKPHIRRMLDQGILKPCQSPWNTPLLPVKKPGTEDYRPVQDLREVNKRVEDIHPTVPNPYNLLSTLPPSHPWYTVLDLKDAFFCLRLHSESQLLFAFEWRDPEIGLSGQLTWTRLPQGFKNSPTLFNEALHSDLADFRVRYPALVLLQYVDDLLLAAATRTECLEGTKALLETLGNKGYRASAKKAQICLQEVTYLGYSLKDGQRWLTKARKEAILSIPVPKNSRQVREFLGTAGYCRLWIPGFAELAAPLYPLTRPGTLFQWGTEQQLAFEDIKKALLSSPALGLPDITKPFELFIDENSGFAKGVLVQKLGPWKRPVAYLSKKLDTVASGWPPCLRMVAAIAILVKDAGKLTLGQPLTILTSHPVEALVRQPPNKWLSNARMTHYQAMLLDAERVHFGPTVSLNPATLLPLPSGGNHHDCLQILAETHGTRPDLTDQPLPDADLTWYTDGSSFIRNGEREAGAAVTTESEVIWAAPLPPGTSAQRAELIALTQALKMAEGKKLTVYTDSRYAFATTHVHGEIYRRRGWLTSEGKEIKNKNEILALLEALFLPKRLSIIHCPGHQKGDSPQAKGNRLADDTAKKAATETHSSLTVLPAGKRTADGSEFEKRTADGSEFESPKKKAKVE

SEQ ID NO: 7529 - protein, 2094 aa, synthetic construct
MPAAKRVKLDGGDKKYSIGLDIGTNSVGWAVITDEYKVPSKKFKVLGNTDRHSIKKNLIGALLFDSGETAEATRLKRTARRRYTRRKNRICYLQEIFSNEMAKVDDSFFHRLEESFLVEEDKKHERHPIFGNIVDEVAYHEKYPTIYHLRKKLVDSTDKADLRLIYLALAHMIKFRGHFLIEGDLNPDNSDVDKLFIQLVQTYNQLFEENPINASGVDAKAILSARLSKSRRLENLIAQLPGEKKNGLFGNLIALSLGLTPNFKSNFDLAEDAKLQLSKDTYDDDLDNLLAQIGDQYADLFLAAKNLSDAILLSDILRVNTEITKAPLSASMIKRYDEHHQDLTLLKALVRQQLPEKYKEIFFDQSKNGYAGYIDGGASQEEFYKFIKPILEKMDGTEELLVKLNREDLLRKQRTFDNGSIPHQIHLGELHAILRRQEDFYPFLKDNREKIEKILTFRIPYYVGPLARGNSRFAWMTRKSEETITPWNFEEVVDKGASAQSFIERMTNFDKNLPNEKVLPKHSLLYEYFTVYNELTKVKYVTEGMRKPAFLSGEQKKAIVDLLFKTNRKVTVKQLKEDYFKKIECFDSVEISGVEDRFNASLGTYHDLLKIIKDKDFLDNEENEDILEDIVLTLTLFEDREMIEERLKTYAHLFDDKVMKQLKRRRYTGWGRLSRKLINGIRDKQSGKTILDFLKSDGFANRNFMQLIHDDSLTFKEDIQKAQVSGQGDSLHEHIANLAGSPAIKKGILQTVKVVDELVKVMGRHKPENIVIEMARENQTTQKGQKNSRERMKRIEEGIKELGSQILKEHPVENTQLQNEKLYLYYLQNGRDMYVDQELDINRLSDYDVDHIVPQSFLKDDSIDNKVLTRSDKARGKSDNVPSEEVVKKMKNYWRQLLNAKLITQRKFDNLTKAERGGLSELDKAGFIKRQLVETRQITKHVAQILDSRMNTKYDENDKLIREVKVITLKSKLVSDFRKDFQFYKVREINNYHHAHDAYLNAVVGTALIKKYPKLESEFVYGDYKVYDVRKMIAKSEQEIGKATAKYFFYSNIMNFFKTEITLANGEIRKRPLIETNGETGEIVWDKGRDFATVRKVLSMPQVNIVKKTEVQTGGFSKESILPKRNSDKLIARKKDWDPKKYGGFDSPTVAYSVLVVAKVEKGKSKKLKSVKELLGITIMERSSFEKNPIDFLEAKGYKEVKKDLIIKLPKYSLFELENGRKRMLASAGELQKGNELALPSKYVNFLYLASHYEKLKGSPEDNEQKQLFVEQHKHYLDEIIEQISEFSKRVILADANLDKVLSAYNKHRDKPIREQAENIIHLFTLTNLGAPAAFKYFDTTIDRKRYTSTKEVLDATLIHQSITGLYETRIDLSQLGGDGGPAPGGGEAAAKGGVLNLEEEYRLHEKPVPSSIDPSWLQLFPTVWAERAGMGLANQVPPVVVELRSGASPVAVRQYPMSKEAREGIRPHIQKFLDLGVLVPCRSPWNTPLLPVKKPGTNDYRPVQDLREINKRVQDIHPTVPNPYNLLSSLPPSYTWYSVLDLKDAFFCLRLHPNSQPLFAFEWKDPEKGNTGQLTWTRLPQGFKNSPTLFNEALHRDLAPFRALNPQVVLLQYVDDLLVAAPTYEDCKKGTQKLLQELSKLGYRVSAKKAQLCQREVTYLGYLLKEGKRWLTPARKATVMKIPVPTTPRQVREFLGTAGFCRLWIPGFASLAAPLYPLTKPSIPFIWTEEHQQAFDHIKKALLSAPALALPDLTKPFTLYIDERAGVARGVLTQTLGPWRRPVAYLSKKLDPVASGWPTCLKAVAAVALLLKDADKLTLGQNVTVIASHSLESIVRQPPDRWMTNARMTHYQSLLLNERVSFAPPAVLNPATLLPVESEATPVHRCSEILAEETGTRRDLEDQPLPGVPTWYTDGSSFITEGKRRAGAPIVDGKRTVWASSLPEGTSAQKAELVALTQALRLAEGKNINIYTDSRYAFATAHIHGAIYKQRGWLTSAGKDIKNKEEILALLEAIHLPRRVAIIHCPGHQRGSNPVATGNRRADEAAKQAALSTRVLAGTTKPAGKRTADGSEFEKRTADGSEFESPKKKAKVE

SEQ ID NO: 7530 - protein, 2127 aa, synthetic construct
MPAAKRVKLDGGDKKYSIGLDIGTNSVGWAVITDEYKVPSKKFKVLGNTDRHSIKKNLIGALLFDSGETAEATRLKRTARRRYTRRKNRICYLQEIFSNEMAKVDDSFFHRLEESFLVEEDKKHERHPIFGNIVDEVAYHEKYPTIYHLRKKLVDSTDKADLRLIYLALAHMIKFRGHFLIEGDLNPDNSDVDKLFIQLVQTYNQLFEENPINASGVDAKAILSARLSKSRRLENLIAQLPGEKKNGLFGNLIALSLGLTPNFKSNFDLAEDAKLQLSKDTYDDDLDNLLAQIGDQYADLFLAAKNLSDAILLSDILRVNTEITKAPLSASMIKRYDEHHQDLTLLKALVRQQLPEKYKEIFFDQSKNGYAGYIDGGASQEEFYKFIKPILEKMDGTEELLVKLNREDLLRKQRTFDNGSIPHQIHLGELHAILRRQEDFYPFLKDNREKIEKILTFRIPYYVGPLARGNSRFAWMTRKSEETITPWNFEEVVDKGASAQSFIERMTNFDKNLPNEKVLPKHSLLYEYFTVYNELTKVKYVTEGMRKPAFLSGEQKKAIVDLLFKTNRKVTVKQLKEDYFKKIECFDSVEISGVEDRFNASLGTYHDLLKIIKDKDFLDNEENEDILEDIVLTLTLFEDREMIEERLKTYAHLFDDKVMKQLKRRRYTGWGRLSRKLINGIRDKQSGKTILDFLKSDGFANRNFMQLIHDDSLTFKEDIQKAQVSGQGDSLHEHIANLAGSPAIKKGILQTVKVVDELVKVMGRHKPENIVIEMARENQTTQKGQKNSRERMKRIEEGIKELGSQILKEHPVENTQLQNEKLYLYYLQNGRDMYVDQELDINRLSDYDVDHIVPQSFLKDDSIDNKVLTRSDKARGKSDNVPSEEVVKKMKNYWRQLLNAKLITQRKFDNLTKAERGGLSELDKAGFIKRQLVETRQITKHVAQILDSRMNTKYDENDKLIREVKVITLKSKLVSDFRKDFQFYKVREINNYHHAHDAYLNAVVGTALIKKYPKLESEFVYGDYKVYDVRKMIAKSEQEIGKATAKYFFYSNIMNFFKTEITLANGEIRKRPLIETNGETGEIVWDKGRDFATVRKVLSMPQVNIVKKTEVQTGGFSKESILPKRNSDKLIARKKDWDPKKYGGFDSPTVAYSVLVVAKVEKGKSKKLKSVKELLGITIMERSSFEKNPIDFLEAKGYKEVKKDLIIKLPKYSLFELENGRKRMLASAGELQKGNELALPSKYVNFLYLASHYEKLKGSPEDNEQKQLFVEQHKHYLDEIIEQISEFSKRVILADANLDKVLSAYNKHRDKPIREQAENIIHLFTLTNLGAPAAFKYFDTTIDRKRYTSTKEVLDATLIHQSITGLYETRIDLSQLGGDGGPAPGGGEAAAKGGLLGRDLLTKLKAQIQFSTEGPQVTWEDRPAMCLVLNLEEEYRLHEKPVPPSIDPSWLQLFPMVWAEKAGMGLANQVPPVVVELKSDASPVAVRQYPMSKEAREGIRPHIQRFLDLGILVPCQSPWNTPLLPVKKPGTNDYRPVQDLREVNKRVQDIHPTVPNPYNLLSSLPPSHTWYSVLDLKDAFFCLKLHPNSQPLFAFEWRDPEKGNTGQLTWTRLPQGFKNSPTLFNEALHRDLASFRALNPQVVMLQYVDDLLVAAPTYRDCKEGTRRLLQELSKLGYRVSAKKAQLCREEVTYLGYLLKGGKRWLTPARKATVMKIPTPTTPRQVREFLGTAGFCRLWIPGFASLAAPLYPLTRPKVPFTWTEAHQEAFGRIKEALLSAPALALPDLTKPFALYVDEKEGVARGVLTQTLGPWRRPVAYLSKKLDPVASGWPTCLKAIAAVALLLKDADKLTLGQNVLVIAPHNLESIVRQPPDRWMTNARMTHYQSLLLNERVSFAPPAILNPATLLPVESDDTPIHICSEILAEETGTRPDLRDQPLPGVPAWYTDGSSFIMDGRRQAGAAIVDNKRTVWASNLPEGTSAQKAELIALTQALRLAEGKSINIYTDSRYAFATAHVHGAIYKQRGWLTSAGKDIKNKEEILALLEAIHLPKRVAIIHCPGHQRGTDPVATGNRKADEAAKQAAQSTRILTETTKNAGKRTADGSEFEKRTADGSEFESPKKKAKVE

SEQ ID NO: 7531 - protein, 2127 aa, synthetic construct
MPAAKRVKLDGGDKKYSIGLDIGTNSVGWAVITDEYKVPSKKFKVLGNTDRHSIKKNLIGALLFDSGETAEATRLKRTARRRYTRRKNRICYLQEIFSNEMAKVDDSFFHRLEESFLVEEDKKHERHPIFGNIVDEVAYHEKYPTIYHLRKKLVDSTDKADLRLIYLALAHMIKFRGHFLIEGDLNPDNSDVDKLFIQLVQTYNQLFEENPINASGVDAKAILSARLSKSRRLENLIAQLPGEKKNGLFGNLIALSLGLTPNFKSNFDLAEDAKLQLSKDTYDDDLDNLLAQIGDQYADLFLAAKNLSDAILLSDILRVNTEITKAPLSASMIKRYDEHHQDLTLLKALVRQQLPEKYKEIFFDQSKNGYAGYIDGGASQEEFYKFIKPILEKMDGTEELLVKLNREDLLRKQRTFDNGSIPHQIHLGELHAILRRQEDFYPFLKDNREKIEKILTFRIPYYVGPLARGNSRFAWMTRKSEETITPWNFEEVVDKGASAQSFIERMTNFDKNLPNEKVLPKHSLLYEYFTVYNELTKVKYVTEGMRKPAFLSGEQKKAIVDLLFKTNRKVTVKQLKEDYFKKIECFDSVEISGVEDRFNASLGTYHDLLKIIKDKDFLDNEENEDILEDIVLTLTLFEDREMIEERLKTYAHLFDDKVMKQLKRRRYTGWGRLSRKLINGIRDKQSGKTILDFLKSDGFANRNFMQLIHDDSLTFKEDIQKAQVSGQGDSLHEHIANLAGSPAIKKGILQTVKVVDELVKVMGRHKPENIVIEMARENQTTQKGQKNSRERMKRIEEGIKELGSQILKEHPVENTQLQNEKLYLYYLQNGRDMYVDQELDINRLSDYDVDHIVPQSFLKDDSIDNKVLTRSDKARGKSDNVPSEEVVKKMKNYWRQLLNAKLITQRKFDNLTKAERGGLSELDKAGFIKRQLVETRQITKHVAQILDSRMNTKYDENDKLIREVKVITLKSKLVSDFRKDFQFYKVREINNYHHAHDAYLNAVVGTALIKKYPKLESEFVYGDYKVYDVRKMIAKSEQEIGKATAKYFFYSNIMNFFKTEITLANGEIRKRPLIETNGETGEIVWDKGRDFATVRKVLSMPQVNIVKKTEVQTGGFSKESILPKRNSDKLIARKKDWDPKKYGGFDSPTVAYSVLVVAKVEKGKSKKLKSVKELLGITIMERSSFEKNPIDFLEAKGYKEVKKDLIIKLPKYSLFELENGRKRMLASAGELQKGNELALPSKYVNFLYLASHYEKLKGSPEDNEQKQLFVEQHKHYLDEIIEQISEFSKRVILADANLDKVLSAYNKHRDKPIREQAENIIHLFTLTNLGAPAAFKYFDTTIDRKRYTSTKEVLDATLIHQSITGLYETRIDLSQLGGDGGPAPGGGEAAAKGGLLGRDLLTKLKAQIQFSTEGPQVTWEDRPAMCLVLNLEEEYRLHEKPVPPSIDPSWLQLFPMVWAEKAGMGLANQVPPVVVELKSDASPVAVRQYPMSKEAREGIRPHIQRFLDLGILVPCQSPWNTPLLPVKKPGTNDYRPVQDLREVNKRVQDIHPTVPNPYNLLSSLPPSHTWYSVLDLKDAFFCLKLHPNSQPLFAFEWRDPEKGNTGQLTWTRLPQGFKNSPTLFNEALHRDLASFRALNPQVVMLQYVDDLLVAAPTYRDCKEGTRRLLQELSKLGYRVSAKKAQLCREEVTYLGYLLKGGKRWLTPARKATVMKIPTPTTPRQVREFLGKAGFCRLFIPGFASLAAPLYPLTRPKVPFTWTEAHQEAFGRIKEALLSAPALALPDLTKPFALYVDEKEGVARGVLTQTLGPWRRPVAYLSKKLDPVASGWPTCLKAIAAVALLLKDADKLTLGQNVLVIAPHNLESIVRQPPDRWMTNARMTHYQSLLLNERVSFAPPAILNPATLLPVESDDTPIHICSEILAEETGTRPDLRDQPLPGVPAWYTDGSSFIMDGRRQAGAAIVDNKRTVWASNLPEGTSAQKAELIALTQALRLAEGKSINIYTDSRYAFATAHVHGAIYKQRGWLTSAGKDIKNKEEILALLEAIHLPKRVAIIHCPGHQRGTDPVATGNRKADEAAKQAAQSTRILTETTKNAGKRTADGSEFEKRTADGSEFESPKKKAKVE

SEQ ID NO: 7532 - protein, 2218 aa, synthetic construct
MPAAKRVKLDGGDKKYSIGLDIGTNSVGWAVITDEYKVPSKKFKVLGNTDRHSIKKNLIGALLFDSGETAEATRLKRTARRRYTRRKNRICYLQEIFSNEMAKVDDSFFHRLEESFLVEEDKKHERHPIFGNIVDEVAYHEKYPTIYHLRKKLVDSTDKADLRLIYLALAHMIKFRGHFLIEGDLNPDNSDVDKLFIQLVQTYNQLFEENPINASGVDAKAILSARLSKSRRLENLIAQLPGEKKNGLFGNLIALSLGLTPNFKSNFDLAEDAKLQLSKDTYDDDLDNLLAQIGDQYADLFLAAKNLSDAILLSDILRVNTEITKAPLSASMIKRYDEHHQDLTLLKALVRQQLPEKYKEIFFDQSKNGYAGYIDGGASQEEFYKFIKPILEKMDGTEELLVKLNREDLLRKQRTFDNGSIPHQIHLGELHAILRRQEDFYPFLKDNREKIEKILTFRIPYYVGPLARGNSRFAWMTRKSEETITPWNFEEVVDKGASAQSFIERMTNFDKNLPNEKVLPKHSLLYEYFTVYNELTKVKYVTEGMRKPAFLSGEQKKAIVDLLFKTNRKVTVKQLKEDYFKKIECFDSVEISGVEDRFNASLGTYHDLLKIIKDKDFLDNEENEDILEDIVLTLTLFEDREMIEERLKTYAHLFDDKVMKQLKRRRYTGWGRLSRKLINGIRDKQSGKTILDFLKSDGFANRNFMQLIHDDSLTFKEDIQKAQVSGQGDSLHEHIANLAGSPAIKKGILQTVKVVDELVKVMGRHKPENIVIEMARENQTTQKGQKNSRERMKRIEEGIKELGSQILKEHPVENTQLQNEKLYLYYLQNGRDMYVDQELDINRLSDYDVDHIVPQSFLKDDSIDNKVLTRSDKARGKSDNVPSEEVVKKMKNYWRQLLNAKLITQRKFDNLTKAERGGLSELDKAGFIKRQLVETRQITKHVAQILDSRMNTKYDENDKLIREVKVITLKSKLVSDFRKDFQFYKVREINNYHHAHDAYLNAVVGTALIKKYPKLESEFVYGDYKVYDVRKMIAKSEQEIGKATAKYFFYSNIMNFFKTEITLANGEIRKRPLIETNGETGEIVWDKGRDFATVRKVLSMPQVNIVKKTEVQTGGFSKESILPKRNSDKLIARKKDWDPKKYGGFDSPTVAYSVLVVAKVEKGKSKKLKSVKELLGITIMERSSFEKNPIDFLEAKGYKEVKKDLIIKLPKYSLFELENGRKRMLASAGELQKGNELALPSKYVNFLYLASHYEKLKGSPEDNEQKQLFVEQHKHYLDEIIEQISEFSKRVILADANLDKVLSAYNKHRDKPIREQAENIIHLFTLTNLGAPAAFKYFDTTIDRKRYTSTKEVLDATLIHQSITGLYETRIDLSQLGGDGGPAPGGGEAAAKGGTLGDQGSRGSDPLPEPRVTLTVEGIPTEFLVNTGAEHSVLTKPMGKMGSKRTVVAGATGSKVYPWTTKRLLKIGQKQVTHSFLVIPECPAPLLGRDLLTKLKAQIQFSTEGPQVTWEDRPAMCLVLNLEEEYRLHEKPVPPSIDPSWLQLFPMVWAEKAGMGLANQVPPVVVELKSDASPVAVRQYPMSKEAREGIRPHIQRFLDLGILVPCQSPWNTPLLPVKKPGTNDYRPVQDLREVNKRVQDIHPTVPNPYNLLSSLPPSHTWYSVLDLKDAFFCLKLHPNSQPLFAFEWRDPEKGNTGQLTWTRLPQGFKNSPTLFNEALHRDLASFRALNPQVVMLQYVDDLLVAAPTYRDCKEGTRRLLQELSKLGYRVSAKKAQLCREEVTYLGYLLKGGKRWLTPARKATVMKIPTPTTPRQVREFLGTAGFCRLWIPGFASLAAPLYPLTRPKVPFTWTEAHQEAFGRIKEALLSAPALALPDLTKPFALYVDEKEGVARGVLTQTLGPWRRPVAYLSKKLDPVASGWPTCLKAIAAVALLLKDADKLTLGQNVLVIAPHNLESIVRQPPDRWMTNARMTHYQSLLLNERVSFAPPAILNPATLLPVESDDTPIHICSEILAEETGTRPDLRDQPLPGVPAWYTDGSSFIMDGRRQAGAAIVDNKRTVWASNLPEGTSAQKAELIALTQALRLAEGKSINIYTDSRYAFATAHVHGAIYKQRGWLTSAGKDIKNKEEILALLEAIHLPKRVAIIHCPGHQRGTDPVATGNRKADEAAKQAAQSTRILTETTKNAGKRTADGSEFEKRTADGSEFESPKKKAKVE

SEQ ID NO: 7533 - protein, 2218 aa, synthetic construct
MPAAKRVKLDGGDKKYSIGLDIGTNSVGWAVITDEYKVPSKKFKVLGNTDRHSIKKNLIGALLFDSGETAEATRLKRTARRRYTRRKNRICYLQEIFSNEMAKVDDSFFHRLEESFLVEEDKKHERHPIFGNIVDEVAYHEKYPTIYHLRKKLVDSTDKADLRLIYLALAHMIKFRGHFLIEGDLNPDNSDVDKLFIQLVQTYNQLFEENPINASGVDAKAILSARLSKSRRLENLIAQLPGEKKNGLFGNLIALSLGLTPNFKSNFDLAEDAKLQLSKDTYDDDLDNLLAQIGDQYADLFLAAKNLSDAILLSDILRVNTEITKAPLSASMIKRYDEHHQDLTLLKALVRQQLPEKYKEIFFDQSKNGYAGYIDGGASQEEFYKFIKPILEKMDGTEELLVKLNREDLLRKQRTFDNGSIPHQIHLGELHAILRRQEDFYPFLKDNREKIEKILTFRIPYYVGPLARGNSRFAWMTRKSEETITPWNFEEVVDKGASAQSFIERMTNFDKNLPNEKVLPKHSLLYEYFTVYNELTKVKYVTEGMRKPAFLSGEQKKAIVDLLFKTNRKVTVKQLKEDYFKKIECFDSVEISGVEDRFNASLGTYHDLLKIIKDKDFLDNEENEDILEDIVLTLTLFEDREMIEERLKTYAHLFDDKVMKQLKRRRYTGWGRLSRKLINGIRDKQSGKTILDFLKSDGFANRNFMQLIHDDSLTFKEDIQKAQVSGQGDSLHEHIANLAGSPAIKKGILQTVKVVDELVKVMGRHKPENIVIEMARENQTTQKGQKNSRERMKRIEEGIKELGSQILKEHPVENTQLQNEKLYLYYLQNGRDMYVDQELDINRLSDYDVDHIVPQSFLKDDSIDNKVLTRSDKARGKSDNVPSEEVVKKMKNYWRQLLNAKLITQRKFDNLTKAERGGLSELDKAGFIKRQLVETRQITKHVAQILDSRMNTKYDENDKLIREVKVITLKSKLVSDFRKDFQFYKVREINNYHHAHDAYLNAVVGTALIKKYPKLESEFVYGDYKVYDVRKMIAKSEQEIGKATAKYFFYSNIMNFFKTEITLANGEIRKRPLIETNGETGEIVWDKGRDFATVRKVLSMPQVNIVKKTEVQTGGFSKESILPKRNSDKLIARKKDWDPKKYGGFDSPTVAYSVLVVAKVEKGKSKKLKSVKELLGITIMERSSFEKNPIDFLEAKGYKEVKKDLIIKLPKYSLFELENGRKRMLASAGELQKGNELALPSKYVNFLYLASHYEKLKGSPEDNEQKQLFVEQHKHYLDEIIEQISEFSKRVILADANLDKVLSAYNKHRDKPIREQAENIIHLFTLTNLGAPAAFKYFDTTIDRKRYTSTKEVLDATLIHQSITGLYETRIDLSQLGGDGGPAPGGGEAAAKGGTLGDQGSRGSDPLPEPRVTLTVEGIPTEFLVNTGAEHSVLTKPMGKMGSKRTVVAGATGSKVYPWTTKRLLKIGQKQVTHSFLVIPECPAPLLGRDLLTKLKAQIQFSTEGPQVTWEDRPAMCLVLNLEEEYRLHEKPVPPSIDPSWLQLFPMVWAEKAGMGLANQVPPVVVELKSDASPVAVRQYPMSKEAREGIRPHIQRFLDLGILVPCQSPWNTPLLPVKKPGTNDYRPVQDLREVNKRVQDIHPTVPNPYNLLSSLPPSHTWYSVLDLKDAFFCLKLHPNSQPLFAFEWRDPEKGNTGQLTWTRLPQGFKNSPTLFNEALHRDLASFRALNPQVVMLQYVDDLLVAAPTYRDCKEGTRRLLQELSKLGYRVSAKKAQLCREEVTYLGYLLKGGKRWLTPARKATVMKIPTPTTPRQVREFLGKAGFCRLFIPGFASLAAPLYPLTRPKVPFTWTEAHQEAFGRIKEALLSAPALALPDLTKPFALYVDEKEGVARGVLTQTLGPWRRPVAYLSKKLDPVASGWPTCLKAIAAVALLLKDADKLTLGQNVLVIAPHNLESIVRQPPDRWMTNARMTHYQSLLLNERVSFAPPAILNPATLLPVESDDTPIHICSEILAEETGTRPDLRDQPLPGVPAWYTDGSSFIMDGRRQAGAAIVDNKRTVWASNLPEGTSAQKAELIALTQALRLAEGKSINIYTDSRYAFATAHVHGAIYKQRGWLTSAGKDIKNKEEILALLEAIHLPKRVAIIHCPGHQRGTDPVATGNRKADEAAKQAAQSTRILTETTKNAGKRTADGSEFEKRTADGSEFESPKKKAKVE

SEQ ID NO: 7534 - protein, 2096 aa, synthetic construct
MPAAKRVKLDGGDKKYSIGLDIGTNSVGWAVITDEYKVPSKKFKVLGNTDRHSIKKNLIGALLFDSGETAEATRLKRTARRRYTRRKNRICYLQEIFSNEMAKVDDSFFHRLEESFLVEEDKKHERHPIFGNIVDEVAYHEKYPTIYHLRKKLVDSTDKADLRLIYLALAHMIKFRGHFLIEGDLNPDNSDVDKLFIQLVQTYNQLFEENPINASGVDAKAILSARLSKSRRLENLIAQLPGEKKNGLFGNLIALSLGLTPNFKSNFDLAEDAKLQLSKDTYDDDLDNLLAQIGDQYADLFLAAKNLSDAILLSDILRVNTEITKAPLSASMIKRYDEHHQDLTLLKALVRQQLPEKYKEIFFDQSKNGYAGYIDGGASQEEFYKFIKPILEKMDGTEELLVKLNREDLLRKQRTFDNGSIPHQIHLGELHAILRRQEDFYPFLKDNREKIEKILTFRIPYYVGPLARGNSRFAWMTRKSEETITPWNFEEVVDKGASAQSFIERMTNFDKNLPNEKVLPKHSLLYEYFTVYNELTKVKYVTEGMRKPAFLSGEQKKAIVDLLFKTNRKVTVKQLKEDYFKKIECFDSVEISGVEDRFNASLGTYHDLLKIIKDKDFLDNEENEDILEDIVLTLTLFEDREMIEERLKTYAHLFDDKVMKQLKRRRYTGWGRLSRKLINGIRDKQSGKTILDFLKSDGFANRNFMQLIHDDSLTFKEDIQKAQVSGQGDSLHEHIANLAGSPAIKKGILQTVKVVDELVKVMGRHKPENIVIEMARENQTTQKGQKNSRERMKRIEEGIKELGSQILKEHPVENTQLQNEKLYLYYLQNGRDMYVDQELDINRLSDYDVDHIVPQSFLKDDSIDNKVLTRSDKARGKSDNVPSEEVVKKMKNYWRQLLNAKLITQRKFDNLTKAERGGLSELDKAGFIKRQLVETRQITKHVAQILDSRMNTKYDENDKLIREVKVITLKSKLVSDFRKDFQFYKVREINNYHHAHDAYLNAVVGTALIKKYPKLESEFVYGDYKVYDVRKMIAKSEQEIGKATAKYFFYSNIMNFFKTEITLANGEIRKRPLIETNGETGEIVWDKGRDFATVRKVLSMPQVNIVKKTEVQTGGFSKESILPKRNSDKLIARKKDWDPKKYGGFDSPTVAYSVLVVAKVEKGKSKKLKSVKELLGITIMERSSFEKNPIDFLEAKGYKEVKKDLIIKLPKYSLFELENGRKRMLASAGELQKGNELALPSKYVNFLYLASHYEKLKGSPEDNEQKQLFVEQHKHYLDEIIEQISEFSKRVILADANLDKVLSAYNKHRDKPIREQAENIIHLFTLTNLGAPAAFKYFDTTIDRKRYTSTKEVLDATLIHQSITGLYETRIDLSQLGGDGGPAPGGGEAAAKGGTLNLEDEYRLYETSAEPEVSPGSTWLSDFPQAWAETGGMGLAVRQAPLIIPLKATSTPVSIKQYPMSQEAKLGIKPHIQRLLDQGILVPCQSPWNTPLLPVKKPGTNDYRPVQDLREVNKRVEDIHPTVPNPYNLLSGLPPSHRWYTVLDLKDAFFCLRLHPTSQPLFAFEWRDPGMGISGQLTWTRLPQGFKNSPTLFNEALHRDLADFRIQHPDLILLQYVDDILLAATSELDCQQGTRALLLTLGNLGYRASAKKAQLCQKQVKYLGYLLKEGQRWLTEARKETVMGQPTPKTPRQLREFLGTAGFCRLWIPGFAEMAAPLYPLTKPGTLFNWGPDQQKAYQEIKQALLTAPALGLPDLTKPFELFVDEKQGYAKGVLTQKLGPWRRPVAYLSKKLDPVAAGWPPCLRMVAAIAVLRKDAGKLTMGQPLVILAPHAVEALVKQPPDRWLSNARMTHYQAMLLDTDRVQFGPVVALNPATLLPLPEEGAPHDCLEILAETHGTRPDLTDQPIPDADHTWYTDGSSFLQEGQRKAGAAVTTETEVIWARALPAGTSAQRAELIALTQALKMAEGKRLNVYTDSRYAFATAHIHGEIYRRRGWLTSEGREIKNKSEILALLKALFLPKRLSIIHCLGHQKGDSAEARGNRLADQAAREAAIKTPPDTSTLLAGKRTADGSEFEKRTADGSEFESPKKKAKVE

SEQ ID NO: 7535 - protein, 2096 aa, synthetic construct
MPAAKRVKLDGGDKKYSIGLDIGTNSVGWAVITDEYKVPSKKFKVLGNTDRHSIKKNLIGALLFDSGETAEATRLKRTARRRYTRRKNRICYLQEIFSNEMAKVDDSFFHRLEESFLVEEDKKHERHPIFGNIVDEVAYHEKYPTIYHLRKKLVDSTDKADLRLIYLALAHMIKFRGHFLIEGDLNPDNSDVDKLFIQLVQTYNQLFEENPINASGVDAKAILSARLSKSRRLENLIAQLPGEKKNGLFGNLIALSLGLTPNFKSNFDLAEDAKLQLSKDTYDDDLDNLLAQIGDQYADLFLAAKNLSDAILLSDILRVNTEITKAPLSASMIKRYDEHHQDLTLLKALVRQQLPEKYKEIFFDQSKNGYAGYIDGGASQEEFYKFIKPILEKMDGTEELLVKLNREDLLRKQRTFDNGSIPHQIHLGELHAILRRQEDFYPFLKDNREKIEKILTFRIPYYVGPLARGNSRFAWMTRKSEETITPWNFEEVVDKGASAQSFIERMTNFDKNLPNEKVLPKHSLLYEYFTVYNELTKVKYVTEGMRKPAFLSGEQKKAIVDLLFKTNRKVTVKQLKEDYFKKIECFDSVEISGVEDRFNASLGTYHDLLKIIKDKDFLDNEENEDILEDIVLTLTLFEDREMIEERLKTYAHLFDDKVMKQLKRRRYTGWGRLSRKLINGIRDKQSGKTILDFLKSDGFANRNFMQLIHDDSLTFKEDIQKAQVSGQGDSLHEHIANLAGSPAIKKGILQTVKVVDELVKVMGRHKPENIVIEMARENQTTQKGQKNSRERMKRIEEGIKELGSQILKEHPVENTQLQNEKLYLYYLQNGRDMYVDQELDINRLSDYDVDHIVPQSFLKDDSIDNKVLTRSDKARGKSDNVPSEEVVKKMKNYWRQLLNAKLITQRKFDNLTKAERGGLSELDKAGFIKRQLVETRQITKHVAQILDSRMNTKYDENDKLIREVKVITLKSKLVSDFRKDFQFYKVREINNYHHAHDAYLNAVVGTALIKKYPKLESEFVYGDYKVYDVRKMIAKSEQEIGKATAKYFFYSNIMNFFKTEITLANGEIRKRPLIETNGETGEIVWDKGRDFATVRKVLSMPQVNIVKKTEVQTGGFSKESILPKRNSDKLIARKKDWDPKKYGGFDSPTVAYSVLVVAKVEKGKSKKLKSVKELLGITIMERSSFEKNPIDFLEAKGYKEVKKDLIIKLPKYSLFELENGRKRMLASAGELQKGNELALPSKYVNFLYLASHYEKLKGSPEDNEQKQLFVEQHKHYLDEIIEQISEFSKRVILADANLDKVLSAYNKHRDKPIREQAENIIHLFTLTNLGAPAAFKYFDTTIDRKRYTSTKEVLDATLIHQSITGLYETRIDLSQLGGDGGPAPGGGEAAAKGGTLGIEDEYRLHETSTEPDVSLGSTWLSDFPQAWAETGGMGLAVRQAPLIIPLKATSTPVSIQQYPMSHEARLGIKPHIQRLLDQGILVPCQSPWNTPLLPVKKPGTNDYRPVQDLREVNKRVEDIHPTVPNPYNLLSGLPPSHQWYTVLDLKDAFFCLRLHPTSQPLFAFEWRDPGMGISGQLTWTRLPQGFKNSPTLFNEALHRDLADFRIQHPDLILLQYVDDILLAATSELDCQQGTRALLQTLGDLGYRASAKKAQICQKQVKYLGYLLREGQRWLTEARKETVMGQPVPKTPRQLREFLGTAGFCRLWIPGFAEMAAPLYPLTKPGTLFSWGPDQQKAYQEIKQALLTAPALGLPDLTKPFELFVDEKQGYAKGVLTQKLGPWRRPVAYLSKKLDPVAAGWPPCLRMVAAIAVLTKDAGKLTMGQPLVILAPHAVEALVKQPPDRWLSNARMTHYQAMLLDTDRVQFGPVVALNPATLLPLPEEGAPHDCLEILAETHGTRPDLTDQPIPDADHTWYTDGSSFLQEGQRKAGAAVTTETEVIWAGALPAGTSAQRAELIALTQALKMAEGKRLNVYTDSRYAFATAHIHGEIYRRRGWLTSEGREIKNKSEILALLKALFLPKRLSIIHCLGHQKGDSAEARGNRLADQAAREAAIKTPPDTSTLLAGKRTADGSEFEKRTADGSEFESPKKKAKVE

SEQ ID NO: 7536 - protein, 2096 aa, synthetic construct
MPAAKRVKLDGGDKKYSIGLDIGTNSVGWAVITDEYKVPSKKFKVLGNTDRHSIKKNLIGALLFDSGETAEATRLKRTARRRYTRRKNRICYLQEIFSNEMAKVDDSFFHRLEESFLVEEDKKHERHPIFGNIVDEVAYHEKYPTIYHLRKKLVDSTDKADLRLIYLALAHMIKFRGHFLIEGDLNPDNSDVDKLFIQLVQTYNQLFEENPINASGVDAKAILSARLSKSRRLENLIAQLPGEKKNGLFGNLIALSLGLTPNFKSNFDLAEDAKLQLSKDTYDDDLDNLLAQIGDQYADLFLAAKNLSDAILLSDILRVNTEITKAPLSASMIKRYDEHHQDLTLLKALVRQQLPEKYKEIFFDQSKNGYAGYIDGGASQEEFYKFIKPILEKMDGTEELLVKLNREDLLRKQRTFDNGSIPHQIHLGELHAILRRQEDFYPFLKDNREKIEKILTFRIPYYVGPLARGNSRFAWMTRKSEETITPWNFEEVVDKGASAQSFIERMTNFDKNLPNEKVLPKHSLLYEYFTVYNELTKVKYVTEGMRKPAFLSGEQKKAIVDLLFKTNRKVTVKQLKEDYFKKIECFDSVEISGVEDRFNASLGTYHDLLKIIKDKDFLDNEENEDILEDIVLTLTLFEDREMIEERLKTYAHLFDDKVMKQLKRRRYTGWGRLSRKLINGIRDKQSGKTILDFLKSDGFANRNFMQLIHDDSLTFKEDIQKAQVSGQGDSLHEHIANLAGSPAIKKGILQTVKVVDELVKVMGRHKPENIVIEMARENQTTQKGQKNSRERMKRIEEGIKELGSQILKEHPVENTQLQNEKLYLYYLQNGRDMYVDQELDINRLSDYDVDHIVPQSFLKDDSIDNKVLTRSDKARGKSDNVPSEEVVKKMKNYWRQLLNAKLITQRKFDNLTKAERGGLSELDKAGFIKRQLVETRQITKHVAQILDSRMNTKYDENDKLIREVKVITLKSKLVSDFRKDFQFYKVREINNYHHAHDAYLNAVVGTALIKKYPKLESEFVYGDYKVYDVRKMIAKSEQEIGKATAKYFFYSNIMNFFKTEITLANGEIRKRPLIETNGETGEIVWDKGRDFATVRKVLSMPQVNIVKKTEVQTGGFSKESILPKRNSDKLIARKKDWDPKKYGGFDSPTVAYSVLVVAKVEKGKSKKLKSVKELLGITIMERSSFEKNPIDFLEAKGYKEVKKDLIIKLPKYSLFELENGRKRMLASAGELQKGNELALPSKYVNFLYLASHYEKLKGSPEDNEQKQLFVEQHKHYLDEIIEQISEFSKRVILADANLDKVLSAYNKHRDKPIREQAENIIHLFTLTNLGAPAAFKYFDTTIDRKRYTSTKEVLDATLIHQSITGLYETRIDLSQLGGDGGPAPGGGEAAAKGGTLNIEDEYRLHETSKEPDVSLGSTWLSDFPQAWAETGGMGLAVRQAPLIIPLKATSTPVSIKQYPMSQEARLGIKPHIQRLLDQGILVPCQSPWNTPLLPVKKPGTNDYRPVQDLREVNKRVEDIHPTVPNPYNLLSGLPPSHQWYTVLDLKDAFFCLRLHPTSQPLFAFEWRDPEMGISGQLTWTRLPQGFKNSPTLFNEALHRDLAGFRIQHPDLILLQYVDDLLLAATSELDCQQGTRALLQTLGDLGYRASAKKAQICQKQVKYLGYLLKEGQRWLTEARKETVMGQPIPKTPRQLREFLGTAGFCRLWIPGFAEMAAPLYPLTKPGTLFNWGPDQQKAFQEIKQALLTAPALGLPDLTKPFELFVDEKQGYAKGVLTQKLGPWRRPVAYLSKKLDPVAAGWPPCLRMVAAIAVLTKDAGKLTMGQPLVILAPHAVEALVKQPPDRWLSNARMTHYQALLLDTDRVQFGPVVALNPATLLPLPEEGLQHDCLDILAEAHGTRSDLMDQPLPDADHTWYTDGSSFLQEGQRKAGAAVTTETEVIWARALPAGTSAQRAELIALTQALKMAEGKKLNVYTDSRYAFATAHIHGEIYRRRGWLTSEGKEIKNKDEILALLKALFLPKRLSIIHCPGHQKGNSAEARGNRMADQAAREVATRETPETSTLLAGKRTADGSEFEKRTADGSEFESPKKKAKVE

SEQ ID NO: 7537 - protein, 2096 aa, synthetic construct
MPAAKRVKLDGGDKKYSIGLDIGTNSVGWAVITDEYKVPSKKFKVLGNTDRHSIKKNLIGALLFDSGETAEATRLKRTARRRYTRRKNRICYLQEIFSNEMAKVDDSFFHRLEESFLVEEDKKHERHPIFGNIVDEVAYHEKYPTIYHLRKKLVDSTDKADLRLIYLALAHMIKFRGHFLIEGDLNPDNSDVDKLFIQLVQTYNQLFEENPINASGVDAKAILSARLSKSRRLENLIAQLPGEKKNGLFGNLIALSLGLTPNFKSNFDLAEDAKLQLSKDTYDDDLDNLLAQIGDQYADLFLAAKNLSDAILLSDILRVNTEITKAPLSASMIKRYDEHHQDLTLLKALVRQQLPEKYKEIFFDQSKNGYAGYIDGGASQEEFYKFIKPILEKMDGTEELLVKLNREDLLRKQRTFDNGSIPHQIHLGELHAILRRQEDFYPFLKDNREKIEKILTFRIPYYVGPLARGNSRFAWMTRKSEETITPWNFEEVVDKGASAQSFIERMTNFDKNLPNEKVLPKHSLLYEYFTVYNELTKVKYVTEGMRKPAFLSGEQKKAIVDLLFKTNRKVTVKQLKEDYFKKIECFDSVEISGVEDRFNASLGTYHDLLKIIKDKDFLDNEENEDILEDIVLTLTLFEDREMIEERLKTYAHLFDDKVMKQLKRRRYTGWGRLSRKLINGIRDKQSGKTILDFLKSDGFANRNFMQLIHDDSLTFKEDIQKAQVSGQGDSLHEHIANLAGSPAIKKGILQTVKVVDELVKVMGRHKPENIVIEMARENQTTQKGQKNSRERMKRIEEGIKELGSQILKEHPVENTQLQNEKLYLYYLQNGRDMYVDQELDINRLSDYDVDHIVPQSFLKDDSIDNKVLTRSDKARGKSDNVPSEEVVKKMKNYWRQLLNAKLITQRKFDNLTKAERGGLSELDKAGFIKRQLVETRQITKHVAQILDSRMNTKYDENDKLIREVKVITLKSKLVSDFRKDFQFYKVREINNYHHAHDAYLNAVVGTALIKKYPKLESEFVYGDYKVYDVRKMIAKSEQEIGKATAKYFFYSNIMNFFKTEITLANGEIRKRPLIETNGETGEIVWDKGRDFATVRKVLSMPQVNIVKKTEVQTGGFSKESILPKRNSDKLIARKKDWDPKKYGGFDSPTVAYSVLVVAKVEKGKSKKLKSVKELLGITIMERSSFEKNPIDFLEAKGYKEVKKDLIIKLPKYSLFELENGRKRMLASAGELQKGNELALPSKYVNFLYLASHYEKLKGSPEDNEQKQLFVEQHKHYLDEIIEQISEFSKRVILADANLDKVLSAYNKHRDKPIREQAENIIHLFTLTNLGAPAAFKYFDTTIDRKRYTSTKEVLDATLIHQSITGLYETRIDLSQLGGDGGPAPGGGEAAAKGGTLNIEDEHRLHETSKEPDVSLGSTWLSDFPQAWAETGGMGLAVRQAPLIIPLKATSTPVSIKQYPMSQEARLGIKPHIQRLLDQGILVPCQSPWNTPLLPVKKPGTNDYRPVQDLREVNKRVEDIHPTVPNPYNLLSGLPPSHQWYTVLDLKDAFFCLRLHPTSQPLFAFEWRDPEMGISGQLTWTRLPQGFKNSPTLFNEALHRDLADFRIQHPDLILLQYVDDLLLAATSELDCQQGTRALLQTLGNLGYRASAKKAQICQKQVKYLGYLLKEGQRWLTEARKETVMGQPTPKTPRQLREFLGTAGFCRLWIPGFAEMAAPLYPLTKPGTLFNWGPDQQKAYQEIKQALLTAPALGLPDLTKPFELFVDEKQGYAKGVLTQKLGPWRRPVAYLSKKLDPVAAGWPPCLRMVAAIAVLTKDAGKLTMGQPLVILAPHAVEALVKQPPDRWLSNARMTHYQALLLDTDRVQFGPVVALNPATLLPLPEEGLQHNCLDILAEAHGTRPDLTDQPLPDADHTWYTDGSSLLQEGQRKAGAAVTTETEVIWAKALPAGTSAQRAELIALTQALKMAEGKKLNVYTDSRYAFATAHIHGEIYRRRGWLTSEGKEIKNKDEILALLKALFLPKRLSIIHCPGHQKGHSAEARGNRMADQAARKAAITETPDTSTLLAGKRTADGSEFEKRTADGSEFESPKKKAKVE

SEQ ID NO: 7538 - protein, 2096 aa, synthetic construct
MPAAKRVKLDGGDKKYSIGLDIGTNSVGWAVITDEYKVPSKKFKVLGNTDRHSIKKNLIGALLFDSGETAEATRLKRTARRRYTRRKNRICYLQEIFSNEMAKVDDSFFHRLEESFLVEEDKKHERHPIFGNIVDEVAYHEKYPTIYHLRKKLVDSTDKADLRLIYLALAHMIKFRGHFLIEGDLNPDNSDVDKLFIQLVQTYNQLFEENPINASGVDAKAILSARLSKSRRLENLIAQLPGEKKNGLFGNLIALSLGLTPNFKSNFDLAEDAKLQLSKDTYDDDLDNLLAQIGDQYADLFLAAKNLSDAILLSDILRVNTEITKAPLSASMIKRYDEHHQDLTLLKALVRQQLPEKYKEIFFDQSKNGYAGYIDGGASQEEFYKFIKPILEKMDGTEELLVKLNREDLLRKQRTFDNGSIPHQIHLGELHAILRRQEDFYPFLKDNREKIEKILTFRIPYYVGPLARGNSRFAWMTRKSEETITPWNFEEVVDKGASAQSFIERMTNFDKNLPNEKVLPKHSLLYEYFTVYNELTKVKYVTEGMRKPAFLSGEQKKAIVDLLFKTNRKVTVKQLKEDYFKKIECFDSVEISGVEDRFNASLGTYHDLLKIIKDKDFLDNEENEDILEDIVLTLTLFEDREMIEERLKTYAHLFDDKVMKQLKRRRYTGWGRLSRKLINGIRDKQSGKTILDFLKSDGFANRNFMQLIHDDSLTFKEDIQKAQVSGQGDSLHEHIANLAGSPAIKKGILQTVKVVDELVKVMGRHKPENIVIEMARENQTTQKGQKNSRERMKRIEEGIKELGSQILKEHPVENTQLQNEKLYLYYLQNGRDMYVDQELDINRLSDYDVDHIVPQSFLKDDSIDNKVLTRSDKARGKSDNVPSEEVVKKMKNYWRQLLNAKLITQRKFDNLTKAERGGLSELDKAGFIKRQLVETRQITKHVAQILDSRMNTKYDENDKLIREVKVITLKSKLVSDFRKDFQFYKVREINNYHHAHDAYLNAVVGTALIKKYPKLESEFVYGDYKVYDVRKMIAKSEQEIGKATAKYFFYSNIMNFFKTEITLANGEIRKRPLIETNGETGEIVWDKGRDFATVRKVLSMPQVNIVKKTEVQTGGFSKESILPKRNSDKLIARKKDWDPKKYGGFDSPTVAYSVLVVAKVEKGKSKKLKSVKELLGITIMERSSFEKNPIDFLEAKGYKEVKKDLIIKLPKYSLFELENGRKRMLASAGELQKGNELALPSKYVNFLYLASHYEKLKGSPEDNEQKQLFVEQHKHYLDEIIEQISEFSKRVILADANLDKVLSAYNKHRDKPIREQAENIIHLFTLTNLGAPAAFKYFDTTIDRKRYTSTKEVLDATLIHQSITGLYETRIDLSQLGGDGGPAPGGGEAAAKGGTLNIEDEHRLHETSKEPDVSLGSTWLSDFPQAWAETGGMGLAVRQAPLIIPLKATSTPVSIKQYPMSQEARLGIKPHIQRLLDQGILVPCQSPWNTPLLPVKKPGTNDYRPVQDLREVNKRVEDIHPTVPNPYNLLSGLPPSHQWYTVLDLKDAFFCLRLHPTSQPLFAFEWRDPEMGISGQLTWTRLPQGFKNSPTLFDEALHRDLADFRIQHPDLILLQYVDDLLLAATSELDCQQGTRALLQTLGNLGYRASAKKAQICQKQVKYLGYLLKEGQRWLTEARKETVMGQPTPKTPRQLREFLGTAGFCRLWIPGFAEMAAPLYPLTKTGTLFNWGPDQQKAYQEIKQALLTAPALGLPDLTKPFELFVDEKQGYAKGVLTQKLGPWRRPVAYLSKKLDPVAAGWPPCLRMVAAIAVLTKDAGKLTMGQPLVILAPHAVEALVKQPPDRWLSNARMTHYQALLLDTDRVQFGPVVALNPATLLPLPEEGLQHNCLDILAEAHGTRPDLTDQPLPDADHTWYTDGSSLLQEGQRKAGAAVTTETEVIWAKALPAGTSAQRAELIALTQALKMAEGKKLNVYTDSRYAFATAHIHGEIYRRRGLLTSEGKEIKNKDEILALLKALFLPKRLSIIHCPGHQKGHSAEARGNRMADQAARKAAITETPDTSTLLAGKRTADGSEFEKRTADGSEFESPKKKAKVE

SEQ ID NO: 7539 - protein, 2096 aa, synthetic construct; identical to SEQ ID NO: 7537

SEQ ID NO: 7540 - protein, 2090 aa, synthetic construct
MPAAKRVKLDGGDKKYSIGLDIGTNSVGWAVITDEYKVPSKKFKVLGNTDRHSIKKNLIGALLFDSGETAEATRLKRTARRRYTRRKNRICYLQEIFSNEMAKVDDSFFHRLEESFLVEEDKKHERHPIFGNIVDEVAYHEKYPTIYHLRKKLVDSTDKADLRLIYLALAHMIKFRGHFLIEGDLNPDNSDVDKLFIQLVQTYNQLFEENPINASGVDAKAILSARLSKSRRLENLIAQLPGEKKNGLFGNLIALSLGLTPNFKSNFDLAEDAKLQLSKDTYDDDLDNLLAQIGDQYADLFLAAKNLSDAILLSDILRVNTEITKAPLSASMIKRYDEHHQDLTLLKALVRQQLPEKYKEIFFDQSKNGYAGYIDGGASQEEFYKFIKPILEKMDGTEELLVKLNREDLLRKQRTFDNGSIPHQIHLGELHAILRRQEDFYPFLKDNREKIEKILTFRIPYYVGPLARGNSRFAWMTRKSEETITPWNFEEVVDKGASAQSFIERMTNFDKNLPNEKVLPKHSLLYEYFTVYNELTKVKYVTEGMRKPAFLSGEQKKAIVDLLFKTNRKVTVKQLKEDYFKKIECFDSVEISGVEDRFNASLGTYHDLLKIIKDKDFLDNEENEDILEDIVLTLTLFEDREMIEERLKTYAHLFDDKVMKQLKRRRYTGWGRLSRKLINGIRDKQSGKTILDFLKSDGFANRNFMQLIHDDSLTFKEDIQKAQVSGQGDSLHEHIANLAGSPAIKKGILQTVKVVDELVKVMGRHKPENIVIEMARENQTTQKGQKNSRERMKRIEEGIKELGSQILKEHPVENTQLQNEKLYLYYLQNGRDMYVDQELDINRLSDYDVDHIVPQSFLKDDSIDNKVLTRSDKARGKSDNVPSEEVVKKMKNYWRQLLNAKLITQRKFDNLTKAERGGLSELDKAGFIKRQLVETRQITKHVAQILDSRMNTKYDENDKLIREVKVITLKSKLVSDFRKDFQFYKVREINNYHHAHDAYLNAVVGTALIKKYPKLESEFVYGDYKVYDVRKMIAKSEQEIGKATAKYFFYSNIMNFFKTEITLANGEIRKRPLIETNGETGEIVWDKGRDFATVRKVLSMPQVNIVKKTEVQTGGFSKESILPKRNSDKLIARKKDWDPKKYGGFDSPTVAYSVLVVAKVEKGKSKKLKSVKELLGITIMERSSFEKNPIDFLEAKGYKEVKKDLIIKLPKYSLFELENGRKRMLASAGELQKGNELALPSKYVNFLYLASHYEKLKGSPEDNEQKQLFVEQHKHYLDEIIEQISEFSKRVILADANLDKVLSAYNKHRDKPIREQAENIIHLFTLTNLGAPAAFKYFDTTIDRKRYTSTKEVLDATLIHQSITGLYETRIDLSQLGGDGGPAPGGGEAAAKGGTLQLDDEYRLYSPLVKPDQNIQFWLEQFPQAWAETAGMGLAKQVPPQVIQLKASATPVSVRQYPLSKEAQEGIRPHVQRLIQQGILVPVQSPWNTPLLPVRKPGTNDYRPVQDLREVNKRVQDIHPTVPNPYNLLCALPPQRSWYTVLDLKDAFFCLRLHPTSQPLFAFEWRDPGTGRTGQLTWTRLPQGFKNSPTIFDEALHRDLANFRIQHPQVTLLQYVDDLLLAGATKQDCLEGTKALLLELSDLGYRASAKKAQICRREVTYLGYSLRDGQRWLTEARKKTVVQIPAPTTAKQVREFLGTAGFCRLWIPGFATLAAPLYPLTKEKGEFSWAPEHQKAFDAIKKALLSAPALALPDVTKPFTLYVDERKGVARGVLTQTLGPWRRPVAYLSKKLDPVASGWPVCLKAIAAVAILVKDADKLTLGQNITVIAPHALENIVRQPPDRWMTNARMTHYQSLLLTERVTFAPPAALNPATLLPEETDEPVTHDCHQLLIEETGVRKDLTDIPLTGEVLTWFTDGSSYVVEGKRMAGAAVVDGTRTIWASSLPEGTSAQKAELMALTQALRLAEGKSINIYTDSRYAFATAHVHGAIYKQRGLLTSAGREIKNKEEILSLLEALHLPKRLAIIHCPGHQKAKDPISRGNQMADRVAKQAAQGVNLLAGKRTADGSEFEKRTADGSEFESPKKKAKVE

SEQ ID NO: 7541 - protein, 2090 aa, synthetic construct; identical to SEQ ID NO: 7540

SEQ ID NO: 7542 - protein, 2176 aa, synthetic construct
MPAAKRVKLDGGDKKYSIGLDIGTNSVGWAVITDEYKVPSKKFKVLGNTDRHSIKKNLIGALLFDSGETAEATRLKRTARRRYTRRKNRICYLQEIFSNEMAKVDDSFFHRLEESFLVEEDKKHERHPIFGNIVDEVAYHEKYPTIYHLRKKLVDSTDKADLRLIYLALAHMIKFRGHFLIEGDLNPDNSDVDKLFIQLVQTYNQLFEENPINASGVDAKAILSARLSKSRRLENLIAQLPGEKKNGLFGNLIALSLGLTPNFKSNFDLAEDAKLQLSKDTYDDDLDNLLAQIGDQYADLFLAAKNLSDAILLSDILRVNTEITKAPLSASMIKRYDEHHQDLTLLKALVRQQLPEKYKEIFFDQSKNGYAGYIDGGASQEEFYKFIKPILEKMDGTEELLVKLNREDLLRKQRTFDNGSIPHQIHLGELHAILRRQEDFYPFLKDNREKIEKILTFRIPYYVGPLARGNSRFAWMTRKSEETITPWNFEEVVDKGASAQSFIERMTNFDKNLPNEKVLPKHSLLYEYFTVYNELTKVKYVTEGMRKPAFLSGEQKKAIVDLLFKTNRKVTVKQLKEDYFKKIECFDSVEISGVEDRFNASLGTYHDLLKIIKDKDFLDNEENEDILEDIVLTLTLFEDREMIEERLKTYAHLFDDKVMKQLKRRRYTGWGRLSRKLINGIRDKQSGKTILDFLKSDGFANRNFMQLIHDDSLTFKEDIQKAQVSGQGDSLHEHIANLAGSPAIKKGILQTVKVVDELVKVMGRHKPENIVIEMARENQTTQKGQKNSRERMKRIEEGIKELGSQILKEHPVENTQLQNEKLYLYYLQNGRDMYVDQELDINRLSDYDVDHIVPQSFLKDDSIDNKVLTRSDKARGKSDNVPSEEVVKKMKNYWRQLLNAKLITQRKFDNLTKAERGGLSELDKAGFIKRQLVETRQITKHVAQILDSRMNTKYDENDKLIREVKVITLKSKLVSDFRKDFQFYKVREINNYHHAHDAYLNAVVGTALIKKYPKLESEFVYGDYKVYDVRKMIAKSEQEIGKATAKYFFYSNIMNFFKTEITLANGEIRKRPLIETNGETGEIVWDKGRDFATVRKVLSMPQVNIVKKTEVQTGGFSKESILPKRNSDKLIARKKDWDPKKYGGFDSPTVAYSVLVVAKVEKGKSKKLKSVKELLGITIMERSSFEKNPIDFLEAKGYKEVKKDLIIKLPKYSLFELENGRKRMLASAGELQKGNELALPSKYVNFLYLASHYEKLKGSPEDNEQKQLFVEQHKHYLDEIIEQISEFSKRVILADANLDKVLSAYNKHRDKPIREQAENIIHLFTLTNLGAPAAFKYFDTTIDRKRYTSTKEVLDATLIHQSITGLYETRIDLSQLGGDGGPAPGGGEAAAKGGMDPLQLLQPLEAEIKGTKLKAHWNSGATITCVPEAFLEDERPIQTMLIKTIHGEKQQDVYYLTFKVQGRKVEAEVLASPYDYILLNPSDVPWLMKKPLQLTVLVPLHEYQERLLQQTALPKEQKELLQKLFLKYDALWQHWENQVGHRRIKPHNIATGTLAPRPQKQYPINPKAKPSIQIVIDDLLKQGVLIQQNSTMNTPVYPVPKPDGKWRMVLDYREVNKTIPLIAAQNQHSAGILSSIYRGKYKTTLDLTNGFWAHPITPESYWLTAFTWQGKQYCWTRLPQGFLNSPALFNADVVDLLKEIPNVQAYVDDIYISHDDPQEHLEQLEKIFSILLNAGYVVSLKKSEIAQREVEFLGFNITKEGRGLTDTFKQKLLNITPPKDLKQLQSILGLLNFARNFIPNYSELVKPLYTIVAPANGKFISWTEDNSNQLQHIISVLNQADNLEERNPETRLIIKVNSSPSAGYIRYYNEGSKRPIMYVNYIFSKAEAKFTQTEKLLTTMHKGLIKAMDLAMGQEILVYSPIVSMTKIQRTPLPERKALPVRWITWMTYLEDPRIQFHYDKSLPELQQIPNVTEDVIAKTKHPSEFAMVFYTDGSAIKHPDVNKSHSAGMGIAQVQFIPEYKIVHQWSIPLGDHTAQLAEIAAVEFACKKALKISGPVLIVTDSFYVAESANKELPYWKSNGFLNNKKKPLRHVSKWKSIAECLQLKPDIIIMHEKGHQQPMTTLHTEGNNLADKLATQGSYVVHAGKRTADGSEFEKRTADGSEFESPKKKAKVE

SEQ ID NO: 7543 - protein, 2087 aa, synthetic construct
MPAAKRVKLDGGDKKYSIGLDIGTNSVGWAVITDEYKVPSKKFKVLGNTDRHSIKKNLIGALLFDSGETAEATRLKRTARRRYTRRKNRICYLQEIFSNEMAKVDDSFFHRLEESFLVEEDKKHERHPIFGNIVDEVAYHEKYPTIYHLRKKLVDSTDKADLRLIYLALAHMIKFRGHFLIEGDLNPDNSDVDKLFIQLVQTYNQLFEENPINASGVDAKAILSARLSKSRRLENLIAQLPGEKKNGLFGNLIALSLGLTPNFKSNFDLAEDAKLQLSKDTYDDDLDNLLAQIGDQYADLFLAAKNLSDAILLSDILRVNTEITKAPLSASMIKRYDEHHQDLTLLKALVRQQLPEKYKEIFFDQSKNGYAGYIDGGASQEEFYKFIKPILEKMDGTEELLVKLNREDLLRKQRTFDNGSIPHQIHLGELHAILRRQEDFYPFLKDNREKIEKILTFRIPYYVGPLARGNSRFAWMTRKSEETITPWNFEEVVDKGASAQSFIERMTNFDKNLPNEKVLPKHSLLYEYFTVYNELTKVKYVTEGMRKPAFLSGEQKKAIVDLLFKTNRKVTVKQLKEDYFKKIECFDSVEISGVEDRFNASLGTYHDLLKIIKDKDFLDNEENEDILEDIVLTLTLFEDREMIEERLKTYAHLFDDKVMKQLKRRRYTGWGRLSRKLINGIRDKQSGKTILDFLKSDGFANRNFMQLIHDDSLTFKEDIQKAQVSGQGDSLHEHIANLAGSPAIKKGILQTVKVVDELVKVMGRHKPENIVIEMARENQTTQKGQKNSRERMKRIEEGIKELGSQILKEHPVENTQLQNEKLYLYYLQNGRDMYVDQELDINRLSDYDVDHIVPQSFLKDDSIDNKVLTRSDKARGKSDNVPSEEVVKKMKNYWRQLLNAKLITQRKFDNLTKAERGGLSELDKAGFIKRQLVETRQITKHVAQILDSRMNTKYDENDKLIREVKVITLKSKLVSDFRKDFQFYKVREINNYHHAHDAYLNAVVGTALIKKYPKLESEFVYGDYKVYDVRKMIAKSEQEIGKATAKYFFYSNIMNFFKTEITLANGEIRKRPLIETNGETGEIVWDKGRDFATVRKVLSMPQVNIVKKTEVQTGGFSKESILPKRNSDKLIARKKDWDPKKYGGFDSPTVAYSVLVVAKVEKGKSKKLKSVKELLGITIMERSSFEKNPIDFLEAKGYKEVKKDLIIKLPKYSLFELENGRKRMLASAGELQKGNELALPSKYVNFLYLASHYEKLKGSPEDNEQKQLFVEQHKHYLDEIIEQISEFSKRVILADANLDKVLSAYNKHRDKPIREQAENIIHLFTLTNLGAPAAFKYFDTTIDRKRYTSTKEVLDATLIHQSITGLYETRIDLSQLGGDGGPAPGGGEAAAKGGIPWLMKKPLQLTTLVPLQEYEERLLKQTMLTGSYKEKLQSLFLKYDALWQHWENQVGHRRIKPHHIATGTVNPRPQKQYPINPKAKASIQTVINDLLKQGVLIQQNSIMNTPVYPVPKPDGKWRMVLDYREVNKTIPLIAAQNQHSAGILSSIFRGKYKTTLDLSNGFWAHSITPESYWLTAFTWLGQQYCWTRLPQGFLNSPALFNADVVDLLKEVPNVQVYVDDIYISHDDPREHLEQLEKVFSLLLNAGYVVSLKKSEIAQHEVEFLGFNITKEGRGLTETFKQKLLNITPPRDLKQLQSILGKLNFARNFIPNFSELVKPLYNIIATAPGKYITWTTDNSQQLQNIISMLNSAENLEERNPEVRLIMKVNTSPSAGYIRFYNEFAKRPIMYLNYVYTKAEVKFTNTEKLLTTIHKGLIKALDLGMGQEILVYSPIVSMTKIQKTPLPERKALPIRWITWMSYLEDPRIQFHYDKTLPELQQVPTVTDDIIAKIKHPSEFSMVFYTDGSAIKHPNVNKSHNAGMGIAQVQFKPEFTVINTWSIPLGDHTAQLAEVAAVEFACKKALKIDGPVLIVTDSFYVAESVNKELPYWQSNGFFNNKKKPLKHVSKWKSIADCIQLKPDIIIIHEKGHQPTASTFHTEGNNLADKLATQGSYVVNAGKRTADGSEFEKRTADGSEFESPKKKAKVE

SEQ ID NO: 7544 - protein, 2094 aa, synthetic construct
MPAAKRVKLDGGDKKYSIGLDIGTNSVGWAVITDEYKVPSKKFKVLGNTDRHSIKKNLIGALLFDSGETAEATRLKRTARRRYTRRKNRICYLQEIFSNEMAKVDDSFFHRLEESFLVEEDKKHERHPIFGNIVDEVAYHEKYPTIYHLRKKLVDSTDKADLRLIYLALAHMIKFRGHFLIEGDLNPDNSDVDKLFIQLVQTYNQLFEENPINASGVDAKAILSARLSKSRRLENLIAQLPGEKKNGLFGNLIALSLGLTPNFKSNFDLAEDAKLQLSKDTYDDDLDNLLAQIGDQYADLFLAAKNLSDAILLSDILRVNTEITKAPLSASMIKRYDEHHQDLTLLKALVRQQLPEKYKEIFFDQSKNGYAGYIDGGASQEEFYKFIKPILEKMDGTEELLVKLNREDLLRKQRTFDNGSIPHQIHLGELHAILRRQEDFYPFLKDNREKIEKILTFRIPYYVGPLARGNSRFAWMTRKSEETITPWNFEEVVDKGASAQSFIERMTNFDKNLPNEKVLPKHSLLYEYFTVYNELTKVKYVTEGMRKPAFLSGEQKKAIVDLLFKTNRKVTVKQLKEDYFKKIECFDSVEISGVEDRFNASLGTYHDLLKIIKDKDFLDNEENEDILEDIVLTLTLFEDREMIEERLKTYAHLFDDKVMKQLKRRRYTGWGRLSRKLINGIRDKQSGKTILDFLKSDGFANRNFMQLIHDDSLTFKEDIQKAQVSGQGDSLHEHIANLAGSPAIKKGILQTVKVVDELVKVMGRHKPENIVIEMARENQTTQKGQKNSRERMKRIEEGIKELGSQILKEHPVENTQLQNEKLYLYYLQNGRDMYVDQELDINRLSDYDVDHIVPQSFLKDDSIDNKVLTRSDKARGKSDNVPSEEVVKKMKNYWRQLLNAKLITQRKFDNLTKAERGGLSELDKAGFIKRQLVETRQITKHVAQILDSRMNTKYDENDKLIREVKVITLKSKLVSDFRKDFQFYKVREINNYHHAHDAYLNAVVGTALIKKYPKLESEFVYGDYKVYDVRKMIAKSEQEIGKATAKYFFYSNIMNFFKTEITLANGEIRKRPLIETNGETGEIVWDKGRDFATVRKVLSMPQVNIVKKTEVQTGGFSKESILPKRNSDKLIARKKDWDPKKYGGFDSPTVAYSVLVVAKVEKGKSKKLKSVKELLGITIMERSSFEKNPIDFLEAKGYKEVKKDLIIKLPKYSLFELENGRKRMLASAGELQKGNELALPSKYVNFLYLASHYEKLKGSPEDNEQKQLFVEQHKHYLDEIIEQISEFSKRVILADANLDKVLSAYNKHRDKPIREQAENIIHLFTLTNLGAPAAFKYFDTTIDRKRYTSTKEVLDATLIHQSITGLYETRIDLSQLGGDGGPAPGGGEAAAKGGVLNLEEEYRLHEKPVPSSIDPSWLQLFPTVWAERAGMGLANQVPPVVVELRSGASPVAVRQYPMSKEAREGIRPHIQRFLDLGVLVPCQSPWNTPLLPVKKPGTNDYRPVQDLREINKRVQDIHPTVPNPYNLLSSLPPSHTWYSVLDLKDAFFCLKLHPNSQPLFAFEWRDPEKGNTGQLTWTRLPQGFKNSPTLFNEALHRDLAPFRALNPQVVLLQYVDDLLVAAPTYRDCKEGTQKLLQELSKLGYRVSAKKAQLCQKEVTYLGYLLKEGKRWLTPARKATVMKIPPPTTPRQVREFLGTAGFCRLWIPGFASLAAPLYPLTKPSIPFIWTEEHQKAFDRIKEALLSAPALALPDLTKPFTLYVDERAGVARGVLTQTLGPWRRPVAYLSKKLDPVASGWPTCLKAVAAVALLLKDADKLTLGQNVTVIASHSLESIVRQPPDRWMTNARMTHYQSLLLNERVSFAPPAVLNPATLLPVESEATPVHRCSEILAEETGTRRDLKDQPLPGVPAWYTDGSSFIAEGKRRAGAAIVDGKRTVWASSLPEGTSAQKAELVALTQALRLAEGKDINIYTDSRYAFATAHIHGAIYKQRGWLTSAGKDIKNKEEILALLEAIHLPKRVAIIHCPGHQKGNDPVATGNRRADEAAKQAALSTRVLAETTKPAGKRTADGSEFEKRTADGSEFESPKKKAKVE

SEQ ID NO: 7545 - protein, 2094 aa, synthetic construct
MPAAKRVKLDGGDKKYSIGLDIGTNSVGWAVITDEYKVPSKKFKVLGNTDRHSIKKNLIGALLFDSGETAEATRLKRTARRRYTRRKNRICYLQEIFSNEMAKVDDSFFHRLEESFLVEEDKKHERHPIFGNIVDEVAYHEKYPTIYHLRKKLVDSTDKADLRLIYLALAHMIKFRGHFLIEGDLNPDNSDVDKLFIQLVQTYNQLFEENPINASGVDAKAILSARLSKSRRLENLIAQLPGEKKNGLFGNLIALSLGLTPNFKSNFDLAEDAKLQLSKDTYDDDLDNLLAQIGDQYADLFLAAKNLSDAILLSDILRVNTEITKAPLSASMIKRYDEHHQDLTLLKALVRQQLPEKYKEIFFDQSKNGYAGYIDGGASQEEFYKFIKPILEKMDGTEELLVKLNREDLLRKQRTFDNGSIPHQIHLGELHAILRRQEDFYPFLKDNREKIEKILTFRIPYYVGPLARGNSRFAWMTRKSEETITPWNFEEVVDKGASAQSFIERMTNFDKNLPNEKVLPKHSLLYEYFTVYNELTKVKYVTEGMRKPAFLSGEQKKAIVDLLFKTNRKVTVKQLKEDYFKKIECFDSVEISGVEDRFNASLGTYHDLLKIIKDKDFLDNEENEDILEDIVLTLTLFEDREMIEERLKTYAHLFDDKVMKQLKRRRYTGWGRLSRKLINGIRDKQSGKTILDFLKSDGFANRNFMQLIHDDSLTFKEDIQKAQVSGQGDSLHEHIANLAGSPAIKKGILQTVKVVDELVKVMGRHKPENIVIEMARENQTTQKGQKNSRERMKRIEEGIKELGSQILKEHPVENTQLQNEKLYLYYLQNGRDMYVDQELDINRLSDYDVDHIVPQSFLKDDSIDNKVLTRSDKARGKSDNVPSEEVVKKMKNYWRQLLNAKLITQRKFDNLTKAERGGLSELDKAGFIKRQLVETRQITKHVAQILDSRMNTKYDENDKLIREVKVITLKSKLVSDFRKDFQFYKVREINNYHHAHDAYLNAVVGTALIKKYPKLESEFVYGDYKVYDVRKMIAKSEQEIGKATAKYFFYSNIMNFFKTEITLANGEIRKRPLIETNGETGEIVWDKGRDFATVRKVLSMPQVNIVKKTEVQTGGFSKESILPKRNSDKLIARKKDWDPKKYGGFDSPTVAYSVLVVAKVEKGKSKKLKSVKELLGITIMERSSFEKNPIDFLEAKGYKEVKKDLIIKLPKYSLFELENGRKRMLASAGELQKGNELALPSKYVNFLYLASHYEKLKGSPEDNEQKQLFVEQHKHYLDEIIEQISEFSKRVILADANLDKVLSAYNKHRDKPIREQAENIIHLFTLTNLGAPAAFKYFDTTIDRKRYTSTKEVLDATLIHQSITGLYETRIDLSQLGGDGGPAPGGGEAAAKGGVLNLEEEYRLHEKPVPSSIDPSWLQLFPTVWAERAGMGLANQVPPVVVELRSGASPVAVRQYPMSKEAREGIRPHIQRFLDLGVLVPCQSPWNTPLLPVKKPGTNDYRPVQDLREINKRVQDIHPTVPNPYNLLSSLPPSHTWYSVLDLKDAFFCLKLHPNSQPLFAFEWRDPEKGNTGQLTWTRLPQGFKNSPTLFNEALHRDLAPFRALNPQVVLLQYVDDLLVAAPTYRDCKEGTQKLLQELSKLGYRVSAKKAQLCQKEVTYLGYLLKEGKRWLTPARKATVMKIPPPTTPRQVREFLGKAGFCRLFIPGFASLAAPLYPLTKPSIPFIWTEEHQKAFDRIKEALLSAPALALPDLTKPFTLYVDERAGVARGVLTQTLGPWRRPVAYLSKKLDPVASGWPTCLKAVAAVALLLKDADKLTLGQNVTVIASHSLESIVRQPPDRWMTNARMTHYQSLLLNERVSFAPPAVLNPATLLPVESEATPVHRCSEILAEETGTRRDLKDQPLPGVPAWYTDGSSFIAEGKRRAGAAIVDGKRTVWASSLPEGTSAQKAELVALTQALRLAEGKDINIYTDSRYAFATAHIHGAIYKQRGWLTSAGKDIKNKEEILALLEAIHLPKRVAIIHCPGHQKGNDPVATGNRRADEAAKQAALSTRVLAETTKPAGKRTADGSEFEKRTADGSEFESPKKKAKVE

SEQ ID NO: 7546 - protein, 2096 aa, synthetic construct
MPAAKRVKLDGGDKKYSIGLDIGTNSVGWAVITDEYKVPSKKFKVLGNTDRHSIKKNLIGALLFDSGETAEATRLKRTARRRYTRRKNRICYLQEIFSNEMAKVDDSFFHRLEESFLVEEDKKHERHPIFGNIVDEVAYHEKYPTIYHLRKKLVDSTDKADLRLIYLALAHMIKFRGHFLIEGDLNPDNSDVDKLFIQLVQTYNQLFEENPINASGVDAKAILSARLSKSRRLENLIAQLPGEKKNGLFGNLIALSLGLTPNFKSNFDLAEDAKLQLSKDTYDDDLDNLLAQIGDQYADLFLAAKNLSDAILLSDILRVNTEITKAPLSASMIKRYDEHHQDLTLLKALVRQQLPEKYKEIFFDQSKNGYAGYIDGGASQEEFYKFIKPILEKMDGTEELLVKLNREDLLRKQRTFDNGSIPHQIHLGELHAILRRQEDFYPFLKDNREKIEKILTFRIPYYVGPLARGNSRFAWMTRKSEETITPWNFEEVVDKGASAQSFIERMTNFDKNLPNEKVLPKHSLLYEYFTVYNELTKVKYVTEGMRKPAFLSGEQKKAIVDLLFKTNRKVTVKQLKEDYFKKIECFDSVEISGVEDRFNASLGTYHDLLKIIKDKDFLDNEENEDILEDIVLTLTLFEDREMIEERLKTYAHLFDDKVMKQLKRRRYTGWGRLSRKLINGIRDKQSGKTILDFLKSDGFANRNFMQLIHDDSLTFKEDIQKAQVSGQGDSLHEHIANLAGSPAIKKGILQTVKVVDELVKVMGRHKPENIVIEMARENQTTQKGQKNSRERMKRIEEGIKELGSQILKEHPVENTQLQNEKLYLYYLQNGRDMYVDQELDINRLSDYDVDHIVPQSFLKDDSIDNKVLTRSDKARGKSDNVPSEEVVKKMKNYWRQLLNAKLITQRKFDNLTKAERGGLSELDKAGFIKRQLVETRQITKHVAQILDSRMNTKYDENDKLIREVKVITLKSKLVSDFRKDFQFYKVREINNYHHAHDAYLNAVVGTALIKKYPKLESEFVYGDYKVYDVRKMIAKSEQEIGKATAKYFFYSNIMNFFKTEITLANGEIRKRPLIETNGETGEIVWDKGRDFATVRKVLSMPQVNIVKKTEVQTGGFSKESILPKRNSDKLIARKKDWDPKKYGGFDSPTVAYSVLVVAKVEKGKSKKLKSVKELLGITIMERSSFEKNPIDFLEAKGYKEVKKDLIIKLPKYSLFELENGRKRMLASAGELQKGNELALPSKYVNFLYLASHYEKLKGSPEDNEQKQLFVEQHKHYLDEIIEQISEFSKRVILADANLDKVLSAYNKHRDKPIREQAENIIHLFTLTNLGAPAAFKYFDTTIDRKRYTSTKEVLDATLIHQSITGLYETRIDLSQLGGDGGPAPGGGEAAAKGGTLNIEDEYRLHETSKEPDVPLGSTWLSDFPQAWAETGGMGLAVRQAPLIIPLKATSTPVSIKQYPMSQEARLGIKPHIQRLLDQGILVPCQSPWNTPLLPVKKPGTNDYRPVQDLREVNKRVEDIHPTVPNPYNLLSGLPPSHQWYTVLDLKDAFFCLRLHPTSQPLFAFEWRDPEMGISGQLTWTRLPQGFKNSPTLFNEALHRDLADFRIQHPDLILLQYVDDLLLAATSEQDCQRGTRALLQTLGNLGYRASAKKAQICQKQVKYLGYLLKEGQRWLTEARKETVMGQPTPKTPRQLREFLGTAGFCRLWIPGFAEMAAPLYPLTKPGTLFNWGPDQQKAYQEIKQALLTAPALGLPDLTKPFELFVDEKQGYAKGVLTQKLGPWRRPVAYLSKKLDPVAAGWPPCLRMVAAIAVLTKDAGKLTMGQPLVILAPHAVEALVKQPPDRWLSNARMTHYQAMLLDTDRVQFGPVVALNPATLLPLPEKEAPHDCLEILAETHGTRPDLTDQPIPDADYTWYTDGSSFLQEGQRRAGAAVTTETEVIWARALPAGTSAQRAELIALTQALKMAEGKKLNVYTDSRYAFATAHVHGEIYRRRGWLTSEGREIKNKNEILALLKALFLPKRLSIIHCPGHQKGNSAEARGNRMADQAAREAAMKAVLETSTLLAGKRTADGSEFEKRTADGSEFESPKKKAKVE

SEQ ID NO: 7547 - protein, 2096 aa, synthetic construct
MPAAKRVKLDGGDKKYSIGLDIGTNSVGWAVITDEYKVPSKKFKVLGNTDRHSIKKNLIGALLFDSGETAEATRLKRTARRRYTRRKNRICYLQEIFSNEMAKVDDSFFHRLEESFLVEEDKKHERHPIFGNIVDEVAYHEKYPTIYHLRKKLVDSTDKADLRLIYLALAHMIKFRGHFLIEGDLNPDNSDVDKLFIQLVQTYNQLFEENPINASGVDAKAILSARLSKSRRLENLIAQLPGEKKNGLFGNLIALSLGLTPNFKSNFDLAEDAKLQLSKDTYDDDLDNLLAQIGDQYADLFLAAKNLSDAILLSDILRVNTEITKAPLSASMIKRYDEHHQDLTLLKALVRQQLPEKYKEIFFDQSKNGYAGYIDGGASQEEFYKFIKPILEKMDGTEELLVKLNREDLLRKQRTFDNGSIPHQIHLGELHAILRRQEDFYPFLKDNREKIEKILTFRIPYYVGPLARGNSRFAWMTRKSEETITPWNFEEVVDKGASAQSFIERMTNFDKNLPNEKVLPKHSLLYEYFTVYNELTKVKYVTEGMRKPAFLSGEQKKAIVDLLFKTNRKVTVKQLKEDYFKKIECFDSVEISGVEDRFNASLGTYHDLLKIIKDKDFLDNEENEDILEDIVLTLTLFEDREMIEERLKTYAHLFDDKVMKQLKRRRYTGWGRLSRKLINGIRDKQSGKTILDFLKSDGFANRNFMQLIHDDSLTFKEDIQKAQVSGQGDSLHEHIANLAGSPAIKKGILQTVKVVDELVKVMGRHKPENIVIEMARENQTTQKGQKNSRERMKRIEEGIKELGSQILKEHPVENTQLQNEKLYLYYLQNGRDMYVDQELDINRLSDYDVDHIVPQSFLKDDSIDNKVLTRSDKARGKSDNVPSEEVVKKMKNYWRQLLNAKLITQRKFDNLTKAERGGLSELDKAGFIKRQLVETRQITKHVAQILDSRMNTKYDENDKLIREVKVITLKSKLVSDFRKDFQFYKVREINNYHHAHDAYLNAVVGTALIKKYPKLESEFVYGDYKVYDVRKMIAKSEQEIGKATAKYFFYSNIMNFFKTEITLANGEIRKRPLIETNGETGEIVWDKGRDFATVRKVLSMPQVNIVKKTEVQTGGFSKESILPKRNSDKLIARKKDWDPKKYGGFDSPTVAYSVLVVAKVEKGKSKKLKSVKELLGITIMERSSFEKNPIDFLEAKGYKEVKKDLIIKLPKYSLFELENGRKRMLASAGELQKGNELALPSKYVNFLYLASHYEKLKGSPEDNEQKQLFVEQHKHYLDEIIEQISEFSKRVILADANLDKVLSAYNKHRDKPIREQAENIIHLFTLTNLGAPAAFKYFDTTIDRKRYTSTKEVLDATLIHQSITGLYETRIDLSQLGGDGGPAPGGGEAAAKGGTLNIEDEYRLHETSKEPDVPLGSTWLSDFPQAWAETGGMGLAVRQAPLIIPLKATSTPVSIKQYPMSQEARLGIKPHIQRLLDQGILVPCQSPWNTPLLPVKKPGTNDYRPVQDLREVNKRVEDIHPTVPNPYNLLSGLPPSHQWYTVLDLKDAFFCLRLHPTSQPLFAFEWRDPEMGISGQLTWTRLPQGFKNSPTLFNEALHRDLADFRIQHPDLILLQYVDDLLLAATSEQDCQRGTRALLQTLGNLGYRASAKKAQICQKQVKYLGYLLKEGQRWLTEARKETVMGQPTPKTPRQLREFLGKAGFCRLFIPGFAEMAAPLYPLTKPGTLFNWGPDQQKAYQEIKQALLTAPALGLPDLTKPFELFVDEKQGYAKGVLTQKLGPWRRPVAYLSKKLDPVAAGWPPCLRMVAAIAVLTKDAGKLTMGQPLVILAPHAVEALVKQPPDRWLSNARMTHYQAMLLDTDRVQFGPVVALNPATLLPLPEKEAPHDCLEILAETHGTRPDLTDQPIPDADYTWYTDGSSFLQEGQRRAGAAVTTETEVIWARALPAGTSAQRAELIALTQALKMAEGKKLNVYTDSRYAFATAHVHGEIYRRRGWLTSEGREIKNKNEILALLKALFLPKRLSIIHCPGHQKGNSAEARGNRMADQAAREAAMKAVLETSTLLAGKRTADGSEFEKRTADGSEFESPKKKAKVE

SEQ ID NO: 7548 - protein, 2173 aa, synthetic construct
MPAAKRVKLDGGDKKYSIGLDIGTNSVGWAVITDEYKVPSKKFKVLGNTDRHSIKKNLIGALLFDSGETAEATRLKRTARRRYTRRKNRICYLQEIFSNEMAKVDDSFFHRLEESFLVEEDKKHERHPIFGNIVDEVAYHEKYPTIYHLRKKLVDSTDKADLRLIYLALAHMIKFRGHFLIEGDLNPDNSDVDKLFIQLVQTYNQLFEENPINASGVDAKAILSARLSKSRRLENLIAQLPGEKKNGLFGNLIALSLGLTPNFKSNFDLAEDAKLQLSKDTYDDDLDNLLAQIGDQYADLFLAAKNLSDAILLSDILRVNTEITKAPLSASMIKRYDEHHQDLTLLKALVRQQLPEKYKEIFFDQSKNGYAGYIDGGASQEEFYKFIKPILEKMDGTEELLVKLNREDLLRKQRTFDNGSIPHQIHLGELHAILRRQEDFYPFLKDNREKIEKILTFRIPYYVGPLARGNSRFAWMTRKSEETITPWNFEEVVDKGASAQSFIERMTNFDKNLPNEKVLPKHSLLYEYFTVYNELTKVKYVTEGMRKPAFLSGEQKKAIVDLLFKTNRKVTVKQLKEDYFKKIECFDSVEISGVEDRFNASLGTYHDLLKIIKDKDFLDNEENEDILEDIVLTLTLFEDREMIEERLKTYAHLFDDKVMKQLKRRRYTGWGRLSRKLINGIRDKQSGKTILDFLKSDGFANRNFMQLIHDDSLTFKEDIQKAQVSGQGDSLHEHIANLAGSPAIKKGILQTVKVVDELVKVMGRHKPENIVIEMARENQTTQKGQKNSRERMKRIEEGIKELGSQILKEHPVENTQLQNEKLYLYYLQNGRDMYVDQELDINRLSDYDVDHIVPQSFLKDDSIDNKVLTRSDKARGKSDNVPSEEVVKKMKNYWRQLLNAKLITQRKFDNLTKAERGGLSELDKAGFIKRQLVETRQITKHVAQILDSRMNTKYDENDKLIREVKVITLKSKLVSDFRKDFQFYKVREINNYHHAHDAYLNAVVGTALIKKYPKLESEFVYGDYKVYDVRKMIAKSEQEIGKATAKYFFYSNIMNFFKTEITLANGEIRKRPLIETNGETGEIVWDKGRDFATVRKVLSMPQVNIVKKTEVQTGGFSKESILPKRNSDKLIARKKDWDPKKYGGFDSPTVAYSVLVVAKVEKGKSKKLKSVKELLGITIMERSSFEKNPIDFLEAKGYKEVKKDLIIKLPKYSLFELENGRKRMLASAGELQKGNELALPSKYVNFLYLASHYEKLKGSPEDNEQKQLFVEQHKHYLDEIIEQISEFSKRVILADANLDKVLSAYNKHRDKPIREQAENIIHLFTLTNLGAPAAFKYFDTTIDRKRYTSTKEVLDATLIHQSITGLYETRIDLSQLGGDGGPAPEAAAKGGGGGMDLLKPLTVERKGVKIKGYWNSQADITCVPKDLLQGEEPVRQQNVTTIHGTQEGDVYYVNLKIDGRRINTEVIGTTLDYAIITPGDVPWILKKPLELTIKLDLEEQQGTLLNNSILSKKGKEELKQLFEKYSALWQSWENQVGHRRIRPHKIATGTVKPTPQKQYHINPKAKPDIQIVINDLLKQGVLIQKESTMNTPVYPVPKPNGRWRMVLDYRAVNKVTPLIAVQNQHSYGILGSLFKGRYKTTIDLSNGFWAHPIVPEDYWITAFTWQGKQYCWTVLPQGFLNSPGLFTGDVVDLLQGIPNVEVYVDDVYISHDSEKEHLEYLDILFNRLKEAGYIISLKKSNIANSIVDFLGFQITNEGRGLTDTFKEKLENITAPTTLKQLQSILGLLNFARNFIPDFTELIAPLYALIPKSTKNYVPWQIEHSTTLETLITKLNGAEYLQGRKGDKTLIMKVNASYTTGYIRYYNEGEKKPISYVSIVFSKTELKFTELEKLLTTVHKGLLKALDLSMGQNIHVYSPIVSMQNIQKTPQTAKKALASRWLSWLSYLEDPRIRFFYDPQMPALKDLPAVDTGKDNKKHPSNFQHIFYTDGSAITSPTKEGHLNAGMGIVYFINKDGNLQKQQEWSISLGNHTAQFAEIAAFEFALKKCLPLGGNILVVTDSNYVAKAYNEELDVWASNGFVNNRKKPLKHISKWKSVADLKRLRPDVVVTHEPGHQKLDSSPHAYGNNLADQLATQASFKVHAGKRTADGSEFEKRTADGSEFESPKKKAKVE

SEQ ID NO: 7549 - protein, 2087 aa, synthetic construct
MPAAKRVKLDGGDKKYSIGLDIGTNSVGWAVITDEYKVPSKKFKVLGNTDRHSIKKNLIGALLFDSGETAEATRLKRTARRRYTRRKNRICYLQEIFSNEMAKVDDSFFHRLEESFLVEEDKKHERHPIFGNIVDEVAYHEKYPTIYHLRKKLVDSTDKADLRLIYLALAHMIKFRGHFLIEGDLNPDNSDVDKLFIQLVQTYNQLFEENPINASGVDAKAILSARLSKSRRLENLIAQLPGEKKNGLFGNLIALSLGLTPNFKSNFDLAEDAKLQLSKDTYDDDLDNLLAQIGDQYADLFLAAKNLSDAILLSDILRVNTEITKAPLSASMIKRYDEHHQDLTLLKALVRQQLPEKYKEIFFDQSKNGYAGYIDGGASQEEFYKFIKPILEKMDGTEELLVKLNREDLLRKQRTFDNGSIPHQIHLGELHAILRRQEDFYPFLKDNREKIEKILTFRIPYYVGPLARGNSRFAWMTRKSEETITPWNFEEVVDKGASAQSFIERMTNFDKNLPNEKVLPKHSLLYEYFTVYNELTKVKYVTEGMRKPAFLSGEQKKAIVDLLFKTNRKVTVKQLKEDYFKKIECFDSVEISGVEDRFNASLGTYHDLLKIIKDKDFLDNEENEDILEDIVLTLTLFEDREMIEERLKTYAHLFDDKVMKQLKRRRYTGWGRLSRKLINGIRDKQSGKTILDFLKSDGFANRNFMQLIHDDSLTFKEDIQKAQVSGQGDSLHEHIANLAGSPAIKKGILQTVKVVDELVKVMGRHKPENIVIEMARENQTTQKGQKNSRERMKRIEEGIKELGSQILKEHPVENTQLQNEKLYLYYLQNGRDMYVDQELDINRLSDYDVDHIVPQSFLKDDSIDNKVLTRSDKARGKSDNVPSEEVVKKMKNYWRQLLNAKLITQRKFDNLTKAERGGLSELDKAGFIKRQLVETRQITKHVAQILDSRMNTKYDENDKLIREVKVITLKSKLVSDFRKDFQFYKVREINNYHHAHDAYLNAVVGTALIKKYPKLESEFVYGDYKVYDVRKMIAKSEQEIGKATAKYFFYSNIMNFFKTEITLANGEIRKRPLIETNGETGEIVWDKGRDFATVRKVLSMPQVNIVKKTEVQTGGFSKESILPKRNSDKLIARKKDWDPKKYGGFDSPTVAYSVLVVAKVEKGKSKKLKSVKELLGITIMERSSFEKNPIDFLEAKGYKEVKKDLIIKLPKYSLFELENGRKRMLASAGELQKGNELALPSKYVNFLYLASHYEKLKGSPEDNEQKQLFVEQHKHYLDEIIEQISEFSKRVILADANLDKVLSAYNKHRDKPIREQAENIIHLFTLTNLGAPAAFKYFDTTIDRKRYTSTKEVLDATLIHQSITGLYETRIDLSQLGGDGGPAPEAAAKGGGGGVPWILKKPLELTIKLDLEEQQGTLLNNSILSKKGKEELKQLFEKYSALWQSWENQVGHRRIRPHKIATGTVKPTPQKQYHINPKAKPDIQIVINDLLKQGVLIQKESTMNTPVYPVPKPNGRWRMVLDYRAVNKVTPLIAVQNQHSYGILGSLFKGRYKTTIDLSNGFWAHPIVPEDYWITAFTWQGKQYCWTVLPQGFLNSPGLFTGDVVDLLQGIPNVEVYVDDVYISHDSEKEHLEYLDILFNRLKEAGYIISLKKSNIANSIVDFLGFQITNEGRGLTDTFKEKLENITAPTTLKQLQSILGLLNFARNFIPDFTELIAPLYALIPKSTKNYVPWQIEHSTTLETLITKLNGAEYLQGRKGDKTLIMKVNASYTTGYIRYYNEGEKKPISYVSIVFSKTELKFTELEKLLTTVHKGLLKALDLSMGQNIHVYSPIVSMQNIQKTPQTAKKALASRWLSWLSYLEDPRIRFFYDPQMPALKDLPAVDTGKDNKKHPSNFQHIFYTDGSAITSPTKEGHLNAGMGIVYFINKDGNLQKQQEWSISLGNHTAQFAEIAAFEFALKKCLPLGGNILVVTDSNYVAKAYNEELDVWASNGFVNNRKKPLKHISKWKSVADLKRLRPDVVVTHEPGHQKLDSSPHAYGNNLADQLATQASFKVHAGKRTADGSEFEKRTADGSEFESPKKKAKVE

SEQ ID NO: 7550 - protein, 2095 aa, synthetic construct
MPAAKRVKLDGGDKKYSIGLDIGTNSVGWAVITDEYKVPSKKFKVLGNTDRHSIKKNLIGALLFDSGETAEATRLKRTARRRYTRRKNRICYLQEIFSNEMAKVDDSFFHRLEESFLVEEDKKHERHPIFGNIVDEVAYHEKYPTIYHLRKKLVDSTDKADLRLIYLALAHMIKFRGHFLIEGDLNPDNSDVDKLFIQLVQTYNQLFEENPINASGVDAKAILSARLSKSRRLENLIAQLPGEKKNGLFGNLIALSLGLTPNFKSNFDLAEDAKLQLSKDTYDDDLDNLLAQIGDQYADLFLAAKNLSDAILLSDILRVNTEITKAPLSASMIKRYDEHHQDLTLLKALVRQQLPEKYKEIFFDQSKNGYAGYIDGGASQEEFYKFIKPILEKMDGTEELLVKLNREDLLRKQRTFDNGSIPHQIHLGELHAILRRQEDFYPFLKDNREKIEKILTFRIPYYVGPLARGNSRFAWMTRKSEETITPWNFEEVVDKGASAQSFIERMTNFDKNLPNEKVLPKHSLLYEYFTVYNELTKVKYVTEGMRKPAFLSGEQKKAIVDLLFKTNRKVTVKQLKEDYFKKIECFDSVEISGVEDRFNASLGTYHDLLKIIKDKDFLDNEENEDILEDIVLTLTLFEDREMIEERLKTYAHLFDDKVMKQLKRRRYTGWGRLSRKLINGIRDKQSGKTILDFLKSDGFANRNFMQLIHDDSLTFKEDIQKAQVSGQGDSLHEHIANLAGSPAIKKGILQTVKVVDELVKVMGRHKPENIVIEMARENQTTQKGQKNSRERMKRIEEGIKELGSQILKEHPVENTQLQNEKLYLYYLQNGRDMYVDQELDINRLSDYDVDHIVPQSFLKDDSIDNKVLTRSDKARGKSDNVPSEEVVKKMKNYWRQLLNAKLITQRKFDNLTKAERGGLSELDKAGFIKRQLVETRQITKHVAQILDSRMNTKYDENDKLIREVKVITLKSKLVSDFRKDFQFYKVREINNYHHAHDAYLNAVVGTALIKKYPKLESEFVYGDYKVYDVRKMIAKSEQEIGKATAKYFFYSNIMNFFKTEITLANGEIRKRPLIETNGETGEIVWDKGRDFATVRKVLSMPQVNIVKKTEVQTGGFSKESILPKRNSDKLIARKKDWDPKKYGGFDSPTVAYSVLVVAKVEKGKSKKLKSVKELLGITIMERSSFEKNPIDFLEAKGYKEVKKDLIIKLPKYSLFELENGRKRMLASAGELQKGNELALPSKYVNFLYLASHYEKLKGSPEDNEQKQLFVEQHKHYLDEIIEQISEFSKRVILADANLDKVLSAYNKHRDKPIREQAENIIHLFTLTNLGAPAAFKYFDTTIDRKRYTSTKEVLDATLIHQSITGLYETRIDLSQLGGDGGPAPEAAAKGGGGGTLQLEEEYRLFEPESTQKQEMDIWLKNFPQAWAETGGMGTAHCQAPVLIQLKATATPISIRQYPMPHEAYQGIKPHIRRMLDQGILKPCQSPWNTPLLPVKKPGTEDYRPVQDLREVNKRVEDIHPTVPNPYNLLSTLPPSHPWYTVLDLKDAFFCLRLHSESQLLFAFEWRDPEIGLSGQLTWTRLPQGFKNSPTLFNEALHSDLADFRVRYPALVLLQYVDDLLLAAATRTECLEGTKALLETLGNKGYRASAKKAQICLQEVTYLGYSLKDGQRWLTKARKEAILSIPVPKNSRQVREFLGTAGYCRLWIPGFAELAAPLYPLTRPGTLFQWGTEQQLAFEDIKKALLSSPALGLPDITKPFELFIDENSGFAKGVLVQKLGPWKRPVAYLSKKLDTVASGWPPCLRMVAAIAILVKDAGKLTLGQPLTILTSHPVEALVRQPPNKWLSNARMTHYQAMLLDAERVHFGPTVSLNPATLLPLPSGGNHHDCLQILAETHGTRPDLTDQPLPDADLTWYTDGSSFIRNGEREAGAAVTTESEVIWAAPLPPGTSAQRAELIALTQALKMAEGKKLTVYTDSRYAFATTHVHGEIYRRRGWLTSEGKEIKNKNEILALLEALFLPKRLSIIHCPGHQKGDSPQAKGNRLADDTAKKAATETHSSLTVLPAGKRTADGSEFEKRTADGSEFESPKKKAKVE

SEQ ID NO: 7551 - protein, 2087 aa, synthetic construct
MPAAKRVKLDGGDKKYSIGLDIGTNSVGWAVITDEYKVPSKKFKVLGNTDRHSIKKNLIGALLFDSGETAEATRLKRTARRRYTRRKNRICYLQEIFSNEMAKVDDSFFHRLEESFLVEEDKKHERHPIFGNIVDEVAYHEKYPTIYHLRKKLVDSTDKADLRLIYLALAHMIKFRGHFLIEGDLNPDNSDVDKLFIQLVQTYNQLFEENPINASGVDAKAILSARLSKSRRLENLIAQLPGEKKNGLFGNLIALSLGLTPNFKSNFDLAEDAKLQLSKDTYDDDLDNLLAQIGDQYADLFLAAKNLSDAILLSDILRVNTEITKAPLSASMIKRYDEHHQDLTLLKALVRQQLPEKYKEIFFDQSKNGYAGYIDGGASQEEFYKFIKPILEKMDGTEELLVKLNREDLLRKQRTFDNGSIPHQIHLGELHAILRRQEDFYPFLKDNREKIEKILTFRIPYYVGPLARGNSRFAWMTRKSEETITPWNFEEVVDKGASAQSFIERMTNFDKNLPNEKVLPKHSLLYEYFTVYNELTKVKYVTEGMRKPAFLSGEQKKAIVDLLFKTNRKVTVKQLKEDYFKKIECFDSVEISGVEDRFNASLGTYHDLLKIIKDKDFLDNEENEDILEDIVLTLTLFEDREMIEERLKTYAHLFDDKVMKQLKRRRYTGWGRLSRKLINGIRDKQSGKTILDFLKSDGFANRNFMQLIHDDSLTFKEDIQKAQVSGQGDSLHEHIANLAGSPAIKKGILQTVKVVDELVKVMGRHKPENIVIEMARENQTTQKGQKNSRERMKRIEEGIKELGSQILKEHPVENTQLQNEKLYLYYLQNGRDMYVDQELDINRLSDYDVDHIVPQSFLKDDSIDNKVLTRSDKARGKSDNVPSEEVVKKMKNYWRQLLNAKLITQRKFDNLTKAERGGLSELDKAGFIKRQLVETRQITKHVAQILDSRMNTKYDENDKLIREVKVITLKSKLVSDFRKDFQFYKVREINNYHHAHDAYLNAVVGTALIKKYPKLESEFVYGDYKVYDVRKMIAKSEQEIGKATAKYFFYSNIMNFFKTEITLANGEIRKRPLIETNGETGEIVWDKGRDFATVRKVLSMPQVNIVKKTEVQTGGFSKESILPKRNSDKLIARKKDWDPKKYGGFDSPTVAYSVLVVAKVEKGKSKKLKSVKELLGITIMERSSFEKNPIDFLEAKGYKEVKKDLIIKLPKYSLFELENGRKRMLASAGELQKGNELALPSKYVNFLYLASHYEKLKGSPEDNEQKQLFVEQHKHYLDEIIEQISEFSKRVILADANLDKVLSAYNKHRDKPIREQAENIIHLFTLTNLGAPAAFKYFDTTIDRKRYTSTKEVLDATLIHQSITGLYETRIDLSQLGGDGGPAPEAAAKGGGGGVPWLTQQPLQLTILVPLQEYQEKILSKTALPEDQKQQLKTLFVKYDNLWQHWENQVGHRKIRPHNIATGDYPPRPQKQYPINPKAKPSIQIVIDDLLKQGVLTPQNSTMNTPVYPVPKPDGRWRMVLDYREVNKTIPLTAAQNQHSAGILATIVRQKYKTTLDLANGFWAHPITPESYWLTAFTWQGKQYCWTRLPQGFLNSPALFNADVVDLLKEIPNVQVYVDDIYLSHDDPKEHVQQLEKVFQILLQAGYVVSLKKSEIGQKTVEFLGFNITKEGRGLTDTFKTKLLNITPPKDLKQLQSILGKLNFARNFIPNFAELVQPLYNLIAPAKGKYIEWSEENTKQLNMVIEALNTASNLEERLPEQRLVIKVNTSPSAGYVRYYNETGKKPIMYLNYVFSKAELKFSMLEKLLTTMHKALIKAMDLAMGQEILVYSPIVSMTKIQKTPLPERKALPIRWITWMTYLEDPRIQFHYDKTLPELKHIPDVYTSSQSPVKHPSQYEGVFYTDGSAIKSPDPTKSNNAGMGIVHATYKPEYQVLNQWSIPLGNHTAQMAEIAAVEFACKKALKIPGPVLVITDSFYVAESANKELPYWKSNGFVNNKKKPLKHISKWKSIAECLSMKPDITIQHEKGISLQIPVFILKGNALADKLATQGSYVVNAGKRTADGSEFEKRTADGSEFESPKKKAKVE

SEQ ID NO: 7552 - protein, 2176 aa, synthetic construct
MPAAKRVKLDGGDKKYSIGLDIGTNSVGWAVITDEYKVPSKKFKVLGNTDRHSIKKNLIGALLFDSGETAEATRLKRTARRRYTRRKNRICYLQEIFSNEMAKVDDSFFHRLEESFLVEEDKKHERHPIFGNIVDEVAYHEKYPTIYHLRKKLVDSTDKADLRLIYLALAHMIKFRGHFLIEGDLNPDNSDVDKLFIQLVQTYNQLFEENPINASGVDAKAILSARLSKSRRLENLIAQLPGEKKNGLFGNLIALSLGLTPNFKSNFDLAEDAKLQLSKDTYDDDLDNLLAQIGDQYADLFLAAKNLSDAILLSDILRVNTEITKAPLSASMIKRYDEHHQDLTLLKALVRQQLPEKYKEIFFDQSKNGYAGYIDGGASQEEFYKFIKPILEKMDGTEELLVKLNREDLLRKQRTFDNGSIPHQIHLGELHAILRRQEDFYPFLKDNREKIEKILTFRIPYYVGPLARGNSRFAWMTRKSEETITPWNFEEVVDKGASAQSFIERMTNFDKNLPNEKVLPKHSLLYEYFTVYNELTKVKYVTEGMRKPAFLSGEQKKAIVDLLFKTNRKVTVKQLKEDYFKKIECFDSVEISGVEDRFNASLGTYHDLLKIIKDKDFLDNEENEDILEDIVLTLTLFEDREMIEERLKTYAHLFDDKVMKQLKRRRYTGWGRLSRKLINGIRDKQSGKTILDFLKSDGFANRNFMQLIHDDSLTFKEDIQKAQVSGQGDSLHEHIANLAGSPAIKKGILQTVKVVDELVKVMGRHKPENIVIEMARENQTTQKGQKNSRERMKRIEEGIKELGSQILKEHPVENTQLQNEKLYLYYLQNGRDMYVDQELDINRLSDYDVDHIVPQSFLKDDSIDNKVLTRSDKARGKSDNVPSEEVVKKMKNYWRQLLNAKLITQRKFDNLTKAERGGLSELDKAGFIKRQLVETRQITKHVAQILDSRMNTKYDENDKLIREVKVITLKSKLVSDFRKDFQFYKVREINNYHHAHDAYLNAVVGTALIKKYPKLESEFVYGDYKVYDVRKMIAKSEQEIGKATAKYFFYSNIMNFFKTEITLANGEIRKRPLIETNGETGEIVWDKGRDFATVRKVLSMPQVNIVKKTEVQTGGFSKESILPKRNSDKLIARKKDWDPKKYGGFDSPTVAYSVLVVAKVEKGKSKKLKSVKELLGITIMERSSFEKNPIDFLEAKGYKEVKKDLIIKLPKYSLFELENGRKRMLASAGELQKGNELALPSKYVNFLYLASHYEKLKGSPEDNEQKQLFVEQHKHYLDEIIEQISEFSKRVILADANLDKVLSAYNKHRDKPIREQAENIIHLFTLTNLGAPAAFKYFDTTIDRKRYTSTKEVLDATLIHQSITGLYETRIDLSQLGGDGGPAPEAAAKGGGGGMNPLQLLQPLPAEIKGTKLLAHWNSGATITCIPESFLEDEQPIKKTLIKTIHGEKQQNVYYVTFKVKGRKVEAEVIASPYEYILLSPTDVPWLTQQPLQLTILVPLQEYQEKILSKTALPEDQKQQLKTLFVKYDNLWQHWENQVGHRKIRPHNIATGDYPPRPQKQYPINPKAKPSIQIVIDDLLKQGVLTPQNSTMNTPVYPVPKPDGRWRMVLDYREVNKTIPLTAAQNQHSAGILATIVRQKYKTTLDLANGFWAHPITPESYWLTAFTWQGKQYCWTRLPQGFLNSPALFNADVVDLLKEIPNVQVYVDDIYLSHDDPKEHVQQLEKVFQILLQAGYVVSLKKSEIGQKTVEFLGFNITKEGRGLTDTFKTKLLNITPPKDLKQLQSILGLLNFARNFIPNFAELVQPLYNLIAPAKGKYIEWSEENTKQLNMVIEALNTASNLEERLPEQRLVIKVNTSPSAGYVRYYNETGKKPIMYLNYVFSKAELKFSMLEKLLTTMHKALIKAMDLAMGQEILVYSPIVSMTKIQKTPLPERKALPIRWITWMTYLEDPRIQFHYDKTLPELKHIPDVYTSSQSPVKHPSQYEGVFYTDGSAIKSPDPTKSNNAGMGIVHATYKPEYQVLNQWSIPLGNHTAQMAEIAAVEFACKKALKIPGPVLVITDSFYVAESANKELPYWKSNGFVNNKKKPLKHISKWKSIAECLSMKPDITIQHEKGISLQIPVFILKGNALADKLATQGSYVVNAGKRTADGSEFEKRTADGSEFESPKKKAKVE

SEQ ID NO: 7553 - protein, 2176 aa, synthetic construct
MPAAKRVKLDGGDKKYSIGLDIGTNSVGWAVITDEYKVPSKKFKVLGNTDRHSIKKNLIGALLFDSGETAEATRLKRTARRRYTRRKNRICYLQEIFSNEMAKVDDSFFHRLEESFLVEEDKKHERHPIFGNIVDEVAYHEKYPTIYHLRKKLVDSTDKADLRLIYLALAHMIKFRGHFLIEGDLNPDNSDVDKLFIQLVQTYNQLFEENPINASGVDAKAILSARLSKSRRLENLIAQLPGEKKNGLFGNLIALSLGLTPNFKSNFDLAEDAKLQLSKDTYDDDLDNLLAQIGDQYADLFLAAKNLSDAILLSDILRVNTEITKAPLSASMIKRYDEHHQDLTLLKALVRQQLPEKYKEIFFDQSKNGYAGYIDGGASQEEFYKFIKPILEKMDGTEELLVKLNREDLLRKQRTFDNGSIPHQIHLGELHAILRRQEDFYPFLKDNREKIEKILTFRIPYYVGPLARGNSRFAWMTRKSEETITPWNFEEVVDKGASAQSFIERMTNFDKNLPNEKVLPKHSLLYEYFTVYNELTKVKYVTEGMRKPAFLSGEQKKAIVDLLFKTNRKVTVKQLKEDYFKKIECFDSVEISGVEDRFNASLGTYHDLLKIIKDKDFLDNEENEDILEDIVLTLTLFEDREMIEERLKTYAHLFDDKVMKQLKRRRYTGWGRLSRKLINGIRDKQSGKTILDFLKSDGFANRNFMQLIHDDSLTFKEDIQKAQVSGQGDSLHEHIANLAGSPAIKKGILQTVKVVDELVKVMGRHKPENIVIEMARENQTTQKGQKNSRERMKRIEEGIKELGSQILKEHPVENTQLQNEKLYLYYLQNGRDMYVDQELDINRLSDYDVDHIVPQSFLKDDSIDNKVLTRSDKARGKSDNVPSEEVVKKMKNYWRQLLNAKLITQRKFDNLTKAERGGLSELDKAGFIKRQLVETRQITKHVAQILDSRMNTKYDENDKLIREVKVITLKSKLVSDFRKDFQFYKVREINNYHHAHDAYLNAVVGTALIKKYPKLESEFVYGDYKVYDVRKMIAKSEQEIGKATAKYFFYSNIMNFFKTEITLANGEIRKRPLIETNGETGEIVWDKGRDFATVRKVLSMPQVNIVKKTEVQTGGFSKESILPKRNSDKLIARKKDWDPKKYGGFDSPTVAYSVLVVAKVEKGKSKKLKSVKELLGITIMERSSFEKNPIDFLEAKGYKEVKKDLIIKLPKYSLFELENGRKRMLASAGELQKGNELALPSKYVNFLYLASHYEKLKGSPEDNEQKQLFVEQHKHYLDEIIEQISEFSKRVILADANLDKVLSAYNKHRDKPIREQAENIIHLFTLTNLGAPAAFKYFDTTIDRKRYTSTKEVLDATLIHQSITGLYETRIDLSQLGGDGGPAPEAAAKGGGGGMNPLQLLQPLPAEIKGTKLLAHWNSGATITCIPESFLEDEQPIKKTLIKTIHGEKQQNVYYVTFKVKGRKVEAEVIASPYEYILLSPTDVPWLTQQPLQLTILVPLQEYQEKILSKTALPEDQKQQLKTLFVKYDNLWQHWENQVGHRKIRPHNIATGDYPPRPQKQYPINPKAKPSIQIVIDDLLKQGVLTPQNSTMNTPVYPVPKPDGRWRMVLDYREVNKTIPLTAAQNQHSAGILATIVRQKYKTTLDLANGFWAHPITPESYWLTAFTWQGKQYCWTRLPQGFLNSPALFNADVVDLLKEIPNVQVYVDDIYLSHDDPKEHVQQLEKVFQILLQAGYVVSLKKSEIGQKTVEFLGFNITKEGRGLTDTFKTKLLNITPPKDLKQLQSILGKLNFARNFIPNFAELVQPLYNLIAPAKGKYIEWSEENTKQLNMVIEALNTASNLEERLPEQRLVIKVNTSPSAGYVRYYNETGKKPIMYLNYVFSKAELKFSMLEKLLTTMHKALIKAMDLAMGQEILVYSPIVSMTKIQKTPLPERKALPIRWITWMTYLEDPRIQFHYDKTLPELKHIPDVYTSSQSPVKHPSQYEGVFYTDGSAIKSPDPTKSNNAGMGIVHATYKPEYQVLNQWSIPLGNHTAQMAEIAAVEFACKKALKIPGPVLVITDSFYVAESANKELPYWKSNGFVNNKKKPLKHISKWKSIAECLSMKPDITIQHEKGISLQIPVFILKGNALADKLATQGSYVVNAGKRTADGSEFEKRTADGSEFESPKKKAKVE

SEQ ID NO: 7554 - protein, 2094 aa, synthetic construct
MPAAKRVKLDGGDKKYSIGLDIGTNSVGWAVITDEYKVPSKKFKVLGNTDRHSIKKNLIGALLFDSGETAEATRLKRTARRRYTRRKNRICYLQEIFSNEMAKVDDSFFHRLEESFLVEEDKKHERHPIFGNIVDEVAYHEKYPTIYHLRKKLVDSTDKADLRLIYLALAHMIKFRGHFLIEGDLNPDNSDVDKLFIQLVQTYNQLFEENPINASGVDAKAILSARLSKSRRLENLIAQLPGEKKNGLFGNLIALSLGLTPNFKSNFDLAEDAKLQLSKDTYDDDLDNLLAQIGDQYADLFLAAKNLSDAILLSDILRVNTEITKAPLSASMIKRYDEHHQDLTLLKALVRQQLPEKYKEIFFDQSKNGYAGYIDGGASQEEFYKFIKPILEKMDGTEELLVKLNREDLLRKQRTFDNGSIPHQIHLGELHAILRRQEDFYPFLKDNREKIEKILTFRIPYYVGPLARGNSRFAWMTRKSEETITPWNFEEVVDKGASAQSFIERMTNFDKNLPNEKVLPKHSLLYEYFTVYNELTKVKYVTEGMRKPAFLSGEQKKAIVDLLFKTNRKVTVKQLKEDYFKKIECFDSVEISGVEDRFNASLGTYHDLLKIIKDKDFLDNEENEDILEDIVLTLTLFEDREMIEERLKTYAHLFDDKVMKQLKRRRYTGWGRLSRKLINGIRDKQSGKTILDFLKSDGFANRNFMQLIHDDSLTFKEDIQKAQVSGQGDSLHEHIANLAGSPAIKKGILQTVKVVDELVKVMGRHKPENIVIEMARENQTTQKGQKNSRERMKRIEEGIKELGSQILKEHPVENTQLQNEKLYLYYLQNGRDMYVDQELDINRLSDYDVDHIVPQSFLKDDSIDNKVLTRSDKARGKSDNVPSEEVVKKMKNYWRQLLNAKLITQRKFDNLTKAERGGLSELDKAGFIKRQLVETRQITKHVAQILDSRMNTKYDENDKLIREVKVITLKSKLVSDFRKDFQFYKVREINNYHHAHDAYLNAVVGTALIKKYPKLESEFVYGDYKVYDVRKMIAKSEQEIGKATAKYFFYSNIMNFFKTEITLANGEIRKRPLIETNGETGEIVWDKGRDFATVRKVLSMPQVNIVKKTEVQTGGFSKESILPKRNSDKLIARKKDWDPKKYGGFDSPTVAYSVLVVAKVEKGKSKKLKSVKELLGITIMERSSFEKNPIDFLEAKGYKEVKKDLIIKLPKYSLFELENGRKRMLASAGELQKGNELALPSKYVNFLYLASHYEKLKGSPEDNEQKQLFVEQHKHYLDEIIEQISEFSKRVILADANLDKVLSAYNKHRDKPIREQAENIIHLFTLTNLGAPAAFKYFDTTIDRKRYTSTKEVLDATLIHQSITGLYETRIDLSQLGGDGGPAPEAAAKGGGGGVLNLEEEYRLHEKPVPSSIDPSWLQLFPTVWAERAGMGLANQVPPVVVELRSGASPVAVRQYPMSKEAREGIRPHIQKFLDLGVLVPCRSPWNTPLLPVKKPGTNDYRPVQDLREINKRVQDIHPTVPNPYNLLSSLPPSYTWYSVLDLKDAFFCLRLHPNSQPLFAFEWKDPEKGNTGQLTWTRLPQGFKNSPTLFNEALHRDLAPFRALNPQVVLLQYVDDLLVAAPTYEDCKKGTQKLLQELSKLGYRVSAKKAQLCQREVTYLGYLLKEGKRWLTPARKATVMKIPVPTTPRQVREFLGKAGFCRLFIPGFASLAAPLYPLTKPSIPFIWTEEHQQAFDHIKKALLSAPALALPDLTKPFTLYIDERAGVARGVLTQTLGPWRRPVAYLSKKLDPVASGWPTCLKAVAAVALLLKDADKLTLGQNVTVIASHSLESIVRQPPDRWMTNARMTHYQSLLLNERVSFAPPAVLNPATLLPVESEATPVHRCSEILAEETGTRRDLEDQPLPGVPTWYTDGSSFITEGKRRAGAPIVDGKRTVWASSLPEGTSAQKAELVALTQALRLAEGKNINIYTDSRYAFATAHIHGAIYKQRGWLTSAGKDIKNKEEILALLEAIHLPRRVAIIHCPGHQRGSNPVATGNRRADEAAKQAALSTRVLAGTTKPAGKRTADGSEFEKRTADGSEFESPKKKAKVE

SEQ ID NO: 7555 - protein, 2127 aa, synthetic construct; identical to SEQ ID NO: 4537

SEQ ID NO: 7556 - protein, 2218 aa, synthetic construct
MPAAKRVKLDGGDKKYSIGLDIGTNSVGWAVITDEYKVPSKKFKVLGNTDRHSIKKNLIGALLFDSGETAEATRLKRTARRRYTRRKNRICYLQEIFSNEMAKVDDSFFHRLEESFLVEEDKKHERHPIFGNIVDEVAYHEKYPTIYHLRKKLVDSTDKADLRLIYLALAHMIKFRGHFLIEGDLNPDNSDVDKLFIQLVQTYNQLFEENPINASGVDAKAILSARLSKSRRLENLIAQLPGEKKNGLFGNLIALSLGLTPNFKSNFDLAEDAKLQLSKDTYDDDLDNLLAQIGDQYADLFLAAKNLSDAILLSDILRVNTEITKAPLSASMIKRYDEHHQDLTLLKALVRQQLPEKYKEIFFDQSKNGYAGYIDGGASQEEFYKFIKPILEKMDGTEELLVKLNREDLLRKQRTFDNGSIPHQIHLGELHAILRRQEDFYPFLKDNREKIEKILTFRIPYYVGPLARGNSRFAWMTRKSEETITPWNFEEVVDKGASAQSFIERMTNFDKNLPNEKVLPKHSLLYEYFTVYNELTKVKYVTEGMRKPAFLSGEQKKAIVDLLFKTNRKVTVKQLKEDYFKKIECFDSVEISGVEDRFNASLGTYHDLLKIIKDKDFLDNEENEDILEDIVLTLTLFEDREMIEERLKTYAHLFDDKVMKQLKRRRYTGWGRLSRKLINGIRDKQSGKTILDFLKSDGFANRNFMQLIHDDSLTFKEDIQKAQVSGQGDSLHEHIANLAGSPAIKKGILQTVKVVDELVKVMGRHKPENIVIEMARENQTTQKGQKNSRERMKRIEEGIKELGSQILKEHPVENTQLQNEKLYLYYLQNGRDMYVDQELDINRLSDYDVDHIVPQSFLKDDSIDNKVLTRSDKARGKSDNVPSEEVVKKMKNYWRQLLNAKLITQRKFDNLTKAERGGLSELDKAGFIKRQLVETRQITKHVAQILDSRMNTKYDENDKLIREVKVITLKSKLVSDFRKDFQFYKVREINNYHHAHDAYLNAVVGTALIKKYPKLESEFVYGDYKVYDVRKMIAKSEQEIGKATAKYFFYSNIMNFFKTEITLANGEIRKRPLIETNGETGEIVWDKGRDFATVRKVLSMPQVNIVKKTEVQTGGFSKESILPKRNSDKLIARKKDWDPKKYGGFDSPTVAYSVLVVAKVEKGKSKKLKSVKELLGITIMERSSFEKNPIDFLEAKGYKEVKKDLIIKLPKYSLFELENGRKRMLASAGELQKGNELALPSKYVNFLYLASHYEKLKGSPEDNEQKQLFVEQHKHYLDEIIEQISEFSKRVILADANLDKVLSAYNKHRDKPIREQAENIIHLFTLTNLGAPAAFKYFDTTIDRKRYTSTKEVLDATLIHQSITGLYETRIDLSQLGGDGGPAPEAAAKGGGGGTLGDQGSRGSDPLPEPRVTLTVEGIPTEFLVNTGAEHSVLTKPMGKMGSKRTVVAGATGSKVYPWTTKRLLKIGQKQVTHSFLVIPECPAPLLGRDLLTKLKAQIQFSTEGPQVTWEDRPAMCLVLNLEEEYRLHEKPVPPSIDPSWLQLFPMVWAEKAGMGLANQVPPVVVELKSDASPVAVRQYPMSKEAREGIRPHIQRFLDLGILVPCQSPWNTPLLPVKKPGTNDYRPVQDLREVNKRVQDIHPTVPNPYNLLSSLPPSHTWYSVLDLKDAFFCLKLHPNSQPLFAFEWRDPEKGNTGQLTWTRLPQGFKNSPTLFNEALHRDLASFRALNPQVVMLQYVDDLLVAAPTYRDCKEGTRRLLQELSKLGYRVSAKKAQLCREEVTYLGYLLKGGKRWLTPARKATVMKIPTPTTPRQVREFLGTAGFCRLWIPGFASLAAPLYPLTRPKVPFTWTEAHQEAFGRIKEALLSAPALALPDLTKPFALYVDEKEGVARGVLTQTLGPWRRPVAYLSKKLDPVASGWPTCLKAIAAVALLLKDADKLTLGQNVLVIAPHNLESIVRQPPDRWMTNARMTHYQSLLLNERVSFAPPAILNPATLLPVESDDTPIHICSEILAEETGTRPDLRDQPLPGVPAWYTDGSSFIMDGRRQAGAAIVDNKRTVWASNLPEGTSAQKAELIALTQALRLAEGKSINIYTDSRYAFATAHVHGAIYKQRGWLTSAGKDIKNKEEILALLEAIHLPKRVAIIHCPGHQRGTDPVATGNRKADEAAKQAAQSTRILTETTKNAGKRTADGSEFEKRTADGSEFESPKKKAKVE

SEQ ID NO: 7557 - protein, 2218 aa, synthetic construct
MPAAKRVKLDGGDKKYSIGLDIGTNSVGWAVITDEYKVPSKKFKVLGNTDRHSIKKNLIGALLFDSGETAEATRLKRTARRRYTRRKNRICYLQEIFSNEMAKVDDSFFHRLEESFLVEEDKKHERHPIFGNIVDEVAYHEKYPTIYHLRKKLVDSTDKADLRLIYLALAHMIKFRGHFLIEGDLNPDNSDVDKLFIQLVQTYNQLFEENPINASGVDAKAILSARLSKSRRLENLIAQLPGEKKNGLFGNLIALSLGLTPNFKSNFDLAEDAKLQLSKDTYDDDLDNLLAQIGDQYADLFLAAKNLSDAILLSDILRVNTEITKAPLSASMIKRYDEHHQDLTLLKALVRQQLPEKYKEIFFDQSKNGYAGYIDGGASQEEFYKFIKPILEKMDGTEELLVKLNREDLLRKQRTFDNGSIPHQIHLGELHAILRRQEDFYPFLKDNREKIEKILTFRIPYYVGPLARGNSRFAWMTRKSEETITPWNFEEVVDKGASAQSFIERMTNFDKNLPNEKVLPKHSLLYEYFTVYNELTKVKYVTEGMRKPAFLSGEQKKAIVDLLFKTNRKVTVKQLKEDYFKKIECFDSVEISGVEDRFNASLGTYHDLLKIIKDKDFLDNEENEDILEDIVLTLTLFEDREMIEERLKTYAHLFDDKVMKQLKRRRYTGWGRLSRKLINGIRDKQSGKTILDFLKSDGFANRNFMQLIHDDSLTFKEDIQKAQVSGQGDSLHEHIANLAGSPAIKKGILQTVKVVDELVKVMGRHKPENIVIEMARENQTTQKGQKNSRERMKRIEEGIKELGSQILKEHPVENTQLQNEKLYLYYLQNGRDMYVDQELDINRLSDYDVDHIVPQSFLKDDSIDNKVLTRSDKARGKSDNVPSEEVVKKMKNYWRQLLNAKLITQRKFDNLTKAERGGLSELDKAGFIKRQLVETRQITKHVAQILDSRMNTKYDENDKLIREVKVITLKSKLVSDFRKDFQFYKVREINNYHHAHDAYLNAVVGTALIKKYPKLESEFVYGDYKVYDVRKMIAKSEQEIGKATAKYFFYSNIMNFFKTEITLANGEIRKRPLIETNGETGEIVWDKGRDFATVRKVLSMPQVNIVKKTEVQTGGFSKESILPKRNSDKLIARKKDWDPKKYGGFDSPTVAYSVLVVAKVEKGKSKKLKSVKELLGITIMERSSFEKNPIDFLEAKGYKEVKKDLIIKLPKYSLFELENGRKRMLASAGELQKGNELALPSKYVNFLYLASHYEKLKGSPEDNEQKQLFVEQHKHYLDEIIEQISEFSKRVILADANLDKVLSAYNKHRDKPIREQAENIIHLFTLTNLGAPAAFKYFDTTIDRKRYTSTKEVLDATLIHQSITGLYETRIDLSQLGGDGGPAPEAAAKGGGGGTLGDQGSRGSDPLPEPRVTLTVEGIPTEFLVNTGAEHSVLTKPMGKMGSKRTVVAGATGSKVYPWTTKRLLKIGQKQVTHSFLVIPECPAPLLGRDLLTKLKAQIQFSTEGPQVTWEDRPAMCLVLNLEEEYRLHEKPVPPSIDPSWLQLFPMVWAEKAGMGLANQVPPVVVELKSDASPVAVRQYPMSKEAREGIRPHIQRFLDLGILVPCQSPWNTPLLPVKKPGTNDYRPVQDLREVNKRVQDIHPTVPNPYNLLSSLPPSHTWYSVLDLKDAFFCLKLHPNSQPLFAFEWRDPEKGNTGQLTWTRLPQGFKNSPTLFNEALHRDLASFRALNPQVVMLQYVDDLLVAAPTYRDCKEGTRRLLQELSKLGYRVSAKKAQLCREEVTYLGYLLKGGKRWLTPARKATVMKIPTPTTPRQVREFLGKAGFCRLFIPGFASLAAPLYPLTRPKVPFTWTEAHQEAFGRIKEALLSAPALALPDLTKPFALYVDEKEGVARGVLTQTLGPWRRPVAYLSKKLDPVASGWPTCLKAIAAVALLLKDADKLTLGQNVLVIAPHNLESIVRQPPDRWMTNARMTHYQSLLLNERVSFAPPAILNPATLLPVESDDTPIHICSEILAEETGTRPDLRDQPLPGVPAWYTDGSSFIMDGRRQAGAAIVDNKRTVWASNLPEGTSAQKAELIALTQALRLAEGKSINIYTDSRYAFATAHVHGAIYKQRGWLTSAGKDIKNKEEILALLEAIHLPKRVAIIHCPGHQRGTDPVATGNRKADEAAKQAAQSTRILTETTKNAGKRTADGSEFEKRTADGSEFESPKKKAKVE

SEQ ID NO: 7558 - protein, 2096 aa, synthetic construct
MPAAKRVKLDGGDKKYSIGLDIGTNSVGWAVITDEYKVPSKKFKVLGNTDRHSIKKNLIGALLFDSGETAEATRLKRTARRRYTRRKNRICYLQEIFSNEMAKVDDSFFHRLEESFLVEEDKKHERHPIFGNIVDEVAYHEKYPTIYHLRKKLVDSTDKADLRLIYLALAHMIKFRGHFLIEGDLNPDNSDVDKLFIQLVQTYNQLFEENPINASGVDAKAILSARLSKSRRLENLIAQLPGEKKNGLFGNLIALSLGLTPNFKSNFDLAEDAKLQLSKDTYDDDLDNLLAQIGDQYADLFLAAKNLSDAILLSDILRVNTEITKAPLSASMIKRYDEHHQDLTLLKALVRQQLPEKYKEIFFDQSKNGYAGYIDGGASQEEFYKFIKPILEKMDGTEELLVKLNREDLLRKQRTFDNGSIPHQIHLGELHAILRRQEDFYPFLKDNREKIEKILTFRIPYYVGPLARGNSRFAWMTRKSEETITPWNFEEVVDKGASAQSFIERMTNFDKNLPNEKVLPKHSLLYEYFTVYNELTKVKYVTEGMRKPAFLSGEQKKAIVDLLFKTNRKVTVKQLKEDYFKKIECFDSVEISGVEDRFNASLGTYHDLLKIIKDKDFLDNEENEDILEDIVLTLTLFEDREMIEERLKTYAHLFDDKVMKQLKRRRYTGWGRLSRKLINGIRDKQSGKTILDFLKSDGFANRNFMQLIHDDSLTFKEDIQKAQVSGQGDSLHEHIANLAGSPAIKKGILQTVKVVDELVKVMGRHKPENIVIEMARENQTTQKGQKNSRERMKRIEEGIKELGSQILKEHPVENTQLQNEKLYLYYLQNGRDMYVDQELDINRLSDYDVDHIVPQSFLKDDSIDNKVLTRSDKARGKSDNVPSEEVVKKMKNYWRQLLNAKLITQRKFDNLTKAERGGLSELDKAGFIKRQLVETRQITKHVAQILDSRMNTKYDENDKLIREVKVITLKSKLVSDFRKDFQFYKVREINNYHHAHDAYLNAVVGTALIKKYPKLESEFVYGDYKVYDVRKMIAKSEQEIGKATAKYFFYSNIMNFFKTEITLANGEIRKRPLIETNGETGEIVWDKGRDFATVRKVLSMPQVNIVKKTEVQTGGFSKESILPKRNSDKLIARKKDWDPKKYGGFDSPTVAYSVLVVAKVEKGKSKKLKSVKELLGITIMERSSFEKNPIDFLEAKGYKEVKKDLIIKLPKYSLFELENGRKRMLASAGELQKGNELALPSKYVNFLYLASHYEKLKGSPEDNEQKQLFVEQHKHYLDEIIEQISEFSKRVILADANLDKVLSAYNKHRDKPIREQAENIIHLFTLTNLGAPAAFKYFDTTIDRKRYTSTKEVLDATLIHQSITGLYETRIDLSQLGGDGGPAPEAAAKGGGGGTLNIEDEYRLHETSKGPDVPLGSTWLSDFPQAWAETGGMGLAVRQAPLIIPLKATSTPVSIKQYPMSQEARLGIKPHIQRLLDQGILVPCQSPWNTPLLPVKKPGTNDYRPVQDLREVNKRVEDIHPTVPNPYNLLSGLPPSHQWYTVLDLKDAFFCLRLHPTSQSLFAFEWRDPEMGISGQLTWTRLPQGFKNSPTLFNEALHRDLADFRIQHPDLILLQYVDDLLLAATSELDCQQGTRALLQTLGDLGYRASAKKAQICQKQVKYLGYLLKEGQRWLTEARKETVMGQPTPKTPRQLREFLGKAGFCRLFIPGFAEMAAPLYPLTKPGTLFEWGPDQQKAYQEIKQALLTAPALGLPDLTKPFELFVDEKQGYAKGVLTQKLGPWRRPVAYLSKKLDPVAAGWPPCLRMVAAIAVLTKDAGKLTMGQPLVILAPHAVEALVKQPPDRWLSNARMTHYQALLLDTDRVQFGPIVALNPATLLPLPEEGLQHDCLDILAEAHGTRPDLTDQPLPDADHTWYTDGSSFLQEGQRKAGAAVTTETEVVWAKALPAGTSAQRAELIALTQALKMAEGKKLNVYTDSRYAFATAHIHGEIYRRRGWLTSEGKEIKNKDEILALLKALFLPKRLSIIHCPGHQKGNRAEARGNRMADQAAREVATRETPETSTLLAGKRTADGSEFEKRTADGSEFESPKKKAKVE

SEQ ID NO: 7559 - protein, 2096 aa, synthetic construct
MPAAKRVKLDGGDKKYSIGLDIGTNSVGWAVITDEYKVPSKKFKVLGNTDRHSIKKNLIGALLFDSGETAEATRLKRTARRRYTRRKNRICYLQEIFSNEMAKVDDSFFHRLEESFLVEEDKKHERHPIFGNIVDEVAYHEKYPTIYHLRKKLVDSTDKADLRLIYLALAHMIKFRGHFLIEGDLNPDNSDVDKLFIQLVQTYNQLFEENPINASGVDAKAILSARLSKSRRLENLIAQLPGEKKNGLFGNLIALSLGLTPNFKSNFDLAEDAKLQLSKDTYDDDLDNLLAQIGDQYADLFLAAKNLSDAILLSDILRVNTEITKAPLSASMIKRYDEHHQDLTLLKALVRQQLPEKYKEIFFDQSKNGYAGYIDGGASQEEFYKFIKPILEKMDGTEELLVKLNREDLLRKQRTFDNGSIPHQIHLGELHAILRRQEDFYPFLKDNREKIEKILTFRIPYYVGPLARGNSRFAWMTRKSEETITPWNFEEVVDKGASAQSFIERMTNFDKNLPNEKVLPKHSLLYEYFTVYNELTKVKYVTEGMRKPAFLSGEQKKAIVDLLFKTNRKVTVKQLKEDYFKKIECFDSVEISGVEDRFNASLGTYHDLLKIIKDKDFLDNEENEDILEDIVLTLTLFEDREMIEERLKTYAHLFDDKVMKQLKRRRYTGWGRLSRKLINGIRDKQSGKTILDFLKSDGFANRNFMQLIHDDSLTFKEDIQKAQVSGQGDSLHEHIANLAGSPAIKKGILQTVKVVDELVKVMGRHKPENIVIEMARENQTTQKGQKNSRERMKRIEEGIKELGSQILKEHPVENTQLQNEKLYLYYLQNGRDMYVDQELDINRLSDYDVDHIVPQSFLKDDSIDNKVLTRSDKARGKSDNVPSEEVVKKMKNYWRQLLNAKLITQRKFDNLTKAERGGLSELDKAGFIKRQLVETRQITKHVAQILDSRMNTKYDENDKLIREVKVITLKSKLVSDFRKDFQFYKVREINNYHHAHDAYLNAVVGTALIKKYPKLESEFVYGDYKVYDVRKMIAKSEQEIGKATAKYFFYSNIMNFFKTEITLANGEIRKRPLIETNGETGEIVWDKGRDFATVRKVLSMPQVNIVKKTEVQTGGFSKESILPKRNSDKLIARKKDWDPKKYGGFDSPTVAYSVLVVAKVEKGKSKKLKSVKELLGITIMERSSFEKNPIDFLEAKGYKEVKKDLIIKLPKYSLFELENGRKRMLASAGELQKGNELALPSKYVNFLYLASHYEKLKGSPEDNEQKQLFVEQHKHYLDEIIEQISEFSKRVILADANLDKVLSAYNKHRDKPIREQAENIIHLFTLTNLGAPAAFKYFDTTIDRKRYTSTKEVLDATLIHQSITGLYETRIDLSQLGGDGGPAPEAAAKGGGGGTLNIEDEHRLHETSKEPDVSLGSTWLSDFPQAWAETGGMGLAVRQAPLIIPLKATSTPVSIKQYPMSQEARLGIKPHIQRLLDQGILVPCQSPWNTPLLPVKKPGTNDYRPVQDLREVNKRVEDIHPTVPNPYNLLSGLPPSHQWYTVLDLKDAFFCLRLHPTSQPLFAFEWRDPEMGISGQLTWTRLPQGFKNSPTLFDEALHRDLADFRIQHPDLILLQYVDDLLLAATSELDCQQGTRALLQTLGNLGYRASAKKAQICQKQVKYLGYLLKEGQRWLTEARKETVMGQPTPKTPRQLREFLGTAGFCRLWIPGFAEMAAPLYPLTKTGTLFNWGPDQQKAYQEIKQALLTAPALGLPDLTKPFELFVDEKQGYAKGVLTQKLGPWRRPVAYLSKKLDPVAAGWPPCLRMVAAIAVLTKDAGKLTMGQPLVILAPHAVEALVKQPPDRWLSNARMTHYQALLLDTDRVQFGPVVALNPATLLPLPEEGLQHNCLDILAEAHGTRPDLTDQPLPDADHTWYTDGSSLLQEGQRKAGAAVTTETEVIWAKALPAGTSAQRAELIALTQALKMAEGKKLNVYTDSRYAFATAHIHGEIYRRRGLLTSEGKEIKNKDEILALLKALFLPKRLSIIHCPGHQKGHSAEARGNRMADQAARKAAITETPDTSTLLAGKRTADGSEFEKRTADGSEFESPKKKAKVE

SEQ ID NO: 7560 - protein, 2096 aa, synthetic construct; identical to SEQ ID NO: 7559

SEQ ID NO: 7561 - protein, 2116 aa, synthetic construct
MPAAKRVKLDGGDKKYSIGLDIGTNSVGWAVITDEYKVPSKKFKVLGNTDRHSIKKNLIGALLFDSGETAEATRLKRTARRRYTRRKNRICYLQEIFSNEMAKVDDSFFHRLEESFLVEEDKKHERHPIFGNIVDEVAYHEKYPTIYHLRKKLVDSTDKADLRLIYLALAHMIKFRGHFLIEGDLNPDNSDVDKLFIQLVQTYNQLFEENPINASGVDAKAILSARLSKSRRLENLIAQLPGEKKNGLFGNLIALSLGLTPNFKSNFDLAEDAKLQLSKDTYDDDLDNLLAQIGDQYADLFLAAKNLSDAILLSDILRVNTEITKAPLSASMIKRYDEHHQDLTLLKALVRQQLPEKYKEIFFDQSKNGYAGYIDGGASQEEFYKFIKPILEKMDGTEELLVKLNREDLLRKQRTFDNGSIPHQIHLGELHAILRRQEDFYPFLKDNREKIEKILTFRIPYYVGPLARGNSRFAWMTRKSEETITPWNFEEVVDKGASAQSFIERMTNFDKNLPNEKVLPKHSLLYEYFTVYNELTKVKYVTEGMRKPAFLSGEQKKAIVDLLFKTNRKVTVKQLKEDYFKKIECFDSVEISGVEDRFNASLGTYHDLLKIIKDKDFLDNEENEDILEDIVLTLTLFEDREMIEERLKTYAHLFDDKVMKQLKRRRYTGWGRLSRKLINGIRDKQSGKTILDFLKSDGFANRNFMQLIHDDSLTFKEDIQKAQVSGQGDSLHEHIANLAGSPAIKKGILQTVKVVDELVKVMGRHKPENIVIEMARENQTTQKGQKNSRERMKRIEEGIKELGSQILKEHPVENTQLQNEKLYLYYLQNGRDMYVDQELDINRLSDYDVDHIVPQSFLKDDSIDNKVLTRSDKARGKSDNVPSEEVVKKMKNYWRQLLNAKLITQRKFDNLTKAERGGLSELDKAGFIKRQLVETRQITKHVAQILDSRMNTKYDENDKLIREVKVITLKSKLVSDFRKDFQFYKVREINNYHHAHDAYLNAVVGTALIKKYPKLESEFVYGDYKVYDVRKMIAKSEQEIGKATAKYFFYSNIMNFFKTEITLANGEIRKRPLIETNGETGEIVWDKGRDFATVRKVLSMPQVNIVKKTEVQTGGFSKESILPKRNSDKLIARKKDWDPKKYGGFDSPTVAYSVLVVAKVEKGKSKKLKSVKELLGITIMERSSFEKNPIDFLEAKGYKEVKKDLIIKLPKYSLFELENGRKRMLASAGELQKGNELALPSKYVNFLYLASHYEKLKGSPEDNEQKQLFVEQHKHYLDEIIEQISEFSKRVILADANLDKVLSAYNKHRDKPIREQAENIIHLFTLTNLGAPAAFKYFDTTIDRKRYTSTKEVLDATLIHQSITGLYETRIDLSQLGGDGGPAPEAAAKGGGGGVQEISDSRPMLHIYLNGRRFLGLLDTGADKTCIAGRDWPANWPIHQTESSLQGLGMACGVARSSQPLRWQHEDKSGIIHPFVIPTLPFTLWGRDIMKDIKVRLMTDSPDDSQDLMIGAIESNLFADQISWKSDQPVWLNQWPLKQEKLQALQQLVTEQLQLGHLEESNSPWNTPVFVIKKKSGKWRLLQDLRAVNATMHDMGALQPGLPSPVAVPKGWEIIIIDLQDCFFNIKLHPEDCKRFAFSVPSPNFKRPYQRFQWKVLPQGMKNSPTLCQKFVDKAILTVRDKYQDSYIVHYMDDILLAHPSRSIVDEILTSMIQALNKHGLVVSTEKIQKYDNLKYLGTHIQGDSVSYQKLQIRTDKLRTLNDFQKLLGNINWIRPFLKLTTGELKPLFEILNGDSNPISTRKLTPEACKALQLMNERLSTARVKRLDLSQPWSLCILKTEYTPTACLWQDGVVEWIHLPHISPKVITPYDIFCTQLIIKGRHRSKELFSKDPDYIVVPYTKVQFDLLLQEKEDWPISLLGFLGEVHFHLPKDPLLTFTLQTAIIFPHMTSTTPLEKGIVIFTDGSANGRSVTYIQGREPIIKENTQNTAQQAEIVAVITAFEEVSQPFNLYTDSKYVTGLFPEIETATLSPRTKIYTELKHLQRLIHKRQEKFYIGHIRGHTGLPGPLAQGNAYADSLTRILTAAGKRTADGSEFEKRTADGSEFESPKKKAKVE

SEQ ID NO: 7562 - protein, 2090 aa, synthetic construct
MPAAKRVKLDGGDKKYSIGLDIGTNSVGWAVITDEYKVPSKKFKVLGNTDRHSIKKNLIGALLFDSGETAEATRLKRTARRRYTRRKNRICYLQEIFSNEMAKVDDSFFHRLEESFLVEEDKKHERHPIFGNIVDEVAYHEKYPTIYHLRKKLVDSTDKADLRLIYLALAHMIKFRGHFLIEGDLNPDNSDVDKLFIQLVQTYNQLFEENPINASGVDAKAILSARLSKSRRLENLIAQLPGEKKNGLFGNLIALSLGLTPNFKSNFDLAEDAKLQLSKDTYDDDLDNLLAQIGDQYADLFLAAKNLSDAILLSDILRVNTEITKAPLSASMIKRYDEHHQDLTLLKALVRQQLPEKYKEIFFDQSKNGYAGYIDGGASQEEFYKFIKPILEKMDGTEELLVKLNREDLLRKQRTFDNGSIPHQIHLGELHAILRRQEDFYPFLKDNREKIEKILTFRIPYYVGPLARGNSRFAWMTRKSEETITPWNFEEVVDKGASAQSFIERMTNFDKNLPNEKVLPKHSLLYEYFTVYNELTKVKYVTEGMRKPAFLSGEQKKAIVDLLFKTNRKVTVKQLKEDYFKKIECFDSVEISGVEDRFNASLGTYHDLLKIIKDKDFLDNEENEDILEDIVLTLTLFEDREMIEERLKTYAHLFDDKVMKQLKRRRYTGWGRLSRKLINGIRDKQSGKTILDFLKSDGFANRNFMQLIHDDSLTFKEDIQKAQVSGQGDSLHEHIANLAGSPAIKKGILQTVKVVDELVKVMGRHKPENIVIEMARENQTTQKGQKNSRERMKRIEEGIKELGSQILKEHPVENTQLQNEKLYLYYLQNGRDMYVDQELDINRLSDYDVDHIVPQSFLKDDSIDNKVLTRSDKARGKSDNVPSEEVVKKMKNYWRQLLNAKLITQRKFDNLTKAERGGLSELDKAGFIKRQLVETRQITKHVAQILDSRMNTKYDENDKLIREVKVITLKSKLVSDFRKDFQFYKVREINNYHHAHDAYLNAVVGTALIKKYPKLESEFVYGDYKVYDVRKMIAKSEQEIGKATAKYFFYSNIMNFFKTEITLANGEIRKRPLIETNGETGEIVWDKGRDFATVRKVLSMPQVNIVKKTEVQTGGFSKESILPKRNSDKLIARKKDWDPKKYGGFDSPTVAYSVLVVAKVEKGKSKKLKSVKELLGITIMERSSFEKNPIDFLEAKGYKEVKKDLIIKLPKYSLFELENGRKRMLASAGELQKGNELALPSKYVNFLYLASHYEKLKGSPEDNEQKQLFVEQHKHYLDEIIEQISEFSKRVILADANLDKVLSAYNKHRDKPIREQAENIIHLFTLTNLGAPAAFKYFDTTIDRKRYTSTKEVLDATLIHQSITGLYETRIDLSQLGGDGGPAPEAAAKGGGGGTLQLDDEYRLYSPLVKPDQNIQFWLEQFPQAWAETAGMGLAKQVPPQVIQLKASATPVSVRQYPLSKEAQEGIRPHVQRLIQQGILVPVQSPWNTPLLPVRKPGTNDYRPVQDLREVNKRVQDIHPTVPNPYNLLCALPPQRSWYTVLDLKDAFFCLRLHPTSQPLFAFEWRDPGTGRTGQLTWTRLPQGFKNSPTIFDEALHRDLANFRIQHPQVTLLQYVDDLLLAGATKQDCLEGTKALLLELSDLGYRASAKKAQICRREVTYLGYSLRDGQRWLTEARKKTVVQIPAPTTAKQVREFLGTAGFCRLWIPGFATLAAPLYPLTKEKGEFSWAPEHQKAFDAIKKALLSAPALALPDVTKPFTLYVDERKGVARGVLTQTLGPWRRPVAYLSKKLDPVASGWPVCLKAIAAVAILVKDADKLTLGQNITVIAPHALENIVRQPPDRWMTNARMTHYQSLLLTERVTFAPPAALNPATLLPEETDEPVTHDCHQLLIEETGVRKDLTDIPLTGEVLTWFTDGSSYVVEGKRMAGAAVVDGTRTIWASSLPEGTSAQKAELMALTQALRLAEGKSINIYTDSRYAFATAHVHGAIYKQRGLLTSAGREIKNKEEILSLLEALHLPKRLAIIHCPGHQKAKDPISRGNQMADRVAKQAAQGVNLLAGKRTADGSEFEKRTADGSEFESPKKKAKVE

SEQ ID NO: 7563 - protein, 2176 aa, synthetic construct
MPAAKRVKLDGGDKKYSIGLDIGTNSVGWAVITDEYKVPSKKFKVLGNTDRHSIKKNLIGALLFDSGETAEATRLKRTARRRYTRRKNRICYLQEIFSNEMAKVDDSFFHRLEESFLVEEDKKHERHPIFGNIVDEVAYHEKYPTIYHLRKKLVDSTDKADLRLIYLALAHMIKFRGHFLIEGDLNPDNSDVDKLFIQLVQTYNQLFEENPINASGVDAKAILSARLSKSRRLENLIAQLPGEKKNGLFGNLIALSLGLTPNFKSNFDLAEDAKLQLSKDTYDDDLDNLLAQIGDQYADLFLAAKNLSDAILLSDILRVNTEITKAPLSASMIKRYDEHHQDLTLLKALVRQQLPEKYKEIFFDQSKNGYAGYIDGGASQEEFYKFIKPILEKMDGTEELLVKLNREDLLRKQRTFDNGSIPHQIHLGELHAILRRQEDFYPFLKDNREKIEKILTFRIPYYVGPLARGNSRFAWMTRKSEETITPWNFEEVVDKGASAQSFIERMTNFDKNLPNEKVLPKHSLLYEYFTVYNELTKVKYVTEGMRKPAFLSGEQKKAIVDLLFKTNRKVTVKQLKEDYFKKIECFDSVEISGVEDRFNASLGTYHDLLKIIKDKDFLDNEENEDILEDIVLTLTLFEDREMIEERLKTYAHLFDDKVMKQLKRRRYTGWGRLSRKLINGIRDKQSGKTILDFLKSDGFANRNFMQLIHDDSLTFKEDIQKAQVSGQGDSLHEHIANLAGSPAIKKGILQTVKVVDELVKVMGRHKPENIVIEMARENQTTQKGQKNSRERMKRIEEGIKELGSQILKEHPVENTQLQNEKLYLYYLQNGRDMYVDQELDINRLSDYDVDHIVPQSFLKDDSIDNKVLTRSDKARGKSDNVPSEEVVKKMKNYWRQLLNAKLITQRKFDNLTKAERGGLSELDKAGFIKRQLVETRQITKHVAQILDSRMNTKYDENDKLIREVKVITLKSKLVSDFRKDFQFYKVREINNYHHAHDAYLNAVVGTALIKKYPKLESEFVYGDYKVYDVRKMIAKSEQEIGKATAKYFFYSNIMNFFKTEITLANGEIRKRPLIETNGETGEIVWDKGRDFATVRKVLSMPQVNIVKKTEVQTGGFSKESILPKRNSDKLIARKKDWDPKKYGGFDSPTVAYSVLVVAKVEKGKSKKLKSVKELLGITIMERSSFEKNPIDFLEAKGYKEVKKDLIIKLPKYSLFELENGRKRMLASAGELQKGNELALPSKYVNFLYLASHYEKLKGSPEDNEQKQLFVEQHKHYLDEIIEQISEFSKRVILADANLDKVLSAYNKHRDKPIREQAENIIHLFTLTNLGAPAAFKYFDTTIDRKRYTSTKEVLDATLIHQSITGLYETRIDLSQLGGDGGPAPEAAAKGGGGGMDPLQLLQPLEAEIKGTKLKAHWNSGATITCVPEAFLEDERPIQTMLIKTIHGEKQQDVYYLTFKVQGRKVEAEVLASPYDYILLNPSDVPWLMKKPLQLTVLVPLHEYQERLLQQTALPKEQKELLQKLFLKYDALWQHWENQVGHRRIKPHNIATGTLAPRPQKQYPINPKAKPSIQIVIDDLLKQGVLIQQNSTMNTPVYPVPKPDGKWRMVLDYREVNKTIPLIAAQNQHSAGILSSIYRGKYKTTLDLTNGFWAHPITPESYWLTAFTWQGKQYCWTRLPQGFLNSPALFTADVVDLLKEIPNVQAYVDDIYISHDDPQEHLEQLEKIFSILLNAGYVVSLKKSEIAQREVEFLGFNITKEGRGLTDTFKQKLLNITPPKDLKQLQSILGLLNFARNFIPNYSELVKPLYTIVANANGKFISWTEDNSNQLQHIISVLNQADNLEERNPETRLIIKVNSSPSAGYIRYYNEGSKRPIMYVNYIFSKAEAKFTQTEKLLTTMHKGLIKAMDLAMGQEILVYSPIVSMTKIQRTPLPERKALPVRWITWMTYLEDPRIQFHYDKSLPELQQIPNVTEDVIAKTKHPSEFAMVFYTDGSAIKHPDVNKSHSAGMGIAQVQFIPEYKIVHQWSIPLGDHTAQLAEIAAVEFACKKALKISGPVLIVTDSFYVAESANKELPYWKSNGFLNNKKKPLRHVSKWKSIAECLQLKPDIIIMHEKGHQQPMTTLHTEGNNLADKLATQGSYVVHAGKRTADGSEFEKRTADGSEFESPKKKAKVE

SEQ ID NO: 7564 - protein, 2176 aa, synthetic construct
MPAAKRVKLDGGDKKYSIGLDIGTNSVGWAVITDEYKVPSKKFKVLGNTDRHSIKKNLIGALLFDSGETAEATRLKRTARRRYTRRKNRICYLQEIFSNEMAKVDDSFFHRLEESFLVEEDKKHERHPIFGNIVDEVAYHEKYPTIYHLRKKLVDSTDKADLRLIYLALAHMIKFRGHFLIEGDLNPDNSDVDKLFIQLVQTYNQLFEENPINASGVDAKAILSARLSKSRRLENLIAQLPGEKKNGLFGNLIALSLGLTPNFKSNFDLAEDAKLQLSKDTYDDDLDNLLAQIGDQYADLFLAAKNLSDAILLSDILRVNTEITKAPLSASMIKRYDEHHQDLTLLKALVRQQLPEKYKEIFFDQSKNGYAGYIDGGASQEEFYKFIKPILEKMDGTEELLVKLNREDLLRKQRTFDNGSIPHQIHLGELHAILRRQEDFYPFLKDNREKIEKILTFRIPYYVGPLARGNSRFAWMTRKSEETITPWNFEEVVDKGASAQSFIERMTNFDKNLPNEKVLPKHSLLYEYFTVYNELTKVKYVTEGMRKPAFLSGEQKKAIVDLLFKTNRKVTVKQLKEDYFKKIECFDSVEISGVEDRFNASLGTYHDLLKIIKDKDFLDNEENEDILEDIVLTLTLFEDREMIEERLKTYAHLFDDKVMKQLKRRRYTGWGRLSRKLINGIRDKQSGKTILDFLKSDGFANRNFMQLIHDDSLTFKEDIQKAQVSGQGDSLHEHIANLAGSPAIKKGILQTVKVVDELVKVMGRHKPENIVIEMARENQTTQKGQKNSRERMKRIEEGIKELGSQILKEHPVENTQLQNEKLYLYYLQNGRDMYVDQELDINRLSDYDVDHIVPQSFLKDDSIDNKVLTRSDKARGKSDNVPSEEVVKKMKNYWRQLLNAKLITQRKFDNLTKAERGGLSELDKAGFIKRQLVETRQITKHVAQILDSRMNTKYDENDKLIREVKVITLKSKLVSDFRKDFQFYKVREINNYHHAHDAYLNAVVGTALIKKYPKLESEFVYGDYKVYDVRKMIAKSEQEIGKATAKYFFYSNIMNFFKTEITLANGEIRKRPLIETNGETGEIVWDKGRDFATVRKVLSMPQVNIVKKTEVQTGGFSKESILPKRNSDKLIARKKDWDPKKYGGFDSPTVAYSVLVVAKVEKGKSKKLKSVKELLGITIMERSSFEKNPIDFLEAKGYKEVKKDLIIKLPKYSLFELENGRKRMLASAGELQKGNELALPSKYVNFLYLASHYEKLKGSPEDNEQKQLFVEQHKHYLDEIIEQISEFSKRVILADANLDKVLSAYNKHRDKPIREQAENIIHLFTLTNLGAPAAFKYFDTTIDRKRYTSTKEVLDATLIHQSITGLYETRIDLSQLGGDGGPAPEAAAKGGGGGMDPLQLLQPLEAEIKGTKLKAHWNSGATITCVPEAFLEDERPIQTMLIKTIHGEKQQDVYYLTFKVQGRKVEAEVLASPYDYILLNPSDVPWLMKKPLQLTVLVPLHEYQERLLQQTALPKEQKELLQKLFLKYDALWQHWENQVGHRRIKPHNIATGTLAPRPQKQYPINPKAKPSIQIVIDDLLKQGVLIQQNSTMNTPVYPVPKPDGKWRMVLDYREVNKTIPLIAAQNQHSAGILSSIYRGKYKTTLDLTNGFWAHPITPESYWLTAFTWQGKQYCWTRLPQGFLNSPALFNADVVDLLKEIPNVQAYVDDIYISHDDPQEHLEQLEKIFSILLNAGYVVSLKKSEIAQREVEFLGFNITKEGRGLTDTFKQKLLNITPPKDLKQLQSILGLLNFARNFIPNYSELVKPLYTIVAPANGKFISWTEDNSNQLQHIISVLNQADNLEERNPETRLIIKVNSSPSAGYIRYYNEGSKRPIMYVNYIFSKAEAKFTQTEKLLTTMHKGLIKAMDLAMGQEILVYSPIVSMTKIQRTPLPERKALPVRWITWMTYLEDPRIQFHYDKSLPELQQIPNVTEDVIAKTKHPSEFAMVFYTDGSAIKHPDVNKSHSAGMGIAQVQFIPEYKIVHQWSIPLGDHTAQLAEIAAVEFACKKALKISGPVLIVTDSFYVAESANKELPYWKSNGFLNNKKKPLRHVSKWKSIAECLQLKPDIIIMHEKGHQQPMTTLHTEGNNLADKLATQGSYVVHAGKRTADGSEFEKRTADGSEFESPKKKAKVE

SEQ ID NO: 7565 - protein, 2087 aa, synthetic construct
MPAAKRVKLDGGDKKYSIGLDIGTNSVGWAVITDEYKVPSKKFKVLGNTDRHSIKKNLIGALLFDSGETAEATRLKRTARRRYTRRKNRICYLQEIFSNEMAKVDDSFFHRLEESFLVEEDKKHERHPIFGNIVDEVAYHEKYPTIYHLRKKLVDSTDKADLRLIYLALAHMIKFRGHFLIEGDLNPDNSDVDKLFIQLVQTYNQLFEENPINASGVDAKAILSARLSKSRRLENLIAQLPGEKKNGLFGNLIALSLGLTPNFKSNFDLAEDAKLQLSKDTYDDDLDNLLAQIGDQYADLFLAAKNLSDAILLSDILRVNTEITKAPLSASMIKRYDEHHQDLTLLKALVRQQLPEKYKEIFFDQSKNGYAGYIDGGASQEEFYKFIKPILEKMDGTEELLVKLNREDLLRKQRTFDNGSIPHQIHLGELHAILRRQEDFYPFLKDNREKIEKILTFRIPYYVGPLARGNSRFAWMTRKSEETITPWNFEEVVDKGASAQSFIERMTNFDKNLPNEKVLPKHSLLYEYFTVYNELTKVKYVTEGMRKPAFLSGEQKKAIVDLLFKTNRKVTVKQLKEDYFKKIECFDSVEISGVEDRFNASLGTYHDLLKIIKDKDFLDNEENEDILEDIVLTLTLFEDREMIEERLKTYAHLFDDKVMKQLKRRRYTGWGRLSRKLINGIRDKQSGKTILDFLKSDGFANRNFMQLIHDDSLTFKEDIQKAQVSGQGDSLHEHIANLAGSPAIKKGILQTVKVVDELVKVMGRHKPENIVIEMARENQTTQKGQKNSRERMKRIEEGIKELGSQILKEHPVENTQLQNEKLYLYYLQNGRDMYVDQELDINRLSDYDVDHIVPQSFLKDDSIDNKVLTRSDKARGKSDNVPSEEVVKKMKNYWRQLLNAKLITQRKFDNLTKAERGGLSELDKAGFIKRQLVETRQITKHVAQILDSRMNTKYDENDKLIREVKVITLKSKLVSDFRKDFQFYKVREINNYHHAHDAYLNAVVGTALIKKYPKLESEFVYGDYKVYDVRKMIAKSEQEIGKATAKYFFYSNIMNFFKTEITLANGEIRKRPLIETNGETGEIVWDKGRDFATVRKVLSMPQVNIVKKTEVQTGGFSKESILPKRNSDKLIARKKDWDPKKYGGFDSPTVAYSVLVVAKVEKGKSKKLKSVKELLGITIMERSSFEKNPIDFLEAKGYKEVKKDLIIKLPKYSLFELENGRKRMLASAGELQKGNELALPSKYVNFLYLASHYEKLKGSPEDNEQKQLFVEQHKHYLDEIIEQISEFSKRVILADANLDKVLSAYNKHRDKPIREQAENIIHLFTLTNLGAPAAFKYFDTTIDRKRYTSTKEVLDATLIHQSITGLYETRIDLSQLGGDGGPAPEAAAKGGGGGIPWLMKKPLQLTTLVPLQEYEERLLKQTMLTGSYKEKLQSLFLKYDALWQHWENQVGHRRIKPHHIATGTVNPRPQKQYPINPKAKASIQTVINDLLKQGVLIQQNSIMNTPVYPVPKPDGKWRMVLDYREVNKTIPLIAAQNQHSAGILSSIFRGKYKTTLDLSNGFWAHSITPESYWLTAFTWLGQQYCWTRLPQGFLNSPALFTADVVDLLKEVPNVQVYVDDIYISHDDPREHLEQLEKVFSLLLNAGYVVSLKKSEIAQHEVEFLGFNITKEGRGLTETFKQKLLNITPPRDLKQLQSILGLLNFARNFIPNFSELVKPLYNIIATANGKYITWTTDNSQQLQNIISMLNSAENLEERNPEVRLIMKVNTSPSAGYIRFYNEFAKRPIMYLNYVYTKAEVKFTNTEKLLTTIHKGLIKALDLGMGQEILVYSPIVSMTKIQKTPLPERKALPIRWITWMSYLEDPRIQFHYDKTLPELQQVPTVTDDIIAKIKHPSEFSMVFYTDGSAIKHPNVNKSHNAGMGIAQVQFKPEFTVINTWSIPLGDHTAQLAEVAAVEFACKKALKIDGPVLIVTDSFYVAESVNKELPYWQSNGFFNNKKKPLKHVSKWKSIADCIQLKPDIIIIHEKGHQPTASTFHTEGNNLADKLATQGSYVVNAGKRTADGSEFEKRTADGSEFESPKKKAKVE

SEQ ID NO: 7566 - protein, 2096 aa, synthetic construct
MPAAKRVKLDGGDKKYSIGLDIGTNSVGWAVITDEYKVPSKKFKVLGNTDRHSIKKNLIGALLFDSGETAEATRLKRTARRRYTRRKNRICYLQEIFSNEMAKVDDSFFHRLEESFLVEEDKKHERHPIFGNIVDEVAYHEKYPTIYHLRKKLVDSTDKADLRLIYLALAHMIKFRGHFLIEGDLNPDNSDVDKLFIQLVQTYNQLFEENPINASGVDAKAILSARLSKSRRLENLIAQLPGEKKNGLFGNLIALSLGLTPNFKSNFDLAEDAKLQLSKDTYDDDLDNLLAQIGDQYADLFLAAKNLSDAILLSDILRVNTEITKAPLSASMIKRYDEHHQDLTLLKALVRQQLPEKYKEIFFDQSKNGYAGYIDGGASQEEFYKFIKPILEKMDGTEELLVKLNREDLLRKQRTFDNGSIPHQIHLGELHAILRRQEDFYPFLKDNREKIEKILTFRIPYYVGPLARGNSRFAWMTRKSEETITPWNFEEVVDKGASAQSFIERMTNFDKNLPNEKVLPKHSLLYEYFTVYNELTKVKYVTEGMRKPAFLSGEQKKAIVDLLFKTNRKVTVKQLKEDYFKKIECFDSVEISGVEDRFNASLGTYHDLLKIIKDKDFLDNEENEDILEDIVLTLTLFEDREMIEERLKTYAHLFDDKVMKQLKRRRYTGWGRLSRKLINGIRDKQSGKTILDFLKSDGFANRNFMQLIHDDSLTFKEDIQKAQVSGQGDSLHEHIANLAGSPAIKKGILQTVKVVDELVKVMGRHKPENIVIEMARENQTTQKGQKNSRERMKRIEEGIKELGSQILKEHPVENTQLQNEKLYLYYLQNGRDMYVDQELDINRLSDYDVDHIVPQSFLKDDSIDNKVLTRSDKARGKSDNVPSEEVVKKMKNYWRQLLNAKLITQRKFDNLTKAERGGLSELDKAGFIKRQLVETRQITKHVAQILDSRMNTKYDENDKLIREVKVITLKSKLVSDFRKDFQFYKVREINNYHHAHDAYLNAVVGTALIKKYPKLESEFVYGDYKVYDVRKMIAKSEQEIGKATAKYFFYSNIMNFFKTEITLANGEIRKRPLIETNGETGEIVWDKGRDFATVRKVLSMPQVNIVKKTEVQTGGFSKESILPKRNSDKLIARKKDWDPKKYGGFDSPTVAYSVLVVAKVEKGKSKKLKSVKELLGITIMERSSFEKNPIDFLEAKGYKEVKKDLIIKLPKYSLFELENGRKRMLASAGELQKGNELALPSKYVNFLYLASHYEKLKGSPEDNEQKQLFVEQHKHYLDEIIEQISEFSKRVILADANLDKVLSAYNKHRDKPIREQAENIIHLFTLTNLGAPAAFKYFDTTIDRKRYTSTKEVLDATLIHQSITGLYETRIDLSQLGGDGGPAPEAAAKGGGGGTLNIEDEYRLHETSKEPDVPLGSTWLSDFPQAWAETGGMGLAVRQAPLIIPLKATSTPVSIKQYPMSQEARLGIKPHIQRLLDQGILVPCQSPWNTPLLPVKKPGTNDYRPVQDLREVNKRVEDIHPTVPNPYNLLSGLPPSHQWYTVLDLKDAFFCLRLHPTSQPLFAFEWRDPEMGISGQLTWTRLPQGFKNSPTLFDEALHRDLADFRIQHPDLILLQYVDDLLLAATSEQDCQRGTRALLQTLGNLGYRASAKKAQICQKQVKYLGYLLKEGQRWLTEARKETVMGQPTPKTPRQLREFLGTAGFCRLWIPGFAEMAAPLYPLTKTGTLFNWGPDQQKAYQEIKQALLTAPALGLPDLTKPFELFVDEKQGYAKGVLTQKLGPWRRPVAYLSKKLDPVAAGWPPCLRMVAAIAVLTKDAGKLTMGQPLVILAPHAVEALVKQPPDRWLSNARMTHYQAMLLDTDRVQFGPVVALNPATLLPLPEKEAPHDCLEILAETHGTRPDLTDQPIPDADYTWYTDGSSFLQEGQRRAGAAVTTETEVIWARALPAGTSAQRAELIALTQALKMAEGKKLNVYTDSRYAFATAHVHGEIYRRRGLLTSEGREIKNKNEILALLKALFLPKRLSIIHCPGHQKGNSAEARGNRMADQAAREAAMKAVLETSTLLAGKRTADGSEFEKRTADGSEFESPKKKAKVE

SEQ ID NO: 7567 - protein, 2096 aa, synthetic construct
MPAAKRVKLDGGDKKYSIGLDIGTNSVGWAVITDEYKVPSKKFKVLGNTDRHSIKKNLIGALLFDSGETAEATRLKRTARRRYTRRKNRICYLQEIFSNEMAKVDDSFFHRLEESFLVEEDKKHERHPIFGNIVDEVAYHEKYPTIYHLRKKLVDSTDKADLRLIYLALAHMIKFRGHFLIEGDLNPDNSDVDKLFIQLVQTYNQLFEENPINASGVDAKAILSARLSKSRRLENLIAQLPGEKKNGLFGNLIALSLGLTPNFKSNFDLAEDAKLQLSKDTYDDDLDNLLAQIGDQYADLFLAAKNLSDAILLSDILRVNTEITKAPLSASMIKRYDEHHQDLTLLKALVRQQLPEKYKEIFFDQSKNGYAGYIDGGASQEEFYKFIKPILEKMDGTEELLVKLNREDLLRKQRTFDNGSIPHQIHLGELHAILRRQEDFYPFLKDNREKIEKILTFRIPYYVGPLARGNSRFAWMTRKSEETITPWNFEEVVDKGASAQSFIERMTNFDKNLPNEKVLPKHSLLYEYFTVYNELTKVKYVTEGMRKPAFLSGEQKKAIVDLLFKTNRKVTVKQLKEDYFKKIECFDSVEISGVEDRFNASLGTYHDLLKIIKDKDFLDNEENEDILEDIVLTLTLFEDREMIEERLKTYAHLFDDKVMKQLKRRRYTGWGRLSRKLINGIRDKQSGKTILDFLKSDGFANRNFMQLIHDDSLTFKEDIQKAQVSGQGDSLHEHIANLAGSPAIKKGILQTVKVVDELVKVMGRHKPENIVIEMARENQTTQKGQKNSRERMKRIEEGIKELGSQILKEHPVENTQLQNEKLYLYYLQNGRDMYVDQELDINRLSDYDVDHIVPQSFLKDDSIDNKVLTRSDKARGKSDNVPSEEVVKKMKNYWRQLLNAKLITQRKFDNLTKAERGGLSELDKAGFIKRQLVETRQITKHVAQILDSRMNTKYDENDKLIREVKVITLKSKLVSDFRKDFQFYKVREINNYHHAHDAYLNAVVGTALIKKYPKLESEFVYGDYKVYDVRKMIAKSEQEIGKATAKYFFYSNIMNFFKTEITLANGEIRKRPLIETNGETGEIVWDKGRDFATVRKVLSMPQVNIVKKTEVQTGGFSKESILPKRNSDKLIARKKDWDPKKYGGFDSPTVAYSVLVVAKVEKGKSKKLKSVKELLGITIMERSSFEKNPIDFLEAKGYKEVKKDLIIKLPKYSLFELENGRKRMLASAGELQKGNELALPSKYVNFLYLASHYEKLKGSPEDNEQKQLFVEQHKHYLDEIIEQISEFSKRVILADANLDKVLSAYNKHRDKPIREQAENIIHLFTLTNLGAPAAFKYFDTTIDRKRYTSTKEVLDATLIHQSITGLYETRIDLSQLGGDGGPAPEAAAKGGGGGTLNIEDEYRLHETSKEPDVPLGSTWLSDFPQAWAETGGMGLAVRQAPLIIPLKATSTPVSIKQYPMSQEARLGIKPHIQRLLDQGILVPCQSPWNTPLLPVKKPGTNDYRPVQDLREVNKRVEDIHPTVPNPYNLLSGLPPSHQWYTVLDLKDAFFCLRLHPTSQPLFAFEWRDPEMGISGQLTWTRLPQGFKNSPTLFNEALHRDLADFRIQHPDLILLQYVDDLLLAATSEQDCQRGTRALLQTLGNLGYRASAKKAQICQKQVKYLGYLLKEGQRWLTEARKETVMGQPTPKTPRQLREFLGTAGFCRLWIPGFAEMAAPLYPLTKPGTLFNWGPDQQKAYQEIKQALLTAPALGLPDLTKPFELFVDEKQGYAKGVLTQKLGPWRRPVAYLSKKLDPVAAGWPPCLRMVAAIAVLTKDAGKLTMGQPLVILAPHAVEALVKQPPDRWLSNARMTHYQAMLLDTDRVQFGPVVALNPATLLPLPEKEAPHDCLEILAETHGTRPDLTDQPIPDADYTWYTDGSSFLQEGQRRAGAAVTTETEVIWARALPAGTSAQRAELIALTQALKMAEGKKLNVYTDSRYAFATAHVHGEIYRRRGWLTSEGREIKNKNEILALLKALFLPKRLSIIHCPGHQKGNSAEARGNRMADQAAREAAMKAVLETSTLLAGKRTADGSEFEKRTADGSEFESPKKKAKVE

SEQ ID NO: 7568 - protein, 2096 aa, synthetic construct
MPAAKRVKLDGGDKKYSIGLDIGTNSVGWAVITDEYKVPSKKFKVLGNTDRHSIKKNLIGALLFDSGETAEATRLKRTARRRYTRRKNRICYLQEIFSNEMAKVDDSFFHRLEESFLVEEDKKHERHPIFGNIVDEVAYHEKYPTIYHLRKKLVDSTDKADLRLIYLALAHMIKFRGHFLIEGDLNPDNSDVDKLFIQLVQTYNQLFEENPINASGVDAKAILSARLSKSRRLENLIAQLPGEKKNGLFGNLIALSLGLTPNFKSNFDLAEDAKLQLSKDTYDDDLDNLLAQIGDQYADLFLAAKNLSDAILLSDILRVNTEITKAPLSASMIKRYDEHHQDLTLLKALVRQQLPEKYKEIFFDQSKNGYAGYIDGGASQEEFYKFIKPILEKMDGTEELLVKLNREDLLRKQRTFDNGSIPHQIHLGELHAILRRQEDFYPFLKDNREKIEKILTFRIPYYVGPLARGNSRFAWMTRKSEETITPWNFEEVVDKGASAQSFIERMTNFDKNLPNEKVLPKHSLLYEYFTVYNELTKVKYVTEGMRKPAFLSGEQKKAIVDLLFKTNRKVTVKQLKEDYFKKIECFDSVEISGVEDRFNASLGTYHDLLKIIKDKDFLDNEENEDILEDIVLTLTLFEDREMIEERLKTYAHLFDDKVMKQLKRRRYTGWGRLSRKLINGIRDKQSGKTILDFLKSDGFANRNFMQLIHDDSLTFKEDIQKAQVSGQGDSLHEHIANLAGSPAIKKGILQTVKVVDELVKVMGRHKPENIVIEMARENQTTQKGQKNSRERMKRIEEGIKELGSQILKEHPVENTQLQNEKLYLYYLQNGRDMYVDQELDINRLSDYDVDHIVPQSFLKDDSIDNKVLTRSDKARGKSDNVPSEEVVKKMKNYWRQLLNAKLITQRKFDNLTKAERGGLSELDKAGFIKRQLVETRQITKHVAQILDSRMNTKYDENDKLIREVKVITLKSKLVSDFRKDFQFYKVREINNYHHAHDAYLNAVVGTALIKKYPKLESEFVYGDYKVYDVRKMIAKSEQEIGKATAKYFFYSNIMNFFKTEITLANGEIRKRPLIETNGETGEIVWDKGRDFATVRKVLSMPQVNIVKKTEVQTGGFSKESILPKRNSDKLIARKKDWDPKKYGGFDSPTVAYSVLVVAKVEKGKSKKLKSVKELLGITIMERSSFEKNPIDFLEAKGYKEVKKDLIIKLPKYSLFELENGRKRMLASAGELQKGNELALPSKYVNFLYLASHYEKLKGSPEDNEQKQLFVEQHKHYLDEIIEQISEFSKRVILADANLDKVLSAYNKHRDKPIREQAENIIHLFTLTNLGAPAAFKYFDTTIDRKRYTSTKEVLDATLIHQSITGLYETRIDLSQLGGDGGPAPEAAAKGGGGGTLNIEDEYRLHETSKEPDVPLGSTWLSDFPQAWAETGGMGLAVRQAPLIIPLKATSTPVSIKQYPMSQEARLGIKPHIQRLLDQGILVPCQSPWNTPLLPVKKPGTNDYRPVQDLREVNKRVEDIHPTVPNPYNLLSGLPPSHQWYTVLDLKDAFFCLRLHPTSQPLFAFEWRDPEMGISGQLTWTRLPQGFKNSPTLFNEALHRDLADFRIQHPDLILLQYVDDLLLAATSEQDCQRGTRALLQTLGNLGYRASAKKAQICQKQVKYLGYLLKEGQRWLTEARKETVMGQPTPKTPRQLREFLGKAGFCRLFIPGFAEMAAPLYPLTKPGTLFNWGPDQQKAYQEIKQALLTAPALGLPDLTKPFELFVDEKQGYAKGVLTQKLGPWRRPVAYLSKKLDPVAAGWPPCLRMVAAIAVLTKDAGKLTMGQPLVILAPHAVEALVKQPPDRWLSNARMTHYQAMLLDTDRVQFGPVVALNPATLLPLPEKEAPHDCLEILAETHGTRPDLTDQPIPDADYTWYTDGSSFLQEGQRRAGAAVTTETEVIWARALPAGTSAQRAELIALTQALKMAEGKKLNVYTDSRYAFATAHVHGEIYRRRGWLTSEGREIKNKNEILALLKALFLPKRLSIIHCPGHQKGNSAEARGNRMADQAAREAAMKAVLETSTLLAGKRTADGSEFEKRTADGSEFESPKKKAKVE

SEQ ID NO: 7569 - protein, 2098 aa, synthetic construct
MPAAKRVKLDGGDKKYSIGLDIGTNSVGWAVITDEYKVPSKKFKVLGNTDRHSIKKNLIGALLFDSGETAEATRLKRTARRRYTRRKNRICYLQEIFSNEMAKVDDSFFHRLEESFLVEEDKKHERHPIFGNIVDEVAYHEKYPTIYHLRKKLVDSTDKADLRLIYLALAHMIKFRGHFLIEGDLNPDNSDVDKLFIQLVQTYNQLFEENPINASGVDAKAILSARLSKSRRLENLIAQLPGEKKNGLFGNLIALSLGLTPNFKSNFDLAEDAKLQLSKDTYDDDLDNLLAQIGDQYADLFLAAKNLSDAILLSDILRVNTEITKAPLSASMIKRYDEHHQDLTLLKALVRQQLPEKYKEIFFDQSKNGYAGYIDGGASQEEFYKFIKPILEKMDGTEELLVKLNREDLLRKQRTFDNGSIPHQIHLGELHAILRRQEDFYPFLKDNREKIEKILTFRIPYYVGPLARGNSRFAWMTRKSEETITPWNFEEVVDKGASAQSFIERMTNFDKNLPNEKVLPKHSLLYEYFTVYNELTKVKYVTEGMRKPAFLSGEQKKAIVDLLFKTNRKVTVKQLKEDYFKKIECFDSVEISGVEDRFNASLGTYHDLLKIIKDKDFLDNEENEDILEDIVLTLTLFEDREMIEERLKTYAHLFDDKVMKQLKRRRYTGWGRLSRKLINGIRDKQSGKTILDFLKSDGFANRNFMQLIHDDSLTFKEDIQKAQVSGQGDSLHEHIANLAGSPAIKKGILQTVKVVDELVKVMGRHKPENIVIEMARENQTTQKGQKNSRERMKRIEEGIKELGSQILKEHPVENTQLQNEKLYLYYLQNGRDMYVDQELDINRLSDYDVDHIVPQSFLKDDSIDNKVLTRSDKARGKSDNVPSEEVVKKMKNYWRQLLNAKLITQRKFDNLTKAERGGLSELDKAGFIKRQLVETRQITKHVAQILDSRMNTKYDENDKLIREVKVITLKSKLVSDFRKDFQFYKVREINNYHHAHDAYLNAVVGTALIKKYPKLESEFVYGDYKVYDVRKMIAKSEQEIGKATAKYFFYSNIMNFFKTEITLANGEIRKRPLIETNGETGEIVWDKGRDFATVRKVLSMPQVNIVKKTEVQTGGFSKESILPKRNSDKLIARKKDWDPKKYGGFDSPTVAYSVLVVAKVEKGKSKKLKSVKELLGITIMERSSFEKNPIDFLEAKGYKEVKKDLIIKLPKYSLFELENGRKRMLASAGELQKGNELALPSKYVNFLYLASHYEKLKGSPEDNEQKQLFVEQHKHYLDEIIEQISEFSKRVILADANLDKVLSAYNKHRDKPIREQAENIIHLFTLTNLGAPAAFKYFDTTIDRKRYTSTKEVLDATLIHQSITGLYETRIDLSQLGGDGGGSSEAAAKPAPGGTAPLEEEYRLFLEAPIQNVTLLEQWKREIPKVWAEINPPGLASTQAPIHVQLLSTALPVRVRQYPITLEAKRSLRETIRKFRAAGILRPVHSPWNTPLLPVRKSGTSEYRMVQDLREVNKRVETIHPTVPNPYTLLSLLPPDRIWYSVLDLKDAFFCIPLAPESQLIFAFEWADAEEGESGQLTWTRLPQGFKNSPTLFNEALNRDLQGFRLDHPSVSLLQYVDDLLIAADTQAACLSATRDLLMTLAELGYRVSGKKAQLCQEEVTYLGFKIHKGSRSLSNSRTQAILQIPVPKTKRQVREFLGTIGYCRLWIPGFAELAQPLYAATRPGNDPLVWGEKEEEAFQSLKLALTQPPALALPSLDKPFQLFVEETSGAAKGVLTQALGPWKRPVAYLSKRLDPVAAGWPRCLRAIAAAALLTREASKLTFGQDIEITSSHNLESLLRSPPDKWLTNARITQYQVLLLDPPRVRFKQTAALNPATLLPETDDTLPIHHCLDTLDSLTSTRPDLTDQPLAQAEATLFTDGSSYIRDGKRYAGAAVVTLDSVIWAEPLPIGTSAQKAELIALTKALEWSKDKSVNIYTDSRYAFATLHVHGMIYRERGWLTAGGKAIKNAPEILALLTAVWLPKRVAVMHCKGHQKDDAPTSTGNRRADEVAREVAIRPLSTQATISAGKRTADGSEFEKRTADGSEFESPKKKAKVE

SEQ ID NO: 7570 - protein, 2102 aa, synthetic construct
MPAAKRVKLDGGDKKYSIGLDIGTNSVGWAVITDEYKVPSKKFKVLGNTDRHSIKKNLIGALLFDSGETAEATRLKRTARRRYTRRKNRICYLQEIFSNEMAKVDDSFFHRLEESFLVEEDKKHERHPIFGNIVDEVAYHEKYPTIYHLRKKLVDSTDKADLRLIYLALAHMIKFRGHFLIEGDLNPDNSDVDKLFIQLVQTYNQLFEENPINASGVDAKAILSARLSKSRRLENLIAQLPGEKKNGLFGNLIALSLGLTPNFKSNFDLAEDAKLQLSKDTYDDDLDNLLAQIGDQYADLFLAAKNLSDAILLSDILRVNTEITKAPLSASMIKRYDEHHQDLTLLKALVRQQLPEKYKEIFFDQSKNGYAGYIDGGASQEEFYKFIKPILEKMDGTEELLVKLNREDLLRKQRTFDNGSIPHQIHLGELHAILRRQEDFYPFLKDNREKIEKILTFRIPYYVGPLARGNSRFAWMTRKSEETITPWNFEEVVDKGASAQSFIERMTNFDKNLPNEKVLPKHSLLYEYFTVYNELTKVKYVTEGMRKPAFLSGEQKKAIVDLLFKTNRKVTVKQLKEDYFKKIECFDSVEISGVEDRFNASLGTYHDLLKIIKDKDFLDNEENEDILEDIVLTLTLFEDREMIEERLKTYAHLFDDKVMKQLKRRRYTGWGRLSRKLINGIRDKQSGKTILDFLKSDGFANRNFMQLIHDDSLTFKEDIQKAQVSGQGDSLHEHIANLAGSPAIKKGILQTVKVVDELVKVMGRHKPENIVIEMARENQTTQKGQKNSRERMKRIEEGIKELGSQILKEHPVENTQLQNEKLYLYYLQNGRDMYVDQELDINRLSDYDVDHIVPQSFLKDDSIDNKVLTRSDKARGKSDNVPSEEVVKKMKNYWRQLLNAKLITQRKFDNLTKAERGGLSELDKAGFIKRQLVETRQITKHVAQILDSRMNTKYDENDKLIREVKVITLKSKLVSDFRKDFQFYKVREINNYHHAHDAYLNAVVGTALIKKYPKLESEFVYGDYKVYDVRKMIAKSEQEIGKATAKYFFYSNIMNFFKTEITLANGEIRKRPLIETNGETGEIVWDKGRDFATVRKVLSMPQVNIVKKTEVQTGGFSKESILPKRNSDKLIARKKDWDPKKYGGFDSPTVAYSVLVVAKVEKGKSKKLKSVKELLGITIMERSSFEKNPIDFLEAKGYKEVKKDLIIKLPKYSLFELENGRKRMLASAGELQKGNELALPSKYVNFLYLASHYEKLKGSPEDNEQKQLFVEQHKHYLDEIIEQISEFSKRVILADANLDKVLSAYNKHRDKPIREQAENIIHLFTLTNLGAPAAFKYFDTTIDRKRYTSTKEVLDATLIHQSITGLYETRIDLSQLGGDGGGSSEAAAKPAPGGTVSLQDEHRLFDIPVTTSLPDVWLQDFPQAWAETGGLGRAKCQAPIIIDLKPTAVPVSIKQYPMSLEAHMGIRQHIIKFLELGVLRPCRSPWNTPLLPVKKPGTQDYRPVQDLREINKRTVDIHPTVPNPYNLLSTLKPDYSWYTVLDLKDAFFCLPLAPQSQELFAFEWKDPERGISGQLTWTRLPQGFKNSPTLFNEALHRDLTDFRTQHPEVTLLQYVDDLLLAAPTKKACTQGTRHLLQELGEKGYRASAKKAQICQTKVTYLGYILSEGKRWLTPGRIETVARIPPPRNPREVREFLGTAGFCRLWIPGFAELAAPLYALTKPSTPFTWQTEHQLAFEALKKALLSAPALGLPDTSKPFTLFLDERQGIAKGVLTQKLGPWKRPVAYLSKKLDPVAAGWPPCLRIMAATAMLVKDSAKLTLGQPLTVITPHTLEAIVRQPPDRWITNARLTHYQALLLDTDRVQFGPPVTLNPATLLPVPENQPSPHDCRQVLAETHGTREDLKDQELPDADHTWYTDGSSYLDSGTRRAGAAVVDGHNTIWAQSLPPGTSAQKAELIALTKALELSKGKKANIYTDSRYAFATAHTHGSIYERRGWLTSEGKEIKNKAEIIALLKALFLPQEVAIIHCPGHQKGQDPVAVGNRQADRVARQAAMAEVLTLATEPDNTSHITAGKRTADGSEFEKRTADGSEFESPKKKAKVE

SEQ ID NO: 7571 - protein, 2173 aa, synthetic construct
MPAAKRVKLDGGDKKYSIGLDIGTNSVGWAVITDEYKVPSKKFKVLGNTDRHSIKKNLIGALLFDSGETAEATRLKRTARRRYTRRKNRICYLQEIFSNEMAKVDDSFFHRLEESFLVEEDKKHERHPIFGNIVDEVAYHEKYPTIYHLRKKLVDSTDKADLRLIYLALAHMIKFRGHFLIEGDLNPDNSDVDKLFIQLVQTYNQLFEENPINASGVDAKAILSARLSKSRRLENLIAQLPGEKKNGLFGNLIALSLGLTPNFKSNFDLAEDAKLQLSKDTYDDDLDNLLAQIGDQYADLFLAAKNLSDAILLSDILRVNTEITKAPLSASMIKRYDEHHQDLTLLKALVRQQLPEKYKEIFFDQSKNGYAGYIDGGASQEEFYKFIKPILEKMDGTEELLVKLNREDLLRKQRTFDNGSIPHQIHLGELHAILRRQEDFYPFLKDNREKIEKILTFRIPYYVGPLARGNSRFAWMTRKSEETITPWNFEEVVDKGASAQSFIERMTNFDKNLPNEKVLPKHSLLYEYFTVYNELTKVKYVTEGMRKPAFLSGEQKKAIVDLLFKTNRKVTVKQLKEDYFKKIECFDSVEISGVEDRFNASLGTYHDLLKIIKDKDFLDNEENEDILEDIVLTLTLFEDREMIEERLKTYAHLFDDKVMKQLKRRRYTGWGRLSRKLINGIRDKQSGKTILDFLKSDGFANRNFMQLIHDDSLTFKEDIQKAQVSGQGDSLHEHIANLAGSPAIKKGILQTVKVVDELVKVMGRHKPENIVIEMARENQTTQKGQKNSRERMKRIEEGIKELGSQILKEHPVENTQLQNEKLYLYYLQNGRDMYVDQELDINRLSDYDVDHIVPQSFLKDDSIDNKVLTRSDKARGKSDNVPSEEVVKKMKNYWRQLLNAKLITQRKFDNLTKAERGGLSELDKAGFIKRQLVETRQITKHVAQILDSRMNTKYDENDKLIREVKVITLKSKLVSDFRKDFQFYKVREINNYHHAHDAYLNAVVGTALIKKYPKLESEFVYGDYKVYDVRKMIAKSEQEIGKATAKYFFYSNIMNFFKTEITLANGEIRKRPLIETNGETGEIVWDKGRDFATVRKVLSMPQVNIVKKTEVQTGGFSKESILPKRNSDKLIARKKDWDPKKYGGFDSPTVAYSVLVVAKVEKGKSKKLKSVKELLGITIMERSSFEKNPIDFLEAKGYKEVKKDLIIKLPKYSLFELENGRKRMLASAGELQKGNELALPSKYVNFLYLASHYEKLKGSPEDNEQKQLFVEQHKHYLDEIIEQISEFSKRVILADANLDKVLSAYNKHRDKPIREQAENIIHLFTLTNLGAPAAFKYFDTTIDRKRYTSTKEVLDATLIHQSITGLYETRIDLSQLGGDGGGSSEAAAKPAPGGMDLLKPLTVERKGVKIKGYWNSQADITCVPKDLLQGEEPVRQQNVTTIHGTQEGDVYYVNLKIDGRRINTEVIGTTLDYAIITPGDVPWILKKPLELTIKLDLEEQQGTLLNNSILSKKGKEELKQLFEKYSALWQSWENQVGHRRIRPHKIATGTVKPTPQKQYHINPKAKPDIQIVINDLLKQGVLIQKESTMNTPVYPVPKPNGRWRMVLDYRAVNKVTPLIAVQNQHSYGILGSLFKGRYKTTIDLSNGFWAHPIVPEDYWITAFTWQGKQYCWTVLPQGFLNSPGLFNGDVVDLLQGIPNVEVYVDDVYISHDSEKEHLEYLDILFNRLKEAGYIISLKKSNIANSIVDFLGFQITNEGRGLTDTFKEKLENITAPTTLKQLQSILGLLNFARNFIPDFTELIAPLYALIPKSPKNYVPWQIEHSTTLETLITKLNGAEYLQGRKGDKTLIMKVNASYTTGYIRYYNEGEKKPISYVSIVFSKTELKFTELEKLLTTVHKGLLKALDLSMGQNIHVYSPIVSMQNIQKTPQTAKKALASRWLSWLSYLEDPRIRFFYDPQMPALKDLPAVDTGKDNKKHPSNFQHIFYTDGSAITSPTKEGHLNAGMGIVYFINKDGNLQKQQEWSISLGNHTAQFAEIAAFEFALKKCLPLGGNILVVTDSNYVAKAYNEELDVWASNGFVNNRKKPLKHISKWKSVADLKRLRPDVVVTHEPGHQKLDSSPHAYGNNLADQLATQASFKVHAGKRTADGSEFEKRTADGSEFESPKKKAKVE

SEQ ID NO: 7572 - protein, 2095 aa, synthetic construct
MPAAKRVKLDGGDKKYSIGLDIGTNSVGWAVITDEYKVPSKKFKVLGNTDRHSIKKNLIGALLFDSGETAEATRLKRTARRRYTRRKNRICYLQEIFSNEMAKVDDSFFHRLEESFLVEEDKKHERHPIFGNIVDEVAYHEKYPTIYHLRKKLVDSTDKADLRLIYLALAHMIKFRGHFLIEGDLNPDNSDVDKLFIQLVQTYNQLFEENPINASGVDAKAILSARLSKSRRLENLIAQLPGEKKNGLFGNLIALSLGLTPNFKSNFDLAEDAKLQLSKDTYDDDLDNLLAQIGDQYADLFLAAKNLSDAILLSDILRVNTEITKAPLSASMIKRYDEHHQDLTLLKALVRQQLPEKYKEIFFDQSKNGYAGYIDGGASQEEFYKFIKPILEKMDGTEELLVKLNREDLLRKQRTFDNGSIPHQIHLGELHAILRRQEDFYPFLKDNREKIEKILTFRIPYYVGPLARGNSRFAWMTRKSEETITPWNFEEVVDKGASAQSFIERMTNFDKNLPNEKVLPKHSLLYEYFTVYNELTKVKYVTEGMRKPAFLSGEQKKAIVDLLFKTNRKVTVKQLKEDYFKKIECFDSVEISGVEDRFNASLGTYHDLLKIIKDKDFLDNEENEDILEDIVLTLTLFEDREMIEERLKTYAHLFDDKVMKQLKRRRYTGWGRLSRKLINGIRDKQSGKTILDFLKSDGFANRNFMQLIHDDSLTFKEDIQKAQVSGQGDSLHEHIANLAGSPAIKKGILQTVKVVDELVKVMGRHKPENIVIEMARENQTTQKGQKNSRERMKRIEEGIKELGSQILKEHPVENTQLQNEKLYLYYLQNGRDMYVDQELDINRLSDYDVDHIVPQSFLKDDSIDNKVLTRSDKARGKSDNVPSEEVVKKMKNYWRQLLNAKLITQRKFDNLTKAERGGLSELDKAGFIKRQLVETRQITKHVAQILDSRMNTKYDENDKLIREVKVITLKSKLVSDFRKDFQFYKVREINNYHHAHDAYLNAVVGTALIKKYPKLESEFVYGDYKVYDVRKMIAKSEQEIGKATAKYFFYSNIMNFFKTEITLANGEIRKRPLIETNGETGEIVWDKGRDFATVRKVLSMPQVNIVKKTEVQTGGFSKESILPKRNSDKLIARKKDWDPKKYGGFDSPTVAYSVLVVAKVEKGKSKKLKSVKELLGITIMERSSFEKNPIDFLEAKGYKEVKKDLIIKLPKYSLFELENGRKRMLASAGELQKGNELALPSKYVNFLYLASHYEKLKGSPEDNEQKQLFVEQHKHYLDEIIEQISEFSKRVILADANLDKVLSAYNKHRDKPIREQAENIIHLFTLTNLGAPAAFKYFDTTIDRKRYTSTKEVLDATLIHQSITGLYETRIDLSQLGGDGGGSSEAAAKPAPGGTLQLEEEYRLFEPESTQKQEMDIWLKNFPQAWAETGGMGTAHCQAPVLIQLKATATPISIRQYPMPHEAYQGIKPHIRRMLDQGILKPCQSPWNTPLLPVKKPGTEDYRPVQDLREVNKRVEDIHPTVPNPYNLLSTLPPSHPWYTVLDLKDAFFCLRLHSESQLLFAFEWRDPEIGLSGQLTWTRLPQGFKNSPTLFNEALHSDLADFRVRYPALVLLQYVDDLLLAAATRTECLEGTKALLETLGNKGYRASAKKAQICLQEVTYLGYSLKDGQRWLTKARKEAILSIPVPKNSRQVREFLGTAGYCRLWIPGFAELAAPLYPLTRPGTLFQWGTEQQLAFEDIKKALLSSPALGLPDITKPFELFIDENSGFAKGVLVQKLGPWKRPVAYLSKKLDTVASGWPPCLRMVAAIAILVKDAGKLTLGQPLTILTSHPVEALVRQPPNKWLSNARMTHYQAMLLDAERVHFGPTVSLNPATLLPLPSGGNHHDCLQILAETHGTRPDLTDQPLPDADLTWYTDGSSFIRNGEREAGAAVTTESEVIWAAPLPPGTSAQRAELIALTQALKMAEGKKLTVYTDSRYAFATTHVHGEIYRRRGWLTSEGKEIKNKNEILALLEALFLPKRLSIIHCPGHQKGDSPQAKGNRLADDTAKKAATETHSSLTVLPAGKRTADGSEFEKRTADGSEFESPKKKAKVE

SEQ ID NO: 7573 - protein, 2087 aa, synthetic construct
MPAAKRVKLDGGDKKYSIGLDIGTNSVGWAVITDEYKVPSKKFKVLGNTDRHSIKKNLIGALLFDSGETAEATRLKRTARRRYTRRKNRICYLQEIFSNEMAKVDDSFFHRLEESFLVEEDKKHERHPIFGNIVDEVAYHEKYPTIYHLRKKLVDSTDKADLRLIYLALAHMIKFRGHFLIEGDLNPDNSDVDKLFIQLVQTYNQLFEENPINASGVDAKAILSARLSKSRRLENLIAQLPGEKKNGLFGNLIALSLGLTPNFKSNFDLAEDAKLQLSKDTYDDDLDNLLAQIGDQYADLFLAAKNLSDAILLSDILRVNTEITKAPLSASMIKRYDEHHQDLTLLKALVRQQLPEKYKEIFFDQSKNGYAGYIDGGASQEEFYKFIKPILEKMDGTEELLVKLNREDLLRKQRTFDNGSIPHQIHLGELHAILRRQEDFYPFLKDNREKIEKILTFRIPYYVGPLARGNSRFAWMTRKSEETITPWNFEEVVDKGASAQSFIERMTNFDKNLPNEKVLPKHSLLYEYFTVYNELTKVKYVTEGMRKPAFLSGEQKKAIVDLLFKTNRKVTVKQLKEDYFKKIECFDSVEISGVEDRFNASLGTYHDLLKIIKDKDFLDNEENEDILEDIVLTLTLFEDREMIEERLKTYAHLFDDKVMKQLKRRRYTGWGRLSRKLINGIRDKQSGKTILDFLKSDGFANRNFMQLIHDDSLTFKEDIQKAQVSGQGDSLHEHIANLAGSPAIKKGILQTVKVVDELVKVMGRHKPENIVIEMARENQTTQKGQKNSRERMKRIEEGIKELGSQILKEHPVENTQLQNEKLYLYYLQNGRDMYVDQELDINRLSDYDVDHIVPQSFLKDDSIDNKVLTRSDKARGKSDNVPSEEVVKKMKNYWRQLLNAKLITQRKFDNLTKAERGGLSELDKAGFIKRQLVETRQITKHVAQILDSRMNTKYDENDKLIREVKVITLKSKLVSDFRKDFQFYKVREINNYHHAHDAYLNAVVGTALIKKYPKLESEFVYGDYKVYDVRKMIAKSEQEIGKATAKYFFYSNIMNFFKTEITLANGEIRKRPLIETNGETGEIVWDKGRDFATVRKVLSMPQVNIVKKTEVQTGGFSKESILPKRNSDKLIARKKDWDPKKYGGFDSPTVAYSVLVVAKVEKGKSKKLKSVKELLGITIMERSSFEKNPIDFLEAKGYKEVKKDLIIKLPKYSLFELENGRKRMLASAGELQKGNELALPSKYVNFLYLASHYEKLKGSPEDNEQKQLFVEQHKHYLDEIIEQISEFSKRVILADANLDKVLSAYNKHRDKPIREQAENIIHLFTLTNLGAPAAFKYFDTTIDRKRYTSTKEVLDATLIHQSITGLYETRIDLSQLGGDGGGSSEAAAKPAPGGVPWLTQQPLQLTILVPLQEYQEKILSKTALPEDQKQQLKTLFVKYDNLWQHWENQVGHRKIRPHNIATGDYPPRPQKQYPINPKAKPSIQIVIDDLLKQGVLTPQNSTMNTPVYPVPKPDGRWRMVLDYREVNKTIPLTAAQNQHSAGILATIVRQKYKTTLDLANGFWAHPITPESYWLTAFTWQGKQYCWTRLPQGFLNSPALFNADVVDLLKEIPNVQVYVDDIYLSHDDPKEHVQQLEKVFQILLQAGYVVSLKKSEIGQKTVEFLGFNITKEGRGLTDTFKTKLLNITPPKDLKQLQSILGKLNFARNFIPNFAELVQPLYNLIAPAKGKYIEWSEENTKQLNMVIEALNTASNLEERLPEQRLVIKVNTSPSAGYVRYYNETGKKPIMYLNYVFSKAELKFSMLEKLLTTMHKALIKAMDLAMGQEILVYSPIVSMTKIQKTPLPERKALPIRWITWMTYLEDPRIQFHYDKTLPELKHIPDVYTSSQSPVKHPSQYEGVFYTDGSAIKSPDPTKSNNAGMGIVHATYKPEYQVLNQWSIPLGNHTAQMAEIAAVEFACKKALKIPGPVLVITDSFYVAESANKELPYWKSNGFVNNKKKPLKHISKWKSIAECLSMKPDITIQHEKGISLQIPVFILKGNALADKLATQGSYVVNAGKRTADGSEFEKRTADGSEFESPKKKAKVE

SEQ ID NO: 7574 - protein, 2127 aa, synthetic construct
MPAAKRVKLDGGDKKYSIGLDIGTNSVGWAVITDEYKVPSKKFKVLGNTDRHSIKKNLIGALLFDSGETAEATRLKRTARRRYTRRKNRICYLQEIFSNEMAKVDDSFFHRLEESFLVEEDKKHERHPIFGNIVDEVAYHEKYPTIYHLRKKLVDSTDKADLRLIYLALAHMIKFRGHFLIEGDLNPDNSDVDKLFIQLVQTYNQLFEENPINASGVDAKAILSARLSKSRRLENLIAQLPGEKKNGLFGNLIALSLGLTPNFKSNFDLAEDAKLQLSKDTYDDDLDNLLAQIGDQYADLFLAAKNLSDAILLSDILRVNTEITKAPLSASMIKRYDEHHQDLTLLKALVRQQLPEKYKEIFFDQSKNGYAGYIDGGASQEEFYKFIKPILEKMDGTEELLVKLNREDLLRKQRTFDNGSIPHQIHLGELHAILRRQEDFYPFLKDNREKIEKILTFRIPYYVGPLARGNSRFAWMTRKSEETITPWNFEEVVDKGASAQSFIERMTNFDKNLPNEKVLPKHSLLYEYFTVYNELTKVKYVTEGMRKPAFLSGEQKKAIVDLLFKTNRKVTVKQLKEDYFKKIECFDSVEISGVEDRFNASLGTYHDLLKIIKDKDFLDNEENEDILEDIVLTLTLFEDREMIEERLKTYAHLFDDKVMKQLKRRRYTGWGRLSRKLINGIRDKQSGKTILDFLKSDGFANRNFMQLIHDDSLTFKEDIQKAQVSGQGDSLHEHIANLAGSPAIKKGILQTVKVVDELVKVMGRHKPENIVIEMARENQTTQKGQKNSRERMKRIEEGIKELGSQILKEHPVENTQLQNEKLYLYYLQNGRDMYVDQELDINRLSDYDVDHIVPQSFLKDDSIDNKVLTRSDKARGKSDNVPSEEVVKKMKNYWRQLLNAKLITQRKFDNLTKAERGGLSELDKAGFIKRQLVETRQITKHVAQILDSRMNTKYDENDKLIREVKVITLKSKLVSDFRKDFQFYKVREINNYHHAHDAYLNAVVGTALIKKYPKLESEFVYGDYKVYDVRKMIAKSEQEIGKATAKYFFYSNIMNFFKTEITLANGEIRKRPLIETNGETGEIVWDKGRDFATVRKVLSMPQVNIVKKTEVQTGGFSKESILPKRNSDKLIARKKDWDPKKYGGFDSPTVAYSVLVVAKVEKGKSKKLKSVKELLGITIMERSSFEKNPIDFLEAKGYKEVKKDLIIKLPKYSLFELENGRKRMLASAGELQKGNELALPSKYVNFLYLASHYEKLKGSPEDNEQKQLFVEQHKHYLDEIIEQISEFSKRVILADANLDKVLSAYNKHRDKPIREQAENIIHLFTLTNLGAPAAFKYFDTTIDRKRYTSTKEVLDATLIHQSITGLYETRIDLSQLGGDGGGSSEAAAKPAPGGLLGRDLLTKLKAQIQFSTEGPQVTWEDRPAMCLVLNLEEEYRLHEKPVPPSIDPSWLQLFPMVWAEKAGMGLANQVPPVVVELKSDASPVAVRQYPMSKEAREGIRPHIQRFLDLGILVPCQSPWNTPLLPVKKPGTNDYRPVQDLREVNKRVQDIHPTVPNPYNLLSSLPPSHTWYSVLDLKDAFFCLKLHPNSQPLFAFEWRDPEKGNTGQLTWTRLPQGFKNSPTLFNEALHRDLASFRALNPQVVMLQYVDDLLVAAPTYRDCKEGTRRLLQELSKLGYRVSAKKAQLCREEVTYLGYLLKGGKRWLTPARKATVMKIPTPTTPRQVREFLGTAGFCRLWIPGFASLAAPLYPLTRPKVPFTWTEAHQEAFGRIKEALLSAPALALPDLTKPFALYVDEKEGVARGVLTQTLGPWRRPVAYLSKKLDPVASGWPTCLKAIAAVALLLKDADKLTLGQNVLVIAPHNLESIVRQPPDRWMTNARMTHYQSLLLNERVSFAPPAILNPATLLPVESDDTPIHICSEILAEETGTRPDLRDQPLPGVPAWYTDGSSFIMDGRRQAGAAIVDNKRTVWASNLPEGTSAQKAELIALTQALRLAEGKSINIYTDSRYAFATAHVHGAIYKQRGWLTSAGKDIKNKEEILALLEAIHLPKRVAIIHCPGHQRGTDPVATGNRKADEAAKQAAQSTRILTETTKNAGKRTADGSEFEKRTADGSEFESPKKKAKVE

SEQ ID NO: 7575 - protein, 2218 aa, synthetic construct
MPAAKRVKLDGGDKKYSIGLDIGTNSVGWAVITDEYKVPSKKFKVLGNTDRHSIKKNLIGALLFDSGETAEATRLKRTARRRYTRRKNRICYLQEIFSNEMAKVDDSFFHRLEESFLVEEDKKHERHPIFGNIVDEVAYHEKYPTIYHLRKKLVDSTDKADLRLIYLALAHMIKFRGHFLIEGDLNPDNSDVDKLFIQLVQTYNQLFEENPINASGVDAKAILSARLSKSRRLENLIAQLPGEKKNGLFGNLIALSLGLTPNFKSNFDLAEDAKLQLSKDTYDDDLDNLLAQIGDQYADLFLAAKNLSDAILLSDILRVNTEITKAPLSASMIKRYDEHHQDLTLLKALVRQQLPEKYKEIFFDQSKNGYAGYIDGGASQEEFYKFIKPILEKMDGTEELLVKLNREDLLRKQRTFDNGSIPHQIHLGELHAILRRQEDFYPFLKDNREKIEKILTFRIPYYVGPLARGNSRFAWMTRKSEETITPWNFEEVVDKGASAQSFIERMTNFDKNLPNEKVLPKHSLLYEYFTVYNELTKVKYVTEGMRKPAFLSGEQKKAIVDLLFKTNRKVTVKQLKEDYFKKIECFDSVEISGVEDRFNASLGTYHDLLKIIKDKDFLDNEENEDILEDIVLTLTLFEDREMIEERLKTYAHLFDDKVMKQLKRRRYTGWGRLSRKLINGIRDKQSGKTILDFLKSDGFANRNFMQLIHDDSLTFKEDIQKAQVSGQGDSLHEHIANLAGSPAIKKGILQTVKVVDELVKVMGRHKPENIVIEMARENQTTQKGQKNSRERMKRIEEGIKELGSQILKEHPVENTQLQNEKLYLYYLQNGRDMYVDQELDINRLSDYDVDHIVPQSFLKDDSIDNKVLTRSDKARGKSDNVPSEEVVKKMKNYWRQLLNAKLITQRKFDNLTKAERGGLSELDKAGFIKRQLVETRQITKHVAQILDSRMNTKYDENDKLIREVKVITLKSKLVSDFRKDFQFYKVREINNYHHAHDAYLNAVVGTALIKKYPKLESEFVYGDYKVYDVRKMIAKSEQEIGKATAKYFFYSNIMNFFKTEITLANGEIRKRPLIETNGETGEIVWDKGRDFATVRKVLSMPQVNIVKKTEVQTGGFSKESILPKRNSDKLIARKKDWDPKKYGGFDSPTVAYSVLVVAKVEKGKSKKLKSVKELLGITIMERSSFEKNPIDFLEAKGYKEVKKDLIIKLPKYSLFELENGRKRMLASAGELQKGNELALPSKYVNFLYLASHYEKLKGSPEDNEQKQLFVEQHKHYLDEIIEQISEFSKRVILADANLDKVLSAYNKHRDKPIREQAENIIHLFTLTNLGAPAAFKYFDTTIDRKRYTSTKEVLDATLIHQSITGLYETRIDLSQLGGDGGGSSEAAAKPAPGGTLGDQGSRGSDPLPEPRVTLTVEGIPTEFLVNTGAEHSVLTKPMGKMGSKRTVVAGATGSKVYPWTTKRLLKIGQKQVTHSFLVIPECPAPLLGRDLLTKLKAQIQFSTEGPQVTWEDRPAMCLVLNLEEEYRLHEKPVPPSIDPSWLQLFPMVWAEKAGMGLANQVPPVVVELKSDASPVAVRQYPMSKEAREGIRPHIQRFLDLGILVPCQSPWNTPLLPVKKPGTNDYRPVQDLREVNKRVQDIHPTVPNPYNLLSSLPPSHTWYSVLDLKDAFFCLKLHPNSQPLFAFEWRDPEKGNTGQLTWTRLPQGFKNSPTLFNEALHRDLASFRALNPQVVMLQYVDDLLVAAPTYRDCKEGTRRLLQELSKLGYRVSAKKAQLCREEVTYLGYLLKGGKRWLTPARKATVMKIPTPTTPRQVREFLGTAGFCRLWIPGFASLAAPLYPLTRPKVPFTWTEAHQEAFGRIKEALLSAPALALPDLTKPFALYVDEKEGVARGVLTQTLGPWRRPVAYLSKKLDPVASGWPTCLKAIAAVALLLKDADKLTLGQNVLVIAPHNLESIVRQPPDRWMTNARMTHYQSLLLNERVSFAPPAILNPATLLPVESDDTPIHICSEILAEETGTRPDLRDQPLPGVPAWYTDGSSFIMDGRRQAGAAIVDNKRTVWASNLPEGTSAQKAELIALTQALRLAEGKSINIYTDSRYAFATAHVHGAIYKQRGWLTSAGKDIKNKEEILALLEAIHLPKRVAIIHCPGHQRGTDPVATGNRKADEAAKQAAQSTRILTETTKNAGKRTADGSEFEKRTADGSEFESPKKKAKVE

SEQ ID NO: 7576 - protein, 2218 aa, synthetic construct
MPAAKRVKLDGGDKKYSIGLDIGTNSVGWAVITDEYKVPSKKFKVLGNTDRHSIKKNLIGALLFDSGETAEATRLKRTARRRYTRRKNRICYLQEIFSNEMAKVDDSFFHRLEESFLVEEDKKHERHPIFGNIVDEVAYHEKYPTIYHLRKKLVDSTDKADLRLIYLALAHMIKFRGHFLIEGDLNPDNSDVDKLFIQLVQTYNQLFEENPINASGVDAKAILSARLSKSRRLENLIAQLPGEKKNGLFGNLIALSLGLTPNFKSNFDLAEDAKLQLSKDTYDDDLDNLLAQIGDQYADLFLAAKNLSDAILLSDILRVNTEITKAPLSASMIKRYDEHHQDLTLLKALVRQQLPEKYKEIFFDQSKNGYAGYIDGGASQEEFYKFIKPILEKMDGTEELLVKLNREDLLRKQRTFDNGSIPHQIHLGELHAILRRQEDFYPFLKDNREKIEKILTFRIPYYVGPLARGNSRFAWMTRKSEETITPWNFEEVVDKGASAQSFIERMTNFDKNLPNEKVLPKHSLLYEYFTVYNELTKVKYVTEGMRKPAFLSGEQKKAIVDLLFKTNRKVTVKQLKEDYFKKIECFDSVEISGVEDRFNASLGTYHDLLKIIKDKDFLDNEENEDILEDIVLTLTLFEDREMIEERLKTYAHLFDDKVMKQLKRRRYTGWGRLSRKLINGIRDKQSGKTILDFLKSDGFANRNFMQLIHDDSLTFKEDIQKAQVSGQGDSLHEHIANLAGSPAIKKGILQTVKVVDELVKVMGRHKPENIVIEMARENQTTQKGQKNSRERMKRIEEGIKELGSQILKEHPVENTQLQNEKLYLYYLQNGRDMYVDQELDINRLSDYDVDHIVPQSFLKDDSIDNKVLTRSDKARGKSDNVPSEEVVKKMKNYWRQLLNAKLITQRKFDNLTKAERGGLSELDKAGFIKRQLVETRQITKHVAQILDSRMNTKYDENDKLIREVKVITLKSKLVSDFRKDFQFYKVREINNYHHAHDAYLNAVVGTALIKKYPKLESEFVYGDYKVYDVRKMIAKSEQEIGKATAKYFFYSNIMNFFKTEITLANGEIRKRPLIETNGETGEIVWDKGRDFATVRKVLSMPQVNIVKKTEVQTGGFSKESILPKRNSDKLIARKKDWDPKKYGGFDSPTVAYSVLVVAKVEKGKSKKLKSVKELLGITIMERSSFEKNPIDFLEAKGYKEVKKDLIIKLPKYSLFELENGRKRMLASAGELQKGNELALPSKYVNFLYLASHYEKLKGSPEDNEQKQLFVEQHKHYLDEIIEQISEFSKRVILADANLDKVLSAYNKHRDKPIREQAENIIHLFTLTNLGAPAAFKYFDTTIDRKRYTSTKEVLDATLIHQSITGLYETRIDLSQLGGDGGGSSEAAAKPAPGGTLGDQGSRGSDPLPEPRVTLTVEGIPTEFLVNTGAEHSVLTKPMGKMGSKRTVVAGATGSKVYPWTTKRLLKIGQKQVTHSFLVIPECPAPLLGRDLLTKLKAQIQFSTEGPQVTWEDRPAMCLVLNLEEEYRLHEKPVPPSIDPSWLQLFPMVWAEKAGMGLANQVPPVVVELKSDASPVAVRQYPMSKEAREGIRPHIQRFLDLGILVPCQSPWNTPLLPVKKPGTNDYRPVQDLREVNKRVQDIHPTVPNPYNLLSSLPPSHTWYSVLDLKDAFFCLKLHPNSQPLFAFEWRDPEKGNTGQLTWTRLPQGFKNSPTLFNEALHRDLASFRALNPQVVMLQYVDDLLVAAPTYRDCKEGTRRLLQELSKLGYRVSAKKAQLCREEVTYLGYLLKGGKRWLTPARKATVMKIPTPTTPRQVREFLGKAGFCRLFIPGFASLAAPLYPLTRPKVPFTWTEAHQEAFGRIKEALLSAPALALPDLTKPFALYVDEKEGVARGVLTQTLGPWRRPVAYLSKKLDPVASGWPTCLKAIAAVALLLKDADKLTLGQNVLVIAPHNLESIVRQPPDRWMTNARMTHYQSLLLNERVSFAPPAILNPATLLPVESDDTPIHICSEILAEETGTRPDLRDQPLPGVPAWYTDGSSFIMDGRRQAGAAIVDNKRTVWASNLPEGTSAQKAELIALTQALRLAEGKSINIYTDSRYAFATAHVHGAIYKQRGWLTSAGKDIKNKEEILALLEAIHLPKRVAIIHCPGHQRGTDPVATGNRKADEAAKQAAQSTRILTETTKNAGKRTADGSEFEKRTADGSEFESPKKKAKVE

SEQ ID NO: 7577 - protein, 2096 aa, synthetic construct
MPAAKRVKLDGGDKKYSIGLDIGTNSVGWAVITDEYKVPSKKFKVLGNTDRHSIKKNLIGALLFDSGETAEATRLKRTARRRYTRRKNRICYLQEIFSNEMAKVDDSFFHRLEESFLVEEDKKHERHPIFGNIVDEVAYHEKYPTIYHLRKKLVDSTDKADLRLIYLALAHMIKFRGHFLIEGDLNPDNSDVDKLFIQLVQTYNQLFEENPINASGVDAKAILSARLSKSRRLENLIAQLPGEKKNGLFGNLIALSLGLTPNFKSNFDLAEDAKLQLSKDTYDDDLDNLLAQIGDQYADLFLAAKNLSDAILLSDILRVNTEITKAPLSASMIKRYDEHHQDLTLLKALVRQQLPEKYKEIFFDQSKNGYAGYIDGGASQEEFYKFIKPILEKMDGTEELLVKLNREDLLRKQRTFDNGSIPHQIHLGELHAILRRQEDFYPFLKDNREKIEKILTFRIPYYVGPLARGNSRFAWMTRKSEETITPWNFEEVVDKGASAQSFIERMTNFDKNLPNEKVLPKHSLLYEYFTVYNELTKVKYVTEGMRKPAFLSGEQKKAIVDLLFKTNRKVTVKQLKEDYFKKIECFDSVEISGVEDRFNASLGTYHDLLKIIKDKDFLDNEENEDILEDIVLTLTLFEDREMIEERLKTYAHLFDDKVMKQLKRRRYTGWGRLSRKLINGIRDKQSGKTILDFLKSDGFANRNFMQLIHDDSLTFKEDIQKAQVSGQGDSLHEHIANLAGSPAIKKGILQTVKVVDELVKVMGRHKPENIVIEMARENQTTQKGQKNSRERMKRIEEGIKELGSQILKEHPVENTQLQNEKLYLYYLQNGRDMYVDQELDINRLSDYDVDHIVPQSFLKDDSIDNKVLTRSDKARGKSDNVPSEEVVKKMKNYWRQLLNAKLITQRKFDNLTKAERGGLSELDKAGFIKRQLVETRQITKHVAQILDSRMNTKYDENDKLIREVKVITLKSKLVSDFRKDFQFYKVREINNYHHAHDAYLNAVVGTALIKKYPKLESEFVYGDYKVYDVRKMIAKSEQEIGKATAKYFFYSNIMNFFKTEITLANGEIRKRPLIETNGETGEIVWDKGRDFATVRKVLSMPQVNIVKKTEVQTGGFSKESILPKRNSDKLIARKKDWDPKKYGGFDSPTVAYSVLVVAKVEKGKSKKLKSVKELLGITIMERSSFEKNPIDFLEAKGYKEVKKDLIIKLPKYSLFELENGRKRMLASAGELQKGNELALPSKYVNFLYLASHYEKLKGSPEDNEQKQLFVEQHKHYLDEIIEQISEFSKRVILADANLDKVLSAYNKHRDKPIREQAENIIHLFTLTNLGAPAAFKYFDTTIDRKRYTSTKEVLDATLIHQSITGLYETRIDLSQLGGDGGGSSEAAAKPAPGGTLNLEDEYRLYETSAEPEVSPGSTWLSDFPQAWAETGGMGLAVRQAPLIIPLKATSTPVSIKQYPMSQEAKLGIKPHIQRLLDQGILVPCQSPWNTPLLPVKKPGTNDYRPVQDLREVNKRVEDIHPTVPNPYNLLSGLPPSHRWYTVLDLKDAFFCLRLHPTSQPLFAFEWRDPGMGISGQLTWTRLPQGFKNSPTLFNEALHRDLADFRIQHPDLILLQYVDDILLAATSELDCQQGTRALLLTLGNLGYRASAKKAQLCQKQVKYLGYLLKEGQRWLTEARKETVMGQPTPKTPRQLREFLGTAGFCRLWIPGFAEMAAPLYPLTKPGTLFNWGPDQQKAYQEIKQALLTAPALGLPDLTKPFELFVDEKQGYAKGVLTQKLGPWRRPVAYLSKKLDPVAAGWPPCLRMVAAIAVLRKDAGKLTMGQPLVILAPHAVEALVKQPPDRWLSNARMTHYQAMLLDTDRVQFGPVVALNPATLLPLPEEGAPHDCLEILAETHGTRPDLTDQPIPDADHTWYTDGSSFLQEGQRKAGAAVTTETEVIWARALPAGTSAQRAELIALTQALKMAEGKRLNVYTDSRYAFATAHIHGEIYRRRGWLTSEGREIKNKSEILALLKALFLPKRLSIIHCLGHQKGDSAEARGNRLADQAAREAAIKTPPDTSTLLAGKRTADGSEFEKRTADGSEFESPKKKAKVE

SEQ ID NO: 7578 - protein, 2096 aa, synthetic construct
MPAAKRVKLDGGDKKYSIGLDIGTNSVGWAVITDEYKVPSKKFKVLGNTDRHSIKKNLIGALLFDSGETAEATRLKRTARRRYTRRKNRICYLQEIFSNEMAKVDDSFFHRLEESFLVEEDKKHERHPIFGNIVDEVAYHEKYPTIYHLRKKLVDSTDKADLRLIYLALAHMIKFRGHFLIEGDLNPDNSDVDKLFIQLVQTYNQLFEENPINASGVDAKAILSARLSKSRRLENLIAQLPGEKKNGLFGNLIALSLGLTPNFKSNFDLAEDAKLQLSKDTYDDDLDNLLAQIGDQYADLFLAAKNLSDAILLSDILRVNTEITKAPLSASMIKRYDEHHQDLTLLKALVRQQLPEKYKEIFFDQSKNGYAGYIDGGASQEEFYKFIKPILEKMDGTEELLVKLNREDLLRKQRTFDNGSIPHQIHLGELHAILRRQEDFYPFLKDNREKIEKILTFRIPYYVGPLARGNSRFAWMTRKSEETITPWNFEEVVDKGASAQSFIERMTNFDKNLPNEKVLPKHSLLYEYFTVYNELTKVKYVTEGMRKPAFLSGEQKKAIVDLLFKTNRKVTVKQLKEDYFKKIECFDSVEISGVEDRFNASLGTYHDLLKIIKDKDFLDNEENEDILEDIVLTLTLFEDREMIEERLKTYAHLFDDKVMKQLKRRRYTGWGRLSRKLINGIRDKQSGKTILDFLKSDGFANRNFMQLIHDDSLTFKEDIQKAQVSGQGDSLHEHIANLAGSPAIKKGILQTVKVVDELVKVMGRHKPENIVIEMARENQTTQKGQKNSRERMKRIEEGIKELGSQILKEHPVENTQLQNEKLYLYYLQNGRDMYVDQELDINRLSDYDVDHIVPQSFLKDDSIDNKVLTRSDKARGKSDNVPSEEVVKKMKNYWRQLLNAKLITQRKFDNLTKAERGGLSELDKAGFIKRQLVETRQITKHVAQILDSRMNTKYDENDKLIREVKVITLKSKLVSDFRKDFQFYKVREINNYHHAHDAYLNAVVGTALIKKYPKLESEFVYGDYKVYDVRKMIAKSEQEIGKATAKYFFYSNIMNFFKTEITLANGEIRKRPLIETNGETGEIVWDKGRDFATVRKVLSMPQVNIVKKTEVQTGGFSKESILPKRNSDKLIARKKDWDPKKYGGFDSPTVAYSVLVVAKVEKGKSKKLKSVKELLGITIMERSSFEKNPIDFLEAKGYKEVKKDLIIKLPKYSLFELENGRKRMLASAGELQKGNELALPSKYVNFLYLASHYEKLKGSPEDNEQKQLFVEQHKHYLDEIIEQISEFSKRVILADANLDKVLSAYNKHRDKPIREQAENIIHLFTLTNLGAPAAFKYFDTTIDRKRYTSTKEVLDATLIHQSITGLYETRIDLSQLGGDGGGSSEAAAKPAPGGTLNLEDEYRLYETSAEPEVSPGSTWLSDFPQAWAETGGMGLAVRQAPLIIPLKATSTPVSIKQYPMSQEAKLGIKPHIQRLLDQGILVPCQSPWNTPLLPVKKPGTNDYRPVQDLREVNKRVEDIHPTVPNPYNLLSGLPPSHRWYTVLDLKDAFFCLRLHPTSQPLFAFEWRDPGMGISGQLTWTRLPQGFKNSPTLFNEALHRDLADFRIQHPDLILLQYVDDILLAATSELDCQQGTRALLLTLGNLGYRASAKKAQLCQKQVKYLGYLLKEGQRWLTEARKETVMGQPTPKTPRQLREFLGKAGFCRLFIPGFAEMAAPLYPLTKPGTLFNWGPDQQKAYQEIKQALLTAPALGLPDLTKPFELFVDEKQGYAKGVLTQKLGPWRRPVAYLSKKLDPVAAGWPPCLRMVAAIAVLRKDAGKLTMGQPLVILAPHAVEALVKQPPDRWLSNARMTHYQAMLLDTDRVQFGPVVALNPATLLPLPEEGAPHDCLEILAETHGTRPDLTDQPIPDADHTWYTDGSSFLQEGQRKAGAAVTTETEVIWARALPAGTSAQRAELIALTQALKMAEGKRLNVYTDSRYAFATAHIHGEIYRRRGWLTSEGREIKNKSEILALLKALFLPKRLSIIHCLGHQKGDSAEARGNRLADQAAREAAIKTPPDTSTLLAGKRTADGSEFEKRTADGSEFESPKKKAKVE

SEQ ID NO: 7579 - protein, 2096 aa, synthetic construct
MPAAKRVKLDGGDKKYSIGLDIGTNSVGWAVITDEYKVPSKKFKVLGNTDRHSIKKNLIGALLFDSGETAEATRLKRTARRRYTRRKNRICYLQEIFSNEMAKVDDSFFHRLEESFLVEEDKKHERHPIFGNIVDEVAYHEKYPTIYHLRKKLVDSTDKADLRLIYLALAHMIKFRGHFLIEGDLNPDNSDVDKLFIQLVQTYNQLFEENPINASGVDAKAILSARLSKSRRLENLIAQLPGEKKNGLFGNLIALSLGLTPNFKSNFDLAEDAKLQLSKDTYDDDLDNLLAQIGDQYADLFLAAKNLSDAILLSDILRVNTEITKAPLSASMIKRYDEHHQDLTLLKALVRQQLPEKYKEIFFDQSKNGYAGYIDGGASQEEFYKFIKPILEKMDGTEELLVKLNREDLLRKQRTFDNGSIPHQIHLGELHAILRRQEDFYPFLKDNREKIEKILTFRIPYYVGPLARGNSRFAWMTRKSEETITPWNFEEVVDKGASAQSFIERMTNFDKNLPNEKVLPKHSLLYEYFTVYNELTKVKYVTEGMRKPAFLSGEQKKAIVDLLFKTNRKVTVKQLKEDYFKKIECFDSVEISGVEDRFNASLGTYHDLLKIIKDKDFLDNEENEDILEDIVLTLTLFEDREMIEERLKTYAHLFDDKVMKQLKRRRYTGWGRLSRKLINGIRDKQSGKTILDFLKSDGFANRNFMQLIHDDSLTFKEDIQKAQVSGQGDSLHEHIANLAGSPAIKKGILQTVKVVDELVKVMGRHKPENIVIEMARENQTTQKGQKNSRERMKRIEEGIKELGSQILKEHPVENTQLQNEKLYLYYLQNGRDMYVDQELDINRLSDYDVDHIVPQSFLKDDSIDNKVLTRSDKARGKSDNVPSEEVVKKMKNYWRQLLNAKLITQRKFDNLTKAERGGLSELDKAGFIKRQLVETRQITKHVAQILDSRMNTKYDENDKLIREVKVITLKSKLVSDFRKDFQFYKVREINNYHHAHDAYLNAVVGTALIKKYPKLESEFVYGDYKVYDVRKMIAKSEQEIGKATAKYFFYSNIMNFFKTEITLANGEIRKRPLIETNGETGEIVWDKGRDFATVRKVLSMPQVNIVKKTEVQTGGFSKESILPKRNSDKLIARKKDWDPKKYGGFDSPTVAYSVLVVAKVEKGKSKKLKSVKELLGITIMERSSFEKNPIDFLEAKGYKEVKKDLIIKLPKYSLFELENGRKRMLASAGELQKGNELALPSKYVNFLYLASHYEKLKGSPEDNEQKQLFVEQHKHYLDEIIEQISEFSKRVILADANLDKVLSAYNKHRDKPIREQAENIIHLFTLTNLGAPAAFKYFDTTIDRKRYTSTKEVLDATLIHQSITGLYETRIDLSQLGGDGGGSSEAAAKPAPGGTLGIEDEYRLHETSTEPDVSLGSTWLSDFPQAWAETGGMGLAVRQAPLIIPLKATSTPVSIQQYPMSHEARLGIKPHIQRLLDQGILVPCQSPWNTPLLPVKKPGTNDYRPVQDLREVNKRVEDIHPTVPNPYNLLSGLPPSHQWYTVLDLKDAFFCLRLHPTSQPLFAFEWRDPGMGISGQLTWTRLPQGFKNSPTLFDEALHRDLADFRIQHPDLILLQYVDDILLAATSELDCQQGTRALLQTLGDLGYRASAKKAQICQKQVKYLGYLLREGQRWLTEARKETVMGQPVPKTPRQLREFLGTAGFCRLWIPGFAEMAAPLYPLTKTGTLFSWGPDQQKAYQEIKQALLTAPALGLPDLTKPFELFVDEKQGYAKGVLTQKLGPWRRPVAYLSKKLDPVAAGWPPCLRMVAAIAVLTKDAGKLTMGQPLVILAPHAVEALVKQPPDRWLSNARMTHYQAMLLDTDRVQFGPVVALNPATLLPLPEEGAPHDCLEILAETHGTRPDLTDQPIPDADHTWYTDGSSFLQEGQRKAGAAVTTETEVIWAGALPAGTSAQRAELIALTQALKMAEGKRLNVYTDSRYAFATAHIHGEIYRRRGLLTSEGREIKNKSEILALLKALFLPKRLSIIHCLGHQKGDSAEARGNRLADQAAREAAIKTPPDTSTLLAGKRTADGSEFEKRTADGSEFESPKKKAKVE

SEQ ID NO: 7580 - protein, 2096 aa, synthetic construct
MPAAKRVKLDGGDKKYSIGLDIGTNSVGWAVITDEYKVPSKKFKVLGNTDRHSIKKNLIGALLFDSGETAEATRLKRTARRRYTRRKNRICYLQEIFSNEMAKVDDSFFHRLEESFLVEEDKKHERHPIFGNIVDEVAYHEKYPTIYHLRKKLVDSTDKADLRLIYLALAHMIKFRGHFLIEGDLNPDNSDVDKLFIQLVQTYNQLFEENPINASGVDAKAILSARLSKSRRLENLIAQLPGEKKNGLFGNLIALSLGLTPNFKSNFDLAEDAKLQLSKDTYDDDLDNLLAQIGDQYADLFLAAKNLSDAILLSDILRVNTEITKAPLSASMIKRYDEHHQDLTLLKALVRQQLPEKYKEIFFDQSKNGYAGYIDGGASQEEFYKFIKPILEKMDGTEELLVKLNREDLLRKQRTFDNGSIPHQIHLGELHAILRRQEDFYPFLKDNREKIEKILTFRIPYYVGPLARGNSRFAWMTRKSEETITPWNFEEVVDKGASAQSFIERMTNFDKNLPNEKVLPKHSLLYEYFTVYNELTKVKYVTEGMRKPAFLSGEQKKAIVDLLFKTNRKVTVKQLKEDYFKKIECFDSVEISGVEDRFNASLGTYHDLLKIIKDKDFLDNEENEDILEDIVLTLTLFEDREMIEERLKTYAHLFDDKVMKQLKRRRYTGWGRLSRKLINGIRDKQSGKTILDFLKSDGFANRNFMQLIHDDSLTFKEDIQKAQVSGQGDSLHEHIANLAGSPAIKKGILQTVKVVDELVKVMGRHKPENIVIEMARENQTTQKGQKNSRERMKRIEEGIKELGSQILKEHPVENTQLQNEKLYLYYLQNGRDMYVDQELDINRLSDYDVDHIVPQSFLKDDSIDNKVLTRSDKARGKSDNVPSEEVVKKMKNYWRQLLNAKLITQRKFDNLTKAERGGLSELDKAGFIKRQLVETRQITKHVAQILDSRMNTKYDENDKLIREVKVITLKSKLVSDFRKDFQFYKVREINNYHHAHDAYLNAVVGTALIKKYPKLESEFVYGDYKVYDVRKMIAKSEQEIGKATAKYFFYSNIMNFFKTEITLANGEIRKRPLIETNGETGEIVWDKGRDFATVRKVLSMPQVNIVKKTEVQTGGFSKESILPKRNSDKLIARKKDWDPKKYGGFDSPTVAYSVLVVAKVEKGKSKKLKSVKELLGITIMERSSFEKNPIDFLEAKGYKEVKKDLIIKLPKYSLFELENGRKRMLASAGELQKGNELALPSKYVNFLYLASHYEKLKGSPEDNEQKQLFVEQHKHYLDEIIEQISEFSKRVILADANLDKVLSAYNKHRDKPIREQAENIIHLFTLTNLGAPAAFKYFDTTIDRKRYTSTKEVLDATLIHQSITGLYETRIDLSQLGGDGGGSSEAAAKPAPGGTLNIEDEYRLHETSKEPDVSLGSTWLSDFPQAWAETGGMGLAVRQAPLIIPLKATSTPVSIKQYPMSQEARLGIKPHIQRLLDQGILVPCQSPWNTPLLPVKKPGTNDYRPVQDLREVNKRVEDIHPTVPNPYNLLSGLPPSHQWYTVLDLKDAFFCLRLHPTSQPLFAFEWRDPEMGISGQLTWTRLPQGFKNSPTLFNEALHRDLAGFRIQHPDLILLQYVDDLLLAATSELDCQQGTRALLQTLGDLGYRASAKKAQICQKQVKYLGYLLKEGQRWLTEARKETVMGQPIPKTPRQLREFLGTAGFCRLWIPGFAEMAAPLYPLTKPGTLFNWGPDQQKAFQEIKQALLTAPALGLPDLTKPFELFVDEKQGYAKGVLTQKLGPWRRPVAYLSKKLDPVAAGWPPCLRMVAAIAVLTKDAGKLTMGQPLVILAPHAVEALVKQPPDRWLSNARMTHYQALLLDTDRVQFGPVVALNPATLLPLPEEGLQHDCLDILAEAHGTRSDLMDQPLPDADHTWYTDGSSFLQEGQRKAGAAVTTETEVIWARALPAGTSAQRAELIALTQALKMAEGKKLNVYTDSRYAFATAHIHGEIYRRRGWLTSEGKEIKNKDEILALLKALFLPKRLSIIHCPGHQKGNSAEARGNRMADQAAREVATRETPETSTLLAGKRTADGSEFEKRTADGSEFESPKKKAKVE

SEQ ID NO: 7581 - protein, 2096 aa, synthetic construct
MPAAKRVKLDGGDKKYSIGLDIGTNSVGWAVITDEYKVPSKKFKVLGNTDRHSIKKNLIGALLFDSGETAEATRLKRTARRRYTRRKNRICYLQEIFSNEMAKVDDSFFHRLEESFLVEEDKKHERHPIFGNIVDEVAYHEKYPTIYHLRKKLVDSTDKADLRLIYLALAHMIKFRGHFLIEGDLNPDNSDVDKLFIQLVQTYNQLFEENPINASGVDAKAILSARLSKSRRLENLIAQLPGEKKNGLFGNLIALSLGLTPNFKSNFDLAEDAKLQLSKDTYDDDLDNLLAQIGDQYADLFLAAKNLSDAILLSDILRVNTEITKAPLSASMIKRYDEHHQDLTLLKALVRQQLPEKYKEIFFDQSKNGYAGYIDGGASQEEFYKFIKPILEKMDGTEELLVKLNREDLLRKQRTFDNGSIPHQIHLGELHAILRRQEDFYPFLKDNREKIEKILTFRIPYYVGPLARGNSRFAWMTRKSEETITPWNFEEVVDKGASAQSFIERMTNFDKNLPNEKVLPKHSLLYEYFTVYNELTKVKYVTEGMRKPAFLSGEQKKAIVDLLFKTNRKVTVKQLKEDYFKKIECFDSVEISGVEDRFNASLGTYHDLLKIIKDKDFLDNEENEDILEDIVLTLTLFEDREMIEERLKTYAHLFDDKVMKQLKRRRYTGWGRLSRKLINGIRDKQSGKTILDFLKSDGFANRNFMQLIHDDSLTFKEDIQKAQVSGQGDSLHEHIANLAGSPAIKKGILQTVKVVDELVKVMGRHKPENIVIEMARENQTTQKGQKNSRERMKRIEEGIKELGSQILKEHPVENTQLQNEKLYLYYLQNGRDMYVDQELDINRLSDYDVDHIVPQSFLKDDSIDNKVLTRSDKARGKSDNVPSEEVVKKMKNYWRQLLNAKLITQRKFDNLTKAERGGLSELDKAGFIKRQLVETRQITKHVAQILDSRMNTKYDENDKLIREVKVITLKSKLVSDFRKDFQFYKVREINNYHHAHDAYLNAVVGTALIKKYPKLESEFVYGDYKVYDVRKMIAKSEQEIGKATAKYFFYSNIMNFFKTEITLANGEIRKRPLIETNGETGEIVWDKGRDFATVRKVLSMPQVNIVKKTEVQTGGFSKESILPKRNSDKLIARKKDWDPKKYGGFDSPTVAYSVLVVAKVEKGKSKKLKSVKELLGITIMERSSFEKNPIDFLEAKGYKEVKKDLIIKLPKYSLFELENGRKRMLASAGELQKGNELALPSKYVNFLYLASHYEKLKGSPEDNEQKQLFVEQHKHYLDEIIEQISEFSKRVILADANLDKVLSAYNKHRDKPIREQAENIIHLFTLTNLGAPAAFKYFDTTIDRKRYTSTKEVLDATLIHQSITGLYETRIDLSQLGGDGGGSSEAAAKPAPGGTLNIEDEYRLHEISTEPDVSPGSTWLSDFPQAWAETGGMGLAVRQAPLIIPLKATSTPVSIKQYPMSQEAKLGIKPHIQRLLDQGILVPCQSPWNTPLLPVKKPGTNDYRPVQGLREVNKRVEDIHPTVPNPYNLLSGLPTSHRWYTVLDLKDAFFCLRLHPTSQPLFASEWRDPGMGISGQLTWTRLPQGFKNSPTLFNEALHRGLADFRIQHPDLILLQYVDDLLLAATSELDCQQGTRALLKTLGNLGYRASAKKAQICQKQVKYLGYLLREGQRWLTEARKETVMGQPTPKTPRQLREFLGKAGFCRLFIPRFAEMAAPLYPLTKPGTLFNWGPDQQKAYHEIKQALLTAPALGLPDLTKPFELFVDEKQGYAKGVLTQKLGPWRRPVAYLSKKLDPVAAGWPPCLRMVAAIAVLTKDAGKLTMGQPLVILAPHAVEALVKQPPDRWLSNARMTHYQAMLLDTDRVQFGPVVALNPATLLPLPEEGAPHDCLEILAETHGTEPDLTDQPIPDADHTWYTDGSSFLQEGQRKAGAAVTTETEVIWARALPAGTSAQRAELIALTQALKMAEGKRLNVYTDSRYAFATAHIHGEIYKRRGWLTSEGREIKNKSEILALLKALFLPKRLSIIHCLGHQKGDSAEARGNRLADQAAREAAIKTPPDTSTLLAGKRTADGSEFEKRTADGSEFESPKKKAKVE

SEQ ID NO: 7582 - protein, 2090 aa, synthetic construct
MPAAKRVKLDGGDKKYSIGLDIGTNSVGWAVITDEYKVPSKKFKVLGNTDRHSIKKNLIGALLFDSGETAEATRLKRTARRRYTRRKNRICYLQEIFSNEMAKVDDSFFHRLEESFLVEEDKKHERHPIFGNIVDEVAYHEKYPTIYHLRKKLVDSTDKADLRLIYLALAHMIKFRGHFLIEGDLNPDNSDVDKLFIQLVQTYNQLFEENPINASGVDAKAILSARLSKSRRLENLIAQLPGEKKNGLFGNLIALSLGLTPNFKSNFDLAEDAKLQLSKDTYDDDLDNLLAQIGDQYADLFLAAKNLSDAILLSDILRVNTEITKAPLSASMIKRYDEHHQDLTLLKALVRQQLPEKYKEIFFDQSKNGYAGYIDGGASQEEFYKFIKPILEKMDGTEELLVKLNREDLLRKQRTFDNGSIPHQIHLGELHAILRRQEDFYPFLKDNREKIEKILTFRIPYYVGPLARGNSRFAWMTRKSEETITPWNFEEVVDKGASAQSFIERMTNFDKNLPNEKVLPKHSLLYEYFTVYNELTKVKYVTEGMRKPAFLSGEQKKAIVDLLFKTNRKVTVKQLKEDYFKKIECFDSVEISGVEDRFNASLGTYHDLLKIIKDKDFLDNEENEDILEDIVLTLTLFEDREMIEERLKTYAHLFDDKVMKQLKRRRYTGWGRLSRKLINGIRDKQSGKTILDFLKSDGFANRNFMQLIHDDSLTFKEDIQKAQVSGQGDSLHEHIANLAGSPAIKKGILQTVKVVDELVKVMGRHKPENIVIEMARENQTTQKGQKNSRERMKRIEEGIKELGSQILKEHPVENTQLQNEKLYLYYLQNGRDMYVDQELDINRLSDYDVDHIVPQSFLKDDSIDNKVLTRSDKARGKSDNVPSEEVVKKMKNYWRQLLNAKLITQRKFDNLTKAERGGLSELDKAGFIKRQLVETRQITKHVAQILDSRMNTKYDENDKLIREVKVITLKSKLVSDFRKDFQFYKVREINNYHHAHDAYLNAVVGTALIKKYPKLESEFVYGDYKVYDVRKMIAKSEQEIGKATAKYFFYSNIMNFFKTEITLANGEIRKRPLIETNGETGEIVWDKGRDFATVRKVLSMPQVNIVKKTEVQTGGFSKESILPKRNSDKLIARKKDWDPKKYGGFDSPTVAYSVLVVAKVEKGKSKKLKSVKELLGITIMERSSFEKNPIDFLEAKGYKEVKKDLIIKLPKYSLFELENGRKRMLASAGELQKGNELALPSKYVNFLYLASHYEKLKGSPEDNEQKQLFVEQHKHYLDEIIEQISEFSKRVILADANLDKVLSAYNKHRDKPIREQAENIIHLFTLTNLGAPAAFKYFDTTIDRKRYTSTKEVLDATLIHQSITGLYETRIDLSQLGGDGGGSSEAAAKPAPGGTLQLDDEYRLYSPLVKPDQNIQFWLEQFPQAWAETAGMGLAKQVPPQVIQLKASATPVSVRQYPLSKEAQEGIRPHVQRLIQQGILVPVQSPWNTPLLPVRKPGTNDYRPVQDLREVNKRVQDIHPTVPNPYNLLCALPPQRSWYTVLDLKDAFFCLRLHPTSQPLFAFEWRDPGTGRTGQLTWTRLPQGFKNSPTIFDEALHRDLANFRIQHPQVTLLQYVDDLLLAGATKQDCLEGTKALLLELSDLGYRASAKKAQICRREVTYLGYSLRDGQRWLTEARKKTVVQIPAPTTAKQVREFLGTAGFCRLWIPGFATLAAPLYPLTKEKGEFSWAPEHQKAFDAIKKALLSAPALALPDVTKPFTLYVDERKGVARGVLTQTLGPWRRPVAYLSKKLDPVASGWPVCLKAIAAVAILVKDADKLTLGQNITVIAPHALENIVRQPPDRWMTNARMTHYQSLLLTERVTFAPPAALNPATLLPEETDEPVTHDCHQLLIEETGVRKDLTDIPLTGEVLTWFTDGSSYVVEGKRMAGAAVVDGTRTIWASSLPEGTSAQKAELMALTQALRLAEGKSINIYTDSRYAFATAHVHGAIYKQRGLLTSAGREIKNKEEILSLLEALHLPKRLAIIHCPGHQKAKDPISRGNQMADRVAKQAAQGVNLLAGKRTADGSEFEKRTADGSEFESPKKKAKVE

SEQ ID NO: 7583 - protein, 2176 aa, synthetic construct
MPAAKRVKLDGGDKKYSIGLDIGTNSVGWAVITDEYKVPSKKFKVLGNTDRHSIKKNLIGALLFDSGETAEATRLKRTARRRYTRRKNRICYLQEIFSNEMAKVDDSFFHRLEESFLVEEDKKHERHPIFGNIVDEVAYHEKYPTIYHLRKKLVDSTDKADLRLIYLALAHMIKFRGHFLIEGDLNPDNSDVDKLFIQLVQTYNQLFEENPINASGVDAKAILSARLSKSRRLENLIAQLPGEKKNGLFGNLIALSLGLTPNFKSNFDLAEDAKLQLSKDTYDDDLDNLLAQIGDQYADLFLAAKNLSDAILLSDILRVNTEITKAPLSASMIKRYDEHHQDLTLLKALVRQQLPEKYKEIFFDQSKNGYAGYIDGGASQEEFYKFIKPILEKMDGTEELLVKLNREDLLRKQRTFDNGSIPHQIHLGELHAILRRQEDFYPFLKDNREKIEKILTFRIPYYVGPLARGNSRFAWMTRKSEETITPWNFEEVVDKGASAQSFIERMTNFDKNLPNEKVLPKHSLLYEYFTVYNELTKVKYVTEGMRKPAFLSGEQKKAIVDLLFKTNRKVTVKQLKEDYFKKIECFDSVEISGVEDRFNASLGTYHDLLKIIKDKDFLDNEENEDILEDIVLTLTLFEDREMIEERLKTYAHLFDDKVMKQLKRRRYTGWGRLSRKLINGIRDKQSGKTILDFLKSDGFANRNFMQLIHDDSLTFKEDIQKAQVSGQGDSLHEHIANLAGSPAIKKGILQTVKVVDELVKVMGRHKPENIVIEMARENQTTQKGQKNSRERMKRIEEGIKELGSQILKEHPVENTQLQNEKLYLYYLQNGRDMYVDQELDINRLSDYDVDHIVPQSFLKDDSIDNKVLTRSDKARGKSDNVPSEEVVKKMKNYWRQLLNAKLITQRKFDNLTKAERGGLSELDKAGFIKRQLVETRQITKHVAQILDSRMNTKYDENDKLIREVKVITLKSKLVSDFRKDFQFYKVREINNYHHAHDAYLNAVVGTALIKKYPKLESEFVYGDYKVYDVRKMIAKSEQEIGKATAKYFFYSNIMNFFKTEITLANGEIRKRPLIETNGETGEIVWDKGRDFATVRKVLSMPQVNIVKKTEVQTGGFSKESILPKRNSDKLIARKKDWDPKKYGGFDSPTVAYSVLVVAKVEKGKSKKLKSVKELLGITIMERSSFEKNPIDFLEAKGYKEVKKDLIIKLPKYSLFELENGRKRMLASAGELQKGNELALPSKYVNFLYLASHYEKLKGSPEDNEQKQLFVEQHKHYLDEIIEQISEFSKRVILADANLDKVLSAYNKHRDKPIREQAENIIHLFTLTNLGAPAAFKYFDTTIDRKRYTSTKEVLDATLIHQSITGLYETRIDLSQLGGDGGGSSEAAAKPAPGGMDPLQLLQPLEAEIKGTKLKAHWNSGATITCVPQAFLEEEVPIKNIWIKTIHGEKEQPVYYLTFKIQGRKVEAEVISSPYDYILVSPSDIPWLMKKPLQLTTLVPLQEYEERLLKQTMLTGSYKEKLQSLFLKYDALWQHWENQVGHRRIKPHHIATGTVNPRPQKQYPINPKAKASIQTVINDLLKQGVLIQQNSIMNTPVYPVPKPDGKWRMVLDYREVNKTIPLIAAQNQHSAGILSSIFRGKYKTTLDLSNGFWAHSITPESYWLTAFTWLGQQYCWTRLPQGFLNSPALFNADVVDLLKEVPNVQVYVDDIYISHDDPREHLEQLEKVFSLLLNAGYVVSLKKSEIAQHEVEFLGFNITKEGRGLTETFKQKLLNITPPRDLKQLQSILGKLNFARNFIPNFSELVKPLYNIIATAPGKYITWTTDNSQQLQNIISMLNSAENLEERNPEVRLIMKVNTSPSAGYIRFYNEFAKRPIMYLNYVYTKAEVKFTNTEKLLTTIHKGLIKALDLGMGQEILVYSPIVSMTKIQKTPLPERKALPIRWITWMSYLEDPRIQFHYDKTLPELQQVPTVTDDIIAKIKHPSEFSMVFYTDGSAIKHPNVNKSHNAGMGIAQVQFKPEFTVINTWSIPLGDHTAQLAEVAAVEFACKKALKIDGPVLIVTDSFYVAESVNKELPYWQSNGFFNNKKKPLKHVSKWKSIADCIQLKPDIIIIHEKGHQPTASTFHTEGNNLADKLATQGSYVVNAGKRTADGSEFEKRTADGSEFESPKKKAKVE

SEQ ID NO: 7584 - protein, 2094 aa, synthetic construct
MPAAKRVKLDGGDKKYSIGLDIGTNSVGWAVITDEYKVPSKKFKVLGNTDRHSIKKNLIGALLFDSGETAEATRLKRTARRRYTRRKNRICYLQEIFSNEMAKVDDSFFHRLEESFLVEEDKKHERHPIFGNIVDEVAYHEKYPTIYHLRKKLVDSTDKADLRLIYLALAHMIKFRGHFLIEGDLNPDNSDVDKLFIQLVQTYNQLFEENPINASGVDAKAILSARLSKSRRLENLIAQLPGEKKNGLFGNLIALSLGLTPNFKSNFDLAEDAKLQLSKDTYDDDLDNLLAQIGDQYADLFLAAKNLSDAILLSDILRVNTEITKAPLSASMIKRYDEHHQDLTLLKALVRQQLPEKYKEIFFDQSKNGYAGYIDGGASQEEFYKFIKPILEKMDGTEELLVKLNREDLLRKQRTFDNGSIPHQIHLGELHAILRRQEDFYPFLKDNREKIEKILTFRIPYYVGPLARGNSRFAWMTRKSEETITPWNFEEVVDKGASAQSFIERMTNFDKNLPNEKVLPKHSLLYEYFTVYNELTKVKYVTEGMRKPAFLSGEQKKAIVDLLFKTNRKVTVKQLKEDYFKKIECFDSVEISGVEDRFNASLGTYHDLLKIIKDKDFLDNEENEDILEDIVLTLTLFEDREMIEERLKTYAHLFDDKVMKQLKRRRYTGWGRLSRKLINGIRDKQSGKTILDFLKSDGFANRNFMQLIHDDSLTFKEDIQKAQVSGQGDSLHEHIANLAGSPAIKKGILQTVKVVDELVKVMGRHKPENIVIEMARENQTTQKGQKNSRERMKRIEEGIKELGSQILKEHPVENTQLQNEKLYLYYLQNGRDMYVDQELDINRLSDYDVDHIVPQSFLKDDSIDNKVLTRSDKARGKSDNVPSEEVVKKMKNYWRQLLNAKLITQRKFDNLTKAERGGLSELDKAGFIKRQLVETRQITKHVAQILDSRMNTKYDENDKLIREVKVITLKSKLVSDFRKDFQFYKVREINNYHHAHDAYLNAVVGTALIKKYPKLESEFVYGDYKVYDVRKMIAKSEQEIGKATAKYFFYSNIMNFFKTEITLANGEIRKRPLIETNGETGEIVWDKGRDFATVRKVLSMPQVNIVKKTEVQTGGFSKESILPKRNSDKLIARKKDWDPKKYGGFDSPTVAYSVLVVAKVEKGKSKKLKSVKELLGITIMERSSFEKNPIDFLEAKGYKEVKKDLIIKLPKYSLFELENGRKRMLASAGELQKGNELALPSKYVNFLYLASHYEKLKGSPEDNEQKQLFVEQHKHYLDEIIEQISEFSKRVILADANLDKVLSAYNKHRDKPIREQAENIIHLFTLTNLGAPAAFKYFDTTIDRKRYTSTKEVLDATLIHQSITGLYETRIDLSQLGGDGGGSSEAAAKPAPGGVLNLEEEYRLHEKPVPSSIDPSWLQLFPTVWAERAGMGLANQVPPVVVELRSGASPVAVRQYPMSKEAREGIRPHIQRFLDLGVLVPCQSPWNTPLLPVKKPGTNDYRPVQDLREINKRVQDIHPTVPNPYNLLSSLPPSHTWYSVLDLKDAFFCLKLHPNSQPLFAFEWRDPEKGNTGQLTWTRLPQGFKNSPTLFDEALHRDLAPFRALNPQVVLLQYVDDLLVAAPTYRDCKEGTQKLLQELSKLGYRVSAKKAQLCQKEVTYLGYLLKEGKRWLTPARKATVMKIPPPTTPRQVREFLGTAGFCRLWIPGFASLAAPLYPLTKESIPFIWTEEHQKAFDRIKEALLSAPALALPDLTKPFTLYVDERAGVARGVLTQTLGPWRRPVAYLSKKLDPVASGWPTCLKAVAAVALLLKDADKLTLGQNVTVIASHSLESIVRQPPDRWMTNARMTHYQSLLLNERVSFAPPAVLNPATLLPVESEATPVHRCSEILAEETGTRRDLKDQPLPGVPAWYTDGSSFIAEGKRRAGAAIVDGKRTVWASSLPEGTSAQKAELVALTQALRLAEGKDINIYTDSRYAFATAHIHGAIYKQRGLLTSAGKDIKNKEEILALLEAIHLPKRVAIIHCPGHQKGNDPVATGNRRADEAAKQAALSTRVLAETTKPAGKRTADGSEFEKRTADGSEFESPKKKAKVE

SEQ ID NO: 7585 - protein, 2094 aa, synthetic construct
MPAAKRVKLDGGDKKYSIGLDIGTNSVGWAVITDEYKVPSKKFKVLGNTDRHSIKKNLIGALLFDSGETAEATRLKRTARRRYTRRKNRICYLQEIFSNEMAKVDDSFFHRLEESFLVEEDKKHERHPIFGNIVDEVAYHEKYPTIYHLRKKLVDSTDKADLRLIYLALAHMIKFRGHFLIEGDLNPDNSDVDKLFIQLVQTYNQLFEENPINASGVDAKAILSARLSKSRRLENLIAQLPGEKKNGLFGNLIALSLGLTPNFKSNFDLAEDAKLQLSKDTYDDDLDNLLAQIGDQYADLFLAAKNLSDAILLSDILRVNTEITKAPLSASMIKRYDEHHQDLTLLKALVRQQLPEKYKEIFFDQSKNGYAGYIDGGASQEEFYKFIKPILEKMDGTEELLVKLNREDLLRKQRTFDNGSIPHQIHLGELHAILRRQEDFYPFLKDNREKIEKILTFRIPYYVGPLARGNSRFAWMTRKSEETITPWNFEEVVDKGASAQSFIERMTNFDKNLPNEKVLPKHSLLYEYFTVYNELTKVKYVTEGMRKPAFLSGEQKKAIVDLLFKTNRKVTVKQLKEDYFKKIECFDSVEISGVEDRFNASLGTYHDLLKIIKDKDFLDNEENEDILEDIVLTLTLFEDREMIEERLKTYAHLFDDKVMKQLKRRRYTGWGRLSRKLINGIRDKQSGKTILDFLKSDGFANRNFMQLIHDDSLTFKEDIQKAQVSGQGDSLHEHIANLAGSPAIKKGILQTVKVVDELVKVMGRHKPENIVIEMARENQTTQKGQKNSRERMKRIEEGIKELGSQILKEHPVENTQLQNEKLYLYYLQNGRDMYVDQELDINRLSDYDVDHIVPQSFLKDDSIDNKVLTRSDKARGKSDNVPSEEVVKKMKNYWRQLLNAKLITQRKFDNLTKAERGGLSELDKAGFIKRQLVETRQITKHVAQILDSRMNTKYDENDKLIREVKVITLKSKLVSDFRKDFQFYKVREINNYHHAHDAYLNAVVGTALIKKYPKLESEFVYGDYKVYDVRKMIAKSEQEIGKATAKYFFYSNIMNFFKTEITLANGEIRKRPLIETNGETGEIVWDKGRDFATVRKVLSMPQVNIVKKTEVQTGGFSKESILPKRNSDKLIARKKDWDPKKYGGFDSPTVAYSVLVVAKVEKGKSKKLKSVKELLGITIMERSSFEKNPIDFLEAKGYKEVKKDLIIKLPKYSLFELENGRKRMLASAGELQKGNELALPSKYVNFLYLASHYEKLKGSPEDNEQKQLFVEQHKHYLDEIIEQISEFSKRVILADANLDKVLSAYNKHRDKPIREQAENIIHLFTLTNLGAPAAFKYFDTTIDRKRYTSTKEVLDATLIHQSITGLYETRIDLSQLGGDGGGSSEAAAKPAPGGVLNLEEEYRLHEKPVPSSIDPSWLQLFPTVWAERAGMGLANQVPPVVVELRSGASPVAVRQYPMSKEAREGIRPHIQRFLDLGVLVPCQSPWNTPLLPVKKPGTNDYRPVQDLREINKRVQDIHPTVPNPYNLLSSLPPSHTWYSVLDLKDAFFCLKLHPNSQPLFAFEWRDPEKGNTGQLTWTRLPQGFKNSPTLFNEALHRDLAPFRALNPQVVLLQYVDDLLVAAPTYRDCKEGTQKLLQELSKLGYRVSAKKAQLCQKEVTYLGYLLKEGKRWLTPARKATVMKIPPPTTPRQVREFLGTAGFCRLWIPGFASLAAPLYPLTKPSIPFIWTEEHQKAFDRIKEALLSAPALALPDLTKPFTLYVDERAGVARGVLTQTLGPWRRPVAYLSKKLDPVASGWPTCLKAVAAVALLLKDADKLTLGQNVTVIASHSLESIVRQPPDRWMTNARMTHYQSLLLNERVSFAPPAVLNPATLLPVESEATPVHRCSEILAEETGTRRDLKDQPLPGVPAWYTDGSSFIAEGKRRAGAAIVDGKRTVWASSLPEGTSAQKAELVALTQALRLAEGKDINIYTDSRYAFATAHIHGAIYKQRGWLTSAGKDIKNKEEILALLEAIHLPKRVAIIHCPGHQKGNDPVATGNRRADEAAKQAALSTRVLAETTKPAGKRTADGSEFEKRTADGSEFESPKKKAKVE

SEQ ID NO: 7586 - protein, 2094 aa, synthetic construct
MPAAKRVKLDGGDKKYSIGLDIGTNSVGWAVITDEYKVPSKKFKVLGNTDRHSIKKNLIGALLFDSGETAEATRLKRTARRRYTRRKNRICYLQEIFSNEMAKVDDSFFHRLEESFLVEEDKKHERHPIFGNIVDEVAYHEKYPTIYHLRKKLVDSTDKADLRLIYLALAHMIKFRGHFLIEGDLNPDNSDVDKLFIQLVQTYNQLFEENPINASGVDAKAILSARLSKSRRLENLIAQLPGEKKNGLFGNLIALSLGLTPNFKSNFDLAEDAKLQLSKDTYDDDLDNLLAQIGDQYADLFLAAKNLSDAILLSDILRVNTEITKAPLSASMIKRYDEHHQDLTLLKALVRQQLPEKYKEIFFDQSKNGYAGYIDGGASQEEFYKFIKPILEKMDGTEELLVKLNREDLLRKQRTFDNGSIPHQIHLGELHAILRRQEDFYPFLKDNREKIEKILTFRIPYYVGPLARGNSRFAWMTRKSEETITPWNFEEVVDKGASAQSFIERMTNFDKNLPNEKVLPKHSLLYEYFTVYNELTKVKYVTEGMRKPAFLSGEQKKAIVDLLFKTNRKVTVKQLKEDYFKKIECFDSVEISGVEDRFNASLGTYHDLLKIIKDKDFLDNEENEDILEDIVLTLTLFEDREMIEERLKTYAHLFDDKVMKQLKRRRYTGWGRLSRKLINGIRDKQSGKTILDFLKSDGFANRNFMQLIHDDSLTFKEDIQKAQVSGQGDSLHEHIANLAGSPAIKKGILQTVKVVDELVKVMGRHKPENIVIEMARENQTTQKGQKNSRERMKRIEEGIKELGSQILKEHPVENTQLQNEKLYLYYLQNGRDMYVDQELDINRLSDYDVDHIVPQSFLKDDSIDNKVLTRSDKARGKSDNVPSEEVVKKMKNYWRQLLNAKLITQRKFDNLTKAERGGLSELDKAGFIKRQLVETRQITKHVAQILDSRMNTKYDENDKLIREVKVITLKSKLVSDFRKDFQFYKVREINNYHHAHDAYLNAVVGTALIKKYPKLESEFVYGDYKVYDVRKMIAKSEQEIGKATAKYFFYSNIMNFFKTEITLANGEIRKRPLIETNGETGEIVWDKGRDFATVRKVLSMPQVNIVKKTEVQTGGFSKESILPKRNSDKLIARKKDWDPKKYGGFDSPTVAYSVLVVAKVEKGKSKKLKSVKELLGITIMERSSFEKNPIDFLEAKGYKEVKKDLIIKLPKYSLFELENGRKRMLASAGELQKGNELALPSKYVNFLYLASHYEKLKGSPEDNEQKQLFVEQHKHYLDEIIEQISEFSKRVILADANLDKVLSAYNKHRDKPIREQAENIIHLFTLTNLGAPAAFKYFDTTIDRKRYTSTKEVLDATLIHQSITGLYETRIDLSQLGGDGGGSSEAAAKPAPGGVLNLEEEYRLHEKPVPSSIDPSWLQLFPTVWAERAGMGLANQVPPVVVELRSGASPVAVRQYPMSKEAREGIRPHIQRFLDLGVLVPCQSPWNTPLLPVKKPGTNDYRPVQDLREINKRVQDIHPTVPNPYNLLSSLPPSHTWYSVLDLKDAFFCLKLHPNSQPLFAFEWRDPEKGNTGQLTWTRLPQGFKNSPTLFNEALHRDLAPFRALNPQVVLLQYVDDLLVAAPTYRDCKEGTQKLLQELSKLGYRVSAKKAQLCQKEVTYLGYLLKEGKRWLTPARKATVMKIPPPTTPRQVREFLGKAGFCRLFIPGFASLAAPLYPLTKPSIPFIWTEEHQKAFDRIKEALLSAPALALPDLTKPFTLYVDERAGVARGVLTQTLGPWRRPVAYLSKKLDPVASGWPTCLKAVAAVALLLKDADKLTLGQNVTVIASHSLESIVRQPPDRWMTNARMTHYQSLLLNERVSFAPPAVLNPATLLPVESEATPVHRCSEILAEETGTRRDLKDQPLPGVPAWYTDGSSFIAEGKRRAGAAIVDGKRTVWASSLPEGTSAQKAELVALTQALRLAEGKDINIYTDSRYAFATAHIHGAIYKQRGWLTSAGKDIKNKEEILALLEAIHLPKRVAIIHCPGHQKGNDPVATGNRRADEAAKQAALSTRVLAETTKPAGKRTADGSEFEKRTADGSEFESPKKKAKVE

SEQ ID NO: 7587 - protein, 2096 aa, synthetic construct; identical to SEQ ID NO: 4538

SEQ ID NO: 7588 - protein, 2098 aa, synthetic construct; identical to SEQ ID NO: 4539

SEQ ID NO: 7589 - protein, 2173 aa, synthetic construct
MPAAKRVKLDGGDKKYSIGLDIGTNSVGWAVITDEYKVPSKKFKVLGNTDRHSIKKNLIGALLFDSGETAEATRLKRTARRRYTRRKNRICYLQEIFSNEMAKVDDSFFHRLEESFLVEEDKKHERHPIFGNIVDEVAYHEKYPTIYHLRKKLVDSTDKADLRLIYLALAHMIKFRGHFLIEGDLNPDNSDVDKLFIQLVQTYNQLFEENPINASGVDAKAILSARLSKSRRLENLIAQLPGEKKNGLFGNLIALSLGLTPNFKSNFDLAEDAKLQLSKDTYDDDLDNLLAQIGDQYADLFLAAKNLSDAILLSDILRVNTEITKAPLSASMIKRYDEHHQDLTLLKALVRQQLPEKYKEIFFDQSKNGYAGYIDGGASQEEFYKFIKPILEKMDGTEELLVKLNREDLLRKQRTFDNGSIPHQIHLGELHAILRRQEDFYPFLKDNREKIEKILTFRIPYYVGPLARGNSRFAWMTRKSEETITPWNFEEVVDKGASAQSFIERMTNFDKNLPNEKVLPKHSLLYEYFTVYNELTKVKYVTEGMRKPAFLSGEQKKAIVDLLFKTNRKVTVKQLKEDYFKKIECFDSVEISGVEDRFNASLGTYHDLLKIIKDKDFLDNEENEDILEDIVLTLTLFEDREMIEERLKTYAHLFDDKVMKQLKRRRYTGWGRLSRKLINGIRDKQSGKTILDFLKSDGFANRNFMQLIHDDSLTFKEDIQKAQVSGQGDSLHEHIANLAGSPAIKKGILQTVKVVDELVKVMGRHKPENIVIEMARENQTTQKGQKNSRERMKRIEEGIKELGSQILKEHPVENTQLQNEKLYLYYLQNGRDMYVDQELDINRLSDYDVDHIVPQSFLKDDSIDNKVLTRSDKARGKSDNVPSEEVVKKMKNYWRQLLNAKLITQRKFDNLTKAERGGLSELDKAGFIKRQLVETRQITKHVAQILDSRMNTKYDENDKLIREVKVITLKSKLVSDFRKDFQFYKVREINNYHHAHDAYLNAVVGTALIKKYPKLESEFVYGDYKVYDVRKMIAKSEQEIGKATAKYFFYSNIMNFFKTEITLANGEIRKRPLIETNGETGEIVWDKGRDFATVRKVLSMPQVNIVKKTEVQTGGFSKESILPKRNSDKLIARKKDWDPKKYGGFDSPTVAYSVLVVAKVEKGKSKKLKSVKELLGITIMERSSFEKNPIDFLEAKGYKEVKKDLIIKLPKYSLFELENGRKRMLASAGELQKGNELALPSKYVNFLYLASHYEKLKGSPEDNEQKQLFVEQHKHYLDEIIEQISEFSKRVILADANLDKVLSAYNKHRDKPIREQAENIIHLFTLTNLGAPAAFKYFDTTIDRKRYTSTKEVLDATLIHQSITGLYETRIDLSQLGGDGGGSSPAPEAAAKGGMDLLKPLTVERKGVKIKGYWNSQADITCVPKDLLQGEEPVRQQNVTTIHGTQEGDVYYVNLKIDGRRINTEVIGTTLDYAIITPGDVPWILKKPLELTIKLDLEEQQGTLLNNSILSKKGKEELKQLFEKYSALWQSWENQVGHRRIRPHKIATGTVKPTPQKQYHINPKAKPDIQIVINDLLKQGVLIQKESTMNTPVYPVPKPNGRWRMVLDYRAVNKVTPLIAVQNQHSYGILGSLFKGRYKTTIDLSNGFWAHPIVPEDYWITAFTWQGKQYCWTVLPQGFLNSPGLFTGDVVDLLQGIPNVEVYVDDVYISHDSEKEHLEYLDILFNRLKEAGYIISLKKSNIANSIVDFLGFQITNEGRGLTDTFKEKLENITAPTTLKQLQSILGLLNFARNFIPDFTELIAPLYALIPKSTKNYVPWQIEHSTTLETLITKLNGAEYLQGRKGDKTLIMKVNASYTTGYIRYYNEGEKKPISYVSIVFSKTELKFTELEKLLTTVHKGLLKALDLSMGQNIHVYSPIVSMQNIQKTPQTAKKALASRWLSWLSYLEDPRIRFFYDPQMPALKDLPAVDTGKDNKKHPSNFQHIFYTDGSAITSPTKEGHLNAGMGIVYFINKDGNLQKQQEWSISLGNHTAQFAEIAAFEFALKKCLPLGGNILVVTDSNYVAKAYNEELDVWASNGFVNNRKKPLKHISKWKSVADLKRLRPDVVVTHEPGHQKLDSSPHAYGNNLADQLATQASFKVHAGKRTADGSEFEKRTADGSEFESPKKKAKVE

SEQ ID NO: 7590 - protein, 2127 aa, synthetic construct
MPAAKRVKLDGGDKKYSIGLDIGTNSVGWAVITDEYKVPSKKFKVLGNTDRHSIKKNLIGALLFDSGETAEATRLKRTARRRYTRRKNRICYLQEIFSNEMAKVDDSFFHRLEESFLVEEDKKHERHPIFGNIVDEVAYHEKYPTIYHLRKKLVDSTDKADLRLIYLALAHMIKFRGHFLIEGDLNPDNSDVDKLFIQLVQTYNQLFEENPINASGVDAKAILSARLSKSRRLENLIAQLPGEKKNGLFGNLIALSLGLTPNFKSNFDLAEDAKLQLSKDTYDDDLDNLLAQIGDQYADLFLAAKNLSDAILLSDILRVNTEITKAPLSASMIKRYDEHHQDLTLLKALVRQQLPEKYKEIFFDQSKNGYAGYIDGGASQEEFYKFIKPILEKMDGTEELLVKLNREDLLRKQRTFDNGSIPHQIHLGELHAILRRQEDFYPFLKDNREKIEKILTFRIPYYVGPLARGNSRFAWMTRKSEETITPWNFEEVVDKGASAQSFIERMTNFDKNLPNEKVLPKHSLLYEYFTVYNELTKVKYVTEGMRKPAFLSGEQKKAIVDLLFKTNRKVTVKQLKEDYFKKIECFDSVEISGVEDRFNASLGTYHDLLKIIKDKDFLDNEENEDILEDIVLTLTLFEDREMIEERLKTYAHLFDDKVMKQLKRRRYTGWGRLSRKLINGIRDKQSGKTILDFLKSDGFANRNFMQLIHDDSLTFKEDIQKAQVSGQGDSLHEHIANLAGSPAIKKGILQTVKVVDELVKVMGRHKPENIVIEMARENQTTQKGQKNSRERMKRIEEGIKELGSQILKEHPVENTQLQNEKLYLYYLQNGRDMYVDQELDINRLSDYDVDHIVPQSFLKDDSIDNKVLTRSDKARGKSDNVPSEEVVKKMKNYWRQLLNAKLITQRKFDNLTKAERGGLSELDKAGFIKRQLVETRQITKHVAQILDSRMNTKYDENDKLIREVKVITLKSKLVSDFRKDFQFYKVREINNYHHAHDAYLNAVVGTALIKKYPKLESEFVYGDYKVYDVRKMIAKSEQEIGKATAKYFFYSNIMNFFKTEITLANGEIRKRPLIETNGETGEIVWDKGRDFATVRKVLSMPQVNIVKKTEVQTGGFSKESILPKRNSDKLIARKKDWDPKKYGGFDSPTVAYSVLVVAKVEKGKSKKLKSVKELLGITIMERSSFEKNPIDFLEAKGYKEVKKDLIIKLPKYSLFELENGRKRMLASAGELQKGNELALPSKYVNFLYLASHYEKLKGSPEDNEQKQLFVEQHKHYLDEIIEQISEFSKRVILADANLDKVLSAYNKHRDKPIREQAENIIHLFTLTNLGAPAAFKYFDTTIDRKRYTSTKEVLDATLIHQSITGLYETRIDLSQLGGDGGGSSPAPEAAAKGGLLGRDLLTKLKAQIQFSTEGPQVTWEDRPAMCLVLNLEEEYRLHEKPVPPSIDPSWLQLFPMVWAEKAGMGLANQVPPVVVELKSDASPVAVRQYPMSKEAREGIRPHIQRFLDLGILVPCQSPWNTPLLPVKKPGTNDYRPVQDLREVNKRVQDIHPTVPNPYNLLSSLPPSHTWYSVLDLKDAFFCLKLHPNSQPLFAFEWRDPEKGNTGQLTWTRLPQGFKNSPTLFNEALHRDLASFRALNPQVVMLQYVDDLLVAAPTYRDCKEGTRRLLQELSKLGYRVSAKKAQLCREEVTYLGYLLKGGKRWLTPARKATVMKIPTPTTPRQVREFLGTAGFCRLWIPGFASLAAPLYPLTRPKVPFTWTEAHQEAFGRIKEALLSAPALALPDLTKPFALYVDEKEGVARGVLTQTLGPWRRPVAYLSKKLDPVASGWPTCLKAIAAVALLLKDADKLTLGQNVLVIAPHNLESIVRQPPDRWMTNARMTHYQSLLLNERVSFAPPAILNPATLLPVESDDTPIHICSEILAEETGTRPDLRDQPLPGVPAWYTDGSSFIMDGRRQAGAAIVDNKRTVWASNLPEGTSAQKAELIALTQALRLAEGKSINIYTDSRYAFATAHVHGAIYKQRGWLTSAGKDIKNKEEILALLEAIHLPKRVAIIHCPGHQRGTDPVATGNRKADEAAKQAAQSTRILTETTKNAGKRTADGSEFEKRTADGSEFESPKKKAKVE

SEQ ID NO: 7591 - protein, 2218 aa, synthetic construct
MPAAKRVKLDGGDKKYSIGLDIGTNSVGWAVITDEYKVPSKKFKVLGNTDRHSIKKNLIGALLFDSGETAEATRLKRTARRRYTRRKNRICYLQEIFSNEMAKVDDSFFHRLEESFLVEEDKKHERHPIFGNIVDEVAYHEKYPTIYHLRKKLVDSTDKADLRLIYLALAHMIKFRGHFLIEGDLNPDNSDVDKLFIQLVQTYNQLFEENPINASGVDAKAILSARLSKSRRLENLIAQLPGEKKNGLFGNLIALSLGLTPNFKSNFDLAEDAKLQLSKDTYDDDLDNLLAQIGDQYADLFLAAKNLSDAILLSDILRVNTEITKAPLSASMIKRYDEHHQDLTLLKALVRQQLPEKYKEIFFDQSKNGYAGYIDGGASQEEFYKFIKPILEKMDGTEELLVKLNREDLLRKQRTFDNGSIPHQIHLGELHAILRRQEDFYPFLKDNREKIEKILTFRIPYYVGPLARGNSRFAWMTRKSEETITPWNFEEVVDKGASAQSFIERMTNFDKNLPNEKVLPKHSLLYEYFTVYNELTKVKYVTEGMRKPAFLSGEQKKAIVDLLFKTNRKVTVKQLKEDYFKKIECFDSVEISGVEDRFNASLGTYHDLLKIIKDKDFLDNEENEDILEDIVLTLTLFEDREMIEERLKTYAHLFDDKVMKQLKRRRYTGWGRLSRKLINGIRDKQSGKTILDFLKSDGFANRNFMQLIHDDSLTFKEDIQKAQVSGQGDSLHEHIANLAGSPAIKKGILQTVKVVDELVKVMGRHKPENIVIEMARENQTTQKGQKNSRERMKRIEEGIKELGSQILKEHPVENTQLQNEKLYLYYLQNGRDMYVDQELDINRLSDYDVDHIVPQSFLKDDSIDNKVLTRSDKARGKSDNVPSEEVVKKMKNYWRQLLNAKLITQRKFDNLTKAERGGLSELDKAGFIKRQLVETRQITKHVAQILDSRMNTKYDENDKLIREVKVITLKSKLVSDFRKDFQFYKVREINNYHHAHDAYLNAVVGTALIKKYPKLESEFVYGDYKVYDVRKMIAKSEQEIGKATAKYFFYSNIMNFFKTEITLANGEIRKRPLIETNGETGEIVWDKGRDFATVRKVLSMPQVNIVKKTEVQTGGFSKESILPKRNSDKLIARKKDWDPKKYGGFDSPTVAYSVLVVAKVEKGKSKKLKSVKELLGITIMERSSFEKNPIDFLEAKGYKEVKKDLIIKLPKYSLFELENGRKRMLASAGELQKGNELALPSKYVNFLYLASHYEKLKGSPEDNEQKQLFVEQHKHYLDEIIEQISEFSKRVILADANLDKVLSAYNKHRDKPIREQAENIIHLFTLTNLGAPAAFKYFDTTIDRKRYTSTKEVLDATLIHQSITGLYETRIDLSQLGGDGGGSSPAPEAAAKGGTLGDQGSRGSDPLPEPRVTLTVEGIPTEFLVNTGAEHSVLTKPMGKMGSKRTVVAGATGSKVYPWTTKRLLKIGQKQVTHSFLVIPECPAPLLGRDLLTKLKAQIQFSTEGPQVTWEDRPAMCLVLNLEEEYRLHEKPVPPSIDPSWLQLFPMVWAEKAGMGLANQVPPVVVELKSDASPVAVRQYPMSKEAREGIRPHIQRFLDLGILVPCQSPWNTPLLPVKKPGTNDYRPVQDLREVNKRVQDIHPTVPNPYNLLSSLPPSHTWYSVLDLKDAFFCLKLHPNSQPLFAFEWRDPEKGNTGQLTWTRLPQGFKNSPTLFNEALHRDLASFRALNPQVVMLQYVDDLLVAAPTYRDCKEGTRRLLQELSKLGYRVSAKKAQLCREEVTYLGYLLKGGKRWLTPARKATVMKIPTPTTPRQVREFLGTAGFCRLWIPGFASLAAPLYPLTRPKVPFTWTEAHQEAFGRIKEALLSAPALALPDLTKPFALYVDEKEGVARGVLTQTLGPWRRPVAYLSKKLDPVASGWPTCLKAIAAVALLLKDADKLTLGQNVLVIAPHNLESIVRQPPDRWMTNARMTHYQSLLLNERVSFAPPAILNPATLLPVESDDTPIHICSEILAEETGTRPDLRDQPLPGVPAWYTDGSSFIMDGRRQAGAAIVDNKRTVWASNLPEGTSAQKAELIALTQALRLAEGKSINIYTDSRYAFATAHVHGAIYKQRGWLTSAGKDIKNKEEILALLEAIHLPKRVAIIHCPGHQRGTDPVATGNRKADEAAKQAAQSTRILTETTKNAGKRTADGSEFEKRTADGSEFESPKKKAKVE

SEQ ID NO: 7592 - protein, 2096 aa, synthetic construct
MPAAKRVKLDGGDKKYSIGLDIGTNSVGWAVITDEYKVPSKKFKVLGNTDRHSIKKNLIGALLFDSGETAEATRLKRTARRRYTRRKNRICYLQEIFSNEMAKVDDSFFHRLEESFLVEEDKKHERHPIFGNIVDEVAYHEKYPTIYHLRKKLVDSTDKADLRLIYLALAHMIKFRGHFLIEGDLNPDNSDVDKLFIQLVQTYNQLFEENPINASGVDAKAILSARLSKSRRLENLIAQLPGEKKNGLFGNLIALSLGLTPNFKSNFDLAEDAKLQLSKDTYDDDLDNLLAQIGDQYADLFLAAKNLSDAILLSDILRVNTEITKAPLSASMIKRYDEHHQDLTLLKALVRQQLPEKYKEIFFDQSKNGYAGYIDGGASQEEFYKFIKPILEKMDGTEELLVKLNREDLLRKQRTFDNGSIPHQIHLGELHAILRRQEDFYPFLKDNREKIEKILTFRIPYYVGPLARGNSRFAWMTRKSEETITPWNFEEVVDKGASAQSFIERMTNFDKNLPNEKVLPKHSLLYEYFTVYNELTKVKYVTEGMRKPAFLSGEQKKAIVDLLFKTNRKVTVKQLKEDYFKKIECFDSVEISGVEDRFNASLGTYHDLLKIIKDKDFLDNEENEDILEDIVLTLTLFEDREMIEERLKTYAHLFDDKVMKQLKRRRYTGWGRLSRKLINGIRDKQSGKTILDFLKSDGFANRNFMQLIHDDSLTFKEDIQKAQVSGQGDSLHEHIANLAGSPAIKKGILQTVKVVDELVKVMGRHKPENIVIEMARENQTTQKGQKNSRERMKRIEEGIKELGSQILKEHPVENTQLQNEKLYLYYLQNGRDMYVDQELDINRLSDYDVDHIVPQSFLKDDSIDNKVLTRSDKARGKSDNVPSEEVVKKMKNYWRQLLNAKLITQRKFDNLTKAERGGLSELDKAGFIKRQLVETRQITKHVAQILDSRMNTKYDENDKLIREVKVITLKSKLVSDFRKDFQFYKVREINNYHHAHDAYLNAVVGTALIKKYPKLESEFVYGDYKVYDVRKMIAKSEQEIGKATAKYFFYSNIMNFFKTEITLANGEIRKRPLIETNGETGEIVWDKGRDFATVRKVLSMPQVNIVKKTEVQTGGFSKESILPKRNSDKLIARKKDWDPKKYGGFDSPTVAYSVLVVAKVEKGKSKKLKSVKELLGITIMERSSFEKNPIDFLEAKGYKEVKKDLIIKLPKYSLFELENGRKRMLASAGELQKGNELALPSKYVNFLYLASHYEKLKGSPEDNEQKQLFVEQHKHYLDEIIEQISEFSKRVILADANLDKVLSAYNKHRDKPIREQAENIIHLFTLTNLGAPAAFKYFDTTIDRKRYTSTKEVLDATLIHQSITGLYETRIDLSQLGGDGGGSSPAPEAAAKGGTLGIEDEYRLHETSTEPDVSLGSTWLSDFPQAWAETGGMGLAVRQAPLIIPLKATSTPVSIQQYPMSHEARLGIKPHIQRLLDQGILVPCQSPWNTPLLPVKKPGTNDYRPVQDLREVNKRVEDIHPTVPNPYNLLSGLPPSHQWYTVLDLKDAFFCLRLHPTSQPLFAFEWRDPGMGISGQLTWTRLPQGFKNSPTLFNEALHRDLADFRIQHPDLILLQYVDDILLAATSELDCQQGTRALLQTLGDLGYRASAKKAQICQKQVKYLGYLLREGQRWLTEARKETVMGQPVPKTPRQLREFLGTAGFCRLWIPGFAEMAAPLYPLTKPGTLFSWGPDQQKAYQEIKQALLTAPALGLPDLTKPFELFVDEKQGYAKGVLTQKLGPWRRPVAYLSKKLDPVAAGWPPCLRMVAAIAVLTKDAGKLTMGQPLVILAPHAVEALVKQPPDRWLSNARMTHYQAMLLDTDRVQFGPVVALNPATLLPLPEEGAPHDCLEILAETHGTRPDLTDQPIPDADHTWYTDGSSFLQEGQRKAGAAVTTETEVIWAGALPAGTSAQRAELIALTQALKMAEGKRLNVYTDSRYAFATAHIHGEIYRRRGWLTSEGREIKNKSEILALLKALFLPKRLSIIHCLGHQKGDSAEARGNRLADQAAREAAIKTPPDTSTLLAGKRTADGSEFEKRTADGSEFESPKKKAKVE

SEQ ID NO: 7593 - protein, 2096 aa, synthetic construct
MPAAKRVKLDGGDKKYSIGLDIGTNSVGWAVITDEYKVPSKKFKVLGNTDRHSIKKNLIGALLFDSGETAEATRLKRTARRRYTRRKNRICYLQEIFSNEMAKVDDSFFHRLEESFLVEEDKKHERHPIFGNIVDEVAYHEKYPTIYHLRKKLVDSTDKADLRLIYLALAHMIKFRGHFLIEGDLNPDNSDVDKLFIQLVQTYNQLFEENPINASGVDAKAILSARLSKSRRLENLIAQLPGEKKNGLFGNLIALSLGLTPNFKSNFDLAEDAKLQLSKDTYDDDLDNLLAQIGDQYADLFLAAKNLSDAILLSDILRVNTEITKAPLSASMIKRYDEHHQDLTLLKALVRQQLPEKYKEIFFDQSKNGYAGYIDGGASQEEFYKFIKPILEKMDGTEELLVKLNREDLLRKQRTFDNGSIPHQIHLGELHAILRRQEDFYPFLKDNREKIEKILTFRIPYYVGPLARGNSRFAWMTRKSEETITPWNFEEVVDKGASAQSFIERMTNFDKNLPNEKVLPKHSLLYEYFTVYNELTKVKYVTEGMRKPAFLSGEQKKAIVDLLFKTNRKVTVKQLKEDYFKKIECFDSVEISGVEDRFNASLGTYHDLLKIIKDKDFLDNEENEDILEDIVLTLTLFEDREMIEERLKTYAHLFDDKVMKQLKRRRYTGWGRLSRKLINGIRDKQSGKTILDFLKSDGFANRNFMQLIHDDSLTFKEDIQKAQVSGQGDSLHEHIANLAGSPAIKKGILQTVKVVDELVKVMGRHKPENIVIEMARENQTTQKGQKNSRERMKRIEEGIKELGSQILKEHPVENTQLQNEKLYLYYLQNGRDMYVDQELDINRLSDYDVDHIVPQSFLKDDSIDNKVLTRSDKARGKSDNVPSEEVVKKMKNYWRQLLNAKLITQRKFDNLTKAERGGLSELDKAGFIKRQLVETRQITKHVAQILDSRMNTKYDENDKLIREVKVITLKSKLVSDFRKDFQFYKVREINNYHHAHDAYLNAVVGTALIKKYPKLESEFVYGDYKVYDVRKMIAKSEQEIGKATAKYFFYSNIMNFFKTEITLANGEIRKRPLIETNGETGEIVWDKGRDFATVRKVLSMPQVNIVKKTEVQTGGFSKESILPKRNSDKLIARKKDWDPKKYGGFDSPTVAYSVLVVAKVEKGKSKKLKSVKELLGITIMERSSFEKNPIDFLEAKGYKEVKKDLIIKLPKYSLFELENGRKRMLASAGELQKGNELALPSKYVNFLYLASHYEKLKGSPEDNEQKQLFVEQHKHYLDEIIEQISEFSKRVILADANLDKVLSAYNKHRDKPIREQAENIIHLFTLTNLGAPAAFKYFDTTIDRKRYTSTKEVLDATLIHQSITGLYETRIDLSQLGGDGGGSSPAPEAAAKGGTLNIEDEHRLHETSKEPDVSLGSTWLSDFPQAWAETGGMGLAVRQAPLIIPLKATSTPVSIKQYPMSQEARLGIKPHIQRLLDQGILVPCQSPWNTPLLPVKKPGTNDYRPVQDLREVNKRVEDIHPTVPNPYNLLSGLPPSHQWYTVLDLKDAFFCLRLHPTSQPLFAFEWRDPEMGISGQLTWTRLPQGFKNSPTLFDEALHRDLADFRIQHPDLILLQYVDDLLLAATSELDCQQGTRALLQTLGNLGYRASAKKAQICQKQVKYLGYLLKEGQRWLTEARKETVMGQPTPKTPRQLREFLGTAGFCRLWIPGFAEMAAPLYPLTKTGTLFNWGPDQQKAYQEIKQALLTAPALGLPDLTKPFELFVDEKQGYAKGVLTQKLGPWRRPVAYLSKKLDPVAAGWPPCLRMVAAIAVLTKDAGKLTMGQPLVILAPHAVEALVKQPPDRWLSNARMTHYQALLLDTDRVQFGPVVALNPATLLPLPEEGLQHNCLDILAEAHGTRPDLTDQPLPDADHTWYTDGSSLLQEGQRKAGAAVTTETEVIWAKALPAGTSAQRAELIALTQALKMAEGKKLNVYTDSRYAFATAHIHGEIYRRRGLLTSEGKEIKNKDEILALLKALFLPKRLSIIHCPGHQKGHSAEARGNRMADQAARKAAITETPDTSTLLAGKRTADGSEFEKRTADGSEFESPKKKAKVE

SEQ ID NO: 7594 - protein, 2096 aa, synthetic construct; identical to SEQ ID NO: 7593

SEQ ID NO: 7595 - protein, 2096 aa, synthetic construct
MPAAKRVKLDGGDKKYSIGLDIGTNSVGWAVITDEYKVPSKKFKVLGNTDRHSIKKNLIGALLFDSGETAEATRLKRTARRRYTRRKNRICYLQEIFSNEMAKVDDSFFHRLEESFLVEEDKKHERHPIFGNIVDEVAYHEKYPTIYHLRKKLVDSTDKADLRLIYLALAHMIKFRGHFLIEGDLNPDNSDVDKLFIQLVQTYNQLFEENPINASGVDAKAILSARLSKSRRLENLIAQLPGEKKNGLFGNLIALSLGLTPNFKSNFDLAEDAKLQLSKDTYDDDLDNLLAQIGDQYADLFLAAKNLSDAILLSDILRVNTEITKAPLSASMIKRYDEHHQDLTLLKALVRQQLPEKYKEIFFDQSKNGYAGYIDGGASQEEFYKFIKPILEKMDGTEELLVKLNREDLLRKQRTFDNGSIPHQIHLGELHAILRRQEDFYPFLKDNREKIEKILTFRIPYYVGPLARGNSRFAWMTRKSEETITPWNFEEVVDKGASAQSFIERMTNFDKNLPNEKVLPKHSLLYEYFTVYNELTKVKYVTEGMRKPAFLSGEQKKAIVDLLFKTNRKVTVKQLKEDYFKKIECFDSVEISGVEDRFNASLGTYHDLLKIIKDKDFLDNEENEDILEDIVLTLTLFEDREMIEERLKTYAHLFDDKVMKQLKRRRYTGWGRLSRKLINGIRDKQSGKTILDFLKSDGFANRNFMQLIHDDSLTFKEDIQKAQVSGQGDSLHEHIANLAGSPAIKKGILQTVKVVDELVKVMGRHKPENIVIEMARENQTTQKGQKNSRERMKRIEEGIKELGSQILKEHPVENTQLQNEKLYLYYLQNGRDMYVDQELDINRLSDYDVDHIVPQSFLKDDSIDNKVLTRSDKARGKSDNVPSEEVVKKMKNYWRQLLNAKLITQRKFDNLTKAERGGLSELDKAGFIKRQLVETRQITKHVAQILDSRMNTKYDENDKLIREVKVITLKSKLVSDFRKDFQFYKVREINNYHHAHDAYLNAVVGTALIKKYPKLESEFVYGDYKVYDVRKMIAKSEQEIGKATAKYFFYSNIMNFFKTEITLANGEIRKRPLIETNGETGEIVWDKGRDFATVRKVLSMPQVNIVKKTEVQTGGFSKESILPKRNSDKLIARKKDWDPKKYGGFDSPTVAYSVLVVAKVEKGKSKKLKSVKELLGITIMERSSFEKNPIDFLEAKGYKEVKKDLIIKLPKYSLFELENGRKRMLASAGELQKGNELALPSKYVNFLYLASHYEKLKGSPEDNEQKQLFVEQHKHYLDEIIEQISEFSKRVILADANLDKVLSAYNKHRDKPIREQAENIIHLFTLTNLGAPAAFKYFDTTIDRKRYTSTKEVLDATLIHQSITGLYETRIDLSQLGGDGGGSSPAPEAAAKGGTLNIEDEYRLHEISTEPDVSPGSTWLSDFPQAWAETGGMGLAVRQAPLIIPLKATSTPVSIKQYPMSQEAKLGIKPHIQRLLDQGILVPCQSPWNTPLLPVKKPGTNDYRPVQGLREVNKRVEDIHPTVPNPYNLLSGLPTSHRWYTVLDLKDAFFCLRLHPTSQPLFASEWRDPGMGISGQLTWTRLPQGFKNSPTLFNEALHRGLADFRIQHPDLILLQYVDDLLLAATSELDCQQGTRALLKTLGNLGYRASAKKAQICQKQVKYLGYLLREGQRWLTEARKETVMGQPTPKTPRQLREFLGTAGFCRLWIPRFAEMAAPLYPLTKPGTLFNWGPDQQKAYHEIKQALLTAPALGLPDLTKPFELFVDEKQGYAKGVLTQKLGPWRRPVAYLSKKLDPVAAGWPPCLRMVAAIAVLTKDAGKLTMGQPLVILAPHAVEALVKQPPDRWLSNARMTHYQAMLLDTDRVQFGPVVALNPATLLPLPEEGAPHDCLEILAETHGTEPDLTDQPIPDADHTWYTDGSSFLQEGQRKAGAAVTTETEVIWARALPAGTSAQRAELIALTQALKMAEGKRLNVYTDSRYAFATAHIHGEIYKRRGWLTSEGREIKNKSEILALLKALFLPKRLSIIHCLGHQKGDSAEARGNRLADQAAREAAIKTPPDTSTLLAGKRTADGSEFEKRTADGSEFESPKKKAKVE

SEQ ID NO: 7596 - protein, 2090 aa, synthetic construct
MPAAKRVKLDGGDKKYSIGLDIGTNSVGWAVITDEYKVPSKKFKVLGNTDRHSIKKNLIGALLFDSGETAEATRLKRTARRRYTRRKNRICYLQEIFSNEMAKVDDSFFHRLEESFLVEEDKKHERHPIFGNIVDEVAYHEKYPTIYHLRKKLVDSTDKADLRLIYLALAHMIKFRGHFLIEGDLNPDNSDVDKLFIQLVQTYNQLFEENPINASGVDAKAILSARLSKSRRLENLIAQLPGEKKNGLFGNLIALSLGLTPNFKSNFDLAEDAKLQLSKDTYDDDLDNLLAQIGDQYADLFLAAKNLSDAILLSDILRVNTEITKAPLSASMIKRYDEHHQDLTLLKALVRQQLPEKYKEIFFDQSKNGYAGYIDGGASQEEFYKFIKPILEKMDGTEELLVKLNREDLLRKQRTFDNGSIPHQIHLGELHAILRRQEDFYPFLKDNREKIEKILTFRIPYYVGPLARGNSRFAWMTRKSEETITPWNFEEVVDKGASAQSFIERMTNFDKNLPNEKVLPKHSLLYEYFTVYNELTKVKYVTEGMRKPAFLSGEQKKAIVDLLFKTNRKVTVKQLKEDYFKKIECFDSVEISGVEDRFNASLGTYHDLLKIIKDKDFLDNEENEDILEDIVLTLTLFEDREMIEERLKTYAHLFDDKVMKQLKRRRYTGWGRLSRKLINGIRDKQSGKTILDFLKSDGFANRNFMQLIHDDSLTFKEDIQKAQVSGQGDSLHEHIANLAGSPAIKKGILQTVKVVDELVKVMGRHKPENIVIEMARENQTTQKGQKNSRERMKRIEEGIKELGSQILKEHPVENTQLQNEKLYLYYLQNGRDMYVDQELDINRLSDYDVDHIVPQSFLKDDSIDNKVLTRSDKARGKSDNVPSEEVVKKMKNYWRQLLNAKLITQRKFDNLTKAERGGLSELDKAGFIKRQLVETRQITKHVAQILDSRMNTKYDENDKLIREVKVITLKSKLVSDFRKDFQFYKVREINNYHHAHDAYLNAVVGTALIKKYPKLESEFVYGDYKVYDVRKMIAKSEQEIGKATAKYFFYSNIMNFFKTEITLANGEIRKRPLIETNGETGEIVWDKGRDFATVRKVLSMPQVNIVKKTEVQTGGFSKESILPKRNSDKLIARKKDWDPKKYGGFDSPTVAYSVLVVAKVEKGKSKKLKSVKELLGITIMERSSFEKNPIDFLEAKGYKEVKKDLIIKLPKYSLFELENGRKRMLASAGELQKGNELALPSKYVNFLYLASHYEKLKGSPEDNEQKQLFVEQHKHYLDEIIEQISEFSKRVILADANLDKVLSAYNKHRDKPIREQAENIIHLFTLTNLGAPAAFKYFDTTIDRKRYTSTKEVLDATLIHQSITGLYETRIDLSQLGGDGGGSSPAPEAAAKGGTLQLDDEYRLYSPLVKPDQNIQFWLEQFPQAWAETAGMGLAKQVPPQVIQLKASATPVSVRQYPLSKEAQEGIRPHVQRLIQQGILVPVQSPWNTPLLPVRKPGTNDYRPVQDLREVNKRVQDIHPTVPNPYNLLCALPPQRSWYTVLDLKDAFFCLRLHPTSQPLFAFEWRDPGTGRTGQLTWTRLPQGFKNSPTIFDEALHRDLANFRIQHPQVTLLQYVDDLLLAGATKQDCLEGTKALLLELSDLGYRASAKKAQICRREVTYLGYSLRDGQRWLTEARKKTVVQIPAPTTAKQVREFLGTAGFCRLWIPGFATLAAPLYPLTKEKGEFSWAPEHQKAFDAIKKALLSAPALALPDVTKPFTLYVDERKGVARGVLTQTLGPWRRPVAYLSKKLDPVASGWPVCLKAIAAVAILVKDADKLTLGQNITVIAPHALENIVRQPPDRWMTNARMTHYQSLLLTERVTFAPPAALNPATLLPEETDEPVTHDCHQLLIEETGVRKDLTDIPLTGEVLTWFTDGSSYVVEGKRMAGAAVVDGTRTIWASSLPEGTSAQKAELMALTQALRLAEGKSINIYTDSRYAFATAHVHGAIYKQRGLLTSAGREIKNKEEILSLLEALHLPKRLAIIHCPGHQKAKDPISRGNQMADRVAKQAAQGVNLLAGKRTADGSEFEKRTADGSEFESPKKKAKVE

SEQ ID NO: 7597 - protein, 2090 aa, synthetic construct; identical to SEQ ID NO: 7596

SEQ ID NO: 7598 - protein, 2176 aa, synthetic construct
MPAAKRVKLDGGDKKYSIGLDIGTNSVGWAVITDEYKVPSKKFKVLGNTDRHSIKKNLIGALLFDSGETAEATRLKRTARRRYTRRKNRICYLQEIFSNEMAKVDDSFFHRLEESFLVEEDKKHERHPIFGNIVDEVAYHEKYPTIYHLRKKLVDSTDKADLRLIYLALAHMIKFRGHFLIEGDLNPDNSDVDKLFIQLVQTYNQLFEENPINASGVDAKAILSARLSKSRRLENLIAQLPGEKKNGLFGNLIALSLGLTPNFKSNFDLAEDAKLQLSKDTYDDDLDNLLAQIGDQYADLFLAAKNLSDAILLSDILRVNTEITKAPLSASMIKRYDEHHQDLTLLKALVRQQLPEKYKEIFFDQSKNGYAGYIDGGASQEEFYKFIKPILEKMDGTEELLVKLNREDLLRKQRTFDNGSIPHQIHLGELHAILRRQEDFYPFLKDNREKIEKILTFRIPYYVGPLARGNSRFAWMTRKSEETITPWNFEEVVDKGASAQSFIERMTNFDKNLPNEKVLPKHSLLYEYFTVYNELTKVKYVTEGMRKPAFLSGEQKKAIVDLLFKTNRKVTVKQLKEDYFKKIECFDSVEISGVEDRFNASLGTYHDLLKIIKDKDFLDNEENEDILEDIVLTLTLFEDREMIEERLKTYAHLFDDKVMKQLKRRRYTGWGRLSRKLINGIRDKQSGKTILDFLKSDGFANRNFMQLIHDDSLTFKEDIQKAQVSGQGDSLHEHIANLAGSPAIKKGILQTVKVVDELVKVMGRHKPENIVIEMARENQTTQKGQKNSRERMKRIEEGIKELGSQILKEHPVENTQLQNEKLYLYYLQNGRDMYVDQELDINRLSDYDVDHIVPQSFLKDDSIDNKVLTRSDKARGKSDNVPSEEVVKKMKNYWRQLLNAKLITQRKFDNLTKAERGGLSELDKAGFIKRQLVETRQITKHVAQILDSRMNTKYDENDKLIREVKVITLKSKLVSDFRKDFQFYKVREINNYHHAHDAYLNAVVGTALIKKYPKLESEFVYGDYKVYDVRKMIAKSEQEIGKATAKYFFYSNIMNFFKTEITLANGEIRKRPLIETNGETGEIVWDKGRDFATVRKVLSMPQVNIVKKTEVQTGGFSKESILPKRNSDKLIARKKDWDPKKYGGFDSPTVAYSVLVVAKVEKGKSKKLKSVKELLGITIMERSSFEKNPIDFLEAKGYKEVKKDLIIKLPKYSLFELENGRKRMLASAGELQKGNELALPSKYVNFLYLASHYEKLKGSPEDNEQKQLFVEQHKHYLDEIIEQISEFSKRVILADANLDKVLSAYNKHRDKPIREQAENIIHLFTLTNLGAPAAFKYFDTTIDRKRYTSTKEVLDATLIHQSITGLYETRIDLSQLGGDGGGSSPAPEAAAKGGMDPLQLLQPLEAEIKGTKLKAHWNSGATITCVPEAFLEDERPIQTMLIKTIHGEKQQDVYYLTFKVQGRKVEAEVLASPYDYILLNPSDVPWLMKKPLQLTVLVPLHEYQERLLQQTALPKEQKELLQKLFLKYDALWQHWENQVGHRRIKPHNIATGTLAPRPQKQYPINPKAKPSIQIVIDDLLKQGVLIQQNSTMNTPVYPVPKPDGKWRMVLDYREVNKTIPLIAAQNQHSAGILSSIYRGKYKTTLDLTNGFWAHPITPESYWLTAFTWQGKQYCWTRLPQGFLNSPALFTADVVDLLKEIPNVQAYVDDIYISHDDPQEHLEQLEKIFSILLNAGYVVSLKKSEIAQREVEFLGFNITKEGRGLTDTFKQKLLNITPPKDLKQLQSILGLLNFARNFIPNYSELVKPLYTIVANANGKFISWTEDNSNQLQHIISVLNQADNLEERNPETRLIIKVNSSPSAGYIRYYNEGSKRPIMYVNYIFSKAEAKFTQTEKLLTTMHKGLIKAMDLAMGQEILVYSPIVSMTKIQRTPLPERKALPVRWITWMTYLEDPRIQFHYDKSLPELQQIPNVTEDVIAKTKHPSEFAMVFYTDGSAIKHPDVNKSHSAGMGIAQVQFIPEYKIVHQWSIPLGDHTAQLAEIAAVEFACKKALKISGPVLIVTDSFYVAESANKELPYWKSNGFLNNKKKPLRHVSKWKSIAECLQLKPDIIIMHEKGHQQPMTTLHTEGNNLADKLATQGSYVVHAGKRTADGSEFEKRTADGSEFESPKKKAKVE

SEQ ID NO: 7599 - protein, 2087 aa, synthetic construct
MPAAKRVKLDGGDKKYSIGLDIGTNSVGWAVITDEYKVPSKKFKVLGNTDRHSIKKNLIGALLFDSGETAEATRLKRTARRRYTRRKNRICYLQEIFSNEMAKVDDSFFHRLEESFLVEEDKKHERHPIFGNIVDEVAYHEKYPTIYHLRKKLVDSTDKADLRLIYLALAHMIKFRGHFLIEGDLNPDNSDVDKLFIQLVQTYNQLFEENPINASGVDAKAILSARLSKSRRLENLIAQLPGEKKNGLFGNLIALSLGLTPNFKSNFDLAEDAKLQLSKDTYDDDLDNLLAQIGDQYADLFLAAKNLSDAILLSDILRVNTEITKAPLSASMIKRYDEHHQDLTLLKALVRQQLPEKYKEIFFDQSKNGYAGYIDGGASQEEFYKFIKPILEKMDGTEELLVKLNREDLLRKQRTFDNGSIPHQIHLGELHAILRRQEDFYPFLKDNREKIEKILTFRIPYYVGPLARGNSRFAWMTRKSEETITPWNFEEVVDKGASAQSFIERMTNFDKNLPNEKVLPKHSLLYEYFTVYNELTKVKYVTEGMRKPAFLSGEQKKAIVDLLFKTNRKVTVKQLKEDYFKKIECFDSVEISGVEDRFNASLGTYHDLLKIIKDKDFLDNEENEDILEDIVLTLTLFEDREMIEERLKTYAHLFDDKVMKQLKRRRYTGWGRLSRKLINGIRDKQSGKTILDFLKSDGFANRNFMQLIHDDSLTFKEDIQKAQVSGQGDSLHEHIANLAGSPAIKKGILQTVKVVDELVKVMGRHKPENIVIEMARENQTTQKGQKNSRERMKRIEEGIKELGSQILKEHPVENTQLQNEKLYLYYLQNGRDMYVDQELDINRLSDYDVDHIVPQSFLKDDSIDNKVLTRSDKARGKSDNVPSEEVVKKMKNYWRQLLNAKLITQRKFDNLTKAERGGLSELDKAGFIKRQLVETRQITKHVAQILDSRMNTKYDENDKLIREVKVITLKSKLVSDFRKDFQFYKVREINNYHHAHDAYLNAVVGTALIKKYPKLESEFVYGDYKVYDVRKMIAKSEQEIGKATAKYFFYSNIMNFFKTEITLANGEIRKRPLIETNGETGEIVWDKGRDFATVRKVLSMPQVNIVKKTEVQTGGFSKESILPKRNSDKLIARKKDWDPKKYGGFDSPTVAYSVLVVAKVEKGKSKKLKSVKELLGITIMERSSFEKNPIDFLEAKGYKEVKKDLIIKLPKYSLFELENGRKRMLASAGELQKGNELALPSKYVNFLYLASHYEKLKGSPEDNEQKQLFVEQHKHYLDEIIEQISEFSKRVILADANLDKVLSAYNKHRDKPIREQAENIIHLFTLTNLGAPAAFKYFDTTIDRKRYTSTKEVLDATLIHQSITGLYETRIDLSQLGGDGGGSSPAPEAAAKGGIPWLMKKPLQLTTLVPLQEYEERLLKQTMLTGSYKEKLQSLFLKYDALWQHWENQVGHRRIKPHHIATGTVNPRPQKQYPINPKAKASIQTVINDLLKQGVLIQQNSIMNTPVYPVPKPDGKWRMVLDYREVNKTIPLIAAQNQHSAGILSSIFRGKYKTTLDLSNGFWAHSITPESYWLTAFTWLGQQYCWTRLPQGFLNSPALFNADVVDLLKEVPNVQVYVDDIYISHDDPREHLEQLEKVFSLLLNAGYVVSLKKSEIAQHEVEFLGFNITKEGRGLTETFKQKLLNITPPRDLKQLQSILGKLNFARNFIPNFSELVKPLYNIIATAPGKYITWTTDNSQQLQNIISMLNSAENLEERNPEVRLIMKVNTSPSAGYIRFYNEFAKRPIMYLNYVYTKAEVKFTNTEKLLTTIHKGLIKALDLGMGQEILVYSPIVSMTKIQKTPLPERKALPIRWITWMSYLEDPRIQFHYDKTLPELQQVPTVTDDIIAKIKHPSEFSMVFYTDGSAIKHPNVNKSHNAGMGIAQVQFKPEFTVINTWSIPLGDHTAQLAEVAAVEFACKKALKIDGPVLIVTDSFYVAESVNKELPYWQSNGFFNNKKKPLKHVSKWKSIADCIQLKPDIIIIHEKGHQPTASTFHTEGNNLADKLATQGSYVVNAGKRTADGSEFEKRTADGSEFESPKKKAKVE

SEQ ID NO: 7600 - protein, 2096 aa, synthetic construct
MPAAKRVKLDGGDKKYSIGLDIGTNSVGWAVITDEYKVPSKKFKVLGNTDRHSIKKNLIGALLFDSGETAEATRLKRTARRRYTRRKNRICYLQEIFSNEMAKVDDSFFHRLEESFLVEEDKKHERHPIFGNIVDEVAYHEKYPTIYHLRKKLVDSTDKADLRLIYLALAHMIKFRGHFLIEGDLNPDNSDVDKLFIQLVQTYNQLFEENPINASGVDAKAILSARLSKSRRLENLIAQLPGEKKNGLFGNLIALSLGLTPNFKSNFDLAEDAKLQLSKDTYDDDLDNLLAQIGDQYADLFLAAKNLSDAILLSDILRVNTEITKAPLSASMIKRYDEHHQDLTLLKALVRQQLPEKYKEIFFDQSKNGYAGYIDGGASQEEFYKFIKPILEKMDGTEELLVKLNREDLLRKQRTFDNGSIPHQIHLGELHAILRRQEDFYPFLKDNREKIEKILTFRIPYYVGPLARGNSRFAWMTRKSEETITPWNFEEVVDKGASAQSFIERMTNFDKNLPNEKVLPKHSLLYEYFTVYNELTKVKYVTEGMRKPAFLSGEQKKAIVDLLFKTNRKVTVKQLKEDYFKKIECFDSVEISGVEDRFNASLGTYHDLLKIIKDKDFLDNEENEDILEDIVLTLTLFEDREMIEERLKTYAHLFDDKVMKQLKRRRYTGWGRLSRKLINGIRDKQSGKTILDFLKSDGFANRNFMQLIHDDSLTFKEDIQKAQVSGQGDSLHEHIANLAGSPAIKKGILQTVKVVDELVKVMGRHKPENIVIEMARENQTTQKGQKNSRERMKRIEEGIKELGSQILKEHPVENTQLQNEKLYLYYLQNGRDMYVDQELDINRLSDYDVDHIVPQSFLKDDSIDNKVLTRSDKARGKSDNVPSEEVVKKMKNYWRQLLNAKLITQRKFDNLTKAERGGLSELDKAGFIKRQLVETRQITKHVAQILDSRMNTKYDENDKLIREVKVITLKSKLVSDFRKDFQFYKVREINNYHHAHDAYLNAVVGTALIKKYPKLESEFVYGDYKVYDVRKMIAKSEQEIGKATAKYFFYSNIMNFFKTEITLANGEIRKRPLIETNGETGEIVWDKGRDFATVRKVLSMPQVNIVKKTEVQTGGFSKESILPKRNSDKLIARKKDWDPKKYGGFDSPTVAYSVLVVAKVEKGKSKKLKSVKELLGITIMERSSFEKNPIDFLEAKGYKEVKKDLIIKLPKYSLFELENGRKRMLASAGELQKGNELALPSKYVNFLYLASHYEKLKGSPEDNEQKQLFVEQHKHYLDEIIEQISEFSKRVILADANLDKVLSAYNKHRDKPIREQAENIIHLFTLTNLGAPAAFKYFDTTIDRKRYTSTKEVLDATLIHQSITGLYETRIDLSQLGGDGGGSSPAPEAAAKGGTLNIEDEYRLHETSKEPDVPLGSTWLSDFPQAWAETGGMGLAVRQAPLIIPLKATSTPVSIKQYPMSQEARLGIKPHIQRLLDQGILVPCQSPWNTPLLPVKKPGTNDYRPVQDLREVNKRVEDIHPTVPNPYNLLSGLPPSHQWYTVLDLKDAFFCLRLHPTSQPLFAFEWRDPEMGISGQLTWTRLPQGFKNSPTLFNEALHRDLADFRIQHPDLILLQYVDDLLLAATSEQDCQRGTRALLQTLGNLGYRASAKKAQICQKQVKYLGYLLKEGQRWLTEARKETVMGQPTPKTPRQLREFLGTAGFCRLWIPGFAEMAAPLYPLTKPGTLFNWGPDQQKAYQEIKQALLTAPALGLPDLTKPFELFVDEKQGYAKGVLTQKLGPWRRPVAYLSKKLDPVAAGWPPCLRMVAAIAVLTKDAGKLTMGQPLVILAPHAVEALVKQPPDRWLSNARMTHYQAMLLDTDRVQFGPVVALNPATLLPLPEKEAPHDCLEILAETHGTRPDLTDQPIPDADYTWYTDGSSFLQEGQRRAGAAVTTETEVIWARALPAGTSAQRAELIALTQALKMAEGKKLNVYTDSRYAFATAHVHGEIYRRRGWLTSEGREIKNKNEILALLKALFLPKRLSIIHCPGHQKGNSAEARGNRMADQAAREAAMKAVLETSTLLAGKRTADGSEFEKRTADGSEFESPKKKAKVE

SEQ ID NO: 7601 - protein, 2087 aa, synthetic construct
MPAAKRVKLDGGDKKYSIGLDIGTNSVGWAVITDEYKVPSKKFKVLGNTDRHSIKKNLIGALLFDSGETAEATRLKRTARRRYTRRKNRICYLQEIFSNEMAKVDDSFFHRLEESFLVEEDKKHERHPIFGNIVDEVAYHEKYPTIYHLRKKLVDSTDKADLRLIYLALAHMIKFRGHFLIEGDLNPDNSDVDKLFIQLVQTYNQLFEENPINASGVDAKAILSARLSKSRRLENLIAQLPGEKKNGLFGNLIALSLGLTPNFKSNFDLAEDAKLQLSKDTYDDDLDNLLAQIGDQYADLFLAAKNLSDAILLSDILRVNTEITKAPLSASMIKRYDEHHQDLTLLKALVRQQLPEKYKEIFFDQSKNGYAGYIDGGASQEEFYKFIKPILEKMDGTEELLVKLNREDLLRKQRTFDNGSIPHQIHLGELHAILRRQEDFYPFLKDNREKIEKILTFRIPYYVGPLARGNSRFAWMTRKSEETITPWNFEEVVDKGASAQSFIERMTNFDKNLPNEKVLPKHSLLYEYFTVYNELTKVKYVTEGMRKPAFLSGEQKKAIVDLLFKTNRKVTVKQLKEDYFKKIECFDSVEISGVEDRFNASLGTYHDLLKIIKDKDFLDNEENEDILEDIVLTLTLFEDREMIEERLKTYAHLFDDKVMKQLKRRRYTGWGRLSRKLINGIRDKQSGKTILDFLKSDGFANRNFMQLIHDDSLTFKEDIQKAQVSGQGDSLHEHIANLAGSPAIKKGILQTVKVVDELVKVMGRHKPENIVIEMARENQTTQKGQKNSRERMKRIEEGIKELGSQILKEHPVENTQLQNEKLYLYYLQNGRDMYVDQELDINRLSDYDVDHIVPQSFLKDDSIDNKVLTRSDKARGKSDNVPSEEVVKKMKNYWRQLLNAKLITQRKFDNLTKAERGGLSELDKAGFIKRQLVETRQITKHVAQILDSRMNTKYDENDKLIREVKVITLKSKLVSDFRKDFQFYKVREINNYHHAHDAYLNAVVGTALIKKYPKLESEFVYGDYKVYDVRKMIAKSEQEIGKATAKYFFYSNIMNFFKTEITLANGEIRKRPLIETNGETGEIVWDKGRDFATVRKVLSMPQVNIVKKTEVQTGGFSKESILPKRNSDKLIARKKDWDPKKYGGFDSPTVAYSVLVVAKVEKGKSKKLKSVKELLGITIMERSSFEKNPIDFLEAKGYKEVKKDLIIKLPKYSLFELENGRKRMLASAGELQKGNELALPSKYVNFLYLASHYEKLKGSPEDNEQKQLFVEQHKHYLDEIIEQISEFSKRVILADANLDKVLSAYNKHRDKPIREQAENIIHLFTLTNLGAPAAFKYFDTTIDRKRYTSTKEVLDATLIHQSITGLYETRIDLSQLGGDGGEAAAKGSSPAPGGVPWILKKPLELTIKLDLEEQQGTLLNNSILSKKGKEELKQLFEKYSALWQSWENQVGHRRIRPHKIATGTVKPTPQKQYHINPKAKPDIQIVINDLLKQGVLIQKESTMNTPVYPVPKPNGRWRMVLDYRAVNKVTPLIAVQNQHSYGILGSLFKGRYKTTIDLSNGFWAHPIVPEDYWITAFTWQGKQYCWTVLPQGFLNSPGLFTGDVVDLLQGIPNVEVYVDDVYISHDSEKEHLEYLDILFNRLKEAGYIISLKKSNIANSIVDFLGFQITNEGRGLTDTFKEKLENITAPTTLKQLQSILGLLNFARNFIPDFTELIAPLYALIPKSTKNYVPWQIEHSTTLETLITKLNGAEYLQGRKGDKTLIMKVNASYTTGYIRYYNEGEKKPISYVSIVFSKTELKFTELEKLLTTVHKGLLKALDLSMGQNIHVYSPIVSMQNIQKTPQTAKKALASRWLSWLSYLEDPRIRFFYDPQMPALKDLPAVDTGKDNKKHPSNFQHIFYTDGSAITSPTKEGHLNAGMGIVYFINKDGNLQKQQEWSISLGNHTAQFAEIAAFEFALKKCLPLGGNILVVTDSNYVAKAYNEELDVWASNGFVNNRKKPLKHISKWKSVADLKRLRPDVVVTHEPGHQKLDSSPHAYGNNLADQLATQASFKVHAGKRTADGSEFEKRTADGSEFESPKKKAKVE

SEQ ID NO: 7602 - protein, 2087 aa, synthetic construct
MPAAKRVKLDGGDKKYSIGLDIGTNSVGWAVITDEYKVPSKKFKVLGNTDRHSIKKNLIGALLFDSGETAEATRLKRTARRRYTRRKNRICYLQEIFSNEMAKVDDSFFHRLEESFLVEEDKKHERHPIFGNIVDEVAYHEKYPTIYHLRKKLVDSTDKADLRLIYLALAHMIKFRGHFLIEGDLNPDNSDVDKLFIQLVQTYNQLFEENPINASGVDAKAILSARLSKSRRLENLIAQLPGEKKNGLFGNLIALSLGLTPNFKSNFDLAEDAKLQLSKDTYDDDLDNLLAQIGDQYADLFLAAKNLSDAILLSDILRVNTEITKAPLSASMIKRYDEHHQDLTLLKALVRQQLPEKYKEIFFDQSKNGYAGYIDGGASQEEFYKFIKPILEKMDGTEELLVKLNREDLLRKQRTFDNGSIPHQIHLGELHAILRRQEDFYPFLKDNREKIEKILTFRIPYYVGPLARGNSRFAWMTRKSEETITPWNFEEVVDKGASAQSFIERMTNFDKNLPNEKVLPKHSLLYEYFTVYNELTKVKYVTEGMRKPAFLSGEQKKAIVDLLFKTNRKVTVKQLKEDYFKKIECFDSVEISGVEDRFNASLGTYHDLLKIIKDKDFLDNEENEDILEDIVLTLTLFEDREMIEERLKTYAHLFDDKVMKQLKRRRYTGWGRLSRKLINGIRDKQSGKTILDFLKSDGFANRNFMQLIHDDSLTFKEDIQKAQVSGQGDSLHEHIANLAGSPAIKKGILQTVKVVDELVKVMGRHKPENIVIEMARENQTTQKGQKNSRERMKRIEEGIKELGSQILKEHPVENTQLQNEKLYLYYLQNGRDMYVDQELDINRLSDYDVDHIVPQSFLKDDSIDNKVLTRSDKARGKSDNVPSEEVVKKMKNYWRQLLNAKLITQRKFDNLTKAERGGLSELDKAGFIKRQLVETRQITKHVAQILDSRMNTKYDENDKLIREVKVITLKSKLVSDFRKDFQFYKVREINNYHHAHDAYLNAVVGTALIKKYPKLESEFVYGDYKVYDVRKMIAKSEQEIGKATAKYFFYSNIMNFFKTEITLANGEIRKRPLIETNGETGEIVWDKGRDFATVRKVLSMPQVNIVKKTEVQTGGFSKESILPKRNSDKLIARKKDWDPKKYGGFDSPTVAYSVLVVAKVEKGKSKKLKSVKELLGITIMERSSFEKNPIDFLEAKGYKEVKKDLIIKLPKYSLFELENGRKRMLASAGELQKGNELALPSKYVNFLYLASHYEKLKGSPEDNEQKQLFVEQHKHYLDEIIEQISEFSKRVILADANLDKVLSAYNKHRDKPIREQAENIIHLFTLTNLGAPAAFKYFDTTIDRKRYTSTKEVLDATLIHQSITGLYETRIDLSQLGGDGGEAAAKGSSPAPGGVPWLTQQPLQLTILVPLQEYQEKILSKTALPEDQKQQLKTLFVKYDNLWQHWENQVGHRKIRPHNIATGDYPPRPQKQYPINPKAKPSIQIVIDDLLKQGVLTPQNSTMNTPVYPVPKPDGRWRMVLDYREVNKTIPLTAAQNQHSAGILATIVRQKYKTTLDLANGFWAHPITPESYWLTAFTWQGKQYCWTRLPQGFLNSPALFNADVVDLLKEIPNVQVYVDDIYLSHDDPKEHVQQLEKVFQILLQAGYVVSLKKSEIGQKTVEFLGFNITKEGRGLTDTFKTKLLNITPPKDLKQLQSILGKLNFARNFIPNFAELVQPLYNLIAPAKGKYIEWSEENTKQLNMVIEALNTASNLEERLPEQRLVIKVNTSPSAGYVRYYNETGKKPIMYLNYVFSKAELKFSMLEKLLTTMHKALIKAMDLAMGQEILVYSPIVSMTKIQKTPLPERKALPIRWITWMTYLEDPRIQFHYDKTLPELKHIPDVYTSSQSPVKHPSQYEGVFYTDGSAIKSPDPTKSNNAGMGIVHATYKPEYQVLNQWSIPLGNHTAQMAEIAAVEFACKKALKIPGPVLVITDSFYVAESANKELPYWKSNGFVNNKKKPLKHISKWKSIAECLSMKPDITIQHEKGISLQIPVFILKGNALADKLATQGSYVVNAGKRTADGSEFEKRTADGSEFESPKKKAKVE

SEQ ID NO: 7603 - protein, 2218 aa, synthetic construct
MPAAKRVKLDGGDKKYSIGLDIGTNSVGWAVITDEYKVPSKKFKVLGNTDRHSIKKNLIGALLFDSGETAEATRLKRTARRRYTRRKNRICYLQEIFSNEMAKVDDSFFHRLEESFLVEEDKKHERHPIFGNIVDEVAYHEKYPTIYHLRKKLVDSTDKADLRLIYLALAHMIKFRGHFLIEGDLNPDNSDVDKLFIQLVQTYNQLFEENPINASGVDAKAILSARLSKSRRLENLIAQLPGEKKNGLFGNLIALSLGLTPNFKSNFDLAEDAKLQLSKDTYDDDLDNLLAQIGDQYADLFLAAKNLSDAILLSDILRVNTEITKAPLSASMIKRYDEHHQDLTLLKALVRQQLPEKYKEIFFDQSKNGYAGYIDGGASQEEFYKFIKPILEKMDGTEELLVKLNREDLLRKQRTFDNGSIPHQIHLGELHAILRRQEDFYPFLKDNREKIEKILTFRIPYYVGPLARGNSRFAWMTRKSEETITPWNFEEVVDKGASAQSFIERMTNFDKNLPNEKVLPKHSLLYEYFTVYNELTKVKYVTEGMRKPAFLSGEQKKAIVDLLFKTNRKVTVKQLKEDYFKKIECFDSVEISGVEDRFNASLGTYHDLLKIIKDKDFLDNEENEDILEDIVLTLTLFEDREMIEERLKTYAHLFDDKVMKQLKRRRYTGWGRLSRKLINGIRDKQSGKTILDFLKSDGFANRNFMQLIHDDSLTFKEDIQKAQVSGQGDSLHEHIANLAGSPAIKKGILQTVKVVDELVKVMGRHKPENIVIEMARENQTTQKGQKNSRERMKRIEEGIKELGSQILKEHPVENTQLQNEKLYLYYLQNGRDMYVDQELDINRLSDYDVDHIVPQSFLKDDSIDNKVLTRSDKARGKSDNVPSEEVVKKMKNYWRQLLNAKLITQRKFDNLTKAERGGLSELDKAGFIKRQLVETRQITKHVAQILDSRMNTKYDENDKLIREVKVITLKSKLVSDFRKDFQFYKVREINNYHHAHDAYLNAVVGTALIKKYPKLESEFVYGDYKVYDVRKMIAKSEQEIGKATAKYFFYSNIMNFFKTEITLANGEIRKRPLIETNGETGEIVWDKGRDFATVRKVLSMPQVNIVKKTEVQTGGFSKESILPKRNSDKLIARKKDWDPKKYGGFDSPTVAYSVLVVAKVEKGKSKKLKSVKELLGITIMERSSFEKNPIDFLEAKGYKEVKKDLIIKLPKYSLFELENGRKRMLASAGELQKGNELALPSKYVNFLYLASHYEKLKGSPEDNEQKQLFVEQHKHYLDEIIEQISEFSKRVILADANLDKVLSAYNKHRDKPIREQAENIIHLFTLTNLGAPAAFKYFDTTIDRKRYTSTKEVLDATLIHQSITGLYETRIDLSQLGGDGGEAAAKGSSPAPGGTLGDQGSRGSDPLPEPRVTLTVEGIPTEFLVNTGAEHSVLTKPMGKMGSKRTVVAGATGSKVYPWTTKRLLKIGQKQVTHSFLVIPECPAPLLGRDLLTKLKAQIQFSTEGPQVTWEDRPAMCLVLNLEEEYRLHEKPVPPSIDPSWLQLFPMVWAEKAGMGLANQVPPVVVELKSDASPVAVRQYPMSKEAREGIRPHIQRFLDLGILVPCQSPWNTPLLPVKKPGTNDYRPVQDLREVNKRVQDIHPTVPNPYNLLSSLPPSHTWYSVLDLKDAFFCLKLHPNSQPLFAFEWRDPEKGNTGQLTWTRLPQGFKNSPTLFNEALHRDLASFRALNPQVVMLQYVDDLLVAAPTYRDCKEGTRRLLQELSKLGYRVSAKKAQLCREEVTYLGYLLKGGKRWLTPARKATVMKIPTPTTPRQVREFLGTAGFCRLWIPGFASLAAPLYPLTRPKVPFTWTEAHQEAFGRIKEALLSAPALALPDLTKPFALYVDEKEGVARGVLTQTLGPWRRPVAYLSKKLDPVASGWPTCLKAIAAVALLLKDADKLTLGQNVLVIAPHNLESIVRQPPDRWMTNARMTHYQSLLLNERVSFAPPAILNPATLLPVESDDTPIHICSEILAEETGTRPDLRDQPLPGVPAWYTDGSSFIMDGRRQAGAAIVDNKRTVWASNLPEGTSAQKAELIALTQALRLAEGKSINIYTDSRYAFATAHVHGAIYKQRGWLTSAGKDIKNKEEILALLEAIHLPKRVAIIHCPGHQRGTDPVATGNRKADEAAKQAAQSTRILTETTKNAGKRTADGSEFEKRTADGSEFESPKKKAKVE

SEQ ID NO: 7604 - protein, 2096 aa, synthetic construct
MPAAKRVKLDGGDKKYSIGLDIGTNSVGWAVITDEYKVPSKKFKVLGNTDRHSIKKNLIGALLFDSGETAEATRLKRTARRRYTRRKNRICYLQEIFSNEMAKVDDSFFHRLEESFLVEEDKKHERHPIFGNIVDEVAYHEKYPTIYHLRKKLVDSTDKADLRLIYLALAHMIKFRGHFLIEGDLNPDNSDVDKLFIQLVQTYNQLFEENPINASGVDAKAILSARLSKSRRLENLIAQLPGEKKNGLFGNLIALSLGLTPNFKSNFDLAEDAKLQLSKDTYDDDLDNLLAQIGDQYADLFLAAKNLSDAILLSDILRVNTEITKAPLSASMIKRYDEHHQDLTLLKALVRQQLPEKYKEIFFDQSKNGYAGYIDGGASQEEFYKFIKPILEKMDGTEELLVKLNREDLLRKQRTFDNGSIPHQIHLGELHAILRRQEDFYPFLKDNREKIEKILTFRIPYYVGPLARGNSRFAWMTRKSEETITPWNFEEVVDKGASAQSFIERMTNFDKNLPNEKVLPKHSLLYEYFTVYNELTKVKYVTEGMRKPAFLSGEQKKAIVDLLFKTNRKVTVKQLKEDYFKKIECFDSVEISGVEDRFNASLGTYHDLLKIIKDKDFLDNEENEDILEDIVLTLTLFEDREMIEERLKTYAHLFDDKVMKQLKRRRYTGWGRLSRKLINGIRDKQSGKTILDFLKSDGFANRNFMQLIHDDSLTFKEDIQKAQVSGQGDSLHEHIANLAGSPAIKKGILQTVKVVDELVKVMGRHKPENIVIEMARENQTTQKGQKNSRERMKRIEEGIKELGSQILKEHPVENTQLQNEKLYLYYLQNGRDMYVDQELDINRLSDYDVDHIVPQSFLKDDSIDNKVLTRSDKARGKSDNVPSEEVVKKMKNYWRQLLNAKLITQRKFDNLTKAERGGLSELDKAGFIKRQLVETRQITKHVAQILDSRMNTKYDENDKLIREVKVITLKSKLVSDFRKDFQFYKVREINNYHHAHDAYLNAVVGTALIKKYPKLESEFVYGDYKVYDVRKMIAKSEQEIGKATAKYFFYSNIMNFFKTEITLANGEIRKRPLIETNGETGEIVWDKGRDFATVRKVLSMPQVNIVKKTEVQTGGFSKESILPKRNSDKLIARKKDWDPKKYGGFDSPTVAYSVLVVAKVEKGKSKKLKSVKELLGITIMERSSFEKNPIDFLEAKGYKEVKKDLIIKLPKYSLFELENGRKRMLASAGELQKGNELALPSKYVNFLYLASHYEKLKGSPEDNEQKQLFVEQHKHYLDEIIEQISEFSKRVILADANLDKVLSAYNKHRDKPIREQAENIIHLFTLTNLGAPAAFKYFDTTIDRKRYTSTKEVLDATLIHQSITGLYETRIDLSQLGGDGGEAAAKGSSPAPGGTLNLEDEYRLYETSAEPEVSPGSTWLSDFPQAWAETGGMGLAVRQAPLIIPLKATSTPVSIKQYPMSQEAKLGIKPHIQRLLDQGILVPCQSPWNTPLLPVKKPGTNDYRPVQDLREVNKRVEDIHPTVPNPYNLLSGLPPSHRWYTVLDLKDAFFCLRLHPTSQPLFAFEWRDPGMGISGQLTWTRLPQGFKNSPTLFNEALHRDLADFRIQHPDLILLQYVDDILLAATSELDCQQGTRALLLTLGNLGYRASAKKAQLCQKQVKYLGYLLKEGQRWLTEARKETVMGQPTPKTPRQLREFLGTAGFCRLWIPGFAEMAAPLYPLTKPGTLFNWGPDQQKAYQEIKQALLTAPALGLPDLTKPFELFVDEKQGYAKGVLTQKLGPWRRPVAYLSKKLDPVAAGWPPCLRMVAAIAVLRKDAGKLTMGQPLVILAPHAVEALVKQPPDRWLSNARMTHYQAMLLDTDRVQFGPVVALNPATLLPLPEEGAPHDCLEILAETHGTRPDLTDQPIPDADHTWYTDGSSFLQEGQRKAGAAVTTETEVIWARALPAGTSAQRAELIALTQALKMAEGKRLNVYTDSRYAFATAHIHGEIYRRRGWLTSEGREIKNKSEILALLKALFLPKRLSIIHCLGHQKGDSAEARGNRLADQAAREAAIKTPPDTSTLLAGKRTADGSEFEKRTADGSEFESPKKKAKVE

SEQ ID NO: 7605 - protein, 2096 aa, synthetic construct
MPAAKRVKLDGGDKKYSIGLDIGTNSVGWAVITDEYKVPSKKFKVLGNTDRHSIKKNLIGALLFDSGETAEATRLKRTARRRYTRRKNRICYLQEIFSNEMAKVDDSFFHRLEESFLVEEDKKHERHPIFGNIVDEVAYHEKYPTIYHLRKKLVDSTDKADLRLIYLALAHMIKFRGHFLIEGDLNPDNSDVDKLFIQLVQTYNQLFEENPINASGVDAKAILSARLSKSRRLENLIAQLPGEKKNGLFGNLIALSLGLTPNFKSNFDLAEDAKLQLSKDTYDDDLDNLLAQIGDQYADLFLAAKNLSDAILLSDILRVNTEITKAPLSASMIKRYDEHHQDLTLLKALVRQQLPEKYKEIFFDQSKNGYAGYIDGGASQEEFYKFIKPILEKMDGTEELLVKLNREDLLRKQRTFDNGSIPHQIHLGELHAILRRQEDFYPFLKDNREKIEKILTFRIPYYVGPLARGNSRFAWMTRKSEETITPWNFEEVVDKGASAQSFIERMTNFDKNLPNEKVLPKHSLLYEYFTVYNELTKVKYVTEGMRKPAFLSGEQKKAIVDLLFKTNRKVTVKQLKEDYFKKIECFDSVEISGVEDRFNASLGTYHDLLKIIKDKDFLDNEENEDILEDIVLTLTLFEDREMIEERLKTYAHLFDDKVMKQLKRRRYTGWGRLSRKLINGIRDKQSGKTILDFLKSDGFANRNFMQLIHDDSLTFKEDIQKAQVSGQGDSLHEHIANLAGSPAIKKGILQTVKVVDELVKVMGRHKPENIVIEMARENQTTQKGQKNSRERMKRIEEGIKELGSQILKEHPVENTQLQNEKLYLYYLQNGRDMYVDQELDINRLSDYDVDHIVPQSFLKDDSIDNKVLTRSDKARGKSDNVPSEEVVKKMKNYWRQLLNAKLITQRKFDNLTKAERGGLSELDKAGFIKRQLVETRQITKHVAQILDSRMNTKYDENDKLIREVKVITLKSKLVSDFRKDFQFYKVREINNYHHAHDAYLNAVVGTALIKKYPKLESEFVYGDYKVYDVRKMIAKSEQEIGKATAKYFFYSNIMNFFKTEITLANGEIRKRPLIETNGETGEIVWDKGRDFATVRKVLSMPQVNIVKKTEVQTGGFSKESILPKRNSDKLIARKKDWDPKKYGGFDSPTVAYSVLVVAKVEKGKSKKLKSVKELLGITIMERSSFEKNPIDFLEAKGYKEVKKDLIIKLPKYSLFELENGRKRMLASAGELQKGNELALPSKYVNFLYLASHYEKLKGSPEDNEQKQLFVEQHKHYLDEIIEQISEFSKRVILADANLDKVLSAYNKHRDKPIREQAENIIHLFTLTNLGAPAAFKYFDTTIDRKRYTSTKEVLDATLIHQSITGLYETRIDLSQLGGDGGEAAAKGSSPAPGGTLNIEDEYRLHETSKEPDVSLGSTWLSDFPQAWAETGGMGLAVRQAPLIIPLKATSTPVSIKQYPMSQEARLGIKPHIQRLLDQGILVPCQSPWNTPLLPVKKPGTNDYRPVQDLREVNKRVEDIHPTVPNPYNLLSGLPPSHQWYTVLDLKDAFFCLRLHPTSQPLFAFEWRDPEMGISGQLTWTRLPQGFKNSPTLFDEALHRDLAGFRIQHPDLILLQYVDDLLLAATSELDCQQGTRALLQTLGDLGYRASAKKAQICQKQVKYLGYLLKEGQRWLTEARKETVMGQPIPKTPRQLREFLGTAGFCRLWIPGFAEMAAPLYPLTKTGTLFNWGPDQQKAFQEIKQALLTAPALGLPDLTKPFELFVDEKQGYAKGVLTQKLGPWRRPVAYLSKKLDPVAAGWPPCLRMVAAIAVLTKDAGKLTMGQPLVILAPHAVEALVKQPPDRWLSNARMTHYQALLLDTDRVQFGPVVALNPATLLPLPEEGLQHDCLDILAEAHGTRSDLMDQPLPDADHTWYTDGSSFLQEGQRKAGAAVTTETEVIWARALPAGTSAQRAELIALTQALKMAEGKKLNVYTDSRYAFATAHIHGEIYRRRGLLTSEGKEIKNKDEILALLKALFLPKRLSIIHCPGHQKGNSAEARGNRMADQAAREVATRETPETSTLLAGKRTADGSEFEKRTADGSEFESPKKKAKVE

SEQ ID NO: 7606 - protein, 2096 aa, synthetic construct
MPAAKRVKLDGGDKKYSIGLDIGTNSVGWAVITDEYKVPSKKFKVLGNTDRHSIKKNLIGALLFDSGETAEATRLKRTARRRYTRRKNRICYLQEIFSNEMAKVDDSFFHRLEESFLVEEDKKHERHPIFGNIVDEVAYHEKYPTIYHLRKKLVDSTDKADLRLIYLALAHMIKFRGHFLIEGDLNPDNSDVDKLFIQLVQTYNQLFEENPINASGVDAKAILSARLSKSRRLENLIAQLPGEKKNGLFGNLIALSLGLTPNFKSNFDLAEDAKLQLSKDTYDDDLDNLLAQIGDQYADLFLAAKNLSDAILLSDILRVNTEITKAPLSASMIKRYDEHHQDLTLLKALVRQQLPEKYKEIFFDQSKNGYAGYIDGGASQEEFYKFIKPILEKMDGTEELLVKLNREDLLRKQRTFDNGSIPHQIHLGELHAILRRQEDFYPFLKDNREKIEKILTFRIPYYVGPLARGNSRFAWMTRKSEETITPWNFEEVVDKGASAQSFIERMTNFDKNLPNEKVLPKHSLLYEYFTVYNELTKVKYVTEGMRKPAFLSGEQKKAIVDLLFKTNRKVTVKQLKEDYFKKIECFDSVEISGVEDRFNASLGTYHDLLKIIKDKDFLDNEENEDILEDIVLTLTLFEDREMIEERLKTYAHLFDDKVMKQLKRRRYTGWGRLSRKLINGIRDKQSGKTILDFLKSDGFANRNFMQLIHDDSLTFKEDIQKAQVSGQGDSLHEHIANLAGSPAIKKGILQTVKVVDELVKVMGRHKPENIVIEMARENQTTQKGQKNSRERMKRIEEGIKELGSQILKEHPVENTQLQNEKLYLYYLQNGRDMYVDQELDINRLSDYDVDHIVPQSFLKDDSIDNKVLTRSDKARGKSDNVPSEEVVKKMKNYWRQLLNAKLITQRKFDNLTKAERGGLSELDKAGFIKRQLVETRQITKHVAQILDSRMNTKYDENDKLIREVKVITLKSKLVSDFRKDFQFYKVREINNYHHAHDAYLNAVVGTALIKKYPKLESEFVYGDYKVYDVRKMIAKSEQEIGKATAKYFFYSNIMNFFKTEITLANGEIRKRPLIETNGETGEIVWDKGRDFATVRKVLSMPQVNIVKKTEVQTGGFSKESILPKRNSDKLIARKKDWDPKKYGGFDSPTVAYSVLVVAKVEKGKSKKLKSVKELLGITIMERSSFEKNPIDFLEAKGYKEVKKDLIIKLPKYSLFELENGRKRMLASAGELQKGNELALPSKYVNFLYLASHYEKLKGSPEDNEQKQLFVEQHKHYLDEIIEQISEFSKRVILADANLDKVLSAYNKHRDKPIREQAENIIHLFTLTNLGAPAAFKYFDTTIDRKRYTSTKEVLDATLIHQSITGLYETRIDLSQLGGDGGEAAAKGSSPAPGGTLNIEDEYRLHETSKEPDVSLGSTWLSDFPQAWAETGGMGLAVRQAPLIIPLKATSTPVSIKQYPMSQEARLGIKPHIQRLLDQGILVPCQSPWNTPLLPVKKPGTNDYRPVQDLREVNKRVEDIHPTVPNPYNLLSGLPPSHQWYTVLDLKDAFFCLRLHPTSQPLFAFEWRDPEMGISGQLTWTRLPQGFKNSPTLFNEALHRDLAGFRIQHPDLILLQYVDDLLLAATSELDCQQGTRALLQTLGDLGYRASAKKAQICQKQVKYLGYLLKEGQRWLTEARKETVMGQPIPKTPRQLREFLGKAGFCRLFIPGFAEMAAPLYPLTKPGTLFNWGPDQQKAFQEIKQALLTAPALGLPDLTKPFELFVDEKQGYAKGVLTQKLGPWRRPVAYLSKKLDPVAAGWPPCLRMVAAIAVLTKDAGKLTMGQPLVILAPHAVEALVKQPPDRWLSNARMTHYQALLLDTDRVQFGPVVALNPATLLPLPEEGLQHDCLDILAEAHGTRSDLMDQPLPDADHTWYTDGSSFLQEGQRKAGAAVTTETEVIWARALPAGTSAQRAELIALTQALKMAEGKKLNVYTDSRYAFATAHIHGEIYRRRGWLTSEGKEIKNKDEILALLKALFLPKRLSIIHCPGHQKGNSAEARGNRMADQAAREVATRETPETSTLLAGKRTADGSEFEKRTADGSEFESPKKKAKVE

SEQ ID NO: 7607 - protein, 2096 aa, synthetic construct
MPAAKRVKLDGGDKKYSIGLDIGTNSVGWAVITDEYKVPSKKFKVLGNTDRHSIKKNLIGALLFDSGETAEATRLKRTARRRYTRRKNRICYLQEIFSNEMAKVDDSFFHRLEESFLVEEDKKHERHPIFGNIVDEVAYHEKYPTIYHLRKKLVDSTDKADLRLIYLALAHMIKFRGHFLIEGDLNPDNSDVDKLFIQLVQTYNQLFEENPINASGVDAKAILSARLSKSRRLENLIAQLPGEKKNGLFGNLIALSLGLTPNFKSNFDLAEDAKLQLSKDTYDDDLDNLLAQIGDQYADLFLAAKNLSDAILLSDILRVNTEITKAPLSASMIKRYDEHHQDLTLLKALVRQQLPEKYKEIFFDQSKNGYAGYIDGGASQEEFYKFIKPILEKMDGTEELLVKLNREDLLRKQRTFDNGSIPHQIHLGELHAILRRQEDFYPFLKDNREKIEKILTFRIPYYVGPLARGNSRFAWMTRKSEETITPWNFEEVVDKGASAQSFIERMTNFDKNLPNEKVLPKHSLLYEYFTVYNELTKVKYVTEGMRKPAFLSGEQKKAIVDLLFKTNRKVTVKQLKEDYFKKIECFDSVEISGVEDRFNASLGTYHDLLKIIKDKDFLDNEENEDILEDIVLTLTLFEDREMIEERLKTYAHLFDDKVMKQLKRRRYTGWGRLSRKLINGIRDKQSGKTILDFLKSDGFANRNFMQLIHDDSLTFKEDIQKAQVSGQGDSLHEHIANLAGSPAIKKGILQTVKVVDELVKVMGRHKPENIVIEMARENQTTQKGQKNSRERMKRIEEGIKELGSQILKEHPVENTQLQNEKLYLYYLQNGRDMYVDQELDINRLSDYDVDHIVPQSFLKDDSIDNKVLTRSDKARGKSDNVPSEEVVKKMKNYWRQLLNAKLITQRKFDNLTKAERGGLSELDKAGFIKRQLVETRQITKHVAQILDSRMNTKYDENDKLIREVKVITLKSKLVSDFRKDFQFYKVREINNYHHAHDAYLNAVVGTALIKKYPKLESEFVYGDYKVYDVRKMIAKSEQEIGKATAKYFFYSNIMNFFKTEITLANGEIRKRPLIETNGETGEIVWDKGRDFATVRKVLSMPQVNIVKKTEVQTGGFSKESILPKRNSDKLIARKKDWDPKKYGGFDSPTVAYSVLVVAKVEKGKSKKLKSVKELLGITIMERSSFEKNPIDFLEAKGYKEVKKDLIIKLPKYSLFELENGRKRMLASAGELQKGNELALPSKYVNFLYLASHYEKLKGSPEDNEQKQLFVEQHKHYLDEIIEQISEFSKRVILADANLDKVLSAYNKHRDKPIREQAENIIHLFTLTNLGAPAAFKYFDTTIDRKRYTSTKEVLDATLIHQSITGLYETRIDLSQLGGDGGEAAAKGSSPAPGGTLNIEDEHRLHETSKEPDVSLGSTWLSDFPQAWAETGGMGLAVRQAPLIIPLKATSTPVSIKQYPMSQEARLGIKPHIQRLLDQGILVPCQSPWNTPLLPVKKPGTNDYRPVQDLREVNKRVEDIHPTVPNPYNLLSGLPPSHQWYTVLDLKDAFFCLRLHPTSQPLFAFEWRDPEMGISGQLTWTRLPQGFKNSPTLFDEALHRDLADFRIQHPDLILLQYVDDLLLAATSELDCQQGTRALLQTLGNLGYRASAKKAQICQKQVKYLGYLLKEGQRWLTEARKETVMGQPTPKTPRQLREFLGTAGFCRLWIPGFAEMAAPLYPLTKTGTLFNWGPDQQKAYQEIKQALLTAPALGLPDLTKPFELFVDEKQGYAKGVLTQKLGPWRRPVAYLSKKLDPVAAGWPPCLRMVAAIAVLTKDAGKLTMGQPLVILAPHAVEALVKQPPDRWLSNARMTHYQALLLDTDRVQFGPVVALNPATLLPLPEEGLQHNCLDILAEAHGTRPDLTDQPLPDADHTWYTDGSSLLQEGQRKAGAAVTTETEVIWAKALPAGTSAQRAELIALTQALKMAEGKKLNVYTDSRYAFATAHIHGEIYRRRGLLTSEGKEIKNKDEILALLKALFLPKRLSIIHCPGHQKGHSAEARGNRMADQAARKAAITETPDTSTLLAGKRTADGSEFEKRTADGSEFESPKKKAKVE

SEQ ID NO: 7608 - protein, 2024 aa, synthetic construct
MPAAKRVKLDGGDKKYSIGLDIGTNSVGWAVITDEYKVPSKKFKVLGNTDRHSIKKNLIGALLFDSGETAEATRLKRTARRRYTRRKNRICYLQEIFSNEMAKVDDSFFHRLEESFLVEEDKKHERHPIFGNIVDEVAYHEKYPTIYHLRKKLVDSTDKADLRLIYLALAHMIKFRGHFLIEGDLNPDNSDVDKLFIQLVQTYNQLFEENPINASGVDAKAILSARLSKSRRLENLIAQLPGEKKNGLFGNLIALSLGLTPNFKSNFDLAEDAKLQLSKDTYDDDLDNLLAQIGDQYADLFLAAKNLSDAILLSDILRVNTEITKAPLSASMIKRYDEHHQDLTLLKALVRQQLPEKYKEIFFDQSKNGYAGYIDGGASQEEFYKFIKPILEKMDGTEELLVKLNREDLLRKQRTFDNGSIPHQIHLGELHAILRRQEDFYPFLKDNREKIEKILTFRIPYYVGPLARGNSRFAWMTRKSEETITPWNFEEVVDKGASAQSFIERMTNFDKNLPNEKVLPKHSLLYEYFTVYNELTKVKYVTEGMRKPAFLSGEQKKAIVDLLFKTNRKVTVKQLKEDYFKKIECFDSVEISGVEDRFNASLGTYHDLLKIIKDKDFLDNEENEDILEDIVLTLTLFEDREMIEERLKTYAHLFDDKVMKQLKRRRYTGWGRLSRKLINGIRDKQSGKTILDFLKSDGFANRNFMQLIHDDSLTFKEDIQKAQVSGQGDSLHEHIANLAGSPAIKKGILQTVKVVDELVKVMGRHKPENIVIEMARENQTTQKGQKNSRERMKRIEEGIKELGSQILKEHPVENTQLQNEKLYLYYLQNGRDMYVDQELDINRLSDYDVDHIVPQSFLKDDSIDNKVLTRSDKARGKSDNVPSEEVVKKMKNYWRQLLNAKLITQRKFDNLTKAERGGLSELDKAGFIKRQLVETRQITKHVAQILDSRMNTKYDENDKLIREVKVITLKSKLVSDFRKDFQFYKVREINNYHHAHDAYLNAVVGTALIKKYPKLESEFVYGDYKVYDVRKMIAKSEQEIGKATAKYFFYSNIMNFFKTEITLANGEIRKRPLIETNGETGEIVWDKGRDFATVRKVLSMPQVNIVKKTEVQTGGFSKESILPKRNSDKLIARKKDWDPKKYGGFDSPTVAYSVLVVAKVEKGKSKKLKSVKELLGITIMERSSFEKNPIDFLEAKGYKEVKKDLIIKLPKYSLFELENGRKRMLASAGELQKGNELALPSKYVNFLYLASHYEKLKGSPEDNEQKQLFVEQHKHYLDEIIEQISEFSKRVILADANLDKVLSAYNKHRDKPIREQAENIIHLFTLTNLGAPAAFKYFDTTIDRKRYTSTKEVLDATLIHQSITGLYETRIDLSQLGGDGGEAAAKGSSPAPGGGRDIMKDIKVRLMTDSPDDSQDLMIGAIESNLFADQISWKSDQPVWLNQWPLKQEKLQALQQLVTEQLQLGHLEESNSPWNTPVFVIKKKSGKWRLLQDLRAVNATMHDMGALQPGLPSPVAPPKGWEIIIIDLQDCFFNIKLHPEDCKRFAFSVPSPNFKRPYQRFQWKVLPQGMKNSPTLCQKFVDKAILTVRDKYQDSYIVHYMDDILLAHPSRSIVDEILTSMIQALNKHGLVVSTEKIQKYDNLKYLGTHIQGDSVSYQKLQIRTDKLRTLNDFQKLLGNINWIRPFLKLTTGELKPLFEILNPDSNPISTRKLTPEACKALQLMNERLSTARVKRLDLSQPWSLCILKTEYTPTACLWQDGVVEWIHLPHISPKVITPYDIFCTQLIIKGRHRSKELFSKDPDYIVVPYTKVQFDLLLQEKEDWPISLLGFLGEVHFHLPKDPLLTFTLQTAIIFPHMTSTTPLEKGIVIFTDGSANGRSVTYIQGREPIIKENTQNTAQQAEIVAVITAFEEVSQPFNLYTDSKYVTGLFPEIETATLSPRTKIYTELKHLQRLIHKRQEKFYIGHIRGHTGLPGPLAQGNAYADSLTRILTAGKRTADGSEFEKRTADGSEFESPKKKAKVE

SEQ ID NO: 7609 - protein, 2176 aa, synthetic construct
MPAAKRVKLDGGDKKYSIGLDIGTNSVGWAVITDEYKVPSKKFKVLGNTDRHSIKKNLIGALLFDSGETAEATRLKRTARRRYTRRKNRICYLQEIFSNEMAKVDDSFFHRLEESFLVEEDKKHERHPIFGNIVDEVAYHEKYPTIYHLRKKLVDSTDKADLRLIYLALAHMIKFRGHFLIEGDLNPDNSDVDKLFIQLVQTYNQLFEENPINASGVDAKAILSARLSKSRRLENLIAQLPGEKKNGLFGNLIALSLGLTPNFKSNFDLAEDAKLQLSKDTYDDDLDNLLAQIGDQYADLFLAAKNLSDAILLSDILRVNTEITKAPLSASMIKRYDEHHQDLTLLKALVRQQLPEKYKEIFFDQSKNGYAGYIDGGASQEEFYKFIKPILEKMDGTEELLVKLNREDLLRKQRTFDNGSIPHQIHLGELHAILRRQEDFYPFLKDNREKIEKILTFRIPYYVGPLARGNSRFAWMTRKSEETITPWNFEEVVDKGASAQSFIERMTNFDKNLPNEKVLPKHSLLYEYFTVYNELTKVKYVTEGMRKPAFLSGEQKKAIVDLLFKTNRKVTVKQLKEDYFKKIECFDSVEISGVEDRFNASLGTYHDLLKIIKDKDFLDNEENEDILEDIVLTLTLFEDREMIEERLKTYAHLFDDKVMKQLKRRRYTGWGRLSRKLINGIRDKQSGKTILDFLKSDGFANRNFMQLIHDDSLTFKEDIQKAQVSGQGDSLHEHIANLAGSPAIKKGILQTVKVVDELVKVMGRHKPENIVIEMARENQTTQKGQKNSRERMKRIEEGIKELGSQILKEHPVENTQLQNEKLYLYYLQNGRDMYVDQELDINRLSDYDVDHIVPQSFLKDDSIDNKVLTRSDKARGKSDNVPSEEVVKKMKNYWRQLLNAKLITQRKFDNLTKAERGGLSELDKAGFIKRQLVETRQITKHVAQILDSRMNTKYDENDKLIREVKVITLKSKLVSDFRKDFQFYKVREINNYHHAHDAYLNAVVGTALIKKYPKLESEFVYGDYKVYDVRKMIAKSEQEIGKATAKYFFYSNIMNFFKTEITLANGEIRKRPLIETNGETGEIVWDKGRDFATVRKVLSMPQVNIVKKTEVQTGGFSKESILPKRNSDKLIARKKDWDPKKYGGFDSPTVAYSVLVVAKVEKGKSKKLKSVKELLGITIMERSSFEKNPIDFLEAKGYKEVKKDLIIKLPKYSLFELENGRKRMLASAGELQKGNELALPSKYVNFLYLASHYEKLKGSPEDNEQKQLFVEQHKHYLDEIIEQISEFSKRVILADANLDKVLSAYNKHRDKPIREQAENIIHLFTLTNLGAPAAFKYFDTTIDRKRYTSTKEVLDATLIHQSITGLYETRIDLSQLGGDGGEAAAKGSSPAPGGMDPLQLLQPLEAEIKGTKLKAHWNSGATITCVPEAFLEDERPIQTMLIKTIHGEKQQDVYYLTFKVQGRKVEAEVLASPYDYILLNPSDVPWLMKKPLQLTVLVPLHEYQERLLQQTALPKEQKELLQKLFLKYDALWQHWENQVGHRRIKPHNIATGTLAPRPQKQYPINPKAKPSIQIVIDDLLKQGVLIQQNSTMNTPVYPVPKPDGKWRMVLDYREVNKTIPLIAAQNQHSAGILSSIYRGKYKTTLDLTNGFWAHPITPESYWLTAFTWQGKQYCWTRLPQGFLNSPALFNADVVDLLKEIPNVQAYVDDIYISHDDPQEHLEQLEKIFSILLNAGYVVSLKKSEIAQREVEFLGFNITKEGRGLTDTFKQKLLNITPPKDLKQLQSILGKLNFARNFIPNYSELVKPLYTIVAPANGKFISWTEDNSNQLQHIISVLNQADNLEERNPETRLIIKVNSSPSAGYIRYYNEGSKRPIMYVNYIFSKAEAKFTQTEKLLTTMHKGLIKAMDLAMGQEILVYSPIVSMTKIQRTPLPERKALPVRWITWMTYLEDPRIQFHYDKSLPELQQIPNVTEDVIAKTKHPSEFAMVFYTDGSAIKHPDVNKSHSAGMGIAQVQFIPEYKIVHQWSIPLGDHTAQLAEIAAVEFACKKALKISGPVLIVTDSFYVAESANKELPYWKSNGFLNNKKKPLRHVSKWKSIAECLQLKPDIIIMHEKGHQQPMTTLHTEGNNLADKLATQGSYVVHAGKRTADGSEFEKRTADGSEFESPKKKAKVE

SEQ ID NO: 7610 - protein, 2087 aa, synthetic construct
MPAAKRVKLDGGDKKYSIGLDIGTNSVGWAVITDEYKVPSKKFKVLGNTDRHSIKKNLIGALLFDSGETAEATRLKRTARRRYTRRKNRICYLQEIFSNEMAKVDDSFFHRLEESFLVEEDKKHERHPIFGNIVDEVAYHEKYPTIYHLRKKLVDSTDKADLRLIYLALAHMIKFRGHFLIEGDLNPDNSDVDKLFIQLVQTYNQLFEENPINASGVDAKAILSARLSKSRRLENLIAQLPGEKKNGLFGNLIALSLGLTPNFKSNFDLAEDAKLQLSKDTYDDDLDNLLAQIGDQYADLFLAAKNLSDAILLSDILRVNTEITKAPLSASMIKRYDEHHQDLTLLKALVRQQLPEKYKEIFFDQSKNGYAGYIDGGASQEEFYKFIKPILEKMDGTEELLVKLNREDLLRKQRTFDNGSIPHQIHLGELHAILRRQEDFYPFLKDNREKIEKILTFRIPYYVGPLARGNSRFAWMTRKSEETITPWNFEEVVDKGASAQSFIERMTNFDKNLPNEKVLPKHSLLYEYFTVYNELTKVKYVTEGMRKPAFLSGEQKKAIVDLLFKTNRKVTVKQLKEDYFKKIECFDSVEISGVEDRFNASLGTYHDLLKIIKDKDFLDNEENEDILEDIVLTLTLFEDREMIEERLKTYAHLFDDKVMKQLKRRRYTGWGRLSRKLINGIRDKQSGKTILDFLKSDGFANRNFMQLIHDDSLTFKEDIQKAQVSGQGDSLHEHIANLAGSPAIKKGILQTVKVVDELVKVMGRHKPENIVIEMARENQTTQKGQKNSRERMKRIEEGIKELGSQILKEHPVENTQLQNEKLYLYYLQNGRDMYVDQELDINRLSDYDVDHIVPQSFLKDDSIDNKVLTRSDKARGKSDNVPSEEVVKKMKNYWRQLLNAKLITQRKFDNLTKAERGGLSELDKAGFIKRQLVETRQITKHVAQILDSRMNTKYDENDKLIREVKVITLKSKLVSDFRKDFQFYKVREINNYHHAHDAYLNAVVGTALIKKYPKLESEFVYGDYKVYDVRKMIAKSEQEIGKATAKYFFYSNIMNFFKTEITLANGEIRKRPLIETNGETGEIVWDKGRDFATVRKVLSMPQVNIVKKTEVQTGGFSKESILPKRNSDKLIARKKDWDPKKYGGFDSPTVAYSVLVVAKVEKGKSKKLKSVKELLGITIMERSSFEKNPIDFLEAKGYKEVKKDLIIKLPKYSLFELENGRKRMLASAGELQKGNELALPSKYVNFLYLASHYEKLKGSPEDNEQKQLFVEQHKHYLDEIIEQISEFSKRVILADANLDKVLSAYNKHRDKPIREQAENIIHLFTLTNLGAPAAFKYFDTTIDRKRYTSTKEVLDATLIHQSITGLYETRIDLSQLGGDGGEAAAKGSSPAPGGIPWLMKKPLQLTTLVPLQEYEERLLKQTMLTGSYKEKLQSLFLKYDALWQHWENQVGHRRIKPHHIATGTVNPRPQKQYPINPKAKASIQTVINDLLKQGVLIQQNSIMNTPVYPVPKPDGKWRMVLDYREVNKTIPLIAAQNQHSAGILSSIFRGKYKTTLDLSNGFWAHSITPESYWLTAFTWLGQQYCWTRLPQGFLNSPALFNADVVDLLKEVPNVQVYVDDIYISHDDPREHLEQLEKVFSLLLNAGYVVSLKKSEIAQHEVEFLGFNITKEGRGLTETFKQKLLNITPPRDLKQLQSILGKLNFARNFIPNFSELVKPLYNIIATAPGKYITWTTDNSQQLQNIISMLNSAENLEERNPEVRLIMKVNTSPSAGYIRFYNEFAKRPIMYLNYVYTKAEVKFTNTEKLLTTIHKGLIKALDLGMGQEILVYSPIVSMTKIQKTPLPERKALPIRWITWMSYLEDPRIQFHYDKTLPELQQVPTVTDDIIAKIKHPSEFSMVFYTDGSAIKHPNVNKSHNAGMGIAQVQFKPEFTVINTWSIPLGDHTAQLAEVAAVEFACKKALKIDGPVLIVTDSFYVAESVNKELPYWQSNGFFNNKKKPLKHVSKWKSIADCIQLKPDIIIIHEKGHQPTASTFHTEGNNLADKLATQGSYVVNAGKRTADGSEFEKRTADGSEFESPKKKAKVE

SEQ ID NO: 7611 - protein, 2176 aa, synthetic construct
MPAAKRVKLDGGDKKYSIGLDIGTNSVGWAVITDEYKVPSKKFKVLGNTDRHSIKKNLIGALLFDSGETAEATRLKRTARRRYTRRKNRICYLQEIFSNEMAKVDDSFFHRLEESFLVEEDKKHERHPIFGNIVDEVAYHEKYPTIYHLRKKLVDSTDKADLRLIYLALAHMIKFRGHFLIEGDLNPDNSDVDKLFIQLVQTYNQLFEENPINASGVDAKAILSARLSKSRRLENLIAQLPGEKKNGLFGNLIALSLGLTPNFKSNFDLAEDAKLQLSKDTYDDDLDNLLAQIGDQYADLFLAAKNLSDAILLSDILRVNTEITKAPLSASMIKRYDEHHQDLTLLKALVRQQLPEKYKEIFFDQSKNGYAGYIDGGASQEEFYKFIKPILEKMDGTEELLVKLNREDLLRKQRTFDNGSIPHQIHLGELHAILRRQEDFYPFLKDNREKIEKILTFRIPYYVGPLARGNSRFAWMTRKSEETITPWNFEEVVDKGASAQSFIERMTNFDKNLPNEKVLPKHSLLYEYFTVYNELTKVKYVTEGMRKPAFLSGEQKKAIVDLLFKTNRKVTVKQLKEDYFKKIECFDSVEISGVEDRFNASLGTYHDLLKIIKDKDFLDNEENEDILEDIVLTLTLFEDREMIEERLKTYAHLFDDKVMKQLKRRRYTGWGRLSRKLINGIRDKQSGKTILDFLKSDGFANRNFMQLIHDDSLTFKEDIQKAQVSGQGDSLHEHIANLAGSPAIKKGILQTVKVVDELVKVMGRHKPENIVIEMARENQTTQKGQKNSRERMKRIEEGIKELGSQILKEHPVENTQLQNEKLYLYYLQNGRDMYVDQELDINRLSDYDVDHIVPQSFLKDDSIDNKVLTRSDKARGKSDNVPSEEVVKKMKNYWRQLLNAKLITQRKFDNLTKAERGGLSELDKAGFIKRQLVETRQITKHVAQILDSRMNTKYDENDKLIREVKVITLKSKLVSDFRKDFQFYKVREINNYHHAHDAYLNAVVGTALIKKYPKLESEFVYGDYKVYDVRKMIAKSEQEIGKATAKYFFYSNIMNFFKTEITLANGEIRKRPLIETNGETGEIVWDKGRDFATVRKVLSMPQVNIVKKTEVQTGGFSKESILPKRNSDKLIARKKDWDPKKYGGFDSPTVAYSVLVVAKVEKGKSKKLKSVKELLGITIMERSSFEKNPIDFLEAKGYKEVKKDLIIKLPKYSLFELENGRKRMLASAGELQKGNELALPSKYVNFLYLASHYEKLKGSPEDNEQKQLFVEQHKHYLDEIIEQISEFSKRVILADANLDKVLSAYNKHRDKPIREQAENIIHLFTLTNLGAPAAFKYFDTTIDRKRYTSTKEVLDATLIHQSITGLYETRIDLSQLGGDGGEAAAKGSSPAPGGMDPLQLLQPLEAEIKGTKLKAHWNSGATITCVPQAFLEEEVPIKNIWIKTIHGEKEQPVYYLTFKIQGRKVEAEVISSPYDYILVSPSDIPWLMKKPLQLTTLVPLQEYEERLLKQTMLTGSYKEKLQSLFLKYDALWQHWENQVGHRRIKPHHIATGTVNPRPQKQYPINPKAKASIQTVINDLLKQGVLIQQNSIMNTPVYPVPKPDGKWRMVLDYREVNKTIPLIAAQNQHSAGILSSIFRGKYKTTLDLSNGFWAHSITPESYWLTAFTWLGQQYCWTRLPQGFLNSPALFNADVVDLLKEVPNVQVYVDDIYISHDDPREHLEQLEKVFSLLLNAGYVVSLKKSEIAQHEVEFLGFNITKEGRGLTETFKQKLLNITPPRDLKQLQSILGKLNFARNFIPNFSELVKPLYNIIATAPGKYITWTTDNSQQLQNIISMLNSAENLEERNPEVRLIMKVNTSPSAGYIRFYNEFAKRPIMYLNYVYTKAEVKFTNTEKLLTTIHKGLIKALDLGMGQEILVYSPIVSMTKIQKTPLPERKALPIRWITWMSYLEDPRIQFHYDKTLPELQQVPTVTDDIIAKIKHPSEFSMVFYTDGSAIKHPNVNKSHNAGMGIAQVQFKPEFTVINTWSIPLGDHTAQLAEVAAVEFACKKALKIDGPVLIVTDSFYVAESVNKELPYWQSNGFFNNKKKPLKHVSKWKSIADCIQLKPDIIIIHEKGHQPTASTFHTEGNNLADKLATQGSYVVNAGKRTADGSEFEKRTADGSEFESPKKKAKVE

SEQ ID NO: 7612 - protein, 2098 aa, synthetic construct
MPAAKRVKLDGGDKKYSIGLDIGTNSVGWAVITDEYKVPSKKFKVLGNTDRHSIKKNLIGALLFDSGETAEATRLKRTARRRYTRRKNRICYLQEIFSNEMAKVDDSFFHRLEESFLVEEDKKHERHPIFGNIVDEVAYHEKYPTIYHLRKKLVDSTDKADLRLIYLALAHMIKFRGHFLIEGDLNPDNSDVDKLFIQLVQTYNQLFEENPINASGVDAKAILSARLSKSRRLENLIAQLPGEKKNGLFGNLIALSLGLTPNFKSNFDLAEDAKLQLSKDTYDDDLDNLLAQIGDQYADLFLAAKNLSDAILLSDILRVNTEITKAPLSASMIKRYDEHHQDLTLLKALVRQQLPEKYKEIFFDQSKNGYAGYIDGGASQEEFYKFIKPILEKMDGTEELLVKLNREDLLRKQRTFDNGSIPHQIHLGELHAILRRQEDFYPFLKDNREKIEKILTFRIPYYVGPLARGNSRFAWMTRKSEETITPWNFEEVVDKGASAQSFIERMTNFDKNLPNEKVLPKHSLLYEYFTVYNELTKVKYVTEGMRKPAFLSGEQKKAIVDLLFKTNRKVTVKQLKEDYFKKIECFDSVEISGVEDRFNASLGTYHDLLKIIKDKDFLDNEENEDILEDIVLTLTLFEDREMIEERLKTYAHLFDDKVMKQLKRRRYTGWGRLSRKLINGIRDKQSGKTILDFLKSDGFANRNFMQLIHDDSLTFKEDIQKAQVSGQGDSLHEHIANLAGSPAIKKGILQTVKVVDELVKVMGRHKPENIVIEMARENQTTQKGQKNSRERMKRIEEGIKELGSQILKEHPVENTQLQNEKLYLYYLQNGRDMYVDQELDINRLSDYDVDHIVPQSFLKDDSIDNKVLTRSDKARGKSDNVPSEEVVKKMKNYWRQLLNAKLITQRKFDNLTKAERGGLSELDKAGFIKRQLVETRQITKHVAQILDSRMNTKYDENDKLIREVKVITLKSKLVSDFRKDFQFYKVREINNYHHAHDAYLNAVVGTALIKKYPKLESEFVYGDYKVYDVRKMIAKSEQEIGKATAKYFFYSNIMNFFKTEITLANGEIRKRPLIETNGETGEIVWDKGRDFATVRKVLSMPQVNIVKKTEVQTGGFSKESILPKRNSDKLIARKKDWDPKKYGGFDSPTVAYSVLVVAKVEKGKSKKLKSVKELLGITIMERSSFEKNPIDFLEAKGYKEVKKDLIIKLPKYSLFELENGRKRMLASAGELQKGNELALPSKYVNFLYLASHYEKLKGSPEDNEQKQLFVEQHKHYLDEIIEQISEFSKRVILADANLDKVLSAYNKHRDKPIREQAENIIHLFTLTNLGAPAAFKYFDTTIDRKRYTSTKEVLDATLIHQSITGLYETRIDLSQLGGDGGEAAAKPAPGSSGGTAPLEEEYRLFLEAPIQNVTLLEQWKREIPKVWAEINPPGLASTQAPIHVQLLSTALPVRVRQYPITLEAKRSLRETIRKFRAAGILRPVHSPWNTPLLPVRKSGTSEYRMVQDLREVNKRVETIHPTVPNPYTLLSLLPPDRIWYSVLDLKDAFFCIPLAPESQLIFAFEWADAEEGESGQLTWTRLPQGFKNSPTLFNEALNRDLQGFRLDHPSVSLLQYVDDLLIAADTQAACLSATRDLLMTLAELGYRVSGKKAQLCQEEVTYLGFKIHKGSRSLSNSRTQAILQIPVPKTKRQVREFLGKIGYCRLFIPGFAELAQPLYAATRPGNDPLVWGEKEEEAFQSLKLALTQPPALALPSLDKPFQLFVEETSGAAKGVLTQALGPWKRPVAYLSKRLDPVAAGWPRCLRAIAAAALLTREASKLTFGQDIEITSSHNLESLLRSPPDKWLTNARITQYQVLLLDPPRVRFKQTAALNPATLLPETDDTLPIHHCLDTLDSLTSTRPDLTDQPLAQAEATLFTDGSSYIRDGKRYAGAAVVTLDSVIWAEPLPIGTSAQKAELIALTKALEWSKDKSVNIYTDSRYAFATLHVHGMIYRERGWLTAGGKAIKNAPEILALLTAVWLPKRVAVMHCKGHQKDDAPTSTGNRRADEVAREVAIRPLSTQATISAGKRTADGSEFEKRTADGSEFESPKKKAKVE

SEQ ID NO: 7613 - protein, 2102 aa, synthetic construct
MPAAKRVKLDGGDKKYSIGLDIGTNSVGWAVITDEYKVPSKKFKVLGNTDRHSIKKNLIGALLFDSGETAEATRLKRTARRRYTRRKNRICYLQEIFSNEMAKVDDSFFHRLEESFLVEEDKKHERHPIFGNIVDEVAYHEKYPTIYHLRKKLVDSTDKADLRLIYLALAHMIKFRGHFLIEGDLNPDNSDVDKLFIQLVQTYNQLFEENPINASGVDAKAILSARLSKSRRLENLIAQLPGEKKNGLFGNLIALSLGLTPNFKSNFDLAEDAKLQLSKDTYDDDLDNLLAQIGDQYADLFLAAKNLSDAILLSDILRVNTEITKAPLSASMIKRYDEHHQDLTLLKALVRQQLPEKYKEIFFDQSKNGYAGYIDGGASQEEFYKFIKPILEKMDGTEELLVKLNREDLLRKQRTFDNGSIPHQIHLGELHAILRRQEDFYPFLKDNREKIEKILTFRIPYYVGPLARGNSRFAWMTRKSEETITPWNFEEVVDKGASAQSFIERMTNFDKNLPNEKVLPKHSLLYEYFTVYNELTKVKYVTEGMRKPAFLSGEQKKAIVDLLFKTNRKVTVKQLKEDYFKKIECFDSVEISGVEDRFNASLGTYHDLLKIIKDKDFLDNEENEDILEDIVLTLTLFEDREMIEERLKTYAHLFDDKVMKQLKRRRYTGWGRLSRKLINGIRDKQSGKTILDFLKSDGFANRNFMQLIHDDSLTFKEDIQKAQVSGQGDSLHEHIANLAGSPAIKKGILQTVKVVDELVKVMGRHKPENIVIEMARENQTTQKGQKNSRERMKRIEEGIKELGSQILKEHPVENTQLQNEKLYLYYLQNGRDMYVDQELDINRLSDYDVDHIVPQSFLKDDSIDNKVLTRSDKARGKSDNVPSEEVVKKMKNYWRQLLNAKLITQRKFDNLTKAERGGLSELDKAGFIKRQLVETRQITKHVAQILDSRMNTKYDENDKLIREVKVITLKSKLVSDFRKDFQFYKVREINNYHHAHDAYLNAVVGTALIKKYPKLESEFVYGDYKVYDVRKMIAKSEQEIGKATAKYFFYSNIMNFFKTEITLANGEIRKRPLIETNGETGEIVWDKGRDFATVRKVLSMPQVNIVKKTEVQTGGFSKESILPKRNSDKLIARKKDWDPKKYGGFDSPTVAYSVLVVAKVEKGKSKKLKSVKELLGITIMERSSFEKNPIDFLEAKGYKEVKKDLIIKLPKYSLFELENGRKRMLASAGELQKGNELALPSKYVNFLYLASHYEKLKGSPEDNEQKQLFVEQHKHYLDEIIEQISEFSKRVILADANLDKVLSAYNKHRDKPIREQAENIIHLFTLTNLGAPAAFKYFDTTIDRKRYTSTKEVLDATLIHQSITGLYETRIDLSQLGGDGGEAAAKPAPGSSGGTVSLQDEHRLFDIPVTTSLPDVWLQDFPQAWAETGGLGRAKCQAPIIIDLKPTAVPVSIKQYPMSLEAHMGIRQHIIKFLELGVLRPCRSPWNTPLLPVKKPGTQDYRPVQDLREINKRTVDIHPTVPNPYNLLSTLKPDYSWYTVLDLKDAFFCLPLAPQSQELFAFEWKDPERGISGQLTWTRLPQGFKNSPTLFNEALHRDLTDFRTQHPEVTLLQYVDDLLLAAPTKKACTQGTRHLLQELGEKGYRASAKKAQICQTKVTYLGYILSEGKRWLTPGRIETVARIPPPRNPREVREFLGTAGFCRLWIPGFAELAAPLYALTKPSTPFTWQTEHQLAFEALKKALLSAPALGLPDTSKPFTLFLDERQGIAKGVLTQKLGPWKRPVAYLSKKLDPVAAGWPPCLRIMAATAMLVKDSAKLTLGQPLTVITPHTLEAIVRQPPDRWITNARLTHYQALLLDTDRVQFGPPVTLNPATLLPVPENQPSPHDCRQVLAETHGTREDLKDQELPDADHTWYTDGSSYLDSGTRRAGAAVVDGHNTIWAQSLPPGTSAQKAELIALTKALELSKGKKANIYTDSRYAFATAHTHGSIYERRGWLTSEGKEIKNKAEIIALLKALFLPQEVAIIHCPGHQKGQDPVAVGNRQADRVARQAAMAEVLTLATEPDNTSHITAGKRTADGSEFEKRTADGSEFESPKKKAKVE

SEQ ID NO: 7614 - protein, 2173 aa, synthetic construct
MPAAKRVKLDGGDKKYSIGLDIGTNSVGWAVITDEYKVPSKKFKVLGNTDRHSIKKNLIGALLFDSGETAEATRLKRTARRRYTRRKNRICYLQEIFSNEMAKVDDSFFHRLEESFLVEEDKKHERHPIFGNIVDEVAYHEKYPTIYHLRKKLVDSTDKADLRLIYLALAHMIKFRGHFLIEGDLNPDNSDVDKLFIQLVQTYNQLFEENPINASGVDAKAILSARLSKSRRLENLIAQLPGEKKNGLFGNLIALSLGLTPNFKSNFDLAEDAKLQLSKDTYDDDLDNLLAQIGDQYADLFLAAKNLSDAILLSDILRVNTEITKAPLSASMIKRYDEHHQDLTLLKALVRQQLPEKYKEIFFDQSKNGYAGYIDGGASQEEFYKFIKPILEKMDGTEELLVKLNREDLLRKQRTFDNGSIPHQIHLGELHAILRRQEDFYPFLKDNREKIEKILTFRIPYYVGPLARGNSRFAWMTRKSEETITPWNFEEVVDKGASAQSFIERMTNFDKNLPNEKVLPKHSLLYEYFTVYNELTKVKYVTEGMRKPAFLSGEQKKAIVDLLFKTNRKVTVKQLKEDYFKKIECFDSVEISGVEDRFNASLGTYHDLLKIIKDKDFLDNEENEDILEDIVLTLTLFEDREMIEERLKTYAHLFDDKVMKQLKRRRYTGWGRLSRKLINGIRDKQSGKTILDFLKSDGFANRNFMQLIHDDSLTFKEDIQKAQVSGQGDSLHEHIANLAGSPAIKKGILQTVKVVDELVKVMGRHKPENIVIEMARENQTTQKGQKNSRERMKRIEEGIKELGSQILKEHPVENTQLQNEKLYLYYLQNGRDMYVDQELDINRLSDYDVDHIVPQSFLKDDSIDNKVLTRSDKARGKSDNVPSEEVVKKMKNYWRQLLNAKLITQRKFDNLTKAERGGLSELDKAGFIKRQLVETRQITKHVAQILDSRMNTKYDENDKLIREVKVITLKSKLVSDFRKDFQFYKVREINNYHHAHDAYLNAVVGTALIKKYPKLESEFVYGDYKVYDVRKMIAKSEQEIGKATAKYFFYSNIMNFFKTEITLANGEIRKRPLIETNGETGEIVWDKGRDFATVRKVLSMPQVNIVKKTEVQTGGFSKESILPKRNSDKLIARKKDWDPKKYGGFDSPTVAYSVLVVAKVEKGKSKKLKSVKELLGITIMERSSFEKNPIDFLEAKGYKEVKKDLIIKLPKYSLFELENGRKRMLASAGELQKGNELALPSKYVNFLYLASHYEKLKGSPEDNEQKQLFVEQHKHYLDEIIEQISEFSKRVILADANLDKVLSAYNKHRDKPIREQAENIIHLFTLTNLGAPAAFKYFDTTIDRKRYTSTKEVLDATLIHQSITGLYETRIDLSQLGGDGGEAAAKPAPGSSGGMDLLKPLTVERKGVKIKGYWNSQADITCVPKDLLQGEEPVRQQNVTTIHGTQEGDVYYVNLKIDGRRINTEVIGTTLDYAIITPGDVPWILKKPLELTIKLDLEEQQGTLLNNSILSKKGKEELKQLFEKYSALWQSWENQVGHRRIRPHKIATGTVKPTPQKQYHINPKAKPDIQIVINDLLKQGVLIQKESTMNTPVYPVPKPNGRWRMVLDYRAVNKVTPLIAVQNQHSYGILGSLFKGRYKTTIDLSNGFWAHPIVPEDYWITAFTWQGKQYCWTVLPQGFLNSPGLFTGDVVDLLQGIPNVEVYVDDVYISHDSEKEHLEYLDILFNRLKEAGYIISLKKSNIANSIVDFLGFQITNEGRGLTDTFKEKLENITAPTTLKQLQSILGLLNFARNFIPDFTELIAPLYALIPKSTKNYVPWQIEHSTTLETLITKLNGAEYLQGRKGDKTLIMKVNASYTTGYIRYYNEGEKKPISYVSIVFSKTELKFTELEKLLTTVHKGLLKALDLSMGQNIHVYSPIVSMQNIQKTPQTAKKALASRWLSWLSYLEDPRIRFFYDPQMPALKDLPAVDTGKDNKKHPSNFQHIFYTDGSAITSPTKEGHLNAGMGIVYFINKDGNLQKQQEWSISLGNHTAQFAEIAAFEFALKKCLPLGGNILVVTDSNYVAKAYNEELDVWASNGFVNNRKKPLKHISKWKSVADLKRLRPDVVVTHEPGHQKLDSSPHAYGNNLADQLATQASFKVHAGKRTADGSEFEKRTADGSEFESPKKKAKVE

SEQ ID NO: 7615 - protein, 2095 aa, synthetic construct
MPAAKRVKLDGGDKKYSIGLDIGTNSVGWAVITDEYKVPSKKFKVLGNTDRHSIKKNLIGALLFDSGETAEATRLKRTARRRYTRRKNRICYLQEIFSNEMAKVDDSFFHRLEESFLVEEDKKHERHPIFGNIVDEVAYHEKYPTIYHLRKKLVDSTDKADLRLIYLALAHMIKFRGHFLIEGDLNPDNSDVDKLFIQLVQTYNQLFEENPINASGVDAKAILSARLSKSRRLENLIAQLPGEKKNGLFGNLIALSLGLTPNFKSNFDLAEDAKLQLSKDTYDDDLDNLLAQIGDQYADLFLAAKNLSDAILLSDILRVNTEITKAPLSASMIKRYDEHHQDLTLLKALVRQQLPEKYKEIFFDQSKNGYAGYIDGGASQEEFYKFIKPILEKMDGTEELLVKLNREDLLRKQRTFDNGSIPHQIHLGELHAILRRQEDFYPFLKDNREKIEKILTFRIPYYVGPLARGNSRFAWMTRKSEETITPWNFEEVVDKGASAQSFIERMTNFDKNLPNEKVLPKHSLLYEYFTVYNELTKVKYVTEGMRKPAFLSGEQKKAIVDLLFKTNRKVTVKQLKEDYFKKIECFDSVEISGVEDRFNASLGTYHDLLKIIKDKDFLDNEENEDILEDIVLTLTLFEDREMIEERLKTYAHLFDDKVMKQLKRRRYTGWGRLSRKLINGIRDKQSGKTILDFLKSDGFANRNFMQLIHDDSLTFKEDIQKAQVSGQGDSLHEHIANLAGSPAIKKGILQTVKVVDELVKVMGRHKPENIVIEMARENQTTQKGQKNSRERMKRIEEGIKELGSQILKEHPVENTQLQNEKLYLYYLQNGRDMYVDQELDINRLSDYDVDHIVPQSFLKDDSIDNKVLTRSDKARGKSDNVPSEEVVKKMKNYWRQLLNAKLITQRKFDNLTKAERGGLSELDKAGFIKRQLVETRQITKHVAQILDSRMNTKYDENDKLIREVKVITLKSKLVSDFRKDFQFYKVREINNYHHAHDAYLNAVVGTALIKKYPKLESEFVYGDYKVYDVRKMIAKSEQEIGKATAKYFFYSNIMNFFKTEITLANGEIRKRPLIETNGETGEIVWDKGRDFATVRKVLSMPQVNIVKKTEVQTGGFSKESILPKRNSDKLIARKKDWDPKKYGGFDSPTVAYSVLVVAKVEKGKSKKLKSVKELLGITIMERSSFEKNPIDFLEAKGYKEVKKDLIIKLPKYSLFELENGRKRMLASAGELQKGNELALPSKYVNFLYLASHYEKLKGSPEDNEQKQLFVEQHKHYLDEIIEQISEFSKRVILADANLDKVLSAYNKHRDKPIREQAENIIHLFTLTNLGAPAAFKYFDTTIDRKRYTSTKEVLDATLIHQSITGLYETRIDLSQLGGDGGEAAAKPAPGSSGGTLQLEEEYRLFEPESTQKQEMDIWLKNFPQAWAETGGMGTAHCQAPVLIQLKATATPISIRQYPMPHEAYQGIKPHIRRMLDQGILKPCQSPWNTPLLPVKKPGTEDYRPVQDLREVNKRVEDIHPTVPNPYNLLSTLPPSHPWYTVLDLKDAFFCLRLHSESQLLFAFEWRDPEIGLSGQLTWTRLPQGFKNSPTLFNEALHSDLADFRVRYPALVLLQYVDDLLLAAATRTECLEGTKALLETLGNKGYRASAKKAQICLQEVTYLGYSLKDGQRWLTKARKEAILSIPVPKNSRQVREFLGKAGYCRLFIPGFAELAAPLYPLTRPGTLFQWGTEQQLAFEDIKKALLSSPALGLPDITKPFELFIDENSGFAKGVLVQKLGPWKRPVAYLSKKLDTVASGWPPCLRMVAAIAILVKDAGKLTLGQPLTILTSHPVEALVRQPPNKWLSNARMTHYQAMLLDAERVHFGPTVSLNPATLLPLPSGGNHHDCLQILAETHGTRPDLTDQPLPDADLTWYTDGSSFIRNGEREAGAAVTTESEVIWAAPLPPGTSAQRAELIALTQALKMAEGKKLTVYTDSRYAFATTHVHGEIYRRRGWLTSEGKEIKNKNEILALLEALFLPKRLSIIHCPGHQKGDSPQAKGNRLADDTAKKAATETHSSLTVLPAGKRTADGSEFEKRTADGSEFESPKKKAKVE

SEQ ID NO: 7616 - protein, 2087 aa, synthetic construct
MPAAKRVKLDGGDKKYSIGLDIGTNSVGWAVITDEYKVPSKKFKVLGNTDRHSIKKNLIGALLFDSGETAEATRLKRTARRRYTRRKNRICYLQEIFSNEMAKVDDSFFHRLEESFLVEEDKKHERHPIFGNIVDEVAYHEKYPTIYHLRKKLVDSTDKADLRLIYLALAHMIKFRGHFLIEGDLNPDNSDVDKLFIQLVQTYNQLFEENPINASGVDAKAILSARLSKSRRLENLIAQLPGEKKNGLFGNLIALSLGLTPNFKSNFDLAEDAKLQLSKDTYDDDLDNLLAQIGDQYADLFLAAKNLSDAILLSDILRVNTEITKAPLSASMIKRYDEHHQDLTLLKALVRQQLPEKYKEIFFDQSKNGYAGYIDGGASQEEFYKFIKPILEKMDGTEELLVKLNREDLLRKQRTFDNGSIPHQIHLGELHAILRRQEDFYPFLKDNREKIEKILTFRIPYYVGPLARGNSRFAWMTRKSEETITPWNFEEVVDKGASAQSFIERMTNFDKNLPNEKVLPKHSLLYEYFTVYNELTKVKYVTEGMRKPAFLSGEQKKAIVDLLFKTNRKVTVKQLKEDYFKKIECFDSVEISGVEDRFNASLGTYHDLLKIIKDKDFLDNEENEDILEDIVLTLTLFEDREMIEERLKTYAHLFDDKVMKQLKRRRYTGWGRLSRKLINGIRDKQSGKTILDFLKSDGFANRNFMQLIHDDSLTFKEDIQKAQVSGQGDSLHEHIANLAGSPAIKKGILQTVKVVDELVKVMGRHKPENIVIEMARENQTTQKGQKNSRERMKRIEEGIKELGSQILKEHPVENTQLQNEKLYLYYLQNGRDMYVDQELDINRLSDYDVDHIVPQSFLKDDSIDNKVLTRSDKARGKSDNVPSEEVVKKMKNYWRQLLNAKLITQRKFDNLTKAERGGLSELDKAGFIKRQLVETRQITKHVAQILDSRMNTKYDENDKLIREVKVITLKSKLVSDFRKDFQFYKVREINNYHHAHDAYLNAVVGTALIKKYPKLESEFVYGDYKVYDVRKMIAKSEQEIGKATAKYFFYSNIMNFFKTEITLANGEIRKRPLIETNGETGEIVWDKGRDFATVRKVLSMPQVNIVKKTEVQTGGFSKESILPKRNSDKLIARKKDWDPKKYGGFDSPTVAYSVLVVAKVEKGKSKKLKSVKELLGITIMERSSFEKNPIDFLEAKGYKEVKKDLIIKLPKYSLFELENGRKRMLASAGELQKGNELALPSKYVNFLYLASHYEKLKGSPEDNEQKQLFVEQHKHYLDEIIEQISEFSKRVILADANLDKVLSAYNKHRDKPIREQAENIIHLFTLTNLGAPAAFKYFDTTIDRKRYTSTKEVLDATLIHQSITGLYETRIDLSQLGGDGGEAAAKPAPGSSGGVPWLTQQPLQLTILVPLQEYQEKILSKTALPEDQKQQLKTLFVKYDNLWQHWENQVGHRKIRPHNIATGDYPPRPQKQYPINPKAKPSIQIVIDDLLKQGVLTPQNSTMNTPVYPVPKPDGRWRMVLDYREVNKTIPLTAAQNQHSAGILATIVRQKYKTTLDLANGFWAHPITPESYWLTAFTWQGKQYCWTRLPQGFLNSPALFNADVVDLLKEIPNVQVYVDDIYLSHDDPKEHVQQLEKVFQILLQAGYVVSLKKSEIGQKTVEFLGFNITKEGRGLTDTFKTKLLNITPPKDLKQLQSILGKLNFARNFIPNFAELVQPLYNLIAPAKGKYIEWSEENTKQLNMVIEALNTASNLEERLPEQRLVIKVNTSPSAGYVRYYNETGKKPIMYLNYVFSKAELKFSMLEKLLTTMHKALIKAMDLAMGQEILVYSPIVSMTKIQKTPLPERKALPIRWITWMTYLEDPRIQFHYDKTLPELKHIPDVYTSSQSPVKHPSQYEGVFYTDGSAIKSPDPTKSNNAGMGIVHATYKPEYQVLNQWSIPLGNHTAQMAEIAAVEFACKKALKIPGPVLVITDSFYVAESANKELPYWKSNGFVNNKKKPLKHISKWKSIAECLSMKPDITIQHEKGISLQIPVFILKGNALADKLATQGSYVVNAGKRTADGSEFEKRTADGSEFESPKKKAKVE

SEQ ID NO: 7617 - protein, 2094 aa, synthetic construct
MPAAKRVKLDGGDKKYSIGLDIGTNSVGWAVITDEYKVPSKKFKVLGNTDRHSIKKNLIGALLFDSGETAEATRLKRTARRRYTRRKNRICYLQEIFSNEMAKVDDSFFHRLEESFLVEEDKKHERHPIFGNIVDEVAYHEKYPTIYHLRKKLVDSTDKADLRLIYLALAHMIKFRGHFLIEGDLNPDNSDVDKLFIQLVQTYNQLFEENPINASGVDAKAILSARLSKSRRLENLIAQLPGEKKNGLFGNLIALSLGLTPNFKSNFDLAEDAKLQLSKDTYDDDLDNLLAQIGDQYADLFLAAKNLSDAILLSDILRVNTEITKAPLSASMIKRYDEHHQDLTLLKALVRQQLPEKYKEIFFDQSKNGYAGYIDGGASQEEFYKFIKPILEKMDGTEELLVKLNREDLLRKQRTFDNGSIPHQIHLGELHAILRRQEDFYPFLKDNREKIEKILTFRIPYYVGPLARGNSRFAWMTRKSEETITPWNFEEVVDKGASAQSFIERMTNFDKNLPNEKVLPKHSLLYEYFTVYNELTKVKYVTEGMRKPAFLSGEQKKAIVDLLFKTNRKVTVKQLKEDYFKKIECFDSVEISGVEDRFNASLGTYHDLLKIIKDKDFLDNEENEDILEDIVLTLTLFEDREMIEERLKTYAHLFDDKVMKQLKRRRYTGWGRLSRKLINGIRDKQSGKTILDFLKSDGFANRNFMQLIHDDSLTFKEDIQKAQVSGQGDSLHEHIANLAGSPAIKKGILQTVKVVDELVKVMGRHKPENIVIEMARENQTTQKGQKNSRERMKRIEEGIKELGSQILKEHPVENTQLQNEKLYLYYLQNGRDMYVDQELDINRLSDYDVDHIVPQSFLKDDSIDNKVLTRSDKARGKSDNVPSEEVVKKMKNYWRQLLNAKLITQRKFDNLTKAERGGLSELDKAGFIKRQLVETRQITKHVAQILDSRMNTKYDENDKLIREVKVITLKSKLVSDFRKDFQFYKVREINNYHHAHDAYLNAVVGTALIKKYPKLESEFVYGDYKVYDVRKMIAKSEQEIGKATAKYFFYSNIMNFFKTEITLANGEIRKRPLIETNGETGEIVWDKGRDFATVRKVLSMPQVNIVKKTEVQTGGFSKESILPKRNSDKLIARKKDWDPKKYGGFDSPTVAYSVLVVAKVEKGKSKKLKSVKELLGITIMERSSFEKNPIDFLEAKGYKEVKKDLIIKLPKYSLFELENGRKRMLASAGELQKGNELALPSKYVNFLYLASHYEKLKGSPEDNEQKQLFVEQHKHYLDEIIEQISEFSKRVILADANLDKVLSAYNKHRDKPIREQAENIIHLFTLTNLGAPAAFKYFDTTIDRKRYTSTKEVLDATLIHQSITGLYETRIDLSQLGGDGGEAAAKPAPGSSGGVLNLEEEYRLHEKPVPSSIDPSWLQLFPTVWAERAGMGLANQVPPVVVELRSGASPVAVRQYPMSKEAREGIRPHIQKFLDLGVLVPCRSPWNTPLLPVKKPGTNDYRPVQDLREINKRVQDIHPTVPNPYNLLSSLPPSYTWYSVLDLKDAFFCLRLHPNSQPLFAFEWKDPEKGNTGQLTWTRLPQGFKNSPTLFNEALHRDLAPFRALNPQVVLLQYVDDLLVAAPTYEDCKKGTQKLLQELSKLGYRVSAKKAQLCQREVTYLGYLLKEGKRWLTPARKATVMKIPVPTTPRQVREFLGTAGFCRLWIPGFASLAAPLYPLTKPSIPFIWTEEHQQAFDHIKKALLSAPALALPDLTKPFTLYIDERAGVARGVLTQTLGPWRRPVAYLSKKLDPVASGWPTCLKAVAAVALLLKDADKLTLGQNVTVIASHSLESIVRQPPDRWMTNARMTHYQSLLLNERVSFAPPAVLNPATLLPVESEATPVHRCSEILAEETGTRRDLEDQPLPGVPTWYTDGSSFITEGKRRAGAPIVDGKRTVWASSLPEGTSAQKAELVALTQALRLAEGKNINIYTDSRYAFATAHIHGAIYKQRGWLTSAGKDIKNKEEILALLEAIHLPRRVAIIHCPGHQRGSNPVATGNRRADEAAKQAALSTRVLAGTTKPAGKRTADGSEFEKRTADGSEFESPKKKAKVE

SEQ ID NO: 7618 - protein, 2094 aa, synthetic construct
MPAAKRVKLDGGDKKYSIGLDIGTNSVGWAVITDEYKVPSKKFKVLGNTDRHSIKKNLIGALLFDSGETAEATRLKRTARRRYTRRKNRICYLQEIFSNEMAKVDDSFFHRLEESFLVEEDKKHERHPIFGNIVDEVAYHEKYPTIYHLRKKLVDSTDKADLRLIYLALAHMIKFRGHFLIEGDLNPDNSDVDKLFIQLVQTYNQLFEENPINASGVDAKAILSARLSKSRRLENLIAQLPGEKKNGLFGNLIALSLGLTPNFKSNFDLAEDAKLQLSKDTYDDDLDNLLAQIGDQYADLFLAAKNLSDAILLSDILRVNTEITKAPLSASMIKRYDEHHQDLTLLKALVRQQLPEKYKEIFFDQSKNGYAGYIDGGASQEEFYKFIKPILEKMDGTEELLVKLNREDLLRKQRTFDNGSIPHQIHLGELHAILRRQEDFYPFLKDNREKIEKILTFRIPYYVGPLARGNSRFAWMTRKSEETITPWNFEEVVDKGASAQSFIERMTNFDKNLPNEKVLPKHSLLYEYFTVYNELTKVKYVTEGMRKPAFLSGEQKKAIVDLLFKTNRKVTVKQLKEDYFKKIECFDSVEISGVEDRFNASLGTYHDLLKIIKDKDFLDNEENEDILEDIVLTLTLFEDREMIEERLKTYAHLFDDKVMKQLKRRRYTGWGRLSRKLINGIRDKQSGKTILDFLKSDGFANRNFMQLIHDDSLTFKEDIQKAQVSGQGDSLHEHIANLAGSPAIKKGILQTVKVVDELVKVMGRHKPENIVIEMARENQTTQKGQKNSRERMKRIEEGIKELGSQILKEHPVENTQLQNEKLYLYYLQNGRDMYVDQELDINRLSDYDVDHIVPQSFLKDDSIDNKVLTRSDKARGKSDNVPSEEVVKKMKNYWRQLLNAKLITQRKFDNLTKAERGGLSELDKAGFIKRQLVETRQITKHVAQILDSRMNTKYDENDKLIREVKVITLKSKLVSDFRKDFQFYKVREINNYHHAHDAYLNAVVGTALIKKYPKLESEFVYGDYKVYDVRKMIAKSEQEIGKATAKYFFYSNIMNFFKTEITLANGEIRKRPLIETNGETGEIVWDKGRDFATVRKVLSMPQVNIVKKTEVQTGGFSKESILPKRNSDKLIARKKDWDPKKYGGFDSPTVAYSVLVVAKVEKGKSKKLKSVKELLGITIMERSSFEKNPIDFLEAKGYKEVKKDLIIKLPKYSLFELENGRKRMLASAGELQKGNELALPSKYVNFLYLASHYEKLKGSPEDNEQKQLFVEQHKHYLDEIIEQISEFSKRVILADANLDKVLSAYNKHRDKPIREQAENIIHLFTLTNLGAPAAFKYFDTTIDRKRYTSTKEVLDATLIHQSITGLYETRIDLSQLGGDGGEAAAKPAPGSSGGVLNLEEEYRLHEKPVPSSIDPSWLQLFPTVWAERAGMGLANQVPPVVVELRSGASPVAVRQYPMSKEAREGIRPHIQKFLDLGVLVPCRSPWNTPLLPVKKPGTNDYRPVQDLREINKRVQDIHPTVPNPYNLLSSLPPSYTWYSVLDLKDAFFCLRLHPNSQPLFAFEWKDPEKGNTGQLTWTRLPQGFKNSPTLFNEALHRDLAPFRALNPQVVLLQYVDDLLVAAPTYEDCKKGTQKLLQELSKLGYRVSAKKAQLCQREVTYLGYLLKEGKRWLTPARKATVMKIPVPTTPRQVREFLGKAGFCRLFIPGFASLAAPLYPLTKPSIPFIWTEEHQQAFDHIKKALLSAPALALPDLTKPFTLYIDERAGVARGVLTQTLGPWRRPVAYLSKKLDPVASGWPTCLKAVAAVALLLKDADKLTLGQNVTVIASHSLESIVRQPPDRWMTNARMTHYQSLLLNERVSFAPPAVLNPATLLPVESEATPVHRCSEILAEETGTRRDLEDQPLPGVPTWYTDGSSFITEGKRRAGAPIVDGKRTVWASSLPEGTSAQKAELVALTQALRLAEGKNINIYTDSRYAFATAHIHGAIYKQRGWLTSAGKDIKNKEEILALLEAIHLPRRVAIIHCPGHQRGSNPVATGNRRADEAAKQAALSTRVLAGTTKPAGKRTADGSEFEKRTADGSEFESPKKKAKVE

SEQ ID NO: 7619 - protein, 2218 aa, synthetic construct
MPAAKRVKLDGGDKKYSIGLDIGTNSVGWAVITDEYKVPSKKFKVLGNTDRHSIKKNLIGALLFDSGETAEATRLKRTARRRYTRRKNRICYLQEIFSNEMAKVDDSFFHRLEESFLVEEDKKHERHPIFGNIVDEVAYHEKYPTIYHLRKKLVDSTDKADLRLIYLALAHMIKFRGHFLIEGDLNPDNSDVDKLFIQLVQTYNQLFEENPINASGVDAKAILSARLSKSRRLENLIAQLPGEKKNGLFGNLIALSLGLTPNFKSNFDLAEDAKLQLSKDTYDDDLDNLLAQIGDQYADLFLAAKNLSDAILLSDILRVNTEITKAPLSASMIKRYDEHHQDLTLLKALVRQQLPEKYKEIFFDQSKNGYAGYIDGGASQEEFYKFIKPILEKMDGTEELLVKLNREDLLRKQRTFDNGSIPHQIHLGELHAILRRQEDFYPFLKDNREKIEKILTFRIPYYVGPLARGNSRFAWMTRKSEETITPWNFEEVVDKGASAQSFIERMTNFDKNLPNEKVLPKHSLLYEYFTVYNELTKVKYVTEGMRKPAFLSGEQKKAIVDLLFKTNRKVTVKQLKEDYFKKIECFDSVEISGVEDRFNASLGTYHDLLKIIKDKDFLDNEENEDILEDIVLTLTLFEDREMIEERLKTYAHLFDDKVMKQLKRRRYTGWGRLSRKLINGIRDKQSGKTILDFLKSDGFANRNFMQLIHDDSLTFKEDIQKAQVSGQGDSLHEHIANLAGSPAIKKGILQTVKVVDELVKVMGRHKPENIVIEMARENQTTQKGQKNSRERMKRIEEGIKELGSQILKEHPVENTQLQNEKLYLYYLQNGRDMYVDQELDINRLSDYDVDHIVPQSFLKDDSIDNKVLTRSDKARGKSDNVPSEEVVKKMKNYWRQLLNAKLITQRKFDNLTKAERGGLSELDKAGFIKRQLVETRQITKHVAQILDSRMNTKYDENDKLIREVKVITLKSKLVSDFRKDFQFYKVREINNYHHAHDAYLNAVVGTALIKKYPKLESEFVYGDYKVYDVRKMIAKSEQEIGKATAKYFFYSNIMNFFKTEITLANGEIRKRPLIETNGETGEIVWDKGRDFATVRKVLSMPQVNIVKKTEVQTGGFSKESILPKRNSDKLIARKKDWDPKKYGGFDSPTVAYSVLVVAKVEKGKSKKLKSVKELLGITIMERSSFEKNPIDFLEAKGYKEVKKDLIIKLPKYSLFELENGRKRMLASAGELQKGNELALPSKYVNFLYLASHYEKLKGSPEDNEQKQLFVEQHKHYLDEIIEQISEFSKRVILADANLDKVLSAYNKHRDKPIREQAENIIHLFTLTNLGAPAAFKYFDTTIDRKRYTSTKEVLDATLIHQSITGLYETRIDLSQLGGDGGEAAAKPAPGSSGGTLGDQGSRGSDPLPEPRVTLTVEGIPTEFLVNTGAEHSVLTKPMGKMGSKRTVVAGATGSKVYPWTTKRLLKIGQKQVTHSFLVIPECPAPLLGRDLLTKLKAQIQFSTEGPQVTWEDRPAMCLVLNLEEEYRLHEKPVPPSIDPSWLQLFPMVWAEKAGMGLANQVPPVVVELKSDASPVAVRQYPMSKEAREGIRPHIQRFLDLGILVPCQSPWNTPLLPVKKPGTNDYRPVQDLREVNKRVQDIHPTVPNPYNLLSSLPPSHTWYSVLDLKDAFFCLKLHPNSQPLFAFEWRDPEKGNTGQLTWTRLPQGFKNSPTLFDEALHRDLASFRALNPQVVMLQYVDDLLVAAPTYRDCKEGTRRLLQELSKLGYRVSAKKAQLCREEVTYLGYLLKGGKRWLTPARKATVMKIPTPTTPRQVREFLGTAGFCRLWIPGFASLAAPLYPLTREKVPFTWTEAHQEAFGRIKEALLSAPALALPDLTKPFALYVDEKEGVARGVLTQTLGPWRRPVAYLSKKLDPVASGWPTCLKAIAAVALLLKDADKLTLGQNVLVIAPHNLESIVRQPPDRWMTNARMTHYQSLLLNERVSFAPPAILNPATLLPVESDDTPIHICSEILAEETGTRPDLRDQPLPGVPAWYTDGSSFIMDGRRQAGAAIVDNKRTVWASNLPEGTSAQKAELIALTQALRLAEGKSINIYTDSRYAFATAHVHGAIYKQRGLLTSAGKDIKNKEEILALLEAIHLPKRVAIIHCPGHQRGTDPVATGNRKADEAAKQAAQSTRILTETTKNAGKRTADGSEFEKRTADGSEFESPKKKAKVE

SEQ ID NO: 7620 - protein, 2218 aa, synthetic construct
MPAAKRVKLDGGDKKYSIGLDIGTNSVGWAVITDEYKVPSKKFKVLGNTDRHSIKKNLIGALLFDSGETAEATRLKRTARRRYTRRKNRICYLQEIFSNEMAKVDDSFFHRLEESFLVEEDKKHERHPIFGNIVDEVAYHEKYPTIYHLRKKLVDSTDKADLRLIYLALAHMIKFRGHFLIEGDLNPDNSDVDKLFIQLVQTYNQLFEENPINASGVDAKAILSARLSKSRRLENLIAQLPGEKKNGLFGNLIALSLGLTPNFKSNFDLAEDAKLQLSKDTYDDDLDNLLAQIGDQYADLFLAAKNLSDAILLSDILRVNTEITKAPLSASMIKRYDEHHQDLTLLKALVRQQLPEKYKEIFFDQSKNGYAGYIDGGASQEEFYKFIKPILEKMDGTEELLVKLNREDLLRKQRTFDNGSIPHQIHLGELHAILRRQEDFYPFLKDNREKIEKILTFRIPYYVGPLARGNSRFAWMTRKSEETITPWNFEEVVDKGASAQSFIERMTNFDKNLPNEKVLPKHSLLYEYFTVYNELTKVKYVTEGMRKPAFLSGEQKKAIVDLLFKTNRKVTVKQLKEDYFKKIECFDSVEISGVEDRFNASLGTYHDLLKIIKDKDFLDNEENEDILEDIVLTLTLFEDREMIEERLKTYAHLFDDKVMKQLKRRRYTGWGRLSRKLINGIRDKQSGKTILDFLKSDGFANRNFMQLIHDDSLTFKEDIQKAQVSGQGDSLHEHIANLAGSPAIKKGILQTVKVVDELVKVMGRHKPENIVIEMARENQTTQKGQKNSRERMKRIEEGIKELGSQILKEHPVENTQLQNEKLYLYYLQNGRDMYVDQELDINRLSDYDVDHIVPQSFLKDDSIDNKVLTRSDKARGKSDNVPSEEVVKKMKNYWRQLLNAKLITQRKFDNLTKAERGGLSELDKAGFIKRQLVETRQITKHVAQILDSRMNTKYDENDKLIREVKVITLKSKLVSDFRKDFQFYKVREINNYHHAHDAYLNAVVGTALIKKYPKLESEFVYGDYKVYDVRKMIAKSEQEIGKATAKYFFYSNIMNFFKTEITLANGEIRKRPLIETNGETGEIVWDKGRDFATVRKVLSMPQVNIVKKTEVQTGGFSKESILPKRNSDKLIARKKDWDPKKYGGFDSPTVAYSVLVVAKVEKGKSKKLKSVKELLGITIMERSSFEKNPIDFLEAKGYKEVKKDLIIKLPKYSLFELENGRKRMLASAGELQKGNELALPSKYVNFLYLASHYEKLKGSPEDNEQKQLFVEQHKHYLDEIIEQISEFSKRVILADANLDKVLSAYNKHRDKPIREQAENIIHLFTLTNLGAPAAFKYFDTTIDRKRYTSTKEVLDATLIHQSITGLYETRIDLSQLGGDGGEAAAKPAPGSSGGTLGDQGSRGSDPLPEPRVTLTVEGIPTEFLVNTGAEHSVLTKPMGKMGSKRTVVAGATGSKVYPWTTKRLLKIGQKQVTHSFLVIPECPAPLLGRDLLTKLKAQIQFSTEGPQVTWEDRPAMCLVLNLEEEYRLHEKPVPPSIDPSWLQLFPMVWAEKAGMGLANQVPPVVVELKSDASPVAVRQYPMSKEAREGIRPHIQRFLDLGILVPCQSPWNTPLLPVKKPGTNDYRPVQDLREVNKRVQDIHPTVPNPYNLLSSLPPSHTWYSVLDLKDAFFCLKLHPNSQPLFAFEWRDPEKGNTGQLTWTRLPQGFKNSPTLFNEALHRDLASFRALNPQVVMLQYVDDLLVAAPTYRDCKEGTRRLLQELSKLGYRVSAKKAQLCREEVTYLGYLLKGGKRWLTPARKATVMKIPTPTTPRQVREFLGTAGFCRLWIPGFASLAAPLYPLTRPKVPFTWTEAHQEAFGRIKEALLSAPALALPDLTKPFALYVDEKEGVARGVLTQTLGPWRRPVAYLSKKLDPVASGWPTCLKAIAAVALLLKDADKLTLGQNVLVIAPHNLESIVRQPPDRWMTNARMTHYQSLLLNERVSFAPPAILNPATLLPVESDDTPIHICSEILAEETGTRPDLRDQPLPGVPAWYTDGSSFIMDGRRQAGAAIVDNKRTVWASNLPEGTSAQKAELIALTQALRLAEGKSINIYTDSRYAFATAHVHGAIYKQRGWLTSAGKDIKNKEEILALLEAIHLPKRVAIIHCPGHQRGTDPVATGNRKADEAAKQAAQSTRILTETTKNAGKRTADGSEFEKRTADGSEFESPKKKAKVE

SEQ ID NO: 7621 - protein, 2096 aa, synthetic construct
MPAAKRVKLDGGDKKYSIGLDIGTNSVGWAVITDEYKVPSKKFKVLGNTDRHSIKKNLIGALLFDSGETAEATRLKRTARRRYTRRKNRICYLQEIFSNEMAKVDDSFFHRLEESFLVEEDKKHERHPIFGNIVDEVAYHEKYPTIYHLRKKLVDSTDKADLRLIYLALAHMIKFRGHFLIEGDLNPDNSDVDKLFIQLVQTYNQLFEENPINASGVDAKAILSARLSKSRRLENLIAQLPGEKKNGLFGNLIALSLGLTPNFKSNFDLAEDAKLQLSKDTYDDDLDNLLAQIGDQYADLFLAAKNLSDAILLSDILRVNTEITKAPLSASMIKRYDEHHQDLTLLKALVRQQLPEKYKEIFFDQSKNGYAGYIDGGASQEEFYKFIKPILEKMDGTEELLVKLNREDLLRKQRTFDNGSIPHQIHLGELHAILRRQEDFYPFLKDNREKIEKILTFRIPYYVGPLARGNSRFAWMTRKSEETITPWNFEEVVDKGASAQSFIERMTNFDKNLPNEKVLPKHSLLYEYFTVYNELTKVKYVTEGMRKPAFLSGEQKKAIVDLLFKTNRKVTVKQLKEDYFKKIECFDSVEISGVEDRFNASLGTYHDLLKIIKDKDFLDNEENEDILEDIVLTLTLFEDREMIEERLKTYAHLFDDKVMKQLKRRRYTGWGRLSRKLINGIRDKQSGKTILDFLKSDGFANRNFMQLIHDDSLTFKEDIQKAQVSGQGDSLHEHIANLAGSPAIKKGILQTVKVVDELVKVMGRHKPENIVIEMARENQTTQKGQKNSRERMKRIEEGIKELGSQILKEHPVENTQLQNEKLYLYYLQNGRDMYVDQELDINRLSDYDVDHIVPQSFLKDDSIDNKVLTRSDKARGKSDNVPSEEVVKKMKNYWRQLLNAKLITQRKFDNLTKAERGGLSELDKAGFIKRQLVETRQITKHVAQILDSRMNTKYDENDKLIREVKVITLKSKLVSDFRKDFQFYKVREINNYHHAHDAYLNAVVGTALIKKYPKLESEFVYGDYKVYDVRKMIAKSEQEIGKATAKYFFYSNIMNFFKTEITLANGEIRKRPLIETNGETGEIVWDKGRDFATVRKVLSMPQVNIVKKTEVQTGGFSKESILPKRNSDKLIARKKDWDPKKYGGFDSPTVAYSVLVVAKVEKGKSKKLKSVKELLGITIMERSSFEKNPIDFLEAKGYKEVKKDLIIKLPKYSLFELENGRKRMLASAGELQKGNELALPSKYVNFLYLASHYEKLKGSPEDNEQKQLFVEQHKHYLDEIIEQISEFSKRVILADANLDKVLSAYNKHRDKPIREQAENIIHLFTLTNLGAPAAFKYFDTTIDRKRYTSTKEVLDATLIHQSITGLYETRIDLSQLGGDGGEAAAKPAPGSSGGTLNLEDEYRLYETSAEPEVSPGSTWLSDFPQAWAETGGMGLAVRQAPLIIPLKATSTPVSIKQYPMSQEAKLGIKPHIQRLLDQGILVPCQSPWNTPLLPVKKPGTNDYRPVQDLREVNKRVEDIHPTVPNPYNLLSGLPPSHRWYTVLDLKDAFFCLRLHPTSQPLFAFEWRDPGMGISGQLTWTRLPQGFKNSPTLFNEALHRDLADFRIQHPDLILLQYVDDILLAATSELDCQQGTRALLLTLGNLGYRASAKKAQLCQKQVKYLGYLLKEGQRWLTEARKETVMGQPTPKTPRQLREFLGKAGFCRLFIPGFAEMAAPLYPLTKPGTLFNWGPDQQKAYQEIKQALLTAPALGLPDLTKPFELFVDEKQGYAKGVLTQKLGPWRRPVAYLSKKLDPVAAGWPPCLRMVAAIAVLRKDAGKLTMGQPLVILAPHAVEALVKQPPDRWLSNARMTHYQAMLLDTDRVQFGPVVALNPATLLPLPEEGAPHDCLEILAETHGTRPDLTDQPIPDADHTWYTDGSSFLQEGQRKAGAAVTTETEVIWARALPAGTSAQRAELIALTQALKMAEGKRLNVYTDSRYAFATAHIHGEIYRRRGWLTSEGREIKNKSEILALLKALFLPKRLSIIHCLGHQKGDSAEARGNRLADQAAREAAIKTPPDTSTLLAGKRTADGSEFEKRTADGSEFESPKKKAKVE

SEQ ID NO: 7622 - protein, 2096 aa, synthetic construct
MPAAKRVKLDGGDKKYSIGLDIGTNSVGWAVITDEYKVPSKKFKVLGNTDRHSIKKNLIGALLFDSGETAEATRLKRTARRRYTRRKNRICYLQEIFSNEMAKVDDSFFHRLEESFLVEEDKKHERHPIFGNIVDEVAYHEKYPTIYHLRKKLVDSTDKADLRLIYLALAHMIKFRGHFLIEGDLNPDNSDVDKLFIQLVQTYNQLFEENPINASGVDAKAILSARLSKSRRLENLIAQLPGEKKNGLFGNLIALSLGLTPNFKSNFDLAEDAKLQLSKDTYDDDLDNLLAQIGDQYADLFLAAKNLSDAILLSDILRVNTEITKAPLSASMIKRYDEHHQDLTLLKALVRQQLPEKYKEIFFDQSKNGYAGYIDGGASQEEFYKFIKPILEKMDGTEELLVKLNREDLLRKQRTFDNGSIPHQIHLGELHAILRRQEDFYPFLKDNREKIEKILTFRIPYYVGPLARGNSRFAWMTRKSEETITPWNFEEVVDKGASAQSFIERMTNFDKNLPNEKVLPKHSLLYEYFTVYNELTKVKYVTEGMRKPAFLSGEQKKAIVDLLFKTNRKVTVKQLKEDYFKKIECFDSVEISGVEDRFNASLGTYHDLLKIIKDKDFLDNEENEDILEDIVLTLTLFEDREMIEERLKTYAHLFDDKVMKQLKRRRYTGWGRLSRKLINGIRDKQSGKTILDFLKSDGFANRNFMQLIHDDSLTFKEDIQKAQVSGQGDSLHEHIANLAGSPAIKKGILQTVKVVDELVKVMGRHKPENIVIEMARENQTTQKGQKNSRERMKRIEEGIKELGSQILKEHPVENTQLQNEKLYLYYLQNGRDMYVDQELDINRLSDYDVDHIVPQSFLKDDSIDNKVLTRSDKARGKSDNVPSEEVVKKMKNYWRQLLNAKLITQRKFDNLTKAERGGLSELDKAGFIKRQLVETRQITKHVAQILDSRMNTKYDENDKLIREVKVITLKSKLVSDFRKDFQFYKVREINNYHHAHDAYLNAVVGTALIKKYPKLESEFVYGDYKVYDVRKMIAKSEQEIGKATAKYFFYSNIMNFFKTEITLANGEIRKRPLIETNGETGEIVWDKGRDFATVRKVLSMPQVNIVKKTEVQTGGFSKESILPKRNSDKLIARKKDWDPKKYGGFDSPTVAYSVLVVAKVEKGKSKKLKSVKELLGITIMERSSFEKNPIDFLEAKGYKEVKKDLIIKLPKYSLFELENGRKRMLASAGELQKGNELALPSKYVNFLYLASHYEKLKGSPEDNEQKQLFVEQHKHYLDEIIEQISEFSKRVILADANLDKVLSAYNKHRDKPIREQAENIIHLFTLTNLGAPAAFKYFDTTIDRKRYTSTKEVLDATLIHQSITGLYETRIDLSQLGGDGGEAAAKPAPGSSGGTLNIEDEYRLHETSKGPDVPLGSTWLSDFPQAWAETGGMGLAFRQAPLIISLKATSTPVSIKQYPMSQEARLGIKPHIQRLLDQGILVPCQSPWNTPLLPVKKPGTNDYRPVQDLREVNKRVEDIHPTVPNPYNLLSGLPPSHQWYTVLDLKDAFFCLRLHPTSQSLFAFEWKDPEMGISGQLTWTRLPQGFKNSPTLFNEALHRDLADFRIQHPDLILLQYVDDLLLAATSELDCQQGTRALLQTLGDLGYRASAKKAQICQKQVKYLGYLLKEGQRWLTEARKETVMGQPTPKTPRQLREFLGKAGLCRLFIPGFAEMAAPLYPLTKPGTLFKWGPDQQKAYQEIKQALLTAPALGLPDLTKPFELFVDEKQGYAKGVLTQKLGPWRRPVAYLSKKLDPVAAGWPPCLRMVAAIAVLTKDVGKLTMGQPLVILAPHAVEALVKQPPDRWLSNARMTHYQALLLDTDRVQFGPIVALNPATLLPLPEEGLQHDCLDILAEAHGTRPDLTDQPLPDADHTWYTDGSSFLQEGQRRAGAAVTTETEVIWAKALPAGTSAQRAELIALTQALKMAAGKKLNVYTDSRYAFATAHIHGEIYRRRGWLTSEGKEIKNKDEILALLKALFLPKRLSIIHCPGHQKGNHAEARGNRMADQAAREVATRETPETSTLLAGKRTADGSEFEKRTADGSEFESPKKKAKVE

SEQ ID NO: 7623 - protein, 2096 aa, synthetic construct
MPAAKRVKLDGGDKKYSIGLDIGTNSVGWAVITDEYKVPSKKFKVLGNTDRHSIKKNLIGALLFDSGETAEATRLKRTARRRYTRRKNRICYLQEIFSNEMAKVDDSFFHRLEESFLVEEDKKHERHPIFGNIVDEVAYHEKYPTIYHLRKKLVDSTDKADLRLIYLALAHMIKFRGHFLIEGDLNPDNSDVDKLFIQLVQTYNQLFEENPINASGVDAKAILSARLSKSRRLENLIAQLPGEKKNGLFGNLIALSLGLTPNFKSNFDLAEDAKLQLSKDTYDDDLDNLLAQIGDQYADLFLAAKNLSDAILLSDILRVNTEITKAPLSASMIKRYDEHHQDLTLLKALVRQQLPEKYKEIFFDQSKNGYAGYIDGGASQEEFYKFIKPILEKMDGTEELLVKLNREDLLRKQRTFDNGSIPHQIHLGELHAILRRQEDFYPFLKDNREKIEKILTFRIPYYVGPLARGNSRFAWMTRKSEETITPWNFEEVVDKGASAQSFIERMTNFDKNLPNEKVLPKHSLLYEYFTVYNELTKVKYVTEGMRKPAFLSGEQKKAIVDLLFKTNRKVTVKQLKEDYFKKIECFDSVEISGVEDRFNASLGTYHDLLKIIKDKDFLDNEENEDILEDIVLTLTLFEDREMIEERLKTYAHLFDDKVMKQLKRRRYTGWGRLSRKLINGIRDKQSGKTILDFLKSDGFANRNFMQLIHDDSLTFKEDIQKAQVSGQGDSLHEHIANLAGSPAIKKGILQTVKVVDELVKVMGRHKPENIVIEMARENQTTQKGQKNSRERMKRIEEGIKELGSQILKEHPVENTQLQNEKLYLYYLQNGRDMYVDQELDINRLSDYDVDHIVPQSFLKDDSIDNKVLTRSDKARGKSDNVPSEEVVKKMKNYWRQLLNAKLITQRKFDNLTKAERGGLSELDKAGFIKRQLVETRQITKHVAQILDSRMNTKYDENDKLIREVKVITLKSKLVSDFRKDFQFYKVREINNYHHAHDAYLNAVVGTALIKKYPKLESEFVYGDYKVYDVRKMIAKSEQEIGKATAKYFFYSNIMNFFKTEITLANGEIRKRPLIETNGETGEIVWDKGRDFATVRKVLSMPQVNIVKKTEVQTGGFSKESILPKRNSDKLIARKKDWDPKKYGGFDSPTVAYSVLVVAKVEKGKSKKLKSVKELLGITIMERSSFEKNPIDFLEAKGYKEVKKDLIIKLPKYSLFELENGRKRMLASAGELQKGNELALPSKYVNFLYLASHYEKLKGSPEDNEQKQLFVEQHKHYLDEIIEQISEFSKRVILADANLDKVLSAYNKHRDKPIREQAENIIHLFTLTNLGAPAAFKYFDTTIDRKRYTSTKEVLDATLIHQSITGLYETRIDLSQLGGDGGEAAAKPAPGSSGGTLNIEDEHRLHETSKEPDVSLGSTWLSDFPQAWAETGGMGLAVRQAPLIIPLKATSTPVSIKQYPMSQEARLGIKPHIQRLLDQGILVPCQSPWNTPLLPVKKPGTNDYRPVQDLREVNKRVEDIHPTVPNPYNLLSGLPPSHQWYTVLDLKDAFFCLRLHPTSQPLFAFEWRDPEMGISGQLTWTRLPQGFKNSPTLFDEALHRDLADFRIQHPDLILLQYVDDLLLAATSELDCQQGTRALLQTLGNLGYRASAKKAQICQKQVKYLGYLLKEGQRWLTEARKETVMGQPTPKTPRQLREFLGTAGFCRLWIPGFAEMAAPLYPLTKTGTLFNWGPDQQKAYQEIKQALLTAPALGLPDLTKPFELFVDEKQGYAKGVLTQKLGPWRRPVAYLSKKLDPVAAGWPPCLRMVAAIAVLTKDAGKLTMGQPLVILAPHAVEALVKQPPDRWLSNARMTHYQALLLDTDRVQFGPVVALNPATLLPLPEEGLQHNCLDILAEAHGTRPDLTDQPLPDADHTWYTDGSSLLQEGQRKAGAAVTTETEVIWAKALPAGTSAQRAELIALTQALKMAEGKKLNVYTDSRYAFATAHIHGEIYRRRGLLTSEGKEIKNKDEILALLKALFLPKRLSIIHCPGHQKGHSAEARGNRMADQAARKAAITETPDTSTLLAGKRTADGSEFEKRTADGSEFESPKKKAKVE

SEQ ID NO: 7624 - protein, 2090 aa, synthetic construct
MPAAKRVKLDGGDKKYSIGLDIGTNSVGWAVITDEYKVPSKKFKVLGNTDRHSIKKNLIGALLFDSGETAEATRLKRTARRRYTRRKNRICYLQEIFSNEMAKVDDSFFHRLEESFLVEEDKKHERHPIFGNIVDEVAYHEKYPTIYHLRKKLVDSTDKADLRLIYLALAHMIKFRGHFLIEGDLNPDNSDVDKLFIQLVQTYNQLFEENPINASGVDAKAILSARLSKSRRLENLIAQLPGEKKNGLFGNLIALSLGLTPNFKSNFDLAEDAKLQLSKDTYDDDLDNLLAQIGDQYADLFLAAKNLSDAILLSDILRVNTEITKAPLSASMIKRYDEHHQDLTLLKALVRQQLPEKYKEIFFDQSKNGYAGYIDGGASQEEFYKFIKPILEKMDGTEELLVKLNREDLLRKQRTFDNGSIPHQIHLGELHAILRRQEDFYPFLKDNREKIEKILTFRIPYYVGPLARGNSRFAWMTRKSEETITPWNFEEVVDKGASAQSFIERMTNFDKNLPNEKVLPKHSLLYEYFTVYNELTKVKYVTEGMRKPAFLSGEQKKAIVDLLFKTNRKVTVKQLKEDYFKKIECFDSVEISGVEDRFNASLGTYHDLLKIIKDKDFLDNEENEDILEDIVLTLTLFEDREMIEERLKTYAHLFDDKVMKQLKRRRYTGWGRLSRKLINGIRDKQSGKTILDFLKSDGFANRNFMQLIHDDSLTFKEDIQKAQVSGQGDSLHEHIANLAGSPAIKKGILQTVKVVDELVKVMGRHKPENIVIEMARENQTTQKGQKNSRERMKRIEEGIKELGSQILKEHPVENTQLQNEKLYLYYLQNGRDMYVDQELDINRLSDYDVDHIVPQSFLKDDSIDNKVLTRSDKARGKSDNVPSEEVVKKMKNYWRQLLNAKLITQRKFDNLTKAERGGLSELDKAGFIKRQLVETRQITKHVAQILDSRMNTKYDENDKLIREVKVITLKSKLVSDFRKDFQFYKVREINNYHHAHDAYLNAVVGTALIKKYPKLESEFVYGDYKVYDVRKMIAKSEQEIGKATAKYFFYSNIMNFFKTEITLANGEIRKRPLIETNGETGEIVWDKGRDFATVRKVLSMPQVNIVKKTEVQTGGFSKESILPKRNSDKLIARKKDWDPKKYGGFDSPTVAYSVLVVAKVEKGKSKKLKSVKELLGITIMERSSFEKNPIDFLEAKGYKEVKKDLIIKLPKYSLFELENGRKRMLASAGELQKGNELALPSKYVNFLYLASHYEKLKGSPEDNEQKQLFVEQHKHYLDEIIEQISEFSKRVILADANLDKVLSAYNKHRDKPIREQAENIIHLFTLTNLGAPAAFKYFDTTIDRKRYTSTKEVLDATLIHQSITGLYETRIDLSQLGGDGGEAAAKPAPGSSGGTLQLDDEYRLYSPLVKPDQNIQFWLEQFPQAWAETAGMGLAKQVPPQVIQLKASATPVSVRQYPLSKEAQEGIRPHVQRLIQQGILVPVQSPWNTPLLPVRKPGTNDYRPVQDLREVNKRVQDIHPTVPNPYNLLCALPPQRSWYTVLDLKDAFFCLRLHPTSQPLFAFEWRDPGTGRTGQLTWTRLPQGFKNSPTIFDEALHRDLANFRIQHPQVTLLQYVDDLLLAGATKQDCLEGTKALLLELSDLGYRASAKKAQICRREVTYLGYSLRDGQRWLTEARKKTVVQIPAPTTAKQVREFLGTAGFCRLWIPGFATLAAPLYPLTKEKGEFSWAPEHQKAFDAIKKALLSAPALALPDVTKPFTLYVDERKGVARGVLTQTLGPWRRPVAYLSKKLDPVASGWPVCLKAIAAVAILVKDADKLTLGQNITVIAPHALENIVRQPPDRWMTNARMTHYQSLLLTERVTFAPPAALNPATLLPEETDEPVTHDCHQLLIEETGVRKDLTDIPLTGEVLTWFTDGSSYVVEGKRMAGAAVVDGTRTIWASSLPEGTSAQKAELMALTQALRLAEGKSINIYTDSRYAFATAHVHGAIYKQRGLLTSAGREIKNKEEILSLLEALHLPKRLAIIHCPGHQKAKDPISRGNQMADRVAKQAAQGVNLLAGKRTADGSEFEKRTADGSEFESPKKKAKVE

SEQ ID NO: 7625 - protein, 2096 aa, synthetic construct
MPAAKRVKLDGGDKKYSIGLDIGTNSVGWAVITDEYKVPSKKFKVLGNTDRHSIKKNLIGALLFDSGETAEATRLKRTARRRYTRRKNRICYLQEIFSNEMAKVDDSFFHRLEESFLVEEDKKHERHPIFGNIVDEVAYHEKYPTIYHLRKKLVDSTDKADLRLIYLALAHMIKFRGHFLIEGDLNPDNSDVDKLFIQLVQTYNQLFEENPINASGVDAKAILSARLSKSRRLENLIAQLPGEKKNGLFGNLIALSLGLTPNFKSNFDLAEDAKLQLSKDTYDDDLDNLLAQIGDQYADLFLAAKNLSDAILLSDILRVNTEITKAPLSASMIKRYDEHHQDLTLLKALVRQQLPEKYKEIFFDQSKNGYAGYIDGGASQEEFYKFIKPILEKMDGTEELLVKLNREDLLRKQRTFDNGSIPHQIHLGELHAILRRQEDFYPFLKDNREKIEKILTFRIPYYVGPLARGNSRFAWMTRKSEETITPWNFEEVVDKGASAQSFIERMTNFDKNLPNEKVLPKHSLLYEYFTVYNELTKVKYVTEGMRKPAFLSGEQKKAIVDLLFKTNRKVTVKQLKEDYFKKIECFDSVEISGVEDRFNASLGTYHDLLKIIKDKDFLDNEENEDILEDIVLTLTLFEDREMIEERLKTYAHLFDDKVMKQLKRRRYTGWGRLSRKLINGIRDKQSGKTILDFLKSDGFANRNFMQLIHDDSLTFKEDIQKAQVSGQGDSLHEHIANLAGSPAIKKGILQTVKVVDELVKVMGRHKPENIVIEMARENQTTQKGQKNSRERMKRIEEGIKELGSQILKEHPVENTQLQNEKLYLYYLQNGRDMYVDQELDINRLSDYDVDHIVPQSFLKDDSIDNKVLTRSDKARGKSDNVPSEEVVKKMKNYWRQLLNAKLITQRKFDNLTKAERGGLSELDKAGFIKRQLVETRQITKHVAQILDSRMNTKYDENDKLIREVKVITLKSKLVSDFRKDFQFYKVREINNYHHAHDAYLNAVVGTALIKKYPKLESEFVYGDYKVYDVRKMIAKSEQEIGKATAKYFFYSNIMNFFKTEITLANGEIRKRPLIETNGETGEIVWDKGRDFATVRKVLSMPQVNIVKKTEVQTGGFSKESILPKRNSDKLIARKKDWDPKKYGGFDSPTVAYSVLVVAKVEKGKSKKLKSVKELLGITIMERSSFEKNPIDFLEAKGYKEVKKDLIIKLPKYSLFELENGRKRMLASAGELQKGNELALPSKYVNFLYLASHYEKLKGSPEDNEQKQLFVEQHKHYLDEIIEQISEFSKRVILADANLDKVLSAYNKHRDKPIREQAENIIHLFTLTNLGAPAAFKYFDTTIDRKRYTSTKEVLDATLIHQSITGLYETRIDLSQLGGDGGEAAAKPAPGSSGGTLNIEDEYRLHETSKEPDVPLGSTWLSDFPQAWAETGGMGLAVRQAPLIIPLKATSTPVSIKQYPMSQEARLGIKPHIQRLLDQGILVPCQSPWNTPLLPVKKPGTNDYRPVQDLREVNKRVEDIHPTVPNPYNLLSGLPPSHQWYTVLDLKDAFFCLRLHPTSQPLFAFEWRDPEMGISGQLTWTRLPQGFKNSPTLFNEALHRDLADFRIQHPDLILLQYVDDLLLAATSEQDCQRGTRALLQTLGNLGYRASAKKAQICQKQVKYLGYLLKEGQRWLTEARKETVMGQPTPKTPRQLREFLGTAGFCRLWIPGFAEMAAPLYPLTKPGTLFNWGPDQQKAYQEIKQALLTAPALGLPDLTKPFELFVDEKQGYAKGVLTQKLGPWRRPVAYLSKKLDPVAAGWPPCLRMVAAIAVLTKDAGKLTMGQPLVILAPHAVEALVKQPPDRWLSNARMTHYQAMLLDTDRVQFGPVVALNPATLLPLPEKEAPHDCLEILAETHGTRPDLTDQPIPDADYTWYTDGSSFLQEGQRRAGAAVTTETEVIWARALPAGTSAQRAELIALTQALKMAEGKKLNVYTDSRYAFATAHVHGEIYRRRGWLTSEGREIKNKNEILALLKALFLPKRLSIIHCPGHQKGNSAEARGNRMADQAAREAAMKAVLETSTLLAGKRTADGSEFEKRTADGSEFESPKKKAKVE

SEQ ID NO: 7626 - protein, 2098 aa, synthetic construct
MPAAKRVKLDGGDKKYSIGLDIGTNSVGWAVITDEYKVPSKKFKVLGNTDRHSIKKNLIGALLFDSGETAEATRLKRTARRRYTRRKNRICYLQEIFSNEMAKVDDSFFHRLEESFLVEEDKKHERHPIFGNIVDEVAYHEKYPTIYHLRKKLVDSTDKADLRLIYLALAHMIKFRGHFLIEGDLNPDNSDVDKLFIQLVQTYNQLFEENPINASGVDAKAILSARLSKSRRLENLIAQLPGEKKNGLFGNLIALSLGLTPNFKSNFDLAEDAKLQLSKDTYDDDLDNLLAQIGDQYADLFLAAKNLSDAILLSDILRVNTEITKAPLSASMIKRYDEHHQDLTLLKALVRQQLPEKYKEIFFDQSKNGYAGYIDGGASQEEFYKFIKPILEKMDGTEELLVKLNREDLLRKQRTFDNGSIPHQIHLGELHAILRRQEDFYPFLKDNREKIEKILTFRIPYYVGPLARGNSRFAWMTRKSEETITPWNFEEVVDKGASAQSFIERMTNFDKNLPNEKVLPKHSLLYEYFTVYNELTKVKYVTEGMRKPAFLSGEQKKAIVDLLFKTNRKVTVKQLKEDYFKKIECFDSVEISGVEDRFNASLGTYHDLLKIIKDKDFLDNEENEDILEDIVLTLTLFEDREMIEERLKTYAHLFDDKVMKQLKRRRYTGWGRLSRKLINGIRDKQSGKTILDFLKSDGFANRNFMQLIHDDSLTFKEDIQKAQVSGQGDSLHEHIANLAGSPAIKKGILQTVKVVDELVKVMGRHKPENIVIEMARENQTTQKGQKNSRERMKRIEEGIKELGSQILKEHPVENTQLQNEKLYLYYLQNGRDMYVDQELDINRLSDYDVDHIVPQSFLKDDSIDNKVLTRSDKARGKSDNVPSEEVVKKMKNYWRQLLNAKLITQRKFDNLTKAERGGLSELDKAGFIKRQLVETRQITKHVAQILDSRMNTKYDENDKLIREVKVITLKSKLVSDFRKDFQFYKVREINNYHHAHDAYLNAVVGTALIKKYPKLESEFVYGDYKVYDVRKMIAKSEQEIGKATAKYFFYSNIMNFFKTEITLANGEIRKRPLIETNGETGEIVWDKGRDFATVRKVLSMPQVNIVKKTEVQTGGFSKESILPKRNSDKLIARKKDWDPKKYGGFDSPTVAYSVLVVAKVEKGKSKKLKSVKELLGITIMERSSFEKNPIDFLEAKGYKEVKKDLIIKLPKYSLFELENGRKRMLASAGELQKGNELALPSKYVNFLYLASHYEKLKGSPEDNEQKQLFVEQHKHYLDEIIEQISEFSKRVILADANLDKVLSAYNKHRDKPIREQAENIIHLFTLTNLGAPAAFKYFDTTIDRKRYTSTKEVLDATLIHQSITGLYETRIDLSQLGGDGGPAPGSSEAAAKGGTAPLEEEYRLFLEAPIQNVTLLEQWKREIPKVWAEINPPGLASTQAPIHVQLLSTALPVRVRQYPITLEAKRSLRETIRKFRAAGILRPVHSPWNTPLLPVRKSGTSEYRMVQDLREVNKRVETIHPTVPNPYTLLSLLPPDRIWYSVLDLKDAFFCIPLAPESQLIFAFEWADAEEGESGQLTWTRLPQGFKNSPTLFNEALNRDLQGFRLDHPSVSLLQYVDDLLIAADTQAACLSATRDLLMTLAELGYRVSGKKAQLCQEEVTYLGFKIHKGSRSLSNSRTQAILQIPVPKTKRQVREFLGTIGYCRLWIPGFAELAQPLYAATRPGNDPLVWGEKEEEAFQSLKLALTQPPALALPSLDKPFQLFVEETSGAAKGVLTQALGPWKRPVAYLSKRLDPVAAGWPRCLRAIAAAALLTREASKLTFGQDIEITSSHNLESLLRSPPDKWLTNARITQYQVLLLDPPRVRFKQTAALNPATLLPETDDTLPIHHCLDTLDSLTSTRPDLTDQPLAQAEATLFTDGSSYIRDGKRYAGAAVVTLDSVIWAEPLPIGTSAQKAELIALTKALEWSKDKSVNIYTDSRYAFATLHVHGMIYRERGWLTAGGKAIKNAPEILALLTAVWLPKRVAVMHCKGHQKDDAPTSTGNRRADEVAREVAIRPLSTQATISAGKRTADGSEFEKRTADGSEFESPKKKAKVE

SEQ ID NO: 7627 - protein, 2098 aa, synthetic construct
MPAAKRVKLDGGDKKYSIGLDIGTNSVGWAVITDEYKVPSKKFKVLGNTDRHSIKKNLIGALLFDSGETAEATRLKRTARRRYTRRKNRICYLQEIFSNEMAKVDDSFFHRLEESFLVEEDKKHERHPIFGNIVDEVAYHEKYPTIYHLRKKLVDSTDKADLRLIYLALAHMIKFRGHFLIEGDLNPDNSDVDKLFIQLVQTYNQLFEENPINASGVDAKAILSARLSKSRRLENLIAQLPGEKKNGLFGNLIALSLGLTPNFKSNFDLAEDAKLQLSKDTYDDDLDNLLAQIGDQYADLFLAAKNLSDAILLSDILRVNTEITKAPLSASMIKRYDEHHQDLTLLKALVRQQLPEKYKEIFFDQSKNGYAGYIDGGASQEEFYKFIKPILEKMDGTEELLVKLNREDLLRKQRTFDNGSIPHQIHLGELHAILRRQEDFYPFLKDNREKIEKILTFRIPYYVGPLARGNSRFAWMTRKSEETITPWNFEEVVDKGASAQSFIERMTNFDKNLPNEKVLPKHSLLYEYFTVYNELTKVKYVTEGMRKPAFLSGEQKKAIVDLLFKTNRKVTVKQLKEDYFKKIECFDSVEISGVEDRFNASLGTYHDLLKIIKDKDFLDNEENEDILEDIVLTLTLFEDREMIEERLKTYAHLFDDKVMKQLKRRRYTGWGRLSRKLINGIRDKQSGKTILDFLKSDGFANRNFMQLIHDDSLTFKEDIQKAQVSGQGDSLHEHIANLAGSPAIKKGILQTVKVVDELVKVMGRHKPENIVIEMARENQTTQKGQKNSRERMKRIEEGIKELGSQILKEHPVENTQLQNEKLYLYYLQNGRDMYVDQELDINRLSDYDVDHIVPQSFLKDDSIDNKVLTRSDKARGKSDNVPSEEVVKKMKNYWRQLLNAKLITQRKFDNLTKAERGGLSELDKAGFIKRQLVETRQITKHVAQILDSRMNTKYDENDKLIREVKVITLKSKLVSDFRKDFQFYKVREINNYHHAHDAYLNAVVGTALIKKYPKLESEFVYGDYKVYDVRKMIAKSEQEIGKATAKYFFYSNIMNFFKTEITLANGEIRKRPLIETNGETGEIVWDKGRDFATVRKVLSMPQVNIVKKTEVQTGGFSKESILPKRNSDKLIARKKDWDPKKYGGFDSPTVAYSVLVVAKVEKGKSKKLKSVKELLGITIMERSSFEKNPIDFLEAKGYKEVKKDLIIKLPKYSLFELENGRKRMLASAGELQKGNELALPSKYVNFLYLASHYEKLKGSPEDNEQKQLFVEQHKHYLDEIIEQISEFSKRVILADANLDKVLSAYNKHRDKPIREQAENIIHLFTLTNLGAPAAFKYFDTTIDRKRYTSTKEVLDATLIHQSITGLYETRIDLSQLGGDGGPAPGSSEAAAKGGTAPLEEEYRLFLEAPIQNVTLLEQWKREIPKVWAEINPPGLASTQAPIHVQLLSTALPVRVRQYPITLEAKRSLRETIRKFRAAGILRPVHSPWNTPLLPVRKSGTSEYRMVQDLREVNKRVETIHPTVPNPYTLLSLLPPDRIWYSVLDLKDAFFCIPLAPESQLIFAFEWADAEEGESGQLTWTRLPQGFKNSPTLFNEALNRDLQGFRLDHPSVSLLQYVDDLLIAADTQAACLSATRDLLMTLAELGYRVSGKKAQLCQEEVTYLGFKIHKGSRSLSNSRTQAILQIPVPKTKRQVREFLGKIGYCRLFIPGFAELAQPLYAATRPGNDPLVWGEKEEEAFQSLKLALTQPPALALPSLDKPFQLFVEETSGAAKGVLTQALGPWKRPVAYLSKRLDPVAAGWPRCLRAIAAAALLTREASKLTFGQDIEITSSHNLESLLRSPPDKWLTNARITQYQVLLLDPPRVRFKQTAALNPATLLPETDDTLPIHHCLDTLDSLTSTRPDLTDQPLAQAEATLFTDGSSYIRDGKRYAGAAVVTLDSVIWAEPLPIGTSAQKAELIALTKALEWSKDKSVNIYTDSRYAFATLHVHGMIYRERGWLTAGGKAIKNAPEILALLTAVWLPKRVAVMHCKGHQKDDAPTSTGNRRADEVAREVAIRPLSTQATISAGKRTADGSEFEKRTADGSEFESPKKKAKVE

SEQ ID NO: 7628 - protein, 2087 aa, synthetic construct
MPAAKRVKLDGGDKKYSIGLDIGTNSVGWAVITDEYKVPSKKFKVLGNTDRHSIKKNLIGALLFDSGETAEATRLKRTARRRYTRRKNRICYLQEIFSNEMAKVDDSFFHRLEESFLVEEDKKHERHPIFGNIVDEVAYHEKYPTIYHLRKKLVDSTDKADLRLIYLALAHMIKFRGHFLIEGDLNPDNSDVDKLFIQLVQTYNQLFEENPINASGVDAKAILSARLSKSRRLENLIAQLPGEKKNGLFGNLIALSLGLTPNFKSNFDLAEDAKLQLSKDTYDDDLDNLLAQIGDQYADLFLAAKNLSDAILLSDILRVNTEITKAPLSASMIKRYDEHHQDLTLLKALVRQQLPEKYKEIFFDQSKNGYAGYIDGGASQEEFYKFIKPILEKMDGTEELLVKLNREDLLRKQRTFDNGSIPHQIHLGELHAILRRQEDFYPFLKDNREKIEKILTFRIPYYVGPLARGNSRFAWMTRKSEETITPWNFEEVVDKGASAQSFIERMTNFDKNLPNEKVLPKHSLLYEYFTVYNELTKVKYVTEGMRKPAFLSGEQKKAIVDLLFKTNRKVTVKQLKEDYFKKIECFDSVEISGVEDRFNASLGTYHDLLKIIKDKDFLDNEENEDILEDIVLTLTLFEDREMIEERLKTYAHLFDDKVMKQLKRRRYTGWGRLSRKLINGIRDKQSGKTILDFLKSDGFANRNFMQLIHDDSLTFKEDIQKAQVSGQGDSLHEHIANLAGSPAIKKGILQTVKVVDELVKVMGRHKPENIVIEMARENQTTQKGQKNSRERMKRIEEGIKELGSQILKEHPVENTQLQNEKLYLYYLQNGRDMYVDQELDINRLSDYDVDHIVPQSFLKDDSIDNKVLTRSDKARGKSDNVPSEEVVKKMKNYWRQLLNAKLITQRKFDNLTKAERGGLSELDKAGFIKRQLVETRQITKHVAQILDSRMNTKYDENDKLIREVKVITLKSKLVSDFRKDFQFYKVREINNYHHAHDAYLNAVVGTALIKKYPKLESEFVYGDYKVYDVRKMIAKSEQEIGKATAKYFFYSNIMNFFKTEITLANGEIRKRPLIETNGETGEIVWDKGRDFATVRKVLSMPQVNIVKKTEVQTGGFSKESILPKRNSDKLIARKKDWDPKKYGGFDSPTVAYSVLVVAKVEKGKSKKLKSVKELLGITIMERSSFEKNPIDFLEAKGYKEVKKDLIIKLPKYSLFELENGRKRMLASAGELQKGNELALPSKYVNFLYLASHYEKLKGSPEDNEQKQLFVEQHKHYLDEIIEQISEFSKRVILADANLDKVLSAYNKHRDKPIREQAENIIHLFTLTNLGAPAAFKYFDTTIDRKRYTSTKEVLDATLIHQSITGLYETRIDLSQLGGDGGPAPGSSEAAAKGGVPWILKKPLELTIKLDLEEQQGTLLNNSILSKKGKEELKQLFEKYSALWQSWENQVGHRRIRPHKIATGTVKPTPQKQYHINPKAKPDIQIVINDLLKQGVLIQKESTMNTPVYPVPKPNGRWRMVLDYRAVNKVTPLIAVQNQHSYGILGSLFKGRYKTTIDLSNGFWAHPIVPEDYWITAFTWQGKQYCWTVLPQGFLNSPGLFTGDVVDLLQGIPNVEVYVDDVYISHDSEKEHLEYLDILFNRLKEAGYIISLKKSNIANSIVDFLGFQITNEGRGLTDTFKEKLENITAPTTLKQLQSILGLLNFARNFIPDFTELIAPLYALIPKSTKNYVPWQIEHSTTLETLITKLNGAEYLQGRKGDKTLIMKVNASYTTGYIRYYNEGEKKPISYVSIVFSKTELKFTELEKLLTTVHKGLLKALDLSMGQNIHVYSPIVSMQNIQKTPQTAKKALASRWLSWLSYLEDPRIRFFYDPQMPALKDLPAVDTGKDNKKHPSNFQHIFYTDGSAITSPTKEGHLNAGMGIVYFINKDGNLQKQQEWSISLGNHTAQFAEIAAFEFALKKCLPLGGNILVVTDSNYVAKAYNEELDVWASNGFVNNRKKPLKHISKWKSVADLKRLRPDVVVTHEPGHQKLDSSPHAYGNNLADQLATQASFKVHAGKRTADGSEFEKRTADGSEFESPKKKAKVE

SEQ ID NO: 7629 - protein, 2095 aa, synthetic construct
MPAAKRVKLDGGDKKYSIGLDIGTNSVGWAVITDEYKVPSKKFKVLGNTDRHSIKKNLIGALLFDSGETAEATRLKRTARRRYTRRKNRICYLQEIFSNEMAKVDDSFFHRLEESFLVEEDKKHERHPIFGNIVDEVAYHEKYPTIYHLRKKLVDSTDKADLRLIYLALAHMIKFRGHFLIEGDLNPDNSDVDKLFIQLVQTYNQLFEENPINASGVDAKAILSARLSKSRRLENLIAQLPGEKKNGLFGNLIALSLGLTPNFKSNFDLAEDAKLQLSKDTYDDDLDNLLAQIGDQYADLFLAAKNLSDAILLSDILRVNTEITKAPLSASMIKRYDEHHQDLTLLKALVRQQLPEKYKEIFFDQSKNGYAGYIDGGASQEEFYKFIKPILEKMDGTEELLVKLNREDLLRKQRTFDNGSIPHQIHLGELHAILRRQEDFYPFLKDNREKIEKILTFRIPYYVGPLARGNSRFAWMTRKSEETITPWNFEEVVDKGASAQSFIERMTNFDKNLPNEKVLPKHSLLYEYFTVYNELTKVKYVTEGMRKPAFLSGEQKKAIVDLLFKTNRKVTVKQLKEDYFKKIECFDSVEISGVEDRFNASLGTYHDLLKIIKDKDFLDNEENEDILEDIVLTLTLFEDREMIEERLKTYAHLFDDKVMKQLKRRRYTGWGRLSRKLINGIRDKQSGKTILDFLKSDGFANRNFMQLIHDDSLTFKEDIQKAQVSGQGDSLHEHIANLAGSPAIKKGILQTVKVVDELVKVMGRHKPENIVIEMARENQTTQKGQKNSRERMKRIEEGIKELGSQILKEHPVENTQLQNEKLYLYYLQNGRDMYVDQELDINRLSDYDVDHIVPQSFLKDDSIDNKVLTRSDKARGKSDNVPSEEVVKKMKNYWRQLLNAKLITQRKFDNLTKAERGGLSELDKAGFIKRQLVETRQITKHVAQILDSRMNTKYDENDKLIREVKVITLKSKLVSDFRKDFQFYKVREINNYHHAHDAYLNAVVGTALIKKYPKLESEFVYGDYKVYDVRKMIAKSEQEIGKATAKYFFYSNIMNFFKTEITLANGEIRKRPLIETNGETGEIVWDKGRDFATVRKVLSMPQVNIVKKTEVQTGGFSKESILPKRNSDKLIARKKDWDPKKYGGFDSPTVAYSVLVVAKVEKGKSKKLKSVKELLGITIMERSSFEKNPIDFLEAKGYKEVKKDLIIKLPKYSLFELENGRKRMLASAGELQKGNELALPSKYVNFLYLASHYEKLKGSPEDNEQKQLFVEQHKHYLDEIIEQISEFSKRVILADANLDKVLSAYNKHRDKPIREQAENIIHLFTLTNLGAPAAFKYFDTTIDRKRYTSTKEVLDATLIHQSITGLYETRIDLSQLGGDGGPAPGSSEAAAKGGTLQLEEEYRLFEPESTQKQEMDIWLKNFPQAWAETGGMGTAHCQAPVLIQLKATATPISIRQYPMPHEAYQGIKPHIRRMLDQGILKPCQSPWNTPLLPVKKPGTEDYRPVQDLREVNKRVEDIHPTVPNPYNLLSTLPPSHPWYTVLDLKDAFFCLRLHSESQLLFAFEWRDPEIGLSGQLTWTRLPQGFKNSPTLFNEALHSDLADFRVRYPALVLLQYVDDLLLAAATRTECLEGTKALLETLGNKGYRASAKKAQICLQEVTYLGYSLKDGQRWLTKARKEAILSIPVPKNSRQVREFLGTAGYCRLWIPGFAELAAPLYPLTRPGTLFQWGTEQQLAFEDIKKALLSSPALGLPDITKPFELFIDENSGFAKGVLVQKLGPWKRPVAYLSKKLDTVASGWPPCLRMVAAIAILVKDAGKLTLGQPLTILTSHPVEALVRQPPNKWLSNARMTHYQAMLLDAERVHFGPTVSLNPATLLPLPSGGNHHDCLQILAETHGTRPDLTDQPLPDADLTWYTDGSSFIRNGEREAGAAVTTESEVIWAAPLPPGTSAQRAELIALTQALKMAEGKKLTVYTDSRYAFATTHVHGEIYRRRGWLTSEGKEIKNKNEILALLEALFLPKRLSIIHCPGHQKGDSPQAKGNRLADDTAKKAATETHSSLTVLPAGKRTADGSEFEKRTADGSEFESPKKKAKVE

SEQ ID NO: 7630 - protein, 2094 aa, synthetic construct
MPAAKRVKLDGGDKKYSIGLDIGTNSVGWAVITDEYKVPSKKFKVLGNTDRHSIKKNLIGALLFDSGETAEATRLKRTARRRYTRRKNRICYLQEIFSNEMAKVDDSFFHRLEESFLVEEDKKHERHPIFGNIVDEVAYHEKYPTIYHLRKKLVDSTDKADLRLIYLALAHMIKFRGHFLIEGDLNPDNSDVDKLFIQLVQTYNQLFEENPINASGVDAKAILSARLSKSRRLENLIAQLPGEKKNGLFGNLIALSLGLTPNFKSNFDLAEDAKLQLSKDTYDDDLDNLLAQIGDQYADLFLAAKNLSDAILLSDILRVNTEITKAPLSASMIKRYDEHHQDLTLLKALVRQQLPEKYKEIFFDQSKNGYAGYIDGGASQEEFYKFIKPILEKMDGTEELLVKLNREDLLRKQRTFDNGSIPHQIHLGELHAILRRQEDFYPFLKDNREKIEKILTFRIPYYVGPLARGNSRFAWMTRKSEETITPWNFEEVVDKGASAQSFIERMTNFDKNLPNEKVLPKHSLLYEYFTVYNELTKVKYVTEGMRKPAFLSGEQKKAIVDLLFKTNRKVTVKQLKEDYFKKIECFDSVEISGVEDRFNASLGTYHDLLKIIKDKDFLDNEENEDILEDIVLTLTLFEDREMIEERLKTYAHLFDDKVMKQLKRRRYTGWGRLSRKLINGIRDKQSGKTILDFLKSDGFANRNFMQLIHDDSLTFKEDIQKAQVSGQGDSLHEHIANLAGSPAIKKGILQTVKVVDELVKVMGRHKPENIVIEMARENQTTQKGQKNSRERMKRIEEGIKELGSQILKEHPVENTQLQNEKLYLYYLQNGRDMYVDQELDINRLSDYDVDHIVPQSFLKDDSIDNKVLTRSDKARGKSDNVPSEEVVKKMKNYWRQLLNAKLITQRKFDNLTKAERGGLSELDKAGFIKRQLVETRQITKHVAQILDSRMNTKYDENDKLIREVKVITLKSKLVSDFRKDFQFYKVREINNYHHAHDAYLNAVVGTALIKKYPKLESEFVYGDYKVYDVRKMIAKSEQEIGKATAKYFFYSNIMNFFKTEITLANGEIRKRPLIETNGETGEIVWDKGRDFATVRKVLSMPQVNIVKKTEVQTGGFSKESILPKRNSDKLIARKKDWDPKKYGGFDSPTVAYSVLVVAKVEKGKSKKLKSVKELLGITIMERSSFEKNPIDFLEAKGYKEVKKDLIIKLPKYSLFELENGRKRMLASAGELQKGNELALPSKYVNFLYLASHYEKLKGSPEDNEQKQLFVEQHKHYLDEIIEQISEFSKRVILADANLDKVLSAYNKHRDKPIREQAENIIHLFTLTNLGAPAAFKYFDTTIDRKRYTSTKEVLDATLIHQSITGLYETRIDLSQLGGDGGPAPGSSEAAAKGGVLNLEEEYRLHEKPVPSSIDPSWLQLFPTVWAERAGMGLANQVPPVVVELRSGASPVAVRQYPMSKEAREGIRPHIQKFLDLGVLVPCRSPWNTPLLPVKKPGTNDYRPVQDLREINKRVQDIHPTVPNPYNLLSSLPPSYTWYSVLDLKDAFFCLRLHPNSQPLFAFEWKDPEKGNTGQLTWTRLPQGFKNSPTLFNEALHRDLAPFRALNPQVVLLQYVDDLLVAAPTYEDCKKGTQKLLQELSKLGYRVSAKKAQLCQREVTYLGYLLKEGKRWLTPARKATVMKIPVPTTPRQVREFLGKAGFCRLFIPGFASLAAPLYPLTKPSIPFIWTEEHQQAFDHIKKALLSAPALALPDLTKPFTLYIDERAGVARGVLTQTLGPWRRPVAYLSKKLDPVASGWPTCLKAVAAVALLLKDADKLTLGQNVTVIASHSLESIVRQPPDRWMTNARMTHYQSLLLNERVSFAPPAVLNPATLLPVESEATPVHRCSEILAEETGTRRDLEDQPLPGVPTWYTDGSSFITEGKRRAGAPIVDGKRTVWASSLPEGTSAQKAELVALTQALRLAEGKNINIYTDSRYAFATAHIHGAIYKQRGWLTSAGKDIKNKEEILALLEAIHLPRRVAIIHCPGHQRGSNPVATGNRRADEAAKQAALSTRVLAGTTKPAGKRTADGSEFEKRTADGSEFESPKKKAKVE

SEQ ID NO: 7631 - protein, 2218 aa, synthetic construct
MPAAKRVKLDGGDKKYSIGLDIGTNSVGWAVITDEYKVPSKKFKVLGNTDRHSIKKNLIGALLFDSGETAEATRLKRTARRRYTRRKNRICYLQEIFSNEMAKVDDSFFHRLEESFLVEEDKKHERHPIFGNIVDEVAYHEKYPTIYHLRKKLVDSTDKADLRLIYLALAHMIKFRGHFLIEGDLNPDNSDVDKLFIQLVQTYNQLFEENPINASGVDAKAILSARLSKSRRLENLIAQLPGEKKNGLFGNLIALSLGLTPNFKSNFDLAEDAKLQLSKDTYDDDLDNLLAQIGDQYADLFLAAKNLSDAILLSDILRVNTEITKAPLSASMIKRYDEHHQDLTLLKALVRQQLPEKYKEIFFDQSKNGYAGYIDGGASQEEFYKFIKPILEKMDGTEELLVKLNREDLLRKQRTFDNGSIPHQIHLGELHAILRRQEDFYPFLKDNREKIEKILTFRIPYYVGPLARGNSRFAWMTRKSEETITPWNFEEVVDKGASAQSFIERMTNFDKNLPNEKVLPKHSLLYEYFTVYNELTKVKYVTEGMRKPAFLSGEQKKAIVDLLFKTNRKVTVKQLKEDYFKKIECFDSVEISGVEDRFNASLGTYHDLLKIIKDKDFLDNEENEDILEDIVLTLTLFEDREMIEERLKTYAHLFDDKVMKQLKRRRYTGWGRLSRKLINGIRDKQSGKTILDFLKSDGFANRNFMQLIHDDSLTFKEDIQKAQVSGQGDSLHEHIANLAGSPAIKKGILQTVKVVDELVKVMGRHKPENIVIEMARENQTTQKGQKNSRERMKRIEEGIKELGSQILKEHPVENTQLQNEKLYLYYLQNGRDMYVDQELDINRLSDYDVDHIVPQSFLKDDSIDNKVLTRSDKARGKSDNVPSEEVVKKMKNYWRQLLNAKLITQRKFDNLTKAERGGLSELDKAGFIKRQLVETRQITKHVAQILDSRMNTKYDENDKLIREVKVITLKSKLVSDFRKDFQFYKVREINNYHHAHDAYLNAVVGTALIKKYPKLESEFVYGDYKVYDVRKMIAKSEQEIGKATAKYFFYSNIMNFFKTEITLANGEIRKRPLIETNGETGEIVWDKGRDFATVRKVLSMPQVNIVKKTEVQTGGFSKESILPKRNSDKLIARKKDWDPKKYGGFDSPTVAYSVLVVAKVEKGKSKKLKSVKELLGITIMERSSFEKNPIDFLEAKGYKEVKKDLIIKLPKYSLFELENGRKRMLASAGELQKGNELALPSKYVNFLYLASHYEKLKGSPEDNEQKQLFVEQHKHYLDEIIEQISEFSKRVILADANLDKVLSAYNKHRDKPIREQAENIIHLFTLTNLGAPAAFKYFDTTIDRKRYTSTKEVLDATLIHQSITGLYETRIDLSQLGGDGGPAPGSSEAAAKGGTLGDQGSRGSDPLPEPRVTLTVEGIPTEFLVNTGAEHSVLTKPMGKMGSKRTVVAGATGSKVYPWTTKRLLKIGQKQVTHSFLVIPECPAPLLGRDLLTKLKAQIQFSTEGPQVTWEDRPAMCLVLNLEEEYRLHEKPVPPSIDPSWLQLFPMVWAEKAGMGLANQVPPVVVELKSDASPVAVRQYPMSKEAREGIRPHIQRFLDLGILVPCQSPWNTPLLPVKKPGTNDYRPVQDLREVNKRVQDIHPTVPNPYNLLSSLPPSHTWYSVLDLKDAFFCLKLHPNSQPLFAFEWRDPEKGNTGQLTWTRLPQGFKNSPTLFDEALHRDLASFRALNPQVVMLQYVDDLLVAAPTYRDCKEGTRRLLQELSKLGYRVSAKKAQLCREEVTYLGYLLKGGKRWLTPARKATVMKIPTPTTPRQVREFLGTAGFCRLWIPGFASLAAPLYPLTREKVPFTWTEAHQEAFGRIKEALLSAPALALPDLTKPFALYVDEKEGVARGVLTQTLGPWRRPVAYLSKKLDPVASGWPTCLKAIAAVALLLKDADKLTLGQNVLVIAPHNLESIVRQPPDRWMTNARMTHYQSLLLNERVSFAPPAILNPATLLPVESDDTPIHICSEILAEETGTRPDLRDQPLPGVPAWYTDGSSFIMDGRRQAGAAIVDNKRTVWASNLPEGTSAQKAELIALTQALRLAEGKSINIYTDSRYAFATAHVHGAIYKQRGLLTSAGKDIKNKEEILALLEAIHLPKRVAIIHCPGHQRGTDPVATGNRKADEAAKQAAQSTRILTETTKNAGKRTADGSEFEKRTADGSEFESPKKKAKVE

SEQ ID NO: 7632 - protein, 2127 aa, synthetic construct
MPAAKRVKLDGGDKKYSIGLDIGTNSVGWAVITDEYKVPSKKFKVLGNTDRHSIKKNLIGALLFDSGETAEATRLKRTARRRYTRRKNRICYLQEIFSNEMAKVDDSFFHRLEESFLVEEDKKHERHPIFGNIVDEVAYHEKYPTIYHLRKKLVDSTDKADLRLIYLALAHMIKFRGHFLIEGDLNPDNSDVDKLFIQLVQTYNQLFEENPINASGVDAKAILSARLSKSRRLENLIAQLPGEKKNGLFGNLIALSLGLTPNFKSNFDLAEDAKLQLSKDTYDDDLDNLLAQIGDQYADLFLAAKNLSDAILLSDILRVNTEITKAPLSASMIKRYDEHHQDLTLLKALVRQQLPEKYKEIFFDQSKNGYAGYIDGGASQEEFYKFIKPILEKMDGTEELLVKLNREDLLRKQRTFDNGSIPHQIHLGELHAILRRQEDFYPFLKDNREKIEKILTFRIPYYVGPLARGNSRFAWMTRKSEETITPWNFEEVVDKGASAQSFIERMTNFDKNLPNEKVLPKHSLLYEYFTVYNELTKVKYVTEGMRKPAFLSGEQKKAIVDLLFKTNRKVTVKQLKEDYFKKIECFDSVEISGVEDRFNASLGTYHDLLKIIKDKDFLDNEENEDILEDIVLTLTLFEDREMIEERLKTYAHLFDDKVMKQLKRRRYTGWGRLSRKLINGIRDKQSGKTILDFLKSDGFANRNFMQLIHDDSLTFKEDIQKAQVSGQGDSLHEHIANLAGSPAIKKGILQTVKVVDELVKVMGRHKPENIVIEMARENQTTQKGQKNSRERMKRIEEGIKELGSQILKEHPVENTQLQNEKLYLYYLQNGRDMYVDQELDINRLSDYDVDHIVPQSFLKDDSIDNKVLTRSDKARGKSDNVPSEEVVKKMKNYWRQLLNAKLITQRKFDNLTKAERGGLSELDKAGFIKRQLVETRQITKHVAQILDSRMNTKYDENDKLIREVKVITLKSKLVSDFRKDFQFYKVREINNYHHAHDAYLNAVVGTALIKKYPKLESEFVYGDYKVYDVRKMIAKSEQEIGKATAKYFFYSNIMNFFKTEITLANGEIRKRPLIETNGETGEIVWDKGRDFATVRKVLSMPQVNIVKKTEVQTGGFSKESILPKRNSDKLIARKKDWDPKKYGGFDSPTVAYSVLVVAKVEKGKSKKLKSVKELLGITIMERSSFEKNPIDFLEAKGYKEVKKDLIIKLPKYSLFELENGRKRMLASAGELQKGNELALPSKYVNFLYLASHYEKLKGSPEDNEQKQLFVEQHKHYLDEIIEQISEFSKRVILADANLDKVLSAYNKHRDKPIREQAENIIHLFTLTNLGAPAAFKYFDTTIDRKRYTSTKEVLDATLIHQSITGLYETRIDLSQLGGDGGPAPGSSEAAAKGGLLGRDLLTKLKAQIQFSTEGPQVTWEDRPAMCLVLNLEEEYRLHEKPVPPSIDPSWLQLFPMVWAEKAGMGLANQVPPVVVELKSDASPVAVRQYPMSKEAREGIRPHIQRFLDLGILVPCQSPWNTPLLPVKKPGTNDYRPVQDLREVNKRVQDIHPTVPNPYNLLSSLPPSHTWYSVLDLKDAFFCLKLHPNSQPLFAFEWRDPEKGNTGQLTWTRLPQGFKNSPTLFNEALHRDLASFRALNPQVVMLQYVDDLLVAAPTYRDCKEGTRRLLQELSKLGYRVSAKKAQLCREEVTYLGYLLKGGKRWLTPARKATVMKIPTPTTPRQVREFLGTAGFCRLWIPGFASLAAPLYPLTRPKVPFTWTEAHQEAFGRIKEALLSAPALALPDLTKPFALYVDEKEGVARGVLTQTLGPWRRPVAYLSKKLDPVASGWPTCLKAIAAVALLLKDADKLTLGQNVLVIAPHNLESIVRQPPDRWMTNARMTHYQSLLLNERVSFAPPAILNPATLLPVESDDTPIHICSEILAEETGTRPDLRDQPLPGVPAWYTDGSSFIMDGRRQAGAAIVDNKRTVWASNLPEGTSAQKAELIALTQALRLAEGKSINIYTDSRYAFATAHVHGAIYKQRGWLTSAGKDIKNKEEILALLEAIHLPKRVAIIHCPGHQRGTDPVATGNRKADEAAKQAAQSTRILTETTKNAGKRTADGSEFEKRTADGSEFESPKKKAKVE

SEQ ID NO: 7633 - protein, 2127 aa, synthetic construct
MPAAKRVKLDGGDKKYSIGLDIGTNSVGWAVITDEYKVPSKKFKVLGNTDRHSIKKNLIGALLFDSGETAEATRLKRTARRRYTRRKNRICYLQEIFSNEMAKVDDSFFHRLEESFLVEEDKKHERHPIFGNIVDEVAYHEKYPTIYHLRKKLVDSTDKADLRLIYLALAHMIKFRGHFLIEGDLNPDNSDVDKLFIQLVQTYNQLFEENPINASGVDAKAILSARLSKSRRLENLIAQLPGEKKNGLFGNLIALSLGLTPNFKSNFDLAEDAKLQLSKDTYDDDLDNLLAQIGDQYADLFLAAKNLSDAILLSDILRVNTEITKAPLSASMIKRYDEHHQDLTLLKALVRQQLPEKYKEIFFDQSKNGYAGYIDGGASQEEFYKFIKPILEKMDGTEELLVKLNREDLLRKQRTFDNGSIPHQIHLGELHAILRRQEDFYPFLKDNREKIEKILTFRIPYYVGPLARGNSRFAWMTRKSEETITPWNFEEVVDKGASAQSFIERMTNFDKNLPNEKVLPKHSLLYEYFTVYNELTKVKYVTEGMRKPAFLSGEQKKAIVDLLFKTNRKVTVKQLKEDYFKKIECFDSVEISGVEDRFNASLGTYHDLLKIIKDKDFLDNEENEDILEDIVLTLTLFEDREMIEERLKTYAHLFDDKVMKQLKRRRYTGWGRLSRKLINGIRDKQSGKTILDFLKSDGFANRNFMQLIHDDSLTFKEDIQKAQVSGQGDSLHEHIANLAGSPAIKKGILQTVKVVDELVKVMGRHKPENIVIEMARENQTTQKGQKNSRERMKRIEEGIKELGSQILKEHPVENTQLQNEKLYLYYLQNGRDMYVDQELDINRLSDYDVDHIVPQSFLKDDSIDNKVLTRSDKARGKSDNVPSEEVVKKMKNYWRQLLNAKLITQRKFDNLTKAERGGLSELDKAGFIKRQLVETRQITKHVAQILDSRMNTKYDENDKLIREVKVITLKSKLVSDFRKDFQFYKVREINNYHHAHDAYLNAVVGTALIKKYPKLESEFVYGDYKVYDVRKMIAKSEQEIGKATAKYFFYSNIMNFFKTEITLANGEIRKRPLIETNGETGEIVWDKGRDFATVRKVLSMPQVNIVKKTEVQTGGFSKESILPKRNSDKLIARKKDWDPKKYGGFDSPTVAYSVLVVAKVEKGKSKKLKSVKELLGITIMERSSFEKNPIDFLEAKGYKEVKKDLIIKLPKYSLFELENGRKRMLASAGELQKGNELALPSKYVNFLYLASHYEKLKGSPEDNEQKQLFVEQHKHYLDEIIEQISEFSKRVILADANLDKVLSAYNKHRDKPIREQAENIIHLFTLTNLGAPAAFKYFDTTIDRKRYTSTKEVLDATLIHQSITGLYETRIDLSQLGGDGGPAPGSSEAAAKGGLLGRDLLTKLKAQIQFSTEGPQVTWEDRPAMCLVLNLEEEYRLHEKPVPPSIDPSWLQLFPMVWAEKAGMGLANQVPPVVVELKSDASPVAVRQYPMSKEAREGIRPHIQRFLDLGILVPCQSPWNTPLLPVKKPGTNDYRPVQDLREVNKRVQDIHPTVPNPYNLLSSLPPSHTWYSVLDLKDAFFCLKLHPNSQPLFAFEWRDPEKGNTGQLTWTRLPQGFKNSPTLFNEALHRDLASFRALNPQVVMLQYVDDLLVAAPTYRDCKEGTRRLLQELSKLGYRVSAKKAQLCREEVTYLGYLLKGGKRWLTPARKATVMKIPTPTTPRQVREFLGKAGFCRLFIPGFASLAAPLYPLTRPKVPFTWTEAHQEAFGRIKEALLSAPALALPDLTKPFALYVDEKEGVARGVLTQTLGPWRRPVAYLSKKLDPVASGWPTCLKAIAAVALLLKDADKLTLGQNVLVIAPHNLESIVRQPPDRWMTNARMTHYQSLLLNERVSFAPPAILNPATLLPVESDDTPIHICSEILAEETGTRPDLRDQPLPGVPAWYTDGSSFIMDGRRQAGAAIVDNKRTVWASNLPEGTSAQKAELIALTQALRLAEGKSINIYTDSRYAFATAHVHGAIYKQRGWLTSAGKDIKNKEEILALLEAIHLPKRVAIIHCPGHQRGTDPVATGNRKADEAAKQAAQSTRILTETTKNAGKRTADGSEFEKRTADGSEFESPKKKAKVE

SEQ ID NO: 7634 - protein, 2218 aa, synthetic construct
MPAAKRVKLDGGDKKYSIGLDIGTNSVGWAVITDEYKVPSKKFKVLGNTDRHSIKKNLIGALLFDSGETAEATRLKRTARRRYTRRKNRICYLQEIFSNEMAKVDDSFFHRLEESFLVEEDKKHERHPIFGNIVDEVAYHEKYPTIYHLRKKLVDSTDKADLRLIYLALAHMIKFRGHFLIEGDLNPDNSDVDKLFIQLVQTYNQLFEENPINASGVDAKAILSARLSKSRRLENLIAQLPGEKKNGLFGNLIALSLGLTPNFKSNFDLAEDAKLQLSKDTYDDDLDNLLAQIGDQYADLFLAAKNLSDAILLSDILRVNTEITKAPLSASMIKRYDEHHQDLTLLKALVRQQLPEKYKEIFFDQSKNGYAGYIDGGASQEEFYKFIKPILEKMDGTEELLVKLNREDLLRKQRTFDNGSIPHQIHLGELHAILRRQEDFYPFLKDNREKIEKILTFRIPYYVGPLARGNSRFAWMTRKSEETITPWNFEEVVDKGASAQSFIERMTNFDKNLPNEKVLPKHSLLYEYFTVYNELTKVKYVTEGMRKPAFLSGEQKKAIVDLLFKTNRKVTVKQLKEDYFKKIECFDSVEISGVEDRFNASLGTYHDLLKIIKDKDFLDNEENEDILEDIVLTLTLFEDREMIEERLKTYAHLFDDKVMKQLKRRRYTGWGRLSRKLINGIRDKQSGKTILDFLKSDGFANRNFMQLIHDDSLTFKEDIQKAQVSGQGDSLHEHIANLAGSPAIKKGILQTVKVVDELVKVMGRHKPENIVIEMARENQTTQKGQKNSRERMKRIEEGIKELGSQILKEHPVENTQLQNEKLYLYYLQNGRDMYVDQELDINRLSDYDVDHIVPQSFLKDDSIDNKVLTRSDKARGKSDNVPSEEVVKKMKNYWRQLLNAKLITQRKFDNLTKAERGGLSELDKAGFIKRQLVETRQITKHVAQILDSRMNTKYDENDKLIREVKVITLKSKLVSDFRKDFQFYKVREINNYHHAHDAYLNAVVGTALIKKYPKLESEFVYGDYKVYDVRKMIAKSEQEIGKATAKYFFYSNIMNFFKTEITLANGEIRKRPLIETNGETGEIVWDKGRDFATVRKVLSMPQVNIVKKTEVQTGGFSKESILPKRNSDKLIARKKDWDPKKYGGFDSPTVAYSVLVVAKVEKGKSKKLKSVKELLGITIMERSSFEKNPIDFLEAKGYKEVKKDLIIKLPKYSLFELENGRKRMLASAGELQKGNELALPSKYVNFLYLASHYEKLKGSPEDNEQKQLFVEQHKHYLDEIIEQISEFSKRVILADANLDKVLSAYNKHRDKPIREQAENIIHLFTLTNLGAPAAFKYFDTTIDRKRYTSTKEVLDATLIHQSITGLYETRIDLSQLGGDGGPAPGSSEAAAKGGTLGDQGSRGSDPLPEPRVTLTVEGIPTEFLVNTGAEHSVLTKPMGKMGSKRTVVAGATGSKVYPWTTKRLLKIGQKQVTHSFLVIPECPAPLLGRDLLTKLKAQIQFSTEGPQVTWEDRPAMCLVLNLEEEYRLHEKPVPPSIDPSWLQLFPMVWAEKAGMGLANQVPPVVVELKSDASPVAVRQYPMSKEAREGIRPHIQRFLDLGILVPCQSPWNTPLLPVKKPGTNDYRPVQDLREVNKRVQDIHPTVPNPYNLLSSLPPSHTWYSVLDLKDAFFCLKLHPNSQPLFAFEWRDPEKGNTGQLTWTRLPQGFKNSPTLFNEALHRDLASFRALNPQVVMLQYVDDLLVAAPTYRDCKEGTRRLLQELSKLGYRVSAKKAQLCREEVTYLGYLLKGGKRWLTPARKATVMKIPTPTTPRQVREFLGTAGFCRLWIPGFASLAAPLYPLTRPKVPFTWTEAHQEAFGRIKEALLSAPALALPDLTKPFALYVDEKEGVARGVLTQTLGPWRRPVAYLSKKLDPVASGWPTCLKAIAAVALLLKDADKLTLGQNVLVIAPHNLESIVRQPPDRWMTNARMTHYQSLLLNERVSFAPPAILNPATLLPVESDDTPIHICSEILAEETGTRPDLRDQPLPGVPAWYTDGSSFIMDGRRQAGAAIVDNKRTVWASNLPEGTSAQKAELIALTQALRLAEGKSINIYTDSRYAFATAHVHGAIYKQRGWLTSAGKDIKNKEEILALLEAIHLPKRVAIIHCPGHQRGTDPVATGNRKADEAAKQAAQSTRILTETTKNAGKRTADGSEFEKRTADGSEFESPKKKAKVE

SEQ ID NO: 7635 - protein, 2218 aa, synthetic construct
MPAAKRVKLDGGDKKYSIGLDIGTNSVGWAVITDEYKVPSKKFKVLGNTDRHSIKKNLIGALLFDSGETAEATRLKRTARRRYTRRKNRICYLQEIFSNEMAKVDDSFFHRLEESFLVEEDKKHERHPIFGNIVDEVAYHEKYPTIYHLRKKLVDSTDKADLRLIYLALAHMIKFRGHFLIEGDLNPDNSDVDKLFIQLVQTYNQLFEENPINASGVDAKAILSARLSKSRRLENLIAQLPGEKKNGLFGNLIALSLGLTPNFKSNFDLAEDAKLQLSKDTYDDDLDNLLAQIGDQYADLFLAAKNLSDAILLSDILRVNTEITKAPLSASMIKRYDEHHQDLTLLKALVRQQLPEKYKEIFFDQSKNGYAGYIDGGASQEEFYKFIKPILEKMDGTEELLVKLNREDLLRKQRTFDNGSIPHQIHLGELHAILRRQEDFYPFLKDNREKIEKILTFRIPYYVGPLARGNSRFAWMTRKSEETITPWNFEEVVDKGASAQSFIERMTNFDKNLPNEKVLPKHSLLYEYFTVYNELTKVKYVTEGMRKPAFLSGEQKKAIVDLLFKTNRKVTVKQLKEDYFKKIECFDSVEISGVEDRFNASLGTYHDLLKIIKDKDFLDNEENEDILEDIVLTLTLFEDREMIEERLKTYAHLFDDKVMKQLKRRRYTGWGRLSRKLINGIRDKQSGKTILDFLKSDGFANRNFMQLIHDDSLTFKEDIQKAQVSGQGDSLHEHIANLAGSPAIKKGILQTVKVVDELVKVMGRHKPENIVIEMARENQTTQKGQKNSRERMKRIEEGIKELGSQILKEHPVENTQLQNEKLYLYYLQNGRDMYVDQELDINRLSDYDVDHIVPQSFLKDDSIDNKVLTRSDKARGKSDNVPSEEVVKKMKNYWRQLLNAKLITQRKFDNLTKAERGGLSELDKAGFIKRQLVETRQITKHVAQILDSRMNTKYDENDKLIREVKVITLKSKLVSDFRKDFQFYKVREINNYHHAHDAYLNAVVGTALIKKYPKLESEFVYGDYKVYDVRKMIAKSEQEIGKATAKYFFYSNIMNFFKTEITLANGEIRKRPLIETNGETGEIVWDKGRDFATVRKVLSMPQVNIVKKTEVQTGGFSKESILPKRNSDKLIARKKDWDPKKYGGFDSPTVAYSVLVVAKVEKGKSKKLKSVKELLGITIMERSSFEKNPIDFLEAKGYKEVKKDLIIKLPKYSLFELENGRKRMLASAGELQKGNELALPSKYVNFLYLASHYEKLKGSPEDNEQKQLFVEQHKHYLDEIIEQISEFSKRVILADANLDKVLSAYNKHRDKPIREQAENIIHLFTLTNLGAPAAFKYFDTTIDRKRYTSTKEVLDATLIHQSITGLYETRIDLSQLGGDGGPAPGSSEAAAKGGTLGDQGSRGSDPLPEPRVTLTVEGIPTEFLVNTGAEHSVLTKPMGKMGSKRTVVAGATGSKVYPWTTKRLLKIGQKQVTHSFLVIPECPAPLLGRDLLTKLKAQIQFSTEGPQVTWEDRPAMCLVLNLEEEYRLHEKPVPPSIDPSWLQLFPMVWAEKAGMGLANQVPPVVVELKSDASPVAVRQYPMSKEAREGIRPHIQRFLDLGILVPCQSPWNTPLLPVKKPGTNDYRPVQDLREVNKRVQDIHPTVPNPYNLLSSLPPSHTWYSVLDLKDAFFCLKLHPNSQPLFAFEWRDPEKGNTGQLTWTRLPQGFKNSPTLFNEALHRDLASFRALNPQVVMLQYVDDLLVAAPTYRDCKEGTRRLLQELSKLGYRVSAKKAQLCREEVTYLGYLLKGGKRWLTPARKATVMKIPTPTTPRQVREFLGKAGFCRLFIPGFASLAAPLYPLTRPKVPFTWTEAHQEAFGRIKEALLSAPALALPDLTKPFALYVDEKEGVARGVLTQTLGPWRRPVAYLSKKLDPVASGWPTCLKAIAAVALLLKDADKLTLGQNVLVIAPHNLESIVRQPPDRWMTNARMTHYQSLLLNERVSFAPPAILNPATLLPVESDDTPIHICSEILAEETGTRPDLRDQPLPGVPAWYTDGSSFIMDGRRQAGAAIVDNKRTVWASNLPEGTSAQKAELIALTQALRLAEGKSINIYTDSRYAFATAHVHGAIYKQRGWLTSAGKDIKNKEEILALLEAIHLPKRVAIIHCPGHQRGTDPVATGNRKADEAAKQAAQSTRILTETTKNAGKRTADGSEFEKRTADGSEFESPKKKAKVE

SEQ ID NO: 7636 - protein, 2096 aa, synthetic construct
MPAAKRVKLDGGDKKYSIGLDIGTNSVGWAVITDEYKVPSKKFKVLGNTDRHSIKKNLIGALLFDSGETAEATRLKRTARRRYTRRKNRICYLQEIFSNEMAKVDDSFFHRLEESFLVEEDKKHERHPIFGNIVDEVAYHEKYPTIYHLRKKLVDSTDKADLRLIYLALAHMIKFRGHFLIEGDLNPDNSDVDKLFIQLVQTYNQLFEENPINASGVDAKAILSARLSKSRRLENLIAQLPGEKKNGLFGNLIALSLGLTPNFKSNFDLAEDAKLQLSKDTYDDDLDNLLAQIGDQYADLFLAAKNLSDAILLSDILRVNTEITKAPLSASMIKRYDEHHQDLTLLKALVRQQLPEKYKEIFFDQSKNGYAGYIDGGASQEEFYKFIKPILEKMDGTEELLVKLNREDLLRKQRTFDNGSIPHQIHLGELHAILRRQEDFYPFLKDNREKIEKILTFRIPYYVGPLARGNSRFAWMTRKSEETITPWNFEEVVDKGASAQSFIERMTNFDKNLPNEKVLPKHSLLYEYFTVYNELTKVKYVTEGMRKPAFLSGEQKKAIVDLLFKTNRKVTVKQLKEDYFKKIECFDSVEISGVEDRFNASLGTYHDLLKIIKDKDFLDNEENEDILEDIVLTLTLFEDREMIEERLKTYAHLFDDKVMKQLKRRRYTGWGRLSRKLINGIRDKQSGKTILDFLKSDGFANRNFMQLIHDDSLTFKEDIQKAQVSGQGDSLHEHIANLAGSPAIKKGILQTVKVVDELVKVMGRHKPENIVIEMARENQTTQKGQKNSRERMKRIEEGIKELGSQILKEHPVENTQLQNEKLYLYYLQNGRDMYVDQELDINRLSDYDVDHIVPQSFLKDDSIDNKVLTRSDKARGKSDNVPSEEVVKKMKNYWRQLLNAKLITQRKFDNLTKAERGGLSELDKAGFIKRQLVETRQITKHVAQILDSRMNTKYDENDKLIREVKVITLKSKLVSDFRKDFQFYKVREINNYHHAHDAYLNAVVGTALIKKYPKLESEFVYGDYKVYDVRKMIAKSEQEIGKATAKYFFYSNIMNFFKTEITLANGEIRKRPLIETNGETGEIVWDKGRDFATVRKVLSMPQVNIVKKTEVQTGGFSKESILPKRNSDKLIARKKDWDPKKYGGFDSPTVAYSVLVVAKVEKGKSKKLKSVKELLGITIMERSSFEKNPIDFLEAKGYKEVKKDLIIKLPKYSLFELENGRKRMLASAGELQKGNELALPSKYVNFLYLASHYEKLKGSPEDNEQKQLFVEQHKHYLDEIIEQISEFSKRVILADANLDKVLSAYNKHRDKPIREQAENIIHLFTLTNLGAPAAFKYFDTTIDRKRYTSTKEVLDATLIHQSITGLYETRIDLSQLGGDGGPAPGSSEAAAKGGTLGIEDEYRLHETSTEPDVSLGSTWLSDFPQAWAETGGMGLAVRQAPLIIPLKATSTPVSIQQYPMSHEARLGIKPHIQRLLDQGILVPCQSPWNTPLLPVKKPGTNDYRPVQDLREVNKRVEDIHPTVPNPYNLLSGLPPSHQWYTVLDLKDAFFCLRLHPTSQPLFAFEWRDPGMGISGQLTWTRLPQGFKNSPTLFNEALHRDLADFRIQHPDLILLQYVDDILLAATSELDCQQGTRALLQTLGDLGYRASAKKAQICQKQVKYLGYLLREGQRWLTEARKETVMGQPVPKTPRQLREFLGTAGFCRLWIPGFAEMAAPLYPLTKPGTLFSWGPDQQKAYQEIKQALLTAPALGLPDLTKPFELFVDEKQGYAKGVLTQKLGPWRRPVAYLSKKLDPVAAGWPPCLRMVAAIAVLTKDAGKLTMGQPLVILAPHAVEALVKQPPDRWLSNARMTHYQAMLLDTDRVQFGPVVALNPATLLPLPEEGAPHDCLEILAETHGTRPDLTDQPIPDADHTWYTDGSSFLQEGQRKAGAAVTTETEVIWAGALPAGTSAQRAELIALTQALKMAEGKRLNVYTDSRYAFATAHIHGEIYRRRGWLTSEGREIKNKSEILALLKALFLPKRLSIIHCLGHQKGDSAEARGNRLADQAAREAAIKTPPDTSTLLAGKRTADGSEFEKRTADGSEFESPKKKAKVE

SEQ ID NO: 7637 - protein, 2096 aa, synthetic construct
MPAAKRVKLDGGDKKYSIGLDIGTNSVGWAVITDEYKVPSKKFKVLGNTDRHSIKKNLIGALLFDSGETAEATRLKRTARRRYTRRKNRICYLQEIFSNEMAKVDDSFFHRLEESFLVEEDKKHERHPIFGNIVDEVAYHEKYPTIYHLRKKLVDSTDKADLRLIYLALAHMIKFRGHFLIEGDLNPDNSDVDKLFIQLVQTYNQLFEENPINASGVDAKAILSARLSKSRRLENLIAQLPGEKKNGLFGNLIALSLGLTPNFKSNFDLAEDAKLQLSKDTYDDDLDNLLAQIGDQYADLFLAAKNLSDAILLSDILRVNTEITKAPLSASMIKRYDEHHQDLTLLKALVRQQLPEKYKEIFFDQSKNGYAGYIDGGASQEEFYKFIKPILEKMDGTEELLVKLNREDLLRKQRTFDNGSIPHQIHLGELHAILRRQEDFYPFLKDNREKIEKILTFRIPYYVGPLARGNSRFAWMTRKSEETITPWNFEEVVDKGASAQSFIERMTNFDKNLPNEKVLPKHSLLYEYFTVYNELTKVKYVTEGMRKPAFLSGEQKKAIVDLLFKTNRKVTVKQLKEDYFKKIECFDSVEISGVEDRFNASLGTYHDLLKIIKDKDFLDNEENEDILEDIVLTLTLFEDREMIEERLKTYAHLFDDKVMKQLKRRRYTGWGRLSRKLINGIRDKQSGKTILDFLKSDGFANRNFMQLIHDDSLTFKEDIQKAQVSGQGDSLHEHIANLAGSPAIKKGILQTVKVVDELVKVMGRHKPENIVIEMARENQTTQKGQKNSRERMKRIEEGIKELGSQILKEHPVENTQLQNEKLYLYYLQNGRDMYVDQELDINRLSDYDVDHIVPQSFLKDDSIDNKVLTRSDKARGKSDNVPSEEVVKKMKNYWRQLLNAKLITQRKFDNLTKAERGGLSELDKAGFIKRQLVETRQITKHVAQILDSRMNTKYDENDKLIREVKVITLKSKLVSDFRKDFQFYKVREINNYHHAHDAYLNAVVGTALIKKYPKLESEFVYGDYKVYDVRKMIAKSEQEIGKATAKYFFYSNIMNFFKTEITLANGEIRKRPLIETNGETGEIVWDKGRDFATVRKVLSMPQVNIVKKTEVQTGGFSKESILPKRNSDKLIARKKDWDPKKYGGFDSPTVAYSVLVVAKVEKGKSKKLKSVKELLGITIMERSSFEKNPIDFLEAKGYKEVKKDLIIKLPKYSLFELENGRKRMLASAGELQKGNELALPSKYVNFLYLASHYEKLKGSPEDNEQKQLFVEQHKHYLDEIIEQISEFSKRVILADANLDKVLSAYNKHRDKPIREQAENIIHLFTLTNLGAPAAFKYFDTTIDRKRYTSTKEVLDATLIHQSITGLYETRIDLSQLGGDGGPAPGSSEAAAKGGTLNIEDEYRLHETSKEPDVSLGSTWLSDFPQAWAETGGMGLAVRQAPLIIPLKATSTPVSIKQYPMSQEARLGIKPHIQRLLDQGILVPCQSPWNTPLLPVKKPGTNDYRPVQDLREVNKRVEDIHPTVPNPYNLLSGLPPSHQWYTVLDLKDAFFCLRLHPTSQPLFAFEWRDPEMGISGQLTWTRLPQGFKNSPTLFDEALHRDLAGFRIQHPDLILLQYVDDLLLAATSELDCQQGTRALLQTLGDLGYRASAKKAQICQKQVKYLGYLLKEGQRWLTEARKETVMGQPIPKTPRQLREFLGTAGFCRLWIPGFAEMAAPLYPLTKTGTLFNWGPDQQKAFQEIKQALLTAPALGLPDLTKPFELFVDEKQGYAKGVLTQKLGPWRRPVAYLSKKLDPVAAGWPPCLRMVAAIAVLTKDAGKLTMGQPLVILAPHAVEALVKQPPDRWLSNARMTHYQALLLDTDRVQFGPVVALNPATLLPLPEEGLQHDCLDILAEAHGTRSDLMDQPLPDADHTWYTDGSSFLQEGQRKAGAAVTTETEVIWARALPAGTSAQRAELIALTQALKMAEGKKLNVYTDSRYAFATAHIHGEIYRRRGLLTSEGKEIKNKDEILALLKALFLPKRLSIIHCPGHQKGNSAEARGNRMADQAAREVATRETPETSTLLAGKRTADGSEFEKRTADGSEFESPKKKAKVE

SEQ ID NO: 7638 - protein, 2096 aa, synthetic construct
MPAAKRVKLDGGDKKYSIGLDIGTNSVGWAVITDEYKVPSKKFKVLGNTDRHSIKKNLIGALLFDSGETAEATRLKRTARRRYTRRKNRICYLQEIFSNEMAKVDDSFFHRLEESFLVEEDKKHERHPIFGNIVDEVAYHEKYPTIYHLRKKLVDSTDKADLRLIYLALAHMIKFRGHFLIEGDLNPDNSDVDKLFIQLVQTYNQLFEENPINASGVDAKAILSARLSKSRRLENLIAQLPGEKKNGLFGNLIALSLGLTPNFKSNFDLAEDAKLQLSKDTYDDDLDNLLAQIGDQYADLFLAAKNLSDAILLSDILRVNTEITKAPLSASMIKRYDEHHQDLTLLKALVRQQLPEKYKEIFFDQSKNGYAGYIDGGASQEEFYKFIKPILEKMDGTEELLVKLNREDLLRKQRTFDNGSIPHQIHLGELHAILRRQEDFYPFLKDNREKIEKILTFRIPYYVGPLARGNSRFAWMTRKSEETITPWNFEEVVDKGASAQSFIERMTNFDKNLPNEKVLPKHSLLYEYFTVYNELTKVKYVTEGMRKPAFLSGEQKKAIVDLLFKTNRKVTVKQLKEDYFKKIECFDSVEISGVEDRFNASLGTYHDLLKIIKDKDFLDNEENEDILEDIVLTLTLFEDREMIEERLKTYAHLFDDKVMKQLKRRRYTGWGRLSRKLINGIRDKQSGKTILDFLKSDGFANRNFMQLIHDDSLTFKEDIQKAQVSGQGDSLHEHIANLAGSPAIKKGILQTVKVVDELVKVMGRHKPENIVIEMARENQTTQKGQKNSRERMKRIEEGIKELGSQILKEHPVENTQLQNEKLYLYYLQNGRDMYVDQELDINRLSDYDVDHIVPQSFLKDDSIDNKVLTRSDKARGKSDNVPSEEVVKKMKNYWRQLLNAKLITQRKFDNLTKAERGGLSELDKAGFIKRQLVETRQITKHVAQILDSRMNTKYDENDKLIREVKVITLKSKLVSDFRKDFQFYKVREINNYHHAHDAYLNAVVGTALIKKYPKLESEFVYGDYKVYDVRKMIAKSEQEIGKATAKYFFYSNIMNFFKTEITLANGEIRKRPLIETNGETGEIVWDKGRDFATVRKVLSMPQVNIVKKTEVQTGGFSKESILPKRNSDKLIARKKDWDPKKYGGFDSPTVAYSVLVVAKVEKGKSKKLKSVKELLGITIMERSSFEKNPIDFLEAKGYKEVKKDLIIKLPKYSLFELENGRKRMLASAGELQKGNELALPSKYVNFLYLASHYEKLKGSPEDNEQKQLFVEQHKHYLDEIIEQISEFSKRVILADANLDKVLSAYNKHRDKPIREQAENIIHLFTLTNLGAPAAFKYFDTTIDRKRYTSTKEVLDATLIHQSITGLYETRIDLSQLGGDGGPAPGSSEAAAKGGTLNIEDEHRLHETSKEPDVSLGSTWLSDFPQAWAETGGMGLAVRQAPLIIPLKATSTPVSIKQYPMSQEARLGIKPHIQRLLDQGILVPCQSPWNTPLLPVKKPGTNDYRPVQDLREVNKRVEDIHPTVPNPYNLLSGLPPSHQWYTVLDLKDAFFCLRLHPTSQPLFAFEWRDPEMGISGQLTWTRLPQGFKNSPTLFDEALHRDLADFRIQHPDLILLQYVDDLLLAATSELDCQQGTRALLQTLGNLGYRASAKKAQICQKQVKYLGYLLKEGQRWLTEARKETVMGQPTPKTPRQLREFLGTAGFCRLWIPGFAEMAAPLYPLTKTGTLFNWGPDQQKAYQEIKQALLTAPALGLPDLTKPFELFVDEKQGYAKGVLTQKLGPWRRPVAYLSKKLDPVAAGWPPCLRMVAAIAVLTKDAGKLTMGQPLVILAPHAVEALVKQPPDRWLSNARMTHYQALLLDTDRVQFGPVVALNPATLLPLPEEGLQHNCLDILAEAHGTRPDLTDQPLPDADHTWYTDGSSLLQEGQRKAGAAVTTETEVIWAKALPAGTSAQRAELIALTQALKMAEGKKLNVYTDSRYAFATAHIHGEIYRRRGLLTSEGKEIKNKDEILALLKALFLPKRLSIIHCPGHQKGHSAEARGNRMADQAARKAAITETPDTSTLLAGKRTADGSEFEKRTADGSEFESPKKKAKVE

SEQ ID NO: 7639 - protein, 2096 aa, synthetic construct
MPAAKRVKLDGGDKKYSIGLDIGTNSVGWAVITDEYKVPSKKFKVLGNTDRHSIKKNLIGALLFDSGETAEATRLKRTARRRYTRRKNRICYLQEIFSNEMAKVDDSFFHRLEESFLVEEDKKHERHPIFGNIVDEVAYHEKYPTIYHLRKKLVDSTDKADLRLIYLALAHMIKFRGHFLIEGDLNPDNSDVDKLFIQLVQTYNQLFEENPINASGVDAKAILSARLSKSRRLENLIAQLPGEKKNGLFGNLIALSLGLTPNFKSNFDLAEDAKLQLSKDTYDDDLDNLLAQIGDQYADLFLAAKNLSDAILLSDILRVNTEITKAPLSASMIKRYDEHHQDLTLLKALVRQQLPEKYKEIFFDQSKNGYAGYIDGGASQEEFYKFIKPILEKMDGTEELLVKLNREDLLRKQRTFDNGSIPHQIHLGELHAILRRQEDFYPFLKDNREKIEKILTFRIPYYVGPLARGNSRFAWMTRKSEETITPWNFEEVVDKGASAQSFIERMTNFDKNLPNEKVLPKHSLLYEYFTVYNELTKVKYVTEGMRKPAFLSGEQKKAIVDLLFKTNRKVTVKQLKEDYFKKIECFDSVEISGVEDRFNASLGTYHDLLKIIKDKDFLDNEENEDILEDIVLTLTLFEDREMIEERLKTYAHLFDDKVMKQLKRRRYTGWGRLSRKLINGIRDKQSGKTILDFLKSDGFANRNFMQLIHDDSLTFKEDIQKAQVSGQGDSLHEHIANLAGSPAIKKGILQTVKVVDELVKVMGRHKPENIVIEMARENQTTQKGQKNSRERMKRIEEGIKELGSQILKEHPVENTQLQNEKLYLYYLQNGRDMYVDQELDINRLSDYDVDHIVPQSFLKDDSIDNKVLTRSDKARGKSDNVPSEEVVKKMKNYWRQLLNAKLITQRKFDNLTKAERGGLSELDKAGFIKRQLVETRQITKHVAQILDSRMNTKYDENDKLIREVKVITLKSKLVSDFRKDFQFYKVREINNYHHAHDAYLNAVVGTALIKKYPKLESEFVYGDYKVYDVRKMIAKSEQEIGKATAKYFFYSNIMNFFKTEITLANGEIRKRPLIETNGETGEIVWDKGRDFATVRKVLSMPQVNIVKKTEVQTGGFSKESILPKRNSDKLIARKKDWDPKKYGGFDSPTVAYSVLVVAKVEKGKSKKLKSVKELLGITIMERSSFEKNPIDFLEAKGYKEVKKDLIIKLPKYSLFELENGRKRMLASAGELQKGNELALPSKYVNFLYLASHYEKLKGSPEDNEQKQLFVEQHKHYLDEIIEQISEFSKRVILADANLDKVLSAYNKHRDKPIREQAENIIHLFTLTNLGAPAAFKYFDTTIDRKRYTSTKEVLDATLIHQSITGLYETRIDLSQLGGDGGPAPGSSEAAAKGGTLNIEDEYRLHETSKEPDVPLGSTWLSDFPQAWAETGGMGLAVRQAPLIIPLKATSTPVSIKQYPMSQEARLGIKPHIQRLLDQGILVPCQSPWNTPLLPVKKPGTNDYRPVQDLREVNKRVEDIHPTVPNPYNLLSGLPPSHQWYTVLDLKDAFFCLRLHPTSQPLFAFEWRDPEMGISGQLTWTRLPQGFKNSPTLFNEALHRDLADFRIQHPDLILLQYVDDLLLAATSEQDCQRGTRALLQTLGNLGYRASAKKAQICQKQVKYLGYLLKEGQRWLTEARKETVMGQPTPKTPRQLREFLGKAGFCRLFIPGFAEMAAPLYPLTKPGTLFNWGPDQQKAYQEIKQALLTAPALGLPDLTKPFELFVDEKQGYAKGVLTQKLGPWRRPVAYLSKKLDPVAAGWPPCLRMVAAIAVLTKDAGKLTMGQPLVILAPHAVEALVKQPPDRWLSNARMTHYQAMLLDTDRVQFGPVVALNPATLLPLPEKEAPHDCLEILAETHGTRPDLTDQPIPDADYTWYTDGSSFLQEGQRRAGAAVTTETEVIWARALPAGTSAQRAELIALTQALKMAEGKKLNVYTDSRYAFATAHVHGEIYRRRGWLTSEGREIKNKNEILALLKALFLPKRLSIIHCPGHQKGNSAEARGNRMADQAAREAAMKAVLETSTLLAGKRTADGSEFEKRTADGSEFESPKKKAKVE

SEQ ID NO: 7640 - protein, 2102 aa, synthetic construct
MPAAKRVKLDGGDKKYSIGLDIGTNSVGWAVITDEYKVPSKKFKVLGNTDRHSIKKNLIGALLFDSGETAEATRLKRTARRRYTRRKNRICYLQEIFSNEMAKVDDSFFHRLEESFLVEEDKKHERHPIFGNIVDEVAYHEKYPTIYHLRKKLVDSTDKADLRLIYLALAHMIKFRGHFLIEGDLNPDNSDVDKLFIQLVQTYNQLFEENPINASGVDAKAILSARLSKSRRLENLIAQLPGEKKNGLFGNLIALSLGLTPNFKSNFDLAEDAKLQLSKDTYDDDLDNLLAQIGDQYADLFLAAKNLSDAILLSDILRVNTEITKAPLSASMIKRYDEHHQDLTLLKALVRQQLPEKYKEIFFDQSKNGYAGYIDGGASQEEFYKFIKPILEKMDGTEELLVKLNREDLLRKQRTFDNGSIPHQIHLGELHAILRRQEDFYPFLKDNREKIEKILTFRIPYYVGPLARGNSRFAWMTRKSEETITPWNFEEVVDKGASAQSFIERMTNFDKNLPNEKVLPKHSLLYEYFTVYNELTKVKYVTEGMRKPAFLSGEQKKAIVDLLFKTNRKVTVKQLKEDYFKKIECFDSVEISGVEDRFNASLGTYHDLLKIIKDKDFLDNEENEDILEDIVLTLTLFEDREMIEERLKTYAHLFDDKVMKQLKRRRYTGWGRLSRKLINGIRDKQSGKTILDFLKSDGFANRNFMQLIHDDSLTFKEDIQKAQVSGQGDSLHEHIANLAGSPAIKKGILQTVKVVDELVKVMGRHKPENIVIEMARENQTTQKGQKNSRERMKRIEEGIKELGSQILKEHPVENTQLQNEKLYLYYLQNGRDMYVDQELDINRLSDYDVDHIVPQSFLKDDSIDNKVLTRSDKARGKSDNVPSEEVVKKMKNYWRQLLNAKLITQRKFDNLTKAERGGLSELDKAGFIKRQLVETRQITKHVAQILDSRMNTKYDENDKLIREVKVITLKSKLVSDFRKDFQFYKVREINNYHHAHDAYLNAVVGTALIKKYPKLESEFVYGDYKVYDVRKMIAKSEQEIGKATAKYFFYSNIMNFFKTEITLANGEIRKRPLIETNGETGEIVWDKGRDFATVRKVLSMPQVNIVKKTEVQTGGFSKESILPKRNSDKLIARKKDWDPKKYGGFDSPTVAYSVLVVAKVEKGKSKKLKSVKELLGITIMERSSFEKNPIDFLEAKGYKEVKKDLIIKLPKYSLFELENGRKRMLASAGELQKGNELALPSKYVNFLYLASHYEKLKGSPEDNEQKQLFVEQHKHYLDEIIEQISEFSKRVILADANLDKVLSAYNKHRDKPIREQAENIIHLFTLTNLGAPAAFKYFDTTIDRKRYTSTKEVLDATLIHQSITGLYETRIDLSQLGGDGGPAPEAAAKGSSGGTVSLQDEHRLFDIPVTTSLPDVWLQDFPQAWAETGGLGRAKCQAPIIIDLKPTAVPVSIKQYPMSLEAHMGIRQHIIKFLELGVLRPCRSPWNTPLLPVKKPGTQDYRPVQDLREINKRTVDIHPTVPNPYNLLSTLKPDYSWYTVLDLKDAFFCLPLAPQSQELFAFEWKDPERGISGQLTWTRLPQGFKNSPTLFDEALHRDLTDFRTQHPEVTLLQYVDDLLLAAPTKKACTQGTRHLLQELGEKGYRASAKKAQICQTKVTYLGYILSEGKRWLTPGRIETVARIPPPRNPREVREFLGTAGFCRLWIPGFAELAAPLYALTKESTPFTWQTEHQLAFEALKKALLSAPALGLPDTSKPFTLFLDERQGIAKGVLTQKLGPWKRPVAYLSKKLDPVAAGWPPCLRIMAATAMLVKDSAKLTLGQPLTVITPHTLEAIVRQPPDRWITNARLTHYQALLLDTDRVQFGPPVTLNPATLLPVPENQPSPHDCRQVLAETHGTREDLKDQELPDADHTWYTDGSSYLDSGTRRAGAAVVDGHNTIWAQSLPPGTSAQKAELIALTKALELSKGKKANIYTDSRYAFATAHTHGSIYERRGLLTSEGKEIKNKAEIIALLKALFLPQEVAIIHCPGHQKGQDPVAVGNRQADRVARQAAMAEVLTLATEPDNTSHITAGKRTADGSEFEKRTADGSEFESPKKKAKVE

SEQ ID NO: 7641 - protein, 2095 aa, synthetic construct
MPAAKRVKLDGGDKKYSIGLDIGTNSVGWAVITDEYKVPSKKFKVLGNTDRHSIKKNLIGALLFDSGETAEATRLKRTARRRYTRRKNRICYLQEIFSNEMAKVDDSFFHRLEESFLVEEDKKHERHPIFGNIVDEVAYHEKYPTIYHLRKKLVDSTDKADLRLIYLALAHMIKFRGHFLIEGDLNPDNSDVDKLFIQLVQTYNQLFEENPINASGVDAKAILSARLSKSRRLENLIAQLPGEKKNGLFGNLIALSLGLTPNFKSNFDLAEDAKLQLSKDTYDDDLDNLLAQIGDQYADLFLAAKNLSDAILLSDILRVNTEITKAPLSASMIKRYDEHHQDLTLLKALVRQQLPEKYKEIFFDQSKNGYAGYIDGGASQEEFYKFIKPILEKMDGTEELLVKLNREDLLRKQRTFDNGSIPHQIHLGELHAILRRQEDFYPFLKDNREKIEKILTFRIPYYVGPLARGNSRFAWMTRKSEETITPWNFEEVVDKGASAQSFIERMTNFDKNLPNEKVLPKHSLLYEYFTVYNELTKVKYVTEGMRKPAFLSGEQKKAIVDLLFKTNRKVTVKQLKEDYFKKIECFDSVEISGVEDRFNASLGTYHDLLKIIKDKDFLDNEENEDILEDIVLTLTLFEDREMIEERLKTYAHLFDDKVMKQLKRRRYTGWGRLSRKLINGIRDKQSGKTILDFLKSDGFANRNFMQLIHDDSLTFKEDIQKAQVSGQGDSLHEHIANLAGSPAIKKGILQTVKVVDELVKVMGRHKPENIVIEMARENQTTQKGQKNSRERMKRIEEGIKELGSQILKEHPVENTQLQNEKLYLYYLQNGRDMYVDQELDINRLSDYDVDHIVPQSFLKDDSIDNKVLTRSDKARGKSDNVPSEEVVKKMKNYWRQLLNAKLITQRKFDNLTKAERGGLSELDKAGFIKRQLVETRQITKHVAQILDSRMNTKYDENDKLIREVKVITLKSKLVSDFRKDFQFYKVREINNYHHAHDAYLNAVVGTALIKKYPKLESEFVYGDYKVYDVRKMIAKSEQEIGKATAKYFFYSNIMNFFKTEITLANGEIRKRPLIETNGETGEIVWDKGRDFATVRKVLSMPQVNIVKKTEVQTGGFSKESILPKRNSDKLIARKKDWDPKKYGGFDSPTVAYSVLVVAKVEKGKSKKLKSVKELLGITIMERSSFEKNPIDFLEAKGYKEVKKDLIIKLPKYSLFELENGRKRMLASAGELQKGNELALPSKYVNFLYLASHYEKLKGSPEDNEQKQLFVEQHKHYLDEIIEQISEFSKRVILADANLDKVLSAYNKHRDKPIREQAENIIHLFTLTNLGAPAAFKYFDTTIDRKRYTSTKEVLDATLIHQSITGLYETRIDLSQLGGDGGPAPEAAAKGSSGGTLQLEEEYRLFEPESTQKQEMDIWLKNFPQAWAETGGMGTAHCQAPVLIQLKATATPISIRQYPMPHEAYQGIKPHIRRMLDQGILKPCQSPWNTPLLPVKKPGTEDYRPVQDLREVNKRVEDIHPTVPNPYNLLSTLPPSHPWYTVLDLKDAFFCLRLHSESQLLFAFEWRDPEIGLSGQLTWTRLPQGFKNSPTLFNEALHSDLADFRVRYPALVLLQYVDDLLLAAATRTECLEGTKALLETLGNKGYRASAKKAQICLQEVTYLGYSLKDGQRWLTKARKEAILSIPVPKNSRQVREFLGTAGYCRLWIPGFAELAAPLYPLTRPGTLFQWGTEQQLAFEDIKKALLSSPALGLPDITKPFELFIDENSGFAKGVLVQKLGPWKRPVAYLSKKLDTVASGWPPCLRMVAAIAILVKDAGKLTLGQPLTILTSHPVEALVRQPPNKWLSNARMTHYQAMLLDAERVHFGPTVSLNPATLLPLPSGGNHHDCLQILAETHGTRPDLTDQPLPDADLTWYTDGSSFIRNGEREAGAAVTTESEVIWAAPLPPGTSAQRAELIALTQALKMAEGKKLTVYTDSRYAFATTHVHGEIYRRRGWLTSEGKEIKNKNEILALLEALFLPKRLSIIHCPGHQKGDSPQAKGNRLADDTAKKAATETHSSLTVLPAGKRTADGSEFEKRTADGSEFESPKKKAKVE

SEQ ID NO: 7642 - protein, 2176 aa, synthetic construct
MPAAKRVKLDGGDKKYSIGLDIGTNSVGWAVITDEYKVPSKKFKVLGNTDRHSIKKNLIGALLFDSGETAEATRLKRTARRRYTRRKNRICYLQEIFSNEMAKVDDSFFHRLEESFLVEEDKKHERHPIFGNIVDEVAYHEKYPTIYHLRKKLVDSTDKADLRLIYLALAHMIKFRGHFLIEGDLNPDNSDVDKLFIQLVQTYNQLFEENPINASGVDAKAILSARLSKSRRLENLIAQLPGEKKNGLFGNLIALSLGLTPNFKSNFDLAEDAKLQLSKDTYDDDLDNLLAQIGDQYADLFLAAKNLSDAILLSDILRVNTEITKAPLSASMIKRYDEHHQDLTLLKALVRQQLPEKYKEIFFDQSKNGYAGYIDGGASQEEFYKFIKPILEKMDGTEELLVKLNREDLLRKQRTFDNGSIPHQIHLGELHAILRRQEDFYPFLKDNREKIEKILTFRIPYYVGPLARGNSRFAWMTRKSEETITPWNFEEVVDKGASAQSFIERMTNFDKNLPNEKVLPKHSLLYEYFTVYNELTKVKYVTEGMRKPAFLSGEQKKAIVDLLFKTNRKVTVKQLKEDYFKKIECFDSVEISGVEDRFNASLGTYHDLLKIIKDKDFLDNEENEDILEDIVLTLTLFEDREMIEERLKTYAHLFDDKVMKQLKRRRYTGWGRLSRKLINGIRDKQSGKTILDFLKSDGFANRNFMQLIHDDSLTFKEDIQKAQVSGQGDSLHEHIANLAGSPAIKKGILQTVKVVDELVKVMGRHKPENIVIEMARENQTTQKGQKNSRERMKRIEEGIKELGSQILKEHPVENTQLQNEKLYLYYLQNGRDMYVDQELDINRLSDYDVDHIVPQSFLKDDSIDNKVLTRSDKARGKSDNVPSEEVVKKMKNYWRQLLNAKLITQRKFDNLTKAERGGLSELDKAGFIKRQLVETRQITKHVAQILDSRMNTKYDENDKLIREVKVITLKSKLVSDFRKDFQFYKVREINNYHHAHDAYLNAVVGTALIKKYPKLESEFVYGDYKVYDVRKMIAKSEQEIGKATAKYFFYSNIMNFFKTEITLANGEIRKRPLIETNGETGEIVWDKGRDFATVRKVLSMPQVNIVKKTEVQTGGFSKESILPKRNSDKLIARKKDWDPKKYGGFDSPTVAYSVLVVAKVEKGKSKKLKSVKELLGITIMERSSFEKNPIDFLEAKGYKEVKKDLIIKLPKYSLFELENGRKRMLASAGELQKGNELALPSKYVNFLYLASHYEKLKGSPEDNEQKQLFVEQHKHYLDEIIEQISEFSKRVILADANLDKVLSAYNKHRDKPIREQAENIIHLFTLTNLGAPAAFKYFDTTIDRKRYTSTKEVLDATLIHQSITGLYETRIDLSQLGGDGGPAPEAAAKGSSGGMNPLQLLQPLPAEIKGTKLLAHWNSGATITCIPESFLEDEQPIKKTLIKTIHGEKQQNVYYVTFKVKGRKVEAEVIASPYEYILLSPTDVPWLTQQPLQLTILVPLQEYQEKILSKTALPEDQKQQLKTLFVKYDNLWQHWENQVGHRKIRPHNIATGDYPPRPQKQYPINPKAKPSIQIVIDDLLKQGVLTPQNSTMNTPVYPVPKPDGRWRMVLDYREVNKTIPLTAAQNQHSAGILATIVRQKYKTTLDLANGFWAHPITPESYWLTAFTWQGKQYCWTRLPQGFLNSPALFNADVVDLLKEIPNVQVYVDDIYLSHDDPKEHVQQLEKVFQILLQAGYVVSLKKSEIGQKTVEFLGFNITKEGRGLTDTFKTKLLNITPPKDLKQLQSILGLLNFARNFIPNFAELVQPLYNLIAPAKGKYIEWSEENTKQLNMVIEALNTASNLEERLPEQRLVIKVNTSPSAGYVRYYNETGKKPIMYLNYVFSKAELKFSMLEKLLTTMHKALIKAMDLAMGQEILVYSPIVSMTKIQKTPLPERKALPIRWITWMTYLEDPRIQFHYDKTLPELKHIPDVYTSSQSPVKHPSQYEGVFYTDGSAIKSPDPTKSNNAGMGIVHATYKPEYQVLNQWSIPLGNHTAQMAEIAAVEFACKKALKIPGPVLVITDSFYVAESANKELPYWKSNGFVNNKKKPLKHISKWKSIAECLSMKPDITIQHEKGISLQIPVFILKGNALADKLATQGSYVVNAGKRTADGSEFEKRTADGSEFESPKKKAKVE

SEQ ID NO: 7643 - protein, 2096 aa, synthetic construct
MPAAKRVKLDGGDKKYSIGLDIGTNSVGWAVITDEYKVPSKKFKVLGNTDRHSIKKNLIGALLFDSGETAEATRLKRTARRRYTRRKNRICYLQEIFSNEMAKVDDSFFHRLEESFLVEEDKKHERHPIFGNIVDEVAYHEKYPTIYHLRKKLVDSTDKADLRLIYLALAHMIKFRGHFLIEGDLNPDNSDVDKLFIQLVQTYNQLFEENPINASGVDAKAILSARLSKSRRLENLIAQLPGEKKNGLFGNLIALSLGLTPNFKSNFDLAEDAKLQLSKDTYDDDLDNLLAQIGDQYADLFLAAKNLSDAILLSDILRVNTEITKAPLSASMIKRYDEHHQDLTLLKALVRQQLPEKYKEIFFDQSKNGYAGYIDGGASQEEFYKFIKPILEKMDGTEELLVKLNREDLLRKQRTFDNGSIPHQIHLGELHAILRRQEDFYPFLKDNREKIEKILTFRIPYYVGPLARGNSRFAWMTRKSEETITPWNFEEVVDKGASAQSFIERMTNFDKNLPNEKVLPKHSLLYEYFTVYNELTKVKYVTEGMRKPAFLSGEQKKAIVDLLFKTNRKVTVKQLKEDYFKKIECFDSVEISGVEDRFNASLGTYHDLLKIIKDKDFLDNEENEDILEDIVLTLTLFEDREMIEERLKTYAHLFDDKVMKQLKRRRYTGWGRLSRKLINGIRDKQSGKTILDFLKSDGFANRNFMQLIHDDSLTFKEDIQKAQVSGQGDSLHEHIANLAGSPAIKKGILQTVKVVDELVKVMGRHKPENIVIEMARENQTTQKGQKNSRERMKRIEEGIKELGSQILKEHPVENTQLQNEKLYLYYLQNGRDMYVDQELDINRLSDYDVDHIVPQSFLKDDSIDNKVLTRSDKARGKSDNVPSEEVVKKMKNYWRQLLNAKLITQRKFDNLTKAERGGLSELDKAGFIKRQLVETRQITKHVAQILDSRMNTKYDENDKLIREVKVITLKSKLVSDFRKDFQFYKVREINNYHHAHDAYLNAVVGTALIKKYPKLESEFVYGDYKVYDVRKMIAKSEQEIGKATAKYFFYSNIMNFFKTEITLANGEIRKRPLIETNGETGEIVWDKGRDFATVRKVLSMPQVNIVKKTEVQTGGFSKESILPKRNSDKLIARKKDWDPKKYGGFDSPTVAYSVLVVAKVEKGKSKKLKSVKELLGITIMERSSFEKNPIDFLEAKGYKEVKKDLIIKLPKYSLFELENGRKRMLASAGELQKGNELALPSKYVNFLYLASHYEKLKGSPEDNEQKQLFVEQHKHYLDEIIEQISEFSKRVILADANLDKVLSAYNKHRDKPIREQAENIIHLFTLTNLGAPAAFKYFDTTIDRKRYTSTKEVLDATLIHQSITGLYETRIDLSQLGGDGGPAPEAAAKGSSGGTLGIEDEYRLHETSTEPDVSLGSTWLSDFPQAWAETGGMGLAVRQAPLIIPLKATSTPVSIQQYPMSHEARLGIKPHIQRLLDQGILVPCQSPWNTPLLPVKKPGTNDYRPVQDLREVNKRVEDIHPTVPNPYNLLSGLPPSHQWYTVLDLKDAFFCLRLHPTSQPLFAFEWRDPGMGISGQLTWTRLPQGFKNSPTLFNEALHRDLADFRIQHPDLILLQYVDDILLAATSELDCQQGTRALLQTLGDLGYRASAKKAQICQKQVKYLGYLLREGQRWLTEARKETVMGQPVPKTPRQLREFLGTAGFCRLWIPGFAEMAAPLYPLTKPGTLFSWGPDQQKAYQEIKQALLTAPALGLPDLTKPFELFVDEKQGYAKGVLTQKLGPWRRPVAYLSKKLDPVAAGWPPCLRMVAAIAVLTKDAGKLTMGQPLVILAPHAVEALVKQPPDRWLSNARMTHYQAMLLDTDRVQFGPVVALNPATLLPLPEEGAPHDCLEILAETHGTRPDLTDQPIPDADHTWYTDGSSFLQEGQRKAGAAVTTETEVIWAGALPAGTSAQRAELIALTQALKMAEGKRLNVYTDSRYAFATAHIHGEIYRRRGWLTSEGREIKNKSEILALLKALFLPKRLSIIHCLGHQKGDSAEARGNRLADQAAREAAIKTPPDTSTLLAGKRTADGSEFEKRTADGSEFESPKKKAKVE

SEQ ID NO: 7644 - protein, 2096 aa, synthetic construct; identical to SEQ ID NO: 7643

SEQ ID NO: 7645 - protein, 2096 aa, synthetic construct
MPAAKRVKLDGGDKKYSIGLDIGTNSVGWAVITDEYKVPSKKFKVLGNTDRHSIKKNLIGALLFDSGETAEATRLKRTARRRYTRRKNRICYLQEIFSNEMAKVDDSFFHRLEESFLVEEDKKHERHPIFGNIVDEVAYHEKYPTIYHLRKKLVDSTDKADLRLIYLALAHMIKFRGHFLIEGDLNPDNSDVDKLFIQLVQTYNQLFEENPINASGVDAKAILSARLSKSRRLENLIAQLPGEKKNGLFGNLIALSLGLTPNFKSNFDLAEDAKLQLSKDTYDDDLDNLLAQIGDQYADLFLAAKNLSDAILLSDILRVNTEITKAPLSASMIKRYDEHHQDLTLLKALVRQQLPEKYKEIFFDQSKNGYAGYIDGGASQEEFYKFIKPILEKMDGTEELLVKLNREDLLRKQRTFDNGSIPHQIHLGELHAILRRQEDFYPFLKDNREKIEKILTFRIPYYVGPLARGNSRFAWMTRKSEETITPWNFEEVVDKGASAQSFIERMTNFDKNLPNEKVLPKHSLLYEYFTVYNELTKVKYVTEGMRKPAFLSGEQKKAIVDLLFKTNRKVTVKQLKEDYFKKIECFDSVEISGVEDRFNASLGTYHDLLKIIKDKDFLDNEENEDILEDIVLTLTLFEDREMIEERLKTYAHLFDDKVMKQLKRRRYTGWGRLSRKLINGIRDKQSGKTILDFLKSDGFANRNFMQLIHDDSLTFKEDIQKAQVSGQGDSLHEHIANLAGSPAIKKGILQTVKVVDELVKVMGRHKPENIVIEMARENQTTQKGQKNSRERMKRIEEGIKELGSQILKEHPVENTQLQNEKLYLYYLQNGRDMYVDQELDINRLSDYDVDHIVPQSFLKDDSIDNKVLTRSDKARGKSDNVPSEEVVKKMKNYWRQLLNAKLITQRKFDNLTKAERGGLSELDKAGFIKRQLVETRQITKHVAQILDSRMNTKYDENDKLIREVKVITLKSKLVSDFRKDFQFYKVREINNYHHAHDAYLNAVVGTALIKKYPKLESEFVYGDYKVYDVRKMIAKSEQEIGKATAKYFFYSNIMNFFKTEITLANGEIRKRPLIETNGETGEIVWDKGRDFATVRKVLSMPQVNIVKKTEVQTGGFSKESILPKRNSDKLIARKKDWDPKKYGGFDSPTVAYSVLVVAKVEKGKSKKLKSVKELLGITIMERSSFEKNPIDFLEAKGYKEVKKDLIIKLPKYSLFELENGRKRMLASAGELQKGNELALPSKYVNFLYLASHYEKLKGSPEDNEQKQLFVEQHKHYLDEIIEQISEFSKRVILADANLDKVLSAYNKHRDKPIREQAENIIHLFTLTNLGAPAAFKYFDTTIDRKRYTSTKEVLDATLIHQSITGLYETRIDLSQLGGDGGPAPEAAAKGSSGGTLNIEDEYRLHETSKGPDVPLGSTWLSDFPQAWAETGGMGLAVRQAPLIIPLKATSTPVSIKQYPMSQEARLGIKPHIQRLLDQGILVPCQSPWNTPLLPVKKPGTNDYRPVQDLREVNKRVEDIHPTVPNPYNLLSGLPPSHQWYTVLDLKDAFFCLRLHPTSQSLFAFEWRDPEMGISGQLTWTRLPQGFKNSPTLFDEALHRDLADFRIQHPDLILLQYVDDLLLAATSELDCQQGTRALLQTLGDLGYRASAKKAQICQKQVKYLGYLLKEGQRWLTEARKETVMGQPTPKTPRQLREFLGTAGFCRLWIPGFAEMAAPLYPLTKTGTLFEWGPDQQKAYQEIKQALLTAPALGLPDLTKPFELFVDEKQGYAKGVLTQKLGPWRRPVAYLSKKLDPVAAGWPPCLRMVAAIAVLTKDAGKLTMGQPLVILAPHAVEALVKQPPDRWLSNARMTHYQALLLDTDRVQFGPIVALNPATLLPLPEEGLQHDCLDILAEAHGTRPDLTDQPLPDADHTWYTDGSSFLQEGQRKAGAAVTTETEVVWAKALPAGTSAQRAELIALTQALKMAEGKKLNVYTDSRYAFATAHIHGEIYRRRGLLTSEGKEIKNKDEILALLKALFLPKRLSIIHCPGHQKGNRAEARGNRMADQAAREVATRETPETSTLLAGKRTADGSEFEKRTADGSEFESPKKKAKVE

SEQ ID NO: 7646 - protein, 2090 aa, synthetic construct
MPAAKRVKLDGGDKKYSIGLDIGTNSVGWAVITDEYKVPSKKFKVLGNTDRHSIKKNLIGALLFDSGETAEATRLKRTARRRYTRRKNRICYLQEIFSNEMAKVDDSFFHRLEESFLVEEDKKHERHPIFGNIVDEVAYHEKYPTIYHLRKKLVDSTDKADLRLIYLALAHMIKFRGHFLIEGDLNPDNSDVDKLFIQLVQTYNQLFEENPINASGVDAKAILSARLSKSRRLENLIAQLPGEKKNGLFGNLIALSLGLTPNFKSNFDLAEDAKLQLSKDTYDDDLDNLLAQIGDQYADLFLAAKNLSDAILLSDILRVNTEITKAPLSASMIKRYDEHHQDLTLLKALVRQQLPEKYKEIFFDQSKNGYAGYIDGGASQEEFYKFIKPILEKMDGTEELLVKLNREDLLRKQRTFDNGSIPHQIHLGELHAILRRQEDFYPFLKDNREKIEKILTFRIPYYVGPLARGNSRFAWMTRKSEETITPWNFEEVVDKGASAQSFIERMTNFDKNLPNEKVLPKHSLLYEYFTVYNELTKVKYVTEGMRKPAFLSGEQKKAIVDLLFKTNRKVTVKQLKEDYFKKIECFDSVEISGVEDRFNASLGTYHDLLKIIKDKDFLDNEENEDILEDIVLTLTLFEDREMIEERLKTYAHLFDDKVMKQLKRRRYTGWGRLSRKLINGIRDKQSGKTILDFLKSDGFANRNFMQLIHDDSLTFKEDIQKAQVSGQGDSLHEHIANLAGSPAIKKGILQTVKVVDELVKVMGRHKPENIVIEMARENQTTQKGQKNSRERMKRIEEGIKELGSQILKEHPVENTQLQNEKLYLYYLQNGRDMYVDQELDINRLSDYDVDHIVPQSFLKDDSIDNKVLTRSDKARGKSDNVPSEEVVKKMKNYWRQLLNAKLITQRKFDNLTKAERGGLSELDKAGFIKRQLVETRQITKHVAQILDSRMNTKYDENDKLIREVKVITLKSKLVSDFRKDFQFYKVREINNYHHAHDAYLNAVVGTALIKKYPKLESEFVYGDYKVYDVRKMIAKSEQEIGKATAKYFFYSNIMNFFKTEITLANGEIRKRPLIETNGETGEIVWDKGRDFATVRKVLSMPQVNIVKKTEVQTGGFSKESILPKRNSDKLIARKKDWDPKKYGGFDSPTVAYSVLVVAKVEKGKSKKLKSVKELLGITIMERSSFEKNPIDFLEAKGYKEVKKDLIIKLPKYSLFELENGRKRMLASAGELQKGNELALPSKYVNFLYLASHYEKLKGSPEDNEQKQLFVEQHKHYLDEIIEQISEFSKRVILADANLDKVLSAYNKHRDKPIREQAENIIHLFTLTNLGAPAAFKYFDTTIDRKRYTSTKEVLDATLIHQSITGLYETRIDLSQLGGDGGPAPEAAAKGSSGGTLQLDDEYRLYSPLVKPDQNIQFWLEQFPQAWAETAGMGLAKQVPPQVIQLKASATPVSVRQYPLSKEAQEGIRPHVQRLIQQGILVPVQSPWNTPLLPVRKPGTNDYRPVQDLREVNKRVQDIHPTVPNPYNLLCALPPQRSWYTVLDLKDAFFCLRLHPTSQPLFAFEWRDPGTGRTGQLTWTRLPQGFKNSPTIFDEALHRDLANFRIQHPQVTLLQYVDDLLLAGATKQDCLEGTKALLLELSDLGYRASAKKAQICRREVTYLGYSLRDGQRWLTEARKKTVVQIPAPTTAKQVREFLGTAGFCRLWIPGFATLAAPLYPLTKEKGEFSWAPEHQKAFDAIKKALLSAPALALPDVTKPFTLYVDERKGVARGVLTQTLGPWRRPVAYLSKKLDPVASGWPVCLKAIAAVAILVKDADKLTLGQNITVIAPHALENIVRQPPDRWMTNARMTHYQSLLLTERVTFAPPAALNPATLLPEETDEPVTHDCHQLLIEETGVRKDLTDIPLTGEVLTWFTDGSSYVVEGKRMAGAAVVDGTRTIWASSLPEGTSAQKAELMALTQALRLAEGKSINIYTDSRYAFATAHVHGAIYKQRGLLTSAGREIKNKEEILSLLEALHLPKRLAIIHCPGHQKAKDPISRGNQMADRVAKQAAQGVNLLAGKRTADGSEFEKRTADGSEFESPKKKAKVE

SEQ ID NO: 7647 - protein, 2087 aa, synthetic construct
MPAAKRVKLDGGDKKYSIGLDIGTNSVGWAVITDEYKVPSKKFKVLGNTDRHSIKKNLIGALLFDSGETAEATRLKRTARRRYTRRKNRICYLQEIFSNEMAKVDDSFFHRLEESFLVEEDKKHERHPIFGNIVDEVAYHEKYPTIYHLRKKLVDSTDKADLRLIYLALAHMIKFRGHFLIEGDLNPDNSDVDKLFIQLVQTYNQLFEENPINASGVDAKAILSARLSKSRRLENLIAQLPGEKKNGLFGNLIALSLGLTPNFKSNFDLAEDAKLQLSKDTYDDDLDNLLAQIGDQYADLFLAAKNLSDAILLSDILRVNTEITKAPLSASMIKRYDEHHQDLTLLKALVRQQLPEKYKEIFFDQSKNGYAGYIDGGASQEEFYKFIKPILEKMDGTEELLVKLNREDLLRKQRTFDNGSIPHQIHLGELHAILRRQEDFYPFLKDNREKIEKILTFRIPYYVGPLARGNSRFAWMTRKSEETITPWNFEEVVDKGASAQSFIERMTNFDKNLPNEKVLPKHSLLYEYFTVYNELTKVKYVTEGMRKPAFLSGEQKKAIVDLLFKTNRKVTVKQLKEDYFKKIECFDSVEISGVEDRFNASLGTYHDLLKIIKDKDFLDNEENEDILEDIVLTLTLFEDREMIEERLKTYAHLFDDKVMKQLKRRRYTGWGRLSRKLINGIRDKQSGKTILDFLKSDGFANRNFMQLIHDDSLTFKEDIQKAQVSGQGDSLHEHIANLAGSPAIKKGILQTVKVVDELVKVMGRHKPENIVIEMARENQTTQKGQKNSRERMKRIEEGIKELGSQILKEHPVENTQLQNEKLYLYYLQNGRDMYVDQELDINRLSDYDVDHIVPQSFLKDDSIDNKVLTRSDKARGKSDNVPSEEVVKKMKNYWRQLLNAKLITQRKFDNLTKAERGGLSELDKAGFIKRQLVETRQITKHVAQILDSRMNTKYDENDKLIREVKVITLKSKLVSDFRKDFQFYKVREINNYHHAHDAYLNAVVGTALIKKYPKLESEFVYGDYKVYDVRKMIAKSEQEIGKATAKYFFYSNIMNFFKTEITLANGEIRKRPLIETNGETGEIVWDKGRDFATVRKVLSMPQVNIVKKTEVQTGGFSKESILPKRNSDKLIARKKDWDPKKYGGFDSPTVAYSVLVVAKVEKGKSKKLKSVKELLGITIMERSSFEKNPIDFLEAKGYKEVKKDLIIKLPKYSLFELENGRKRMLASAGELQKGNELALPSKYVNFLYLASHYEKLKGSPEDNEQKQLFVEQHKHYLDEIIEQISEFSKRVILADANLDKVLSAYNKHRDKPIREQAENIIHLFTLTNLGAPAAFKYFDTTIDRKRYTSTKEVLDATLIHQSITGLYETRIDLSQLGGDGGPAPEAAAKGSSGGIPWLMKKPLQLTTLVPLQEYEERLLKQTMLTGSYKEKLQSLFLKYDALWQHWENQVGHRRIKPHHIATGTVNPRPQKQYPINPKAKASIQTVINDLLKQGVLIQQNSIMNTPVYPVPKPDGKWRMVLDYREVNKTIPLIAAQNQHSAGILSSIFRGKYKTTLDLSNGFWAHSITPESYWLTAFTWLGQQYCWTRLPQGFLNSPALFNADVVDLLKEVPNVQVYVDDIYISHDDPREHLEQLEKVFSLLLNAGYVVSLKKSEIAQHEVEFLGFNITKEGRGLTETFKQKLLNITPPRDLKQLQSILGLLNFARNFIPNFSELVKPLYNIIATAPGKYITWTTDNSQQLQNIISMLNSAENLEERNPEVRLIMKVNTSPSAGYIRFYNEFAKRPIMYLNYVYTKAEVKFTNTEKLLTTIHKGLIKALDLGMGQEILVYSPIVSMTKIQKTPLPERKALPIRWITWMSYLEDPRIQFHYDKTLPELQQVPTVTDDIIAKIKHPSEFSMVFYTDGSAIKHPNVNKSHNAGMGIAQVQFKPEFTVINTWSIPLGDHTAQLAEVAAVEFACKKALKIDGPVLIVTDSFYVAESVNKELPYWQSNGFFNNKKKPLKHVSKWKSIADCIQLKPDIIIIHEKGHQPTASTFHTEGNNLADKLATQGSYVVNAGKRTADGSEFEKRTADGSEFESPKKKAKVE

SEQ ID NO: 7648 - protein, 2176 aa, synthetic construct
MPAAKRVKLDGGDKKYSIGLDIGTNSVGWAVITDEYKVPSKKFKVLGNTDRHSIKKNLIGALLFDSGETAEATRLKRTARRRYTRRKNRICYLQEIFSNEMAKVDDSFFHRLEESFLVEEDKKHERHPIFGNIVDEVAYHEKYPTIYHLRKKLVDSTDKADLRLIYLALAHMIKFRGHFLIEGDLNPDNSDVDKLFIQLVQTYNQLFEENPINASGVDAKAILSARLSKSRRLENLIAQLPGEKKNGLFGNLIALSLGLTPNFKSNFDLAEDAKLQLSKDTYDDDLDNLLAQIGDQYADLFLAAKNLSDAILLSDILRVNTEITKAPLSASMIKRYDEHHQDLTLLKALVRQQLPEKYKEIFFDQSKNGYAGYIDGGASQEEFYKFIKPILEKMDGTEELLVKLNREDLLRKQRTFDNGSIPHQIHLGELHAILRRQEDFYPFLKDNREKIEKILTFRIPYYVGPLARGNSRFAWMTRKSEETITPWNFEEVVDKGASAQSFIERMTNFDKNLPNEKVLPKHSLLYEYFTVYNELTKVKYVTEGMRKPAFLSGEQKKAIVDLLFKTNRKVTVKQLKEDYFKKIECFDSVEISGVEDRFNASLGTYHDLLKIIKDKDFLDNEENEDILEDIVLTLTLFEDREMIEERLKTYAHLFDDKVMKQLKRRRYTGWGRLSRKLINGIRDKQSGKTILDFLKSDGFANRNFMQLIHDDSLTFKEDIQKAQVSGQGDSLHEHIANLAGSPAIKKGILQTVKVVDELVKVMGRHKPENIVIEMARENQTTQKGQKNSRERMKRIEEGIKELGSQILKEHPVENTQLQNEKLYLYYLQNGRDMYVDQELDINRLSDYDVDHIVPQSFLKDDSIDNKVLTRSDKARGKSDNVPSEEVVKKMKNYWRQLLNAKLITQRKFDNLTKAERGGLSELDKAGFIKRQLVETRQITKHVAQILDSRMNTKYDENDKLIREVKVITLKSKLVSDFRKDFQFYKVREINNYHHAHDAYLNAVVGTALIKKYPKLESEFVYGDYKVYDVRKMIAKSEQEIGKATAKYFFYSNIMNFFKTEITLANGEIRKRPLIETNGETGEIVWDKGRDFATVRKVLSMPQVNIVKKTEVQTGGFSKESILPKRNSDKLIARKKDWDPKKYGGFDSPTVAYSVLVVAKVEKGKSKKLKSVKELLGITIMERSSFEKNPIDFLEAKGYKEVKKDLIIKLPKYSLFELENGRKRMLASAGELQKGNELALPSKYVNFLYLASHYEKLKGSPEDNEQKQLFVEQHKHYLDEIIEQISEFSKRVILADANLDKVLSAYNKHRDKPIREQAENIIHLFTLTNLGAPAAFKYFDTTIDRKRYTSTKEVLDATLIHQSITGLYETRIDLSQLGGDGGPAPEAAAKGSSGGMNPLQLLQPLPAEVKGTKLLAHWNSGATITCIPESFLEDEQPIKQTLIKTIHGEKQQNVYYLTFKVKGRKVEAEVIASPYEYILLSPTDVPWLTQQPLQLTILVPLQEYQDRILNKTALPEEQKQQLKALFTKYDNLWQHWENQVGHRKIRPHNIATGDYPPRPQKQYPINPKAKPSIQIVIDDLLKQGVLTPQNSTMNTPVYPVPKPDGRWRMVLDYREVNKTIPLTAAQNQHSAGILATIVRQKYKTTLDLANGFWAHPITPDSYWLTAFTWQGKQYCWTRLPQGFLNSPALFNADAVDLLKEVPNVQVYVDDIYLSHDNPHEHIQQLEKVFQILLQAGYVVSLKKSEIGQRTVEFLGFNITKEGRGLTDTFKTKLLNVTPPKDLKQLQSILGKLNFARNFIPNFAELVQTLYNLIASSPGKYIEWTEDNTKQLNKVIEALNTASNLEERLPDQRLVIKVNTSPSAGYVRYYNESGKKPIMYLNYVFSKAELKFSMLEKLLTTMHKALIKAMDLAMGQEILVYSPIVSMTKIQKTPLPERKALPIRWITWMTYLEDPRIQFHYDKTLPELKHIPDVYTSSIPPLKHPSQYEGVFCTDGSAIKSPDPTKSNNAGMGIVHAIYNPEYKILNQWSIPLGHHTAQMAEIAAVEFACKKALKVPGPVLVITDSFYVAESANKELPYWKSNGFVNNKKEPLKHISKWKSIAECLSIKPDITIQHEKGHQPINTSIHTEGNALADKLATQGSYVVNAGKRTADGSEFEKRTADGSEFESPKKKAKVE

SEQ ID NO: 7649 - protein, 2096 aa, synthetic construct
MPAAKRVKLDGGDKKYSIGLDIGTNSVGWAVITDEYKVPSKKFKVLGNTDRHSIKKNLIGALLFDSGETAEATRLKRTARRRYTRRKNRICYLQEIFSNEMAKVDDSFFHRLEESFLVEEDKKHERHPIFGNIVDEVAYHEKYPTIYHLRKKLVDSTDKADLRLIYLALAHMIKFRGHFLIEGDLNPDNSDVDKLFIQLVQTYNQLFEENPINASGVDAKAILSARLSKSRRLENLIAQLPGEKKNGLFGNLIALSLGLTPNFKSNFDLAEDAKLQLSKDTYDDDLDNLLAQIGDQYADLFLAAKNLSDAILLSDILRVNTEITKAPLSASMIKRYDEHHQDLTLLKALVRQQLPEKYKEIFFDQSKNGYAGYIDGGASQEEFYKFIKPILEKMDGTEELLVKLNREDLLRKQRTFDNGSIPHQIHLGELHAILRRQEDFYPFLKDNREKIEKILTFRIPYYVGPLARGNSRFAWMTRKSEETITPWNFEEVVDKGASAQSFIERMTNFDKNLPNEKVLPKHSLLYEYFTVYNELTKVKYVTEGMRKPAFLSGEQKKAIVDLLFKTNRKVTVKQLKEDYFKKIECFDSVEISGVEDRFNASLGTYHDLLKIIKDKDFLDNEENEDILEDIVLTLTLFEDREMIEERLKTYAHLFDDKVMKQLKRRRYTGWGRLSRKLINGIRDKQSGKTILDFLKSDGFANRNFMQLIHDDSLTFKEDIQKAQVSGQGDSLHEHIANLAGSPAIKKGILQTVKVVDELVKVMGRHKPENIVIEMARENQTTQKGQKNSRERMKRIEEGIKELGSQILKEHPVENTQLQNEKLYLYYLQNGRDMYVDQELDINRLSDYDVDHIVPQSFLKDDSIDNKVLTRSDKARGKSDNVPSEEVVKKMKNYWRQLLNAKLITQRKFDNLTKAERGGLSELDKAGFIKRQLVETRQITKHVAQILDSRMNTKYDENDKLIREVKVITLKSKLVSDFRKDFQFYKVREINNYHHAHDAYLNAVVGTALIKKYPKLESEFVYGDYKVYDVRKMIAKSEQEIGKATAKYFFYSNIMNFFKTEITLANGEIRKRPLIETNGETGEIVWDKGRDFATVRKVLSMPQVNIVKKTEVQTGGFSKESILPKRNSDKLIARKKDWDPKKYGGFDSPTVAYSVLVVAKVEKGKSKKLKSVKELLGITIMERSSFEKNPIDFLEAKGYKEVKKDLIIKLPKYSLFELENGRKRMLASAGELQKGNELALPSKYVNFLYLASHYEKLKGSPEDNEQKQLFVEQHKHYLDEIIEQISEFSKRVILADANLDKVLSAYNKHRDKPIREQAENIIHLFTLTNLGAPAAFKYFDTTIDRKRYTSTKEVLDATLIHQSITGLYETRIDLSQLGGDGGPAPEAAAKGSSGGTLNIEDEYRLHETSKEPDVPLGSTWLSDFPQAWAETGGMGLAVRQAPLIIPLKATSTPVSIKQYPMSQEARLGIKPHIQRLLDQGILVPCQSPWNTPLLPVKKPGTNDYRPVQDLREVNKRVEDIHPTVPNPYNLLSGLPPSHQWYTVLDLKDAFFCLRLHPTSQPLFAFEWRDPEMGISGQLTWTRLPQGFKNSPTLFNEALHRDLADFRIQHPDLILLQYVDDLLLAATSEQDCQRGTRALLQTLGNLGYRASAKKAQICQKQVKYLGYLLKEGQRWLTEARKETVMGQPTPKTPRQLREFLGTAGFCRLWIPGFAEMAAPLYPLTKPGTLFNWGPDQQKAYQEIKQALLTAPALGLPDLTKPFELFVDEKQGYAKGVLTQKLGPWRRPVAYLSKKLDPVAAGWPPCLRMVAAIAVLTKDAGKLTMGQPLVILAPHAVEALVKQPPDRWLSNARMTHYQAMLLDTDRVQFGPVVALNPATLLPLPEKEAPHDCLEILAETHGTRPDLTDQPIPDADYTWYTDGSSFLQEGQRRAGAAVTTETEVIWARALPAGTSAQRAELIALTQALKMAEGKKLNVYTDSRYAFATAHVHGEIYRRRGWLTSEGREIKNKNEILALLKALFLPKRLSIIHCPGHQKGNSAEARGNRMADQAAREAAMKAVLETSTLLAGKRTADGSEFEKRTADGSEFESPKKKAKVE

SEQ ID NO: 7650 - protein, 2122 aa, synthetic construct
MPAAKRVKLDGGDKKYSIGLDIGTNSVGWAVITDEYKVPSKKFKVLGNTDRHSIKKNLIGALLFDSGETAEATRLKRTARRRYTRRKNRICYLQEIFSNEMAKVDDSFFHRLEESFLVEEDKKHERHPIFGNIVDEVAYHEKYPTIYHLRKKLVDSTDKADLRLIYLALAHMIKFRGHFLIEGDLNPDNSDVDKLFIQLVQTYNQLFEENPINASGVDAKAILSARLSKSRRLENLIAQLPGEKKNGLFGNLIALSLGLTPNFKSNFDLAEDAKLQLSKDTYDDDLDNLLAQIGDQYADLFLAAKNLSDAILLSDILRVNTEITKAPLSASMIKRYDEHHQDLTLLKALVRQQLPEKYKEIFFDQSKNGYAGYIDGGASQEEFYKFIKPILEKMDGTEELLVKLNREDLLRKQRTFDNGSIPHQIHLGELHAILRRQEDFYPFLKDNREKIEKILTFRIPYYVGPLARGNSRFAWMTRKSEETITPWNFEEVVDKGASAQSFIERMTNFDKNLPNEKVLPKHSLLYEYFTVYNELTKVKYVTEGMRKPAFLSGEQKKAIVDLLFKTNRKVTVKQLKEDYFKKIECFDSVEISGVEDRFNASLGTYHDLLKIIKDKDFLDNEENEDILEDIVLTLTLFEDREMIEERLKTYAHLFDDKVMKQLKRRRYTGWGRLSRKLINGIRDKQSGKTILDFLKSDGFANRNFMQLIHDDSLTFKEDIQKAQVSGQGDSLHEHIANLAGSPAIKKGILQTVKVVDELVKVMGRHKPENIVIEMARENQTTQKGQKNSRERMKRIEEGIKELGSQILKEHPVENTQLQNEKLYLYYLQNGRDMYVDQELDINRLSDYDVDHIVPQSFLKDDSIDNKVLTRSDKARGKSDNVPSEEVVKKMKNYWRQLLNAKLITQRKFDNLTKAERGGLSELDKAGFIKRQLVETRQITKHVAQILDSRMNTKYDENDKLIREVKVITLKSKLVSDFRKDFQFYKVREINNYHHAHDAYLNAVVGTALIKKYPKLESEFVYGDYKVYDVRKMIAKSEQEIGKATAKYFFYSNIMNFFKTEITLANGEIRKRPLIETNGETGEIVWDKGRDFATVRKVLSMPQVNIVKKTEVQTGGFSKESILPKRNSDKLIARKKDWDPKKYGGFDSPTVAYSVLVVAKVEKGKSKKLKSVKELLGITIMERSSFEKNPIDFLEAKGYKEVKKDLIIKLPKYSLFELENGRKRMLASAGELQKGNELALPSKYVNFLYLASHYEKLKGSPEDNEQKQLFVEQHKHYLDEIIEQISEFSKRVILADANLDKVLSAYNKHRDKPIREQAENIIHLFTLTNLGAPAAFKYFDTTIDRKRYTSTKEVLDATLIHQSITGLYETRIDLSQLGGDGGAEAAAKEAAAKEAAAKEAAAKALEAEAAAKEAAAKEAAAKEAAAKAGGVPWILKKPLELTIKLDLEEQQGTLLNNSILSKKGKEELKQLFEKYSALWQSWENQVGHRRIRPHKIATGTVKPTPQKQYHINPKAKPDIQIVINDLLKQGVLIQKESTMNTPVYPVPKPNGRWRMVLDYRAVNKVTPLIAVQNQHSYGILGSLFKGRYKTTIDLSNGFWAHPIVPEDYWITAFTWQGKQYCWTVLPQGFLNSPGLFTGDVVDLLQGIPNVEVYVDDVYISHDSEKEHLEYLDILFNRLKEAGYIISLKKSNIANSIVDFLGFQITNEGRGLTDTFKEKLENITAPTTLKQLQSILGLLNFARNFIPDFTELIAPLYALIPKSTKNYVPWQIEHSTTLETLITKLNGAEYLQGRKGDKTLIMKVNASYTTGYIRYYNEGEKKPISYVSIVFSKTELKFTELEKLLTTVHKGLLKALDLSMGQNIHVYSPIVSMQNIQKTPQTAKKALASRWLSWLSYLEDPRIRFFYDPQMPALKDLPAVDTGKDNKKHPSNFQHIFYTDGSAITSPTKEGHLNAGMGIVYFINKDGNLQKQQEWSISLGNHTAQFAEIAAFEFALKKCLPLGGNILVVTDSNYVAKAYNEELDVWASNGFVNNRKKPLKHISKWKSVADLKRLRPDVVVTHEPGHQKLDSSPHAYGNNLADQLATQASFKVHAGKRTADGSEFEKRTADGSEFESPKKKAKVE

SEQ ID NO: 7651 - protein, 2122 aa, synthetic construct
MPAAKRVKLDGGDKKYSIGLDIGTNSVGWAVITDEYKVPSKKFKVLGNTDRHSIKKNLIGALLFDSGETAEATRLKRTARRRYTRRKNRICYLQEIFSNEMAKVDDSFFHRLEESFLVEEDKKHERHPIFGNIVDEVAYHEKYPTIYHLRKKLVDSTDKADLRLIYLALAHMIKFRGHFLIEGDLNPDNSDVDKLFIQLVQTYNQLFEENPINASGVDAKAILSARLSKSRRLENLIAQLPGEKKNGLFGNLIALSLGLTPNFKSNFDLAEDAKLQLSKDTYDDDLDNLLAQIGDQYADLFLAAKNLSDAILLSDILRVNTEITKAPLSASMIKRYDEHHQDLTLLKALVRQQLPEKYKEIFFDQSKNGYAGYIDGGASQEEFYKFIKPILEKMDGTEELLVKLNREDLLRKQRTFDNGSIPHQIHLGELHAILRRQEDFYPFLKDNREKIEKILTFRIPYYVGPLARGNSRFAWMTRKSEETITPWNFEEVVDKGASAQSFIERMTNFDKNLPNEKVLPKHSLLYEYFTVYNELTKVKYVTEGMRKPAFLSGEQKKAIVDLLFKTNRKVTVKQLKEDYFKKIECFDSVEISGVEDRFNASLGTYHDLLKIIKDKDFLDNEENEDILEDIVLTLTLFEDREMIEERLKTYAHLFDDKVMKQLKRRRYTGWGRLSRKLINGIRDKQSGKTILDFLKSDGFANRNFMQLIHDDSLTFKEDIQKAQVSGQGDSLHEHIANLAGSPAIKKGILQTVKVVDELVKVMGRHKPENIVIEMARENQTTQKGQKNSRERMKRIEEGIKELGSQILKEHPVENTQLQNEKLYLYYLQNGRDMYVDQELDINRLSDYDVDHIVPQSFLKDDSIDNKVLTRSDKARGKSDNVPSEEVVKKMKNYWRQLLNAKLITQRKFDNLTKAERGGLSELDKAGFIKRQLVETRQITKHVAQILDSRMNTKYDENDKLIREVKVITLKSKLVSDFRKDFQFYKVREINNYHHAHDAYLNAVVGTALIKKYPKLESEFVYGDYKVYDVRKMIAKSEQEIGKATAKYFFYSNIMNFFKTEITLANGEIRKRPLIETNGETGEIVWDKGRDFATVRKVLSMPQVNIVKKTEVQTGGFSKESILPKRNSDKLIARKKDWDPKKYGGFDSPTVAYSVLVVAKVEKGKSKKLKSVKELLGITIMERSSFEKNPIDFLEAKGYKEVKKDLIIKLPKYSLFELENGRKRMLASAGELQKGNELALPSKYVNFLYLASHYEKLKGSPEDNEQKQLFVEQHKHYLDEIIEQISEFSKRVILADANLDKVLSAYNKHRDKPIREQAENIIHLFTLTNLGAPAAFKYFDTTIDRKRYTSTKEVLDATLIHQSITGLYETRIDLSQLGGDGGAEAAAKEAAAKEAAAKEAAAKALEAEAAAKEAAAKEAAAKEAAAKAGGVPWILKKPLELTIKLDLEEQQGTLLNNSILSKKGKEELKQLFEKYSALWQSWENQVGHRRIRPHKIATGTVKPTPQKQYHINPKAKPDIQIVINDLLKQGVLIQKESTMNTPVYPVPKPNGRWRMVLDYRAVNKVTPLIAVQNQHSYGILGSLFKGRYKTTIDLSNGFWAHPIVPEDYWITAFTWQGKQYCWTVLPQGFLNSPGLFNGDVVDLLQGIPNVEVYVDDVYISHDSEKEHLEYLDILFNRLKEAGYIISLKKSNIANSIVDFLGFQITNEGRGLTDTFKEKLENITAPTTLKQLQSILGKLNFARNFIPDFTELIAPLYALIPKSPKNYVPWQIEHSTTLETLITKLNGAEYLQGRKGDKTLIMKVNASYTTGYIRYYNEGEKKPISYVSIVFSKTELKFTELEKLLTTVHKGLLKALDLSMGQNIHVYSPIVSMQNIQKTPQTAKKALASRWLSWLSYLEDPRIRFFYDPQMPALKDLPAVDTGKDNKKHPSNFQHIFYTDGSAITSPTKEGHLNAGMGIVYFINKDGNLQKQQEWSISLGNHTAQFAEIAAFEFALKKCLPLGGNILVVTDSNYVAKAYNEELDVWASNGFVNNRKKPLKHISKWKSVADLKRLRPDVVVTHEPGHQKLDSSPHAYGNNLADQLATQASFKVHAGKRTADGSEFEKRTADGSEFESPKKKAKVE

SEQ ID NO: 7652 - protein, 2122 aa, synthetic construct
MPAAKRVKLDGGDKKYSIGLDIGTNSVGWAVITDEYKVPSKKFKVLGNTDRHSIKKNLIGALLFDSGETAEATRLKRTARRRYTRRKNRICYLQEIFSNEMAKVDDSFFHRLEESFLVEEDKKHERHPIFGNIVDEVAYHEKYPTIYHLRKKLVDSTDKADLRLIYLALAHMIKFRGHFLIEGDLNPDNSDVDKLFIQLVQTYNQLFEENPINASGVDAKAILSARLSKSRRLENLIAQLPGEKKNGLFGNLIALSLGLTPNFKSNFDLAEDAKLQLSKDTYDDDLDNLLAQIGDQYADLFLAAKNLSDAILLSDILRVNTEITKAPLSASMIKRYDEHHQDLTLLKALVRQQLPEKYKEIFFDQSKNGYAGYIDGGASQEEFYKFIKPILEKMDGTEELLVKLNREDLLRKQRTFDNGSIPHQIHLGELHAILRRQEDFYPFLKDNREKIEKILTFRIPYYVGPLARGNSRFAWMTRKSEETITPWNFEEVVDKGASAQSFIERMTNFDKNLPNEKVLPKHSLLYEYFTVYNELTKVKYVTEGMRKPAFLSGEQKKAIVDLLFKTNRKVTVKQLKEDYFKKIECFDSVEISGVEDRFNASLGTYHDLLKIIKDKDFLDNEENEDILEDIVLTLTLFEDREMIEERLKTYAHLFDDKVMKQLKRRRYTGWGRLSRKLINGIRDKQSGKTILDFLKSDGFANRNFMQLIHDDSLTFKEDIQKAQVSGQGDSLHEHIANLAGSPAIKKGILQTVKVVDELVKVMGRHKPENIVIEMARENQTTQKGQKNSRERMKRIEEGIKELGSQILKEHPVENTQLQNEKLYLYYLQNGRDMYVDQELDINRLSDYDVDHIVPQSFLKDDSIDNKVLTRSDKARGKSDNVPSEEVVKKMKNYWRQLLNAKLITQRKFDNLTKAERGGLSELDKAGFIKRQLVETRQITKHVAQILDSRMNTKYDENDKLIREVKVITLKSKLVSDFRKDFQFYKVREINNYHHAHDAYLNAVVGTALIKKYPKLESEFVYGDYKVYDVRKMIAKSEQEIGKATAKYFFYSNIMNFFKTEITLANGEIRKRPLIETNGETGEIVWDKGRDFATVRKVLSMPQVNIVKKTEVQTGGFSKESILPKRNSDKLIARKKDWDPKKYGGFDSPTVAYSVLVVAKVEKGKSKKLKSVKELLGITIMERSSFEKNPIDFLEAKGYKEVKKDLIIKLPKYSLFELENGRKRMLASAGELQKGNELALPSKYVNFLYLASHYEKLKGSPEDNEQKQLFVEQHKHYLDEIIEQISEFSKRVILADANLDKVLSAYNKHRDKPIREQAENIIHLFTLTNLGAPAAFKYFDTTIDRKRYTSTKEVLDATLIHQSITGLYETRIDLSQLGGDGGAEAAAKEAAAKEAAAKEAAAKALEAEAAAKEAAAKEAAAKEAAAKAGGVPWLTQQPLQLTILVPLQEYQEKILSKTALPEDQKQQLKTLFVKYDNLWQHWENQVGHRKIRPHNIATGDYPPRPQKQYPINPKAKPSIQIVIDDLLKQGVLTPQNSTMNTPVYPVPKPDGRWRMVLDYREVNKTIPLTAAQNQHSAGILATIVRQKYKTTLDLANGFWAHPITPESYWLTAFTWQGKQYCWTRLPQGFLNSPALFTADVVDLLKEIPNVQVYVDDIYLSHDDPKEHVQQLEKVFQILLQAGYVVSLKKSEIGQKTVEFLGFNITKEGRGLTDTFKTKLLNITPPKDLKQLQSILGLLNFARNFIPNFAELVQPLYNLIASAKGKYIEWSEENTKQLNMVIEALNTASNLEERLPEQRLVIKVNTSPSAGYVRYYNETGKKPIMYLNYVFSKAELKFSMLEKLLTTMHKALIKAMDLAMGQEILVYSPIVSMTKIQKTPLPERKALPIRWITWMTYLEDPRIQFHYDKTLPELKHIPDVYTSSQSPVKHPSQYEGVFYTDGSAIKSPDPTKSNNAGMGIVHATYKPEYQVLNQWSIPLGNHTAQMAEIAAVEFACKKALKIPGPVLVITDSFYVAESANKELPYWKSNGFVNNKKKPLKHISKWKSIAECLSMKPDITIQHEKGISLQIPVFILKGNALADKLATQGSYVVNAGKRTADGSEFEKRTADGSEFESPKKKAKVE

SEQ ID NO: 7653 - protein, 2211 aa, synthetic construct
MPAAKRVKLDGGDKKYSIGLDIGTNSVGWAVITDEYKVPSKKFKVLGNTDRHSIKKNLIGALLFDSGETAEATRLKRTARRRYTRRKNRICYLQEIFSNEMAKVDDSFFHRLEESFLVEEDKKHERHPIFGNIVDEVAYHEKYPTIYHLRKKLVDSTDKADLRLIYLALAHMIKFRGHFLIEGDLNPDNSDVDKLFIQLVQTYNQLFEENPINASGVDAKAILSARLSKSRRLENLIAQLPGEKKNGLFGNLIALSLGLTPNFKSNFDLAEDAKLQLSKDTYDDDLDNLLAQIGDQYADLFLAAKNLSDAILLSDILRVNTEITKAPLSASMIKRYDEHHQDLTLLKALVRQQLPEKYKEIFFDQSKNGYAGYIDGGASQEEFYKFIKPILEKMDGTEELLVKLNREDLLRKQRTFDNGSIPHQIHLGELHAILRRQEDFYPFLKDNREKIEKILTFRIPYYVGPLARGNSRFAWMTRKSEETITPWNFEEVVDKGASAQSFIERMTNFDKNLPNEKVLPKHSLLYEYFTVYNELTKVKYVTEGMRKPAFLSGEQKKAIVDLLFKTNRKVTVKQLKEDYFKKIECFDSVEISGVEDRFNASLGTYHDLLKIIKDKDFLDNEENEDILEDIVLTLTLFEDREMIEERLKTYAHLFDDKVMKQLKRRRYTGWGRLSRKLINGIRDKQSGKTILDFLKSDGFANRNFMQLIHDDSLTFKEDIQKAQVSGQGDSLHEHIANLAGSPAIKKGILQTVKVVDELVKVMGRHKPENIVIEMARENQTTQKGQKNSRERMKRIEEGIKELGSQILKEHPVENTQLQNEKLYLYYLQNGRDMYVDQELDINRLSDYDVDHIVPQSFLKDDSIDNKVLTRSDKARGKSDNVPSEEVVKKMKNYWRQLLNAKLITQRKFDNLTKAERGGLSELDKAGFIKRQLVETRQITKHVAQILDSRMNTKYDENDKLIREVKVITLKSKLVSDFRKDFQFYKVREINNYHHAHDAYLNAVVGTALIKKYPKLESEFVYGDYKVYDVRKMIAKSEQEIGKATAKYFFYSNIMNFFKTEITLANGEIRKRPLIETNGETGEIVWDKGRDFATVRKVLSMPQVNIVKKTEVQTGGFSKESILPKRNSDKLIARKKDWDPKKYGGFDSPTVAYSVLVVAKVEKGKSKKLKSVKELLGITIMERSSFEKNPIDFLEAKGYKEVKKDLIIKLPKYSLFELENGRKRMLASAGELQKGNELALPSKYVNFLYLASHYEKLKGSPEDNEQKQLFVEQHKHYLDEIIEQISEFSKRVILADANLDKVLSAYNKHRDKPIREQAENIIHLFTLTNLGAPAAFKYFDTTIDRKRYTSTKEVLDATLIHQSITGLYETRIDLSQLGGDGGAEAAAKEAAAKEAAAKEAAAKALEAEAAAKEAAAKEAAAKEAAAKAGGMNPLQLLQPLPAEIKGTKLLAHWNSGATITCIPESFLEDEQPIKKTLIKTIHGEKQQNVYYVTFKVKGRKVEAEVIASPYEYILLSPTDVPWLTQQPLQLTILVPLQEYQEKILSKTALPEDQKQQLKTLFVKYDNLWQHWENQVGHRKIRPHNIATGDYPPRPQKQYPINPKAKPSIQIVIDDLLKQGVLTPQNSTMNTPVYPVPKPDGRWRMVLDYREVNKTIPLTAAQNQHSAGILATIVRQKYKTTLDLANGFWAHPITPESYWLTAFTWQGKQYCWTRLPQGFLNSPALFNADVVDLLKEIPNVQVYVDDIYLSHDDPKEHVQQLEKVFQILLQAGYVVSLKKSEIGQKTVEFLGFNITKEGRGLTDTFKTKLLNITPPKDLKQLQSILGLLNFARNFIPNFAELVQPLYNLIAPAKGKYIEWSEENTKQLNMVIEALNTASNLEERLPEQRLVIKVNTSPSAGYVRYYNETGKKPIMYLNYVFSKAELKFSMLEKLLTTMHKALIKAMDLAMGQEILVYSPIVSMTKIQKTPLPERKALPIRWITWMTYLEDPRIQFHYDKTLPELKHIPDVYTSSQSPVKHPSQYEGVFYTDGSAIKSPDPTKSNNAGMGIVHATYKPEYQVLNQWSIPLGNHTAQMAEIAAVEFACKKALKIPGPVLVITDSFYVAESANKELPYWKSNGFVNNKKKPLKHISKWKSIAECLSMKPDITIQHEKGISLQIPVFILKGNALADKLATQGSYVVNAGKRTADGSEFEKRTADGSEFESPKKKAKVE

SEQ ID NO: 7654 - protein, 2211 aa, synthetic construct
MPAAKRVKLDGGDKKYSIGLDIGTNSVGWAVITDEYKVPSKKFKVLGNTDRHSIKKNLIGALLFDSGETAEATRLKRTARRRYTRRKNRICYLQEIFSNEMAKVDDSFFHRLEESFLVEEDKKHERHPIFGNIVDEVAYHEKYPTIYHLRKKLVDSTDKADLRLIYLALAHMIKFRGHFLIEGDLNPDNSDVDKLFIQLVQTYNQLFEENPINASGVDAKAILSARLSKSRRLENLIAQLPGEKKNGLFGNLIALSLGLTPNFKSNFDLAEDAKLQLSKDTYDDDLDNLLAQIGDQYADLFLAAKNLSDAILLSDILRVNTEITKAPLSASMIKRYDEHHQDLTLLKALVRQQLPEKYKEIFFDQSKNGYAGYIDGGASQEEFYKFIKPILEKMDGTEELLVKLNREDLLRKQRTFDNGSIPHQIHLGELHAILRRQEDFYPFLKDNREKIEKILTFRIPYYVGPLARGNSRFAWMTRKSEETITPWNFEEVVDKGASAQSFIERMTNFDKNLPNEKVLPKHSLLYEYFTVYNELTKVKYVTEGMRKPAFLSGEQKKAIVDLLFKTNRKVTVKQLKEDYFKKIECFDSVEISGVEDRFNASLGTYHDLLKIIKDKDFLDNEENEDILEDIVLTLTLFEDREMIEERLKTYAHLFDDKVMKQLKRRRYTGWGRLSRKLINGIRDKQSGKTILDFLKSDGFANRNFMQLIHDDSLTFKEDIQKAQVSGQGDSLHEHIANLAGSPAIKKGILQTVKVVDELVKVMGRHKPENIVIEMARENQTTQKGQKNSRERMKRIEEGIKELGSQILKEHPVENTQLQNEKLYLYYLQNGRDMYVDQELDINRLSDYDVDHIVPQSFLKDDSIDNKVLTRSDKARGKSDNVPSEEVVKKMKNYWRQLLNAKLITQRKFDNLTKAERGGLSELDKAGFIKRQLVETRQITKHVAQILDSRMNTKYDENDKLIREVKVITLKSKLVSDFRKDFQFYKVREINNYHHAHDAYLNAVVGTALIKKYPKLESEFVYGDYKVYDVRKMIAKSEQEIGKATAKYFFYSNIMNFFKTEITLANGEIRKRPLIETNGETGEIVWDKGRDFATVRKVLSMPQVNIVKKTEVQTGGFSKESILPKRNSDKLIARKKDWDPKKYGGFDSPTVAYSVLVVAKVEKGKSKKLKSVKELLGITIMERSSFEKNPIDFLEAKGYKEVKKDLIIKLPKYSLFELENGRKRMLASAGELQKGNELALPSKYVNFLYLASHYEKLKGSPEDNEQKQLFVEQHKHYLDEIIEQISEFSKRVILADANLDKVLSAYNKHRDKPIREQAENIIHLFTLTNLGAPAAFKYFDTTIDRKRYTSTKEVLDATLIHQSITGLYETRIDLSQLGGDGGAEAAAKEAAAKEAAAKEAAAKALEAEAAAKEAAAKEAAAKEAAAKAGGMNPLQLLQPLPAEIKGTKLLAHWNSGATITCIPESFLEDEQPIKKTLIKTIHGEKQQNVYYVTFKVKGRKVEAEVIASPYEYILLSPTDVPWLTQQPLQLTILVPLQEYQEKILSKTALPEDQKQQLKTLFVKYDNLWQHWENQVGHRKIRPHNIATGDYPPRPQKQYPINPKAKPSIQIVIDDLLKQGVLTPQNSTMNTPVYPVPKPDGRWRMVLDYREVNKTIPLTAAQNQHSAGILATIVRQKYKTTLDLANGFWAHPITPESYWLTAFTWQGKQYCWTRLPQGFLNSPALFNADVVDLLKEIPNVQVYVDDIYLSHDDPKEHVQQLEKVFQILLQAGYVVSLKKSEIGQKTVEFLGFNITKEGRGLTDTFKTKLLNITPPKDLKQLQSILGKLNFARNFIPNFAELVQPLYNLIAPAKGKYIEWSEENTKQLNMVIEALNTASNLEERLPEQRLVIKVNTSPSAGYVRYYNETGKKPIMYLNYVFSKAELKFSMLEKLLTTMHKALIKAMDLAMGQEILVYSPIVSMTKIQKTPLPERKALPIRWITWMTYLEDPRIQFHYDKTLPELKHIPDVYTSSQSPVKHPSQYEGVFYTDGSAIKSPDPTKSNNAGMGIVHATYKPEYQVLNQWSIPLGNHTAQMAEIAAVEFACKKALKIPGPVLVITDSFYVAESANKELPYWKSNGFVNNKKKPLKHISKWKSIAECLSMKPDITIQHEKGISLQIPVFILKGNALADKLATQGSYVVNAGKRTADGSEFEKRTADGSEFESPKKKAKVE

SEQ ID NO: 7655 - protein, 2162 aa, synthetic construct
MPAAKRVKLDGGDKKYSIGLDIGTNSVGWAVITDEYKVPSKKFKVLGNTDRHSIKKNLIGALLFDSGETAEATRLKRTARRRYTRRKNRICYLQEIFSNEMAKVDDSFFHRLEESFLVEEDKKHERHPIFGNIVDEVAYHEKYPTIYHLRKKLVDSTDKADLRLIYLALAHMIKFRGHFLIEGDLNPDNSDVDKLFIQLVQTYNQLFEENPINASGVDAKAILSARLSKSRRLENLIAQLPGEKKNGLFGNLIALSLGLTPNFKSNFDLAEDAKLQLSKDTYDDDLDNLLAQIGDQYADLFLAAKNLSDAILLSDILRVNTEITKAPLSASMIKRYDEHHQDLTLLKALVRQQLPEKYKEIFFDQSKNGYAGYIDGGASQEEFYKFIKPILEKMDGTEELLVKLNREDLLRKQRTFDNGSIPHQIHLGELHAILRRQEDFYPFLKDNREKIEKILTFRIPYYVGPLARGNSRFAWMTRKSEETITPWNFEEVVDKGASAQSFIERMTNFDKNLPNEKVLPKHSLLYEYFTVYNELTKVKYVTEGMRKPAFLSGEQKKAIVDLLFKTNRKVTVKQLKEDYFKKIECFDSVEISGVEDRFNASLGTYHDLLKIIKDKDFLDNEENEDILEDIVLTLTLFEDREMIEERLKTYAHLFDDKVMKQLKRRRYTGWGRLSRKLINGIRDKQSGKTILDFLKSDGFANRNFMQLIHDDSLTFKEDIQKAQVSGQGDSLHEHIANLAGSPAIKKGILQTVKVVDELVKVMGRHKPENIVIEMARENQTTQKGQKNSRERMKRIEEGIKELGSQILKEHPVENTQLQNEKLYLYYLQNGRDMYVDQELDINRLSDYDVDHIVPQSFLKDDSIDNKVLTRSDKARGKSDNVPSEEVVKKMKNYWRQLLNAKLITQRKFDNLTKAERGGLSELDKAGFIKRQLVETRQITKHVAQILDSRMNTKYDENDKLIREVKVITLKSKLVSDFRKDFQFYKVREINNYHHAHDAYLNAVVGTALIKKYPKLESEFVYGDYKVYDVRKMIAKSEQEIGKATAKYFFYSNIMNFFKTEITLANGEIRKRPLIETNGETGEIVWDKGRDFATVRKVLSMPQVNIVKKTEVQTGGFSKESILPKRNSDKLIARKKDWDPKKYGGFDSPTVAYSVLVVAKVEKGKSKKLKSVKELLGITIMERSSFEKNPIDFLEAKGYKEVKKDLIIKLPKYSLFELENGRKRMLASAGELQKGNELALPSKYVNFLYLASHYEKLKGSPEDNEQKQLFVEQHKHYLDEIIEQISEFSKRVILADANLDKVLSAYNKHRDKPIREQAENIIHLFTLTNLGAPAAFKYFDTTIDRKRYTSTKEVLDATLIHQSITGLYETRIDLSQLGGDGGAEAAAKEAAAKEAAAKEAAAKALEAEAAAKEAAAKEAAAKEAAAKAGGLLGRDLLTKLKAQIQFSTEGPQVTWEDRPAMCLVLNLEEEYRLHEKPVPPSIDPSWLQLFPMVWAEKAGMGLANQVPPVVVELKSDASPVAVRQYPMSKEAREGIRPHIQRFLDLGILVPCQSPWNTPLLPVKKPGTNDYRPVQDLREVNKRVQDIHPTVPNPYNLLSSLPPSHTWYSVLDLKDAFFCLKLHPNSQPLFAFEWRDPEKGNTGQLTWTRLPQGFKNSPTLFDEALHRDLASFRALNPQVVMLQYVDDLLVAAPTYRDCKEGTRRLLQELSKLGYRVSAKKAQLCREEVTYLGYLLKGGKRWLTPARKATVMKIPTPTTPRQVREFLGTAGFCRLWIPGFASLAAPLYPLTREKVPFTWTEAHQEAFGRIKEALLSAPALALPDLTKPFALYVDEKEGVARGVLTQTLGPWRRPVAYLSKKLDPVASGWPTCLKAIAAVALLLKDADKLTLGQNVLVIAPHNLESIVRQPPDRWMTNARMTHYQSLLLNERVSFAPPAILNPATLLPVESDDTPIHICSEILAEETGTRPDLRDQPLPGVPAWYTDGSSFIMDGRRQAGAAIVDNKRTVWASNLPEGTSAQKAELIALTQALRLAEGKSINIYTDSRYAFATAHVHGAIYKQRGLLTSAGKDIKNKEEILALLEAIHLPKRVAIIHCPGHQRGTDPVATGNRKADEAAKQAAQSTRILTETTKNAGKRTADGSEFEKRTADGSEFESPKKKAKVE

SEQ ID NO: 7656 - protein, 2253 aa, synthetic construct
MPAAKRVKLDGGDKKYSIGLDIGTNSVGWAVITDEYKVPSKKFKVLGNTDRHSIKKNLIGALLFDSGETAEATRLKRTARRRYTRRKNRICYLQEIFSNEMAKVDDSFFHRLEESFLVEEDKKHERHPIFGNIVDEVAYHEKYPTIYHLRKKLVDSTDKADLRLIYLALAHMIKFRGHFLIEGDLNPDNSDVDKLFIQLVQTYNQLFEENPINASGVDAKAILSARLSKSRRLENLIAQLPGEKKNGLFGNLIALSLGLTPNFKSNFDLAEDAKLQLSKDTYDDDLDNLLAQIGDQYADLFLAAKNLSDAILLSDILRVNTEITKAPLSASMIKRYDEHHQDLTLLKALVRQQLPEKYKEIFFDQSKNGYAGYIDGGASQEEFYKFIKPILEKMDGTEELLVKLNREDLLRKQRTFDNGSIPHQIHLGELHAILRRQEDFYPFLKDNREKIEKILTFRIPYYVGPLARGNSRFAWMTRKSEETITPWNFEEVVDKGASAQSFIERMTNFDKNLPNEKVLPKHSLLYEYFTVYNELTKVKYVTEGMRKPAFLSGEQKKAIVDLLFKTNRKVTVKQLKEDYFKKIECFDSVEISGVEDRFNASLGTYHDLLKIIKDKDFLDNEENEDILEDIVLTLTLFEDREMIEERLKTYAHLFDDKVMKQLKRRRYTGWGRLSRKLINGIRDKQSGKTILDFLKSDGFANRNFMQLIHDDSLTFKEDIQKAQVSGQGDSLHEHIANLAGSPAIKKGILQTVKVVDELVKVMGRHKPENIVIEMARENQTTQKGQKNSRERMKRIEEGIKELGSQILKEHPVENTQLQNEKLYLYYLQNGRDMYVDQELDINRLSDYDVDHIVPQSFLKDDSIDNKVLTRSDKARGKSDNVPSEEVVKKMKNYWRQLLNAKLITQRKFDNLTKAERGGLSELDKAGFIKRQLVETRQITKHVAQILDSRMNTKYDENDKLIREVKVITLKSKLVSDFRKDFQFYKVREINNYHHAHDAYLNAVVGTALIKKYPKLESEFVYGDYKVYDVRKMIAKSEQEIGKATAKYFFYSNIMNFFKTEITLANGEIRKRPLIETNGETGEIVWDKGRDFATVRKVLSMPQVNIVKKTEVQTGGFSKESILPKRNSDKLIARKKDWDPKKYGGFDSPTVAYSVLVVAKVEKGKSKKLKSVKELLGITIMERSSFEKNPIDFLEAKGYKEVKKDLIIKLPKYSLFELENGRKRMLASAGELQKGNELALPSKYVNFLYLASHYEKLKGSPEDNEQKQLFVEQHKHYLDEIIEQISEFSKRVILADANLDKVLSAYNKHRDKPIREQAENIIHLFTLTNLGAPAAFKYFDTTIDRKRYTSTKEVLDATLIHQSITGLYETRIDLSQLGGDGGAEAAAKEAAAKEAAAKEAAAKALEAEAAAKEAAAKEAAAKEAAAKAGGTLGDQGSRGSDPLPEPRVTLTVEGIPTEFLVNTGAEHSVLTKPMGKMGSKRTVVAGATGSKVYPWTTKRLLKIGQKQVTHSFLVIPECPAPLLGRDLLTKLKAQIQFSTEGPQVTWEDRPAMCLVLNLEEEYRLHEKPVPPSIDPSWLQLFPMVWAEKAGMGLANQVPPVVVELKSDASPVAVRQYPMSKEAREGIRPHIQRFLDLGILVPCQSPWNTPLLPVKKPGTNDYRPVQDLREVNKRVQDIHPTVPNPYNLLSSLPPSHTWYSVLDLKDAFFCLKLHPNSQPLFAFEWRDPEKGNTGQLTWTRLPQGFKNSPTLFNEALHRDLASFRALNPQVVMLQYVDDLLVAAPTYRDCKEGTRRLLQELSKLGYRVSAKKAQLCREEVTYLGYLLKGGKRWLTPARKATVMKIPTPTTPRQVREFLGTAGFCRLWIPGFASLAAPLYPLTRPKVPFTWTEAHQEAFGRIKEALLSAPALALPDLTKPFALYVDEKEGVARGVLTQTLGPWRRPVAYLSKKLDPVASGWPTCLKAIAAVALLLKDADKLTLGQNVLVIAPHNLESIVRQPPDRWMTNARMTHYQSLLLNERVSFAPPAILNPATLLPVESDDTPIHICSEILAEETGTRPDLRDQPLPGVPAWYTDGSSFIMDGRRQAGAAIVDNKRTVWASNLPEGTSAQKAELIALTQALRLAEGKSINIYTDSRYAFATAHVHGAIYKQRGWLTSAGKDIKNKEEILALLEAIHLPKRVAIIHCPGHQRGTDPVATGNRKADEAAKQAAQSTRILTETTKNAGKRTADGSEFEKRTADGSEFESPKKKAKVE

SEQ ID NO: 7657 - protein, 2131 aa, synthetic construct
MPAAKRVKLDGGDKKYSIGLDIGTNSVGWAVITDEYKVPSKKFKVLGNTDRHSIKKNLIGALLFDSGETAEATRLKRTARRRYTRRKNRICYLQEIFSNEMAKVDDSFFHRLEESFLVEEDKKHERHPIFGNIVDEVAYHEKYPTIYHLRKKLVDSTDKADLRLIYLALAHMIKFRGHFLIEGDLNPDNSDVDKLFIQLVQTYNQLFEENPINASGVDAKAILSARLSKSRRLENLIAQLPGEKKNGLFGNLIALSLGLTPNFKSNFDLAEDAKLQLSKDTYDDDLDNLLAQIGDQYADLFLAAKNLSDAILLSDILRVNTEITKAPLSASMIKRYDEHHQDLTLLKALVRQQLPEKYKEIFFDQSKNGYAGYIDGGASQEEFYKFIKPILEKMDGTEELLVKLNREDLLRKQRTFDNGSIPHQIHLGELHAILRRQEDFYPFLKDNREKIEKILTFRIPYYVGPLARGNSRFAWMTRKSEETITPWNFEEVVDKGASAQSFIERMTNFDKNLPNEKVLPKHSLLYEYFTVYNELTKVKYVTEGMRKPAFLSGEQKKAIVDLLFKTNRKVTVKQLKEDYFKKIECFDSVEISGVEDRFNASLGTYHDLLKIIKDKDFLDNEENEDILEDIVLTLTLFEDREMIEERLKTYAHLFDDKVMKQLKRRRYTGWGRLSRKLINGIRDKQSGKTILDFLKSDGFANRNFMQLIHDDSLTFKEDIQKAQVSGQGDSLHEHIANLAGSPAIKKGILQTVKVVDELVKVMGRHKPENIVIEMARENQTTQKGQKNSRERMKRIEEGIKELGSQILKEHPVENTQLQNEKLYLYYLQNGRDMYVDQELDINRLSDYDVDHIVPQSFLKDDSIDNKVLTRSDKARGKSDNVPSEEVVKKMKNYWRQLLNAKLITQRKFDNLTKAERGGLSELDKAGFIKRQLVETRQITKHVAQILDSRMNTKYDENDKLIREVKVITLKSKLVSDFRKDFQFYKVREINNYHHAHDAYLNAVVGTALIKKYPKLESEFVYGDYKVYDVRKMIAKSEQEIGKATAKYFFYSNIMNFFKTEITLANGEIRKRPLIETNGETGEIVWDKGRDFATVRKVLSMPQVNIVKKTEVQTGGFSKESILPKRNSDKLIARKKDWDPKKYGGFDSPTVAYSVLVVAKVEKGKSKKLKSVKELLGITIMERSSFEKNPIDFLEAKGYKEVKKDLIIKLPKYSLFELENGRKRMLASAGELQKGNELALPSKYVNFLYLASHYEKLKGSPEDNEQKQLFVEQHKHYLDEIIEQISEFSKRVILADANLDKVLSAYNKHRDKPIREQAENIIHLFTLTNLGAPAAFKYFDTTIDRKRYTSTKEVLDATLIHQSITGLYETRIDLSQLGGDGGAEAAAKEAAAKEAAAKEAAAKALEAEAAAKEAAAKEAAAKEAAAKAGGTLNLEDEYRLYETSAEPEVSPGSTWLSDFPQAWAETGGMGLAVRQAPLIIPLKATSTPVSIKQYPMSQEAKLGIKPHIQRLLDQGILVPCQSPWNTPLLPVKKPGTNDYRPVQDLREVNKRVEDIHPTVPNPYNLLSGLPPSHRWYTVLDLKDAFFCLRLHPTSQPLFAFEWRDPGMGISGQLTWTRLPQGFKNSPTLFNEALHRDLADFRIQHPDLILLQYVDDILLAATSELDCQQGTRALLLTLGNLGYRASAKKAQLCQKQVKYLGYLLKEGQRWLTEARKETVMGQPTPKTPRQLREFLGTAGFCRLWIPGFAEMAAPLYPLTKPGTLFNWGPDQQKAYQEIKQALLTAPALGLPDLTKPFELFVDEKQGYAKGVLTQKLGPWRRPVAYLSKKLDPVAAGWPPCLRMVAAIAVLRKDAGKLTMGQPLVILAPHAVEALVKQPPDRWLSNARMTHYQAMLLDTDRVQFGPVVALNPATLLPLPEEGAPHDCLEILAETHGTRPDLTDQPIPDADHTWYTDGSSFLQEGQRKAGAAVTTETEVIWARALPAGTSAQRAELIALTQALKMAEGKRLNVYTDSRYAFATAHIHGEIYRRRGWLTSEGREIKNKSEILALLKALFLPKRLSIIHCLGHQKGDSAEARGNRLADQAAREAAIKTPPDTSTLLAGKRTADGSEFEKRTADGSEFESPKKKAKVE

SEQ ID NO: 7658 - protein, 2131 aa, synthetic construct
MPAAKRVKLDGGDKKYSIGLDIGTNSVGWAVITDEYKVPSKKFKVLGNTDRHSIKKNLIGALLFDSGETAEATRLKRTARRRYTRRKNRICYLQEIFSNEMAKVDDSFFHRLEESFLVEEDKKHERHPIFGNIVDEVAYHEKYPTIYHLRKKLVDSTDKADLRLIYLALAHMIKFRGHFLIEGDLNPDNSDVDKLFIQLVQTYNQLFEENPINASGVDAKAILSARLSKSRRLENLIAQLPGEKKNGLFGNLIALSLGLTPNFKSNFDLAEDAKLQLSKDTYDDDLDNLLAQIGDQYADLFLAAKNLSDAILLSDILRVNTEITKAPLSASMIKRYDEHHQDLTLLKALVRQQLPEKYKEIFFDQSKNGYAGYIDGGASQEEFYKFIKPILEKMDGTEELLVKLNREDLLRKQRTFDNGSIPHQIHLGELHAILRRQEDFYPFLKDNREKIEKILTFRIPYYVGPLARGNSRFAWMTRKSEETITPWNFEEVVDKGASAQSFIERMTNFDKNLPNEKVLPKHSLLYEYFTVYNELTKVKYVTEGMRKPAFLSGEQKKAIVDLLFKTNRKVTVKQLKEDYFKKIECFDSVEISGVEDRFNASLGTYHDLLKIIKDKDFLDNEENEDILEDIVLTLTLFEDREMIEERLKTYAHLFDDKVMKQLKRRRYTGWGRLSRKLINGIRDKQSGKTILDFLKSDGFANRNFMQLIHDDSLTFKEDIQKAQVSGQGDSLHEHIANLAGSPAIKKGILQTVKVVDELVKVMGRHKPENIVIEMARENQTTQKGQKNSRERMKRIEEGIKELGSQILKEHPVENTQLQNEKLYLYYLQNGRDMYVDQELDINRLSDYDVDHIVPQSFLKDDSIDNKVLTRSDKARGKSDNVPSEEVVKKMKNYWRQLLNAKLITQRKFDNLTKAERGGLSELDKAGFIKRQLVETRQITKHVAQILDSRMNTKYDENDKLIREVKVITLKSKLVSDFRKDFQFYKVREINNYHHAHDAYLNAVVGTALIKKYPKLESEFVYGDYKVYDVRKMIAKSEQEIGKATAKYFFYSNIMNFFKTEITLANGEIRKRPLIETNGETGEIVWDKGRDFATVRKVLSMPQVNIVKKTEVQTGGFSKESILPKRNSDKLIARKKDWDPKKYGGFDSPTVAYSVLVVAKVEKGKSKKLKSVKELLGITIMERSSFEKNPIDFLEAKGYKEVKKDLIIKLPKYSLFELENGRKRMLASAGELQKGNELALPSKYVNFLYLASHYEKLKGSPEDNEQKQLFVEQHKHYLDEIIEQISEFSKRVILADANLDKVLSAYNKHRDKPIREQAENIIHLFTLTNLGAPAAFKYFDTTIDRKRYTSTKEVLDATLIHQSITGLYETRIDLSQLGGDGGAEAAAKEAAAKEAAAKEAAAKALEAEAAAKEAAAKEAAAKEAAAKAGGTLNIEDEYRLHETSKEPDVSLGSTWLSDFPQAWAETGGMGLAVRQAPLIIPLKATSTPVSIKQYPMSQEARLGIKPHIQRLLDQGILVPCQSPWNTPLLPVKKPGTNDYRPVQDLREVNKRVEDIHPTVPNPYNLLSGLPPSHQWYTVLDLKDAFFCLRLHPTSQPLFAFEWRDPEMGISGQLTWTRLPQGFKNSPTLFNEALHRDLAGFRIQHPDLILLQYVDDLLLAATSELDCQQGTRALLQTLGDLGYRASAKKAQICQKQVKYLGYLLKEGQRWLTEARKETVMGQPIPKTPRQLREFLGTAGFCRLWIPGFAEMAAPLYPLTKPGTLFNWGPDQQKAFQEIKQALLTAPALGLPDLTKPFELFVDEKQGYAKGVLTQKLGPWRRPVAYLSKKLDPVAAGWPPCLRMVAAIAVLTKDAGKLTMGQPLVILAPHAVEALVKQPPDRWLSNARMTHYQALLLDTDRVQFGPVVALNPATLLPLPEEGLQHDCLDILAEAHGTRSDLMDQPLPDADHTWYTDGSSFLQEGQRKAGAAVTTETEVIWARALPAGTSAQRAELIALTQALKMAEGKKLNVYTDSRYAFATAHIHGEIYRRRGWLTSEGKEIKNKDEILALLKALFLPKRLSIIHCPGHQKGNSAEARGNRMADQAAREVATRETPETSTLLAGKRTADGSEFEKRTADGSEFESPKKKAKVE

SEQ ID NO: 7659 - protein, 2131 aa, synthetic construct
MPAAKRVKLDGGDKKYSIGLDIGTNSVGWAVITDEYKVPSKKFKVLGNTDRHSIKKNLIGALLFDSGETAEATRLKRTARRRYTRRKNRICYLQEIFSNEMAKVDDSFFHRLEESFLVEEDKKHERHPIFGNIVDEVAYHEKYPTIYHLRKKLVDSTDKADLRLIYLALAHMIKFRGHFLIEGDLNPDNSDVDKLFIQLVQTYNQLFEENPINASGVDAKAILSARLSKSRRLENLIAQLPGEKKNGLFGNLIALSLGLTPNFKSNFDLAEDAKLQLSKDTYDDDLDNLLAQIGDQYADLFLAAKNLSDAILLSDILRVNTEITKAPLSASMIKRYDEHHQDLTLLKALVRQQLPEKYKEIFFDQSKNGYAGYIDGGASQEEFYKFIKPILEKMDGTEELLVKLNREDLLRKQRTFDNGSIPHQIHLGELHAILRRQEDFYPFLKDNREKIEKILTFRIPYYVGPLARGNSRFAWMTRKSEETITPWNFEEVVDKGASAQSFIERMTNFDKNLPNEKVLPKHSLLYEYFTVYNELTKVKYVTEGMRKPAFLSGEQKKAIVDLLFKTNRKVTVKQLKEDYFKKIECFDSVEISGVEDRFNASLGTYHDLLKIIKDKDFLDNEENEDILEDIVLTLTLFEDREMIEERLKTYAHLFDDKVMKQLKRRRYTGWGRLSRKLINGIRDKQSGKTILDFLKSDGFANRNFMQLIHDDSLTFKEDIQKAQVSGQGDSLHEHIANLAGSPAIKKGILQTVKVVDELVKVMGRHKPENIVIEMARENQTTQKGQKNSRERMKRIEEGIKELGSQILKEHPVENTQLQNEKLYLYYLQNGRDMYVDQELDINRLSDYDVDHIVPQSFLKDDSIDNKVLTRSDKARGKSDNVPSEEVVKKMKNYWRQLLNAKLITQRKFDNLTKAERGGLSELDKAGFIKRQLVETRQITKHVAQILDSRMNTKYDENDKLIREVKVITLKSKLVSDFRKDFQFYKVREINNYHHAHDAYLNAVVGTALIKKYPKLESEFVYGDYKVYDVRKMIAKSEQEIGKATAKYFFYSNIMNFFKTEITLANGEIRKRPLIETNGETGEIVWDKGRDFATVRKVLSMPQVNIVKKTEVQTGGFSKESILPKRNSDKLIARKKDWDPKKYGGFDSPTVAYSVLVVAKVEKGKSKKLKSVKELLGITIMERSSFEKNPIDFLEAKGYKEVKKDLIIKLPKYSLFELENGRKRMLASAGELQKGNELALPSKYVNFLYLASHYEKLKGSPEDNEQKQLFVEQHKHYLDEIIEQISEFSKRVILADANLDKVLSAYNKHRDKPIREQAENIIHLFTLTNLGAPAAFKYFDTTIDRKRYTSTKEVLDATLIHQSITGLYETRIDLSQLGGDGGAEAAAKEAAAKEAAAKEAAAKALEAEAAAKEAAAKEAAAKEAAAKAGGTLNIEDEYRLHETSKGPDVPLGSTWLSDFPQAWAETGGMGLAFRQAPLIISLKATSTPVSIKQYPMSQEARLGIKPHIQRLLDQGILVPCQSPWNTPLLPVKKPGTNDYRPVQDLREVNKRVEDIHPTVPNPYNLLSGLPPSHQWYTVLDLKDAFFCLRLHPTSQSLFAFEWKDPEMGISGQLTWTRLPQGFKNSPTLFNEALHRDLADFRIQHPDLILLQYVDDLLLAATSELDCQQGTRALLQTLGDLGYRASAKKAQICQKQVKYLGYLLKEGQRWLTEARKETVMGQPTPKTPRQLREFLGKAGLCRLFIPGFAEMAAPLYPLTKPGTLFKWGPDQQKAYQEIKQALLTAPALGLPDLTKPFELFVDEKQGYAKGVLTQKLGPWRRPVAYLSKKLDPVAAGWPPCLRMVAAIAVLTKDVGKLTMGQPLVILAPHAVEALVKQPPDRWLSNARMTHYQALLLDTDRVQFGPIVALNPATLLPLPEEGLQHDCLDILAEAHGTRPDLTDQPLPDADHTWYTDGSSFLQEGQRRAGAAVTTETEVIWAKALPAGTSAQRAELIALTQALKMAAGKKLNVYTDSRYAFATAHIHGEIYRRRGWLTSEGKEIKNKDEILALLKALFLPKRLSIIHCPGHQKGNHAEARGNRMADQAAREVATRETPETSTLLAGKRTADGSEFEKRTADGSEFESPKKKAKVE

SEQ ID NO: 7660 - protein, 2131 aa, synthetic construct; identical to SEQ ID NO: 4540

SEQ ID NO: 7661 - protein, 2151 aa, synthetic construct
MPAAKRVKLDGGDKKYSIGLDIGTNSVGWAVITDEYKVPSKKFKVLGNTDRHSIKKNLIGALLFDSGETAEATRLKRTARRRYTRRKNRICYLQEIFSNEMAKVDDSFFHRLEESFLVEEDKKHERHPIFGNIVDEVAYHEKYPTIYHLRKKLVDSTDKADLRLIYLALAHMIKFRGHFLIEGDLNPDNSDVDKLFIQLVQTYNQLFEENPINASGVDAKAILSARLSKSRRLENLIAQLPGEKKNGLFGNLIALSLGLTPNFKSNFDLAEDAKLQLSKDTYDDDLDNLLAQIGDQYADLFLAAKNLSDAILLSDILRVNTEITKAPLSASMIKRYDEHHQDLTLLKALVRQQLPEKYKEIFFDQSKNGYAGYIDGGASQEEFYKFIKPILEKMDGTEELLVKLNREDLLRKQRTFDNGSIPHQIHLGELHAILRRQEDFYPFLKDNREKIEKILTFRIPYYVGPLARGNSRFAWMTRKSEETITPWNFEEVVDKGASAQSFIERMTNFDKNLPNEKVLPKHSLLYEYFTVYNELTKVKYVTEGMRKPAFLSGEQKKAIVDLLFKTNRKVTVKQLKEDYFKKIECFDSVEISGVEDRFNASLGTYHDLLKIIKDKDFLDNEENEDILEDIVLTLTLFEDREMIEERLKTYAHLFDDKVMKQLKRRRYTGWGRLSRKLINGIRDKQSGKTILDFLKSDGFANRNFMQLIHDDSLTFKEDIQKAQVSGQGDSLHEHIANLAGSPAIKKGILQTVKVVDELVKVMGRHKPENIVIEMARENQTTQKGQKNSRERMKRIEEGIKELGSQILKEHPVENTQLQNEKLYLYYLQNGRDMYVDQELDINRLSDYDVDHIVPQSFLKDDSIDNKVLTRSDKARGKSDNVPSEEVVKKMKNYWRQLLNAKLITQRKFDNLTKAERGGLSELDKAGFIKRQLVETRQITKHVAQILDSRMNTKYDENDKLIREVKVITLKSKLVSDFRKDFQFYKVREINNYHHAHDAYLNAVVGTALIKKYPKLESEFVYGDYKVYDVRKMIAKSEQEIGKATAKYFFYSNIMNFFKTEITLANGEIRKRPLIETNGETGEIVWDKGRDFATVRKVLSMPQVNIVKKTEVQTGGFSKESILPKRNSDKLIARKKDWDPKKYGGFDSPTVAYSVLVVAKVEKGKSKKLKSVKELLGITIMERSSFEKNPIDFLEAKGYKEVKKDLIIKLPKYSLFELENGRKRMLASAGELQKGNELALPSKYVNFLYLASHYEKLKGSPEDNEQKQLFVEQHKHYLDEIIEQISEFSKRVILADANLDKVLSAYNKHRDKPIREQAENIIHLFTLTNLGAPAAFKYFDTTIDRKRYTSTKEVLDATLIHQSITGLYETRIDLSQLGGDGGAEAAAKEAAAKEAAAKEAAAKALEAEAAAKEAAAKEAAAKEAAAKAGGWVQEISDSRPMLHIYLNGRRFLGLLNTGADKTCIAGRDWPANWPIHQTESSLQGLGMACGVARSSQPLRWQHEDKSGIIHPFVIPTLPFTLWGRDIMKDIKVRLMTDSPDDSQDLMIGAIESNLFADQISWKSDQPVWLNQWPLKQEKLQALQQLVTEQLQLGHLEESNSPWNTPVFVIKKKSGKWRLLQDLRAVNATMHDMGALQPGLPSPVAVPKGWEIIIIDLQDCFFNIKLHPEDCKRFAFSVPSPNFKRPYQRFQWKVLPQGMKNSPTLCQKFVDKAILTVRDKYQDSYIVHYMDDILLAHPSRSIVDEILTSMIQALNKHGLVVSTEKIQKYDNLKYLGTHIQGDSVSYQKLQIRTDKLRTLNDFQKLLGNINWIRPFLKLTTGELKPLFEILNPDSNPISTRKLTPEACKALQLMNERLSTARVKRLDLSQPWSLCILKTEYTPTACLWQDGVVEWIHLPHISPKVITPYDIFCTQLIIKGRHRSKELFSKDPDYIVVPYTKVQFDLLLQEKEDWPISLLGFLGEVHFHLPKDPLLTFTLQTAIIFPHMTSTTPLEKGIVIFTDGSANGRSVTYIQGREPIIKENTQNTAQQAEIVAVITAFEEVSQPFNLYTDSKYVTGLFPEIETATLSPRTKIYTELKHLQRLIHKRQEKFYIGHIRGHTGLPGPLAQGNAYADSLTRILTAGKRTADGSEFEKRTADGSEFESPKKKAKVE

SEQ ID NO: 7662 - protein, 2122 aa, synthetic construct
MPAAKRVKLDGGDKKYSIGLDIGTNSVGWAVITDEYKVPSKKFKVLGNTDRHSIKKNLIGALLFDSGETAEATRLKRTARRRYTRRKNRICYLQEIFSNEMAKVDDSFFHRLEESFLVEEDKKHERHPIFGNIVDEVAYHEKYPTIYHLRKKLVDSTDKADLRLIYLALAHMIKFRGHFLIEGDLNPDNSDVDKLFIQLVQTYNQLFEENPINASGVDAKAILSARLSKSRRLENLIAQLPGEKKNGLFGNLIALSLGLTPNFKSNFDLAEDAKLQLSKDTYDDDLDNLLAQIGDQYADLFLAAKNLSDAILLSDILRVNTEITKAPLSASMIKRYDEHHQDLTLLKALVRQQLPEKYKEIFFDQSKNGYAGYIDGGASQEEFYKFIKPILEKMDGTEELLVKLNREDLLRKQRTFDNGSIPHQIHLGELHAILRRQEDFYPFLKDNREKIEKILTFRIPYYVGPLARGNSRFAWMTRKSEETITPWNFEEVVDKGASAQSFIERMTNFDKNLPNEKVLPKHSLLYEYFTVYNELTKVKYVTEGMRKPAFLSGEQKKAIVDLLFKTNRKVTVKQLKEDYFKKIECFDSVEISGVEDRFNASLGTYHDLLKIIKDKDFLDNEENEDILEDIVLTLTLFEDREMIEERLKTYAHLFDDKVMKQLKRRRYTGWGRLSRKLINGIRDKQSGKTILDFLKSDGFANRNFMQLIHDDSLTFKEDIQKAQVSGQGDSLHEHIANLAGSPAIKKGILQTVKVVDELVKVMGRHKPENIVIEMARENQTTQKGQKNSRERMKRIEEGIKELGSQILKEHPVENTQLQNEKLYLYYLQNGRDMYVDQELDINRLSDYDVDHIVPQSFLKDDSIDNKVLTRSDKARGKSDNVPSEEVVKKMKNYWRQLLNAKLITQRKFDNLTKAERGGLSELDKAGFIKRQLVETRQITKHVAQILDSRMNTKYDENDKLIREVKVITLKSKLVSDFRKDFQFYKVREINNYHHAHDAYLNAVVGTALIKKYPKLESEFVYGDYKVYDVRKMIAKSEQEIGKATAKYFFYSNIMNFFKTEITLANGEIRKRPLIETNGETGEIVWDKGRDFATVRKVLSMPQVNIVKKTEVQTGGFSKESILPKRNSDKLIARKKDWDPKKYGGFDSPTVAYSVLVVAKVEKGKSKKLKSVKELLGITIMERSSFEKNPIDFLEAKGYKEVKKDLIIKLPKYSLFELENGRKRMLASAGELQKGNELALPSKYVNFLYLASHYEKLKGSPEDNEQKQLFVEQHKHYLDEIIEQISEFSKRVILADANLDKVLSAYNKHRDKPIREQAENIIHLFTLTNLGAPAAFKYFDTTIDRKRYTSTKEVLDATLIHQSITGLYETRIDLSQLGGDGGAEAAAKEAAAKEAAAKEAAAKALEAEAAAKEAAAKEAAAKEAAAKAGGVPWLMKKPLQLTVLVPLHEYQERLLQQTALPKEQKELLQKLFLKYDALWQHWENQVGHRRIKPHNIATGTLAPRPQKQYPINPKAKPSIQIVIDDLLKQGVLIQQNSTMNTPVYPVPKPDGKWRMVLDYREVNKTIPLIAAQNQHSAGILSSIYRGKYKTTLDLTNGFWAHPITPESYWLTAFTWQGKQYCWTRLPQGFLNSPALFTADVVDLLKEIPNVQAYVDDIYISHDDPQEHLEQLEKIFSILLNAGYVVSLKKSEIAQREVEFLGFNITKEGRGLTDTFKQKLLNITPPKDLKQLQSILGLLNFARNFIPNYSELVKPLYTIVANANGKFISWTEDNSNQLQHIISVLNQADNLEERNPETRLIIKVNSSPSAGYIRYYNEGSKRPIMYVNYIFSKAEAKFTQTEKLLTTMHKGLIKAMDLAMGQEILVYSPIVSMTKIQRTPLPERKALPVRWITWMTYLEDPRIQFHYDKSLPELQQIPNVTEDVIAKTKHPSEFAMVFYTDGSAIKHPDVNKSHSAGMGIAQVQFIPEYKIVHQWSIPLGDHTAQLAEIAAVEFACKKALKISGPVLIVTDSFYVAESANKELPYWKSNGFLNNKKKPLRHVSKWKSIAECLQLKPDIIIMHEKGHQQPMTTLHTEGNNLADKLATQGSYVVHAGKRTADGSEFEKRTADGSEFESPKKKAKVE

SEQ ID NO: 7663 - protein, 2122 aa, synthetic construct
MPAAKRVKLDGGDKKYSIGLDIGTNSVGWAVITDEYKVPSKKFKVLGNTDRHSIKKNLIGALLFDSGETAEATRLKRTARRRYTRRKNRICYLQEIFSNEMAKVDDSFFHRLEESFLVEEDKKHERHPIFGNIVDEVAYHEKYPTIYHLRKKLVDSTDKADLRLIYLALAHMIKFRGHFLIEGDLNPDNSDVDKLFIQLVQTYNQLFEENPINASGVDAKAILSARLSKSRRLENLIAQLPGEKKNGLFGNLIALSLGLTPNFKSNFDLAEDAKLQLSKDTYDDDLDNLLAQIGDQYADLFLAAKNLSDAILLSDILRVNTEITKAPLSASMIKRYDEHHQDLTLLKALVRQQLPEKYKEIFFDQSKNGYAGYIDGGASQEEFYKFIKPILEKMDGTEELLVKLNREDLLRKQRTFDNGSIPHQIHLGELHAILRRQEDFYPFLKDNREKIEKILTFRIPYYVGPLARGNSRFAWMTRKSEETITPWNFEEVVDKGASAQSFIERMTNFDKNLPNEKVLPKHSLLYEYFTVYNELTKVKYVTEGMRKPAFLSGEQKKAIVDLLFKTNRKVTVKQLKEDYFKKIECFDSVEISGVEDRFNASLGTYHDLLKIIKDKDFLDNEENEDILEDIVLTLTLFEDREMIEERLKTYAHLFDDKVMKQLKRRRYTGWGRLSRKLINGIRDKQSGKTILDFLKSDGFANRNFMQLIHDDSLTFKEDIQKAQVSGQGDSLHEHIANLAGSPAIKKGILQTVKVVDELVKVMGRHKPENIVIEMARENQTTQKGQKNSRERMKRIEEGIKELGSQILKEHPVENTQLQNEKLYLYYLQNGRDMYVDQELDINRLSDYDVDHIVPQSFLKDDSIDNKVLTRSDKARGKSDNVPSEEVVKKMKNYWRQLLNAKLITQRKFDNLTKAERGGLSELDKAGFIKRQLVETRQITKHVAQILDSRMNTKYDENDKLIREVKVITLKSKLVSDFRKDFQFYKVREINNYHHAHDAYLNAVVGTALIKKYPKLESEFVYGDYKVYDVRKMIAKSEQEIGKATAKYFFYSNIMNFFKTEITLANGEIRKRPLIETNGETGEIVWDKGRDFATVRKVLSMPQVNIVKKTEVQTGGFSKESILPKRNSDKLIARKKDWDPKKYGGFDSPTVAYSVLVVAKVEKGKSKKLKSVKELLGITIMERSSFEKNPIDFLEAKGYKEVKKDLIIKLPKYSLFELENGRKRMLASAGELQKGNELALPSKYVNFLYLASHYEKLKGSPEDNEQKQLFVEQHKHYLDEIIEQISEFSKRVILADANLDKVLSAYNKHRDKPIREQAENIIHLFTLTNLGAPAAFKYFDTTIDRKRYTSTKEVLDATLIHQSITGLYETRIDLSQLGGDGGAEAAAKEAAAKEAAAKEAAAKALEAEAAAKEAAAKEAAAKEAAAKAGGVPWLMKKPLQLTVLVPLHEYQERLLQQTALPKEQKELLQKLFLKYDALWQHWENQVGHRRIKPHNIATGTLAPRPQKQYPINPKAKPSIQIVIDDLLKQGVLIQQNSTMNTPVYPVPKPDGKWRMVLDYREVNKTIPLIAAQNQHSAGILSSIYRGKYKTTLDLTNGFWAHPITPESYWLTAFTWQGKQYCWTRLPQGFLNSPALFNADVVDLLKEIPNVQAYVDDIYISHDDPQEHLEQLEKIFSILLNAGYVVSLKKSEIAQREVEFLGFNITKEGRGLTDTFKQKLLNITPPKDLKQLQSILGLLNFARNFIPNYSELVKPLYTIVAPANGKFISWTEDNSNQLQHIISVLNQADNLEERNPETRLIIKVNSSPSAGYIRYYNEGSKRPIMYVNYIFSKAEAKFTQTEKLLTTMHKGLIKAMDLAMGQEILVYSPIVSMTKIQRTPLPERKALPVRWITWMTYLEDPRIQFHYDKSLPELQQIPNVTEDVIAKTKHPSEFAMVFYTDGSAIKHPDVNKSHSAGMGIAQVQFIPEYKIVHQWSIPLGDHTAQLAEIAAVEFACKKALKISGPVLIVTDSFYVAESANKELPYWKSNGFLNNKKKPLRHVSKWKSIAECLQLKPDIIIMHEKGHQQPMTTLHTEGNNLADKLATQGSYVVHAGKRTADGSEFEKRTADGSEFESPKKKAKVE

SEQ ID NO: 7664 - protein, 2122 aa, synthetic construct
MPAAKRVKLDGGDKKYSIGLDIGTNSVGWAVITDEYKVPSKKFKVLGNTDRHSIKKNLIGALLFDSGETAEATRLKRTARRRYTRRKNRICYLQEIFSNEMAKVDDSFFHRLEESFLVEEDKKHERHPIFGNIVDEVAYHEKYPTIYHLRKKLVDSTDKADLRLIYLALAHMIKFRGHFLIEGDLNPDNSDVDKLFIQLVQTYNQLFEENPINASGVDAKAILSARLSKSRRLENLIAQLPGEKKNGLFGNLIALSLGLTPNFKSNFDLAEDAKLQLSKDTYDDDLDNLLAQIGDQYADLFLAAKNLSDAILLSDILRVNTEITKAPLSASMIKRYDEHHQDLTLLKALVRQQLPEKYKEIFFDQSKNGYAGYIDGGASQEEFYKFIKPILEKMDGTEELLVKLNREDLLRKQRTFDNGSIPHQIHLGELHAILRRQEDFYPFLKDNREKIEKILTFRIPYYVGPLARGNSRFAWMTRKSEETITPWNFEEVVDKGASAQSFIERMTNFDKNLPNEKVLPKHSLLYEYFTVYNELTKVKYVTEGMRKPAFLSGEQKKAIVDLLFKTNRKVTVKQLKEDYFKKIECFDSVEISGVEDRFNASLGTYHDLLKIIKDKDFLDNEENEDILEDIVLTLTLFEDREMIEERLKTYAHLFDDKVMKQLKRRRYTGWGRLSRKLINGIRDKQSGKTILDFLKSDGFANRNFMQLIHDDSLTFKEDIQKAQVSGQGDSLHEHIANLAGSPAIKKGILQTVKVVDELVKVMGRHKPENIVIEMARENQTTQKGQKNSRERMKRIEEGIKELGSQILKEHPVENTQLQNEKLYLYYLQNGRDMYVDQELDINRLSDYDVDHIVPQSFLKDDSIDNKVLTRSDKARGKSDNVPSEEVVKKMKNYWRQLLNAKLITQRKFDNLTKAERGGLSELDKAGFIKRQLVETRQITKHVAQILDSRMNTKYDENDKLIREVKVITLKSKLVSDFRKDFQFYKVREINNYHHAHDAYLNAVVGTALIKKYPKLESEFVYGDYKVYDVRKMIAKSEQEIGKATAKYFFYSNIMNFFKTEITLANGEIRKRPLIETNGETGEIVWDKGRDFATVRKVLSMPQVNIVKKTEVQTGGFSKESILPKRNSDKLIARKKDWDPKKYGGFDSPTVAYSVLVVAKVEKGKSKKLKSVKELLGITIMERSSFEKNPIDFLEAKGYKEVKKDLIIKLPKYSLFELENGRKRMLASAGELQKGNELALPSKYVNFLYLASHYEKLKGSPEDNEQKQLFVEQHKHYLDEIIEQISEFSKRVILADANLDKVLSAYNKHRDKPIREQAENIIHLFTLTNLGAPAAFKYFDTTIDRKRYTSTKEVLDATLIHQSITGLYETRIDLSQLGGDGGAEAAAKEAAAKEAAAKEAAAKALEAEAAAKEAAAKEAAAKEAAAKAGGVPWLMKKPLQLTVLVPLHEYQERLLQQTALPKEQKELLQKLFLKYDALWQHWENQVGHRRIKPHNIATGTLAPRPQKQYPINPKAKPSIQIVIDDLLKQGVLIQQNSTMNTPVYPVPKPDGKWRMVLDYREVNKTIPLIAAQNQHSAGILSSIYRGKYKTTLDLTNGFWAHPITPESYWLTAFTWQGKQYCWTRLPQGFLNSPALFNADVVDLLKEIPNVQAYVDDIYISHDDPQEHLEQLEKIFSILLNAGYVVSLKKSEIAQREVEFLGFNITKEGRGLTDTFKQKLLNITPPKDLKQLQSILGKLNFARNFIPNYSELVKPLYTIVAPANGKFISWTEDNSNQLQHIISVLNQADNLEERNPETRLIIKVNSSPSAGYIRYYNEGSKRPIMYVNYIFSKAEAKFTQTEKLLTTMHKGLIKAMDLAMGQEILVYSPIVSMTKIQRTPLPERKALPVRWITWMTYLEDPRIQFHYDKSLPELQQIPNVTEDVIAKTKHPSEFAMVFYTDGSAIKHPDVNKSHSAGMGIAQVQFIPEYKIVHQWSIPLGDHTAQLAEIAAVEFACKKALKISGPVLIVTDSFYVAESANKELPYWKSNGFLNNKKKPLRHVSKWKSIAECLQLKPDIIIMHEKGHQQPMTTLHTEGNNLADKLATQGSYVVHAGKRTADGSEFEKRTADGSEFESPKKKAKVE

SEQ ID NO: 7665 - protein, 2211 aa, synthetic construct
MPAAKRVKLDGGDKKYSIGLDIGTNSVGWAVITDEYKVPSKKFKVLGNTDRHSIKKNLIGALLFDSGETAEATRLKRTARRRYTRRKNRICYLQEIFSNEMAKVDDSFFHRLEESFLVEEDKKHERHPIFGNIVDEVAYHEKYPTIYHLRKKLVDSTDKADLRLIYLALAHMIKFRGHFLIEGDLNPDNSDVDKLFIQLVQTYNQLFEENPINASGVDAKAILSARLSKSRRLENLIAQLPGEKKNGLFGNLIALSLGLTPNFKSNFDLAEDAKLQLSKDTYDDDLDNLLAQIGDQYADLFLAAKNLSDAILLSDILRVNTEITKAPLSASMIKRYDEHHQDLTLLKALVRQQLPEKYKEIFFDQSKNGYAGYIDGGASQEEFYKFIKPILEKMDGTEELLVKLNREDLLRKQRTFDNGSIPHQIHLGELHAILRRQEDFYPFLKDNREKIEKILTFRIPYYVGPLARGNSRFAWMTRKSEETITPWNFEEVVDKGASAQSFIERMTNFDKNLPNEKVLPKHSLLYEYFTVYNELTKVKYVTEGMRKPAFLSGEQKKAIVDLLFKTNRKVTVKQLKEDYFKKIECFDSVEISGVEDRFNASLGTYHDLLKIIKDKDFLDNEENEDILEDIVLTLTLFEDREMIEERLKTYAHLFDDKVMKQLKRRRYTGWGRLSRKLINGIRDKQSGKTILDFLKSDGFANRNFMQLIHDDSLTFKEDIQKAQVSGQGDSLHEHIANLAGSPAIKKGILQTVKVVDELVKVMGRHKPENIVIEMARENQTTQKGQKNSRERMKRIEEGIKELGSQILKEHPVENTQLQNEKLYLYYLQNGRDMYVDQELDINRLSDYDVDHIVPQSFLKDDSIDNKVLTRSDKARGKSDNVPSEEVVKKMKNYWRQLLNAKLITQRKFDNLTKAERGGLSELDKAGFIKRQLVETRQITKHVAQILDSRMNTKYDENDKLIREVKVITLKSKLVSDFRKDFQFYKVREINNYHHAHDAYLNAVVGTALIKKYPKLESEFVYGDYKVYDVRKMIAKSEQEIGKATAKYFFYSNIMNFFKTEITLANGEIRKRPLIETNGETGEIVWDKGRDFATVRKVLSMPQVNIVKKTEVQTGGFSKESILPKRNSDKLIARKKDWDPKKYGGFDSPTVAYSVLVVAKVEKGKSKKLKSVKELLGITIMERSSFEKNPIDFLEAKGYKEVKKDLIIKLPKYSLFELENGRKRMLASAGELQKGNELALPSKYVNFLYLASHYEKLKGSPEDNEQKQLFVEQHKHYLDEIIEQISEFSKRVILADANLDKVLSAYNKHRDKPIREQAENIIHLFTLTNLGAPAAFKYFDTTIDRKRYTSTKEVLDATLIHQSITGLYETRIDLSQLGGDGGAEAAAKEAAAKEAAAKEAAAKALEAEAAAKEAAAKEAAAKEAAAKAGGMDPLQLLQPLEAEIKGTKLKAHWNSGATITCVPEAFLEDERPIQTMLIKTIHGEKQQDVYYLTFKVQGRKVEAEVLASPYDYILLNPSDVPWLMKKPLQLTVLVPLHEYQERLLQQTALPKEQKELLQKLFLKYDALWQHWENQVGHRRIKPHNIATGTLAPRPQKQYPINPKAKPSIQIVIDDLLKQGVLIQQNSTMNTPVYPVPKPDGKWRMVLDYREVNKTIPLIAAQNQHSAGILSSIYRGKYKTTLDLTNGFWAHPITPESYWLTAFTWQGKQYCWTRLPQGFLNSPALFNADVVDLLKEIPNVQAYVDDIYISHDDPQEHLEQLEKIFSILLNAGYVVSLKKSEIAQREVEFLGFNITKEGRGLTDTFKQKLLNITPPKDLKQLQSILGLLNFARNFIPNYSELVKPLYTIVAPANGKFISWTEDNSNQLQHIISVLNQADNLEERNPETRLIIKVNSSPSAGYIRYYNEGSKRPIMYVNYIFSKAEAKFTQTEKLLTTMHKGLIKAMDLAMGQEILVYSPIVSMTKIQRTPLPERKALPVRWITWMTYLEDPRIQFHYDKSLPELQQIPNVTEDVIAKTKHPSEFAMVFYTDGSAIKHPDVNKSHSAGMGIAQVQFIPEYKIVHQWSIPLGDHTAQLAEIAAVEFACKKALKISGPVLIVTDSFYVAESANKELPYWKSNGFLNNKKKPLRHVSKWKSIAECLQLKPDIIIMHEKGHQQPMTTLHTEGNNLADKLATQGSYVVHAGKRTADGSEFEKRTADGSEFESPKKKAKVE

SEQ ID NO: 7666 - protein, 2122 aa, synthetic construct
MPAAKRVKLDGGDKKYSIGLDIGTNSVGWAVITDEYKVPSKKFKVLGNTDRHSIKKNLIGALLFDSGETAEATRLKRTARRRYTRRKNRICYLQEIFSNEMAKVDDSFFHRLEESFLVEEDKKHERHPIFGNIVDEVAYHEKYPTIYHLRKKLVDSTDKADLRLIYLALAHMIKFRGHFLIEGDLNPDNSDVDKLFIQLVQTYNQLFEENPINASGVDAKAILSARLSKSRRLENLIAQLPGEKKNGLFGNLIALSLGLTPNFKSNFDLAEDAKLQLSKDTYDDDLDNLLAQIGDQYADLFLAAKNLSDAILLSDILRVNTEITKAPLSASMIKRYDEHHQDLTLLKALVRQQLPEKYKEIFFDQSKNGYAGYIDGGASQEEFYKFIKPILEKMDGTEELLVKLNREDLLRKQRTFDNGSIPHQIHLGELHAILRRQEDFYPFLKDNREKIEKILTFRIPYYVGPLARGNSRFAWMTRKSEETITPWNFEEVVDKGASAQSFIERMTNFDKNLPNEKVLPKHSLLYEYFTVYNELTKVKYVTEGMRKPAFLSGEQKKAIVDLLFKTNRKVTVKQLKEDYFKKIECFDSVEISGVEDRFNASLGTYHDLLKIIKDKDFLDNEENEDILEDIVLTLTLFEDREMIEERLKTYAHLFDDKVMKQLKRRRYTGWGRLSRKLINGIRDKQSGKTILDFLKSDGFANRNFMQLIHDDSLTFKEDIQKAQVSGQGDSLHEHIANLAGSPAIKKGILQTVKVVDELVKVMGRHKPENIVIEMARENQTTQKGQKNSRERMKRIEEGIKELGSQILKEHPVENTQLQNEKLYLYYLQNGRDMYVDQELDINRLSDYDVDHIVPQSFLKDDSIDNKVLTRSDKARGKSDNVPSEEVVKKMKNYWRQLLNAKLITQRKFDNLTKAERGGLSELDKAGFIKRQLVETRQITKHVAQILDSRMNTKYDENDKLIREVKVITLKSKLVSDFRKDFQFYKVREINNYHHAHDAYLNAVVGTALIKKYPKLESEFVYGDYKVYDVRKMIAKSEQEIGKATAKYFFYSNIMNFFKTEITLANGEIRKRPLIETNGETGEIVWDKGRDFATVRKVLSMPQVNIVKKTEVQTGGFSKESILPKRNSDKLIARKKDWDPKKYGGFDSPTVAYSVLVVAKVEKGKSKKLKSVKELLGITIMERSSFEKNPIDFLEAKGYKEVKKDLIIKLPKYSLFELENGRKRMLASAGELQKGNELALPSKYVNFLYLASHYEKLKGSPEDNEQKQLFVEQHKHYLDEIIEQISEFSKRVILADANLDKVLSAYNKHRDKPIREQAENIIHLFTLTNLGAPAAFKYFDTTIDRKRYTSTKEVLDATLIHQSITGLYETRIDLSQLGGDGGAEAAAKEAAAKEAAAKEAAAKALEAEAAAKEAAAKEAAAKEAAAKAGGIPWLMKKPLQLTTLVPLQEYEERLLKQTMLTGSYKEKLQSLFLKYDALWQHWENQVGHRRIKPHHIATGTVNPRPQKQYPINPKAKASIQTVINDLLKQGVLIQQNSIMNTPVYPVPKPDGKWRMVLDYREVNKTIPLIAAQNQHSAGILSSIFRGKYKTTLDLSNGFWAHSITPESYWLTAFTWLGQQYCWTRLPQGFLNSPALFNADVVDLLKEVPNVQVYVDDIYISHDDPREHLEQLEKVFSLLLNAGYVVSLKKSEIAQHEVEFLGFNITKEGRGLTETFKQKLLNITPPRDLKQLQSILGLLNFARNFIPNFSELVKPLYNIIATAPGKYITWTTDNSQQLQNIISMLNSAENLEERNPEVRLIMKVNTSPSAGYIRFYNEFAKRPIMYLNYVYTKAEVKFTNTEKLLTTIHKGLIKALDLGMGQEILVYSPIVSMTKIQKTPLPERKALPIRWITWMSYLEDPRIQFHYDKTLPELQQVPTVTDDIIAKIKHPSEFSMVFYTDGSAIKHPNVNKSHNAGMGIAQVQFKPEFTVINTWSIPLGDHTAQLAEVAAVEFACKKALKIDGPVLIVTDSFYVAESVNKELPYWQSNGFFNNKKKPLKHVSKWKSIADCIQLKPDIIIIHEKGHQPTASTFHTEGNNLADKLATQGSYVVNAGKRTADGSEFEKRTADGSEFESPKKKAKVE

SEQ ID NO: 7667 - protein, 2122 aa, synthetic construct; identical to SEQ ID NO: 4541

SEQ ID NO: 7668 - protein, 2102 aa, synthetic construct
MPAAKRVKLDGGDKKYSIGLDIGTNSVGWAVITDEYKVPSKKFKVLGNTDRHSIKKNLIGALLFDSGETAEATRLKRTARRRYTRRKNRICYLQEIFSNEMAKVDDSFFHRLEESFLVEEDKKHERHPIFGNIVDEVAYHEKYPTIYHLRKKLVDSTDKADLRLIYLALAHMIKFRGHFLIEGDLNPDNSDVDKLFIQLVQTYNQLFEENPINASGVDAKAILSARLSKSRRLENLIAQLPGEKKNGLFGNLIALSLGLTPNFKSNFDLAEDAKLQLSKDTYDDDLDNLLAQIGDQYADLFLAAKNLSDAILLSDILRVNTEITKAPLSASMIKRYDEHHQDLTLLKALVRQQLPEKYKEIFFDQSKNGYAGYIDGGASQEEFYKFIKPILEKMDGTEELLVKLNREDLLRKQRTFDNGSIPHQIHLGELHAILRRQEDFYPFLKDNREKIEKILTFRIPYYVGPLARGNSRFAWMTRKSEETITPWNFEEVVDKGASAQSFIERMTNFDKNLPNEKVLPKHSLLYEYFTVYNELTKVKYVTEGMRKPAFLSGEQKKAIVDLLFKTNRKVTVKQLKEDYFKKIECFDSVEISGVEDRFNASLGTYHDLLKIIKDKDFLDNEENEDILEDIVLTLTLFEDREMIEERLKTYAHLFDDKVMKQLKRRRYTGWGRLSRKLINGIRDKQSGKTILDFLKSDGFANRNFMQLIHDDSLTFKEDIQKAQVSGQGDSLHEHIANLAGSPAIKKGILQTVKVVDELVKVMGRHKPENIVIEMARENQTTQKGQKNSRERMKRIEEGIKELGSQILKEHPVENTQLQNEKLYLYYLQNGRDMYVDQELDINRLSDYDVDHIVPQSFLKDDSIDNKVLTRSDKARGKSDNVPSEEVVKKMKNYWRQLLNAKLITQRKFDNLTKAERGGLSELDKAGFIKRQLVETRQITKHVAQILDSRMNTKYDENDKLIREVKVITLKSKLVSDFRKDFQFYKVREINNYHHAHDAYLNAVVGTALIKKYPKLESEFVYGDYKVYDVRKMIAKSEQEIGKATAKYFFYSNIMNFFKTEITLANGEIRKRPLIETNGETGEIVWDKGRDFATVRKVLSMPQVNIVKKTEVQTGGFSKESILPKRNSDKLIARKKDWDPKKYGGFDSPTVAYSVLVVAKVEKGKSKKLKSVKELLGITIMERSSFEKNPIDFLEAKGYKEVKKDLIIKLPKYSLFELENGRKRMLASAGELQKGNELALPSKYVNFLYLASHYEKLKGSPEDNEQKQLFVEQHKHYLDEIIEQISEFSKRVILADANLDKVLSAYNKHRDKPIREQAENIIHLFTLTNLGAPAAFKYFDTTIDRKRYTSTKEVLDATLIHQSITGLYETRIDLSQLGGDGGGGGGSEAAAKGGGGSGGTAPLEEEYRLFLEAPIQNVTLLEQWKREIPKVWAEINPPGLASTQAPIHVQLLSTALPVRVRQYPITLEAKRSLRETIRKFRAAGILRPVHSPWNTPLLPVRKSGTSEYRMVQDLREVNKRVETIHPTVPNPYTLLSLLPPDRIWYSVLDLKDAFFCIPLAPESQLIFAFEWADAEEGESGQLTWTRLPQGFKNSPTLFDEALNRDLQGFRLDHPSVSLLQYVDDLLIAADTQAACLSATRDLLMTLAELGYRVSGKKAQLCQEEVTYLGFKIHKGSRSLSNSRTQAILQIPVPKTKRQVREFLGTIGYCRLWIPGFAELAQPLYAATRGGNDPLVWGEKEEEAFQSLKLALTQPPALALPSLDKPFQLFVEETSGAAKGVLTQALGPWKRPVAYLSKRLDPVAAGWPRCLRAIAAAALLTREASKLTFGQDIEITSSHNLESLLRSPPDKWLTNARITQYQVLLLDPPRVRFKQTAALNPATLLPETDDTLPIHHCLDTLDSLTSTRPDLTDQPLAQAEATLFTDGSSYIRDGKRYAGAAVVTLDSVIWAEPLPIGTSAQKAELIALTKALEWSKDKSVNIYTDSRYAFATLHVHGMIYRERGLLTAGGKAIKNAPEILALLTAVWLPKRVAVMHCKGHQKDDAPTSTGNRRADEVAREVAIRPLSTQATISAGKRTADGSEFEKRTADGSEFESPKKKAKVE

SEQ ID NO: 7669 - protein, 2177 aa, synthetic construct
MPAAKRVKLDGGDKKYSIGLDIGTNSVGWAVITDEYKVPSKKFKVLGNTDRHSIKKNLIGALLFDSGETAEATRLKRTARRRYTRRKNRICYLQEIFSNEMAKVDDSFFHRLEESFLVEEDKKHERHPIFGNIVDEVAYHEKYPTIYHLRKKLVDSTDKADLRLIYLALAHMIKFRGHFLIEGDLNPDNSDVDKLFIQLVQTYNQLFEENPINASGVDAKAILSARLSKSRRLENLIAQLPGEKKNGLFGNLIALSLGLTPNFKSNFDLAEDAKLQLSKDTYDDDLDNLLAQIGDQYADLFLAAKNLSDAILLSDILRVNTEITKAPLSASMIKRYDEHHQDLTLLKALVRQQLPEKYKEIFFDQSKNGYAGYIDGGASQEEFYKFIKPILEKMDGTEELLVKLNREDLLRKQRTFDNGSIPHQIHLGELHAILRRQEDFYPFLKDNREKIEKILTFRIPYYVGPLARGNSRFAWMTRKSEETITPWNFEEVVDKGASAQSFIERMTNFDKNLPNEKVLPKHSLLYEYFTVYNELTKVKYVTEGMRKPAFLSGEQKKAIVDLLFKTNRKVTVKQLKEDYFKKIECFDSVEISGVEDRFNASLGTYHDLLKIIKDKDFLDNEENEDILEDIVLTLTLFEDREMIEERLKTYAHLFDDKVMKQLKRRRYTGWGRLSRKLINGIRDKQSGKTILDFLKSDGFANRNFMQLIHDDSLTFKEDIQKAQVSGQGDSLHEHIANLAGSPAIKKGILQTVKVVDELVKVMGRHKPENIVIEMARENQTTQKGQKNSRERMKRIEEGIKELGSQILKEHPVENTQLQNEKLYLYYLQNGRDMYVDQELDINRLSDYDVDHIVPQSFLKDDSIDNKVLTRSDKARGKSDNVPSEEVVKKMKNYWRQLLNAKLITQRKFDNLTKAERGGLSELDKAGFIKRQLVETRQITKHVAQILDSRMNTKYDENDKLIREVKVITLKSKLVSDFRKDFQFYKVREINNYHHAHDAYLNAVVGTALIKKYPKLESEFVYGDYKVYDVRKMIAKSEQEIGKATAKYFFYSNIMNFFKTEITLANGEIRKRPLIETNGETGEIVWDKGRDFATVRKVLSMPQVNIVKKTEVQTGGFSKESILPKRNSDKLIARKKDWDPKKYGGFDSPTVAYSVLVVAKVEKGKSKKLKSVKELLGITIMERSSFEKNPIDFLEAKGYKEVKKDLIIKLPKYSLFELENGRKRMLASAGELQKGNELALPSKYVNFLYLASHYEKLKGSPEDNEQKQLFVEQHKHYLDEIIEQISEFSKRVILADANLDKVLSAYNKHRDKPIREQAENIIHLFTLTNLGAPAAFKYFDTTIDRKRYTSTKEVLDATLIHQSITGLYETRIDLSQLGGDGGGGGGSEAAAKGGGGSGGMDLLKPLTVERKGVKIKGYWNSQADITCVPKDLLQGEEPVRQQNVTTIHGTQEGDVYYVNLKIDGRRINTEVIGTTLDYAIITPGDVPWILKKPLELTIKLDLEEQQGTLLNNSILSKKGKEELKQLFEKYSALWQSWENQVGHRRIRPHKIATGTVKPTPQKQYHINPKAKPDIQIVINDLLKQGVLIQKESTMNTPVYPVPKPNGRWRMVLDYRAVNKVTPLIAVQNQHSYGILGSLFKGRYKTTIDLSNGFWAHPIVPEDYWITAFTWQGKQYCWTVLPQGFLNSPGLFNGDVVDLLQGIPNVEVYVDDVYISHDSEKEHLEYLDILFNRLKEAGYIISLKKSNIANSIVDFLGFQITNEGRGLTDTFKEKLENITAPTTLKQLQSILGLLNFARNFIPDFTELIAPLYALIPKSPKNYVPWQIEHSTTLETLITKLNGAEYLQGRKGDKTLIMKVNASYTTGYIRYYNEGEKKPISYVSIVFSKTELKFTELEKLLTTVHKGLLKALDLSMGQNIHVYSPIVSMQNIQKTPQTAKKALASRWLSWLSYLEDPRIRFFYDPQMPALKDLPAVDTGKDNKKHPSNFQHIFYTDGSAITSPTKEGHLNAGMGIVYFINKDGNLQKQQEWSISLGNHTAQFAEIAAFEFALKKCLPLGGNILVVTDSNYVAKAYNEELDVWASNGFVNNRKKPLKHISKWKSVADLKRLRPDVVVTHEPGHQKLDSSPHAYGNNLADQLATQASFKVHAGKRTADGSEFEKRTADGSEFESPKKKAKVE

SEQ ID NO: 7670 - protein, 2099 aa, synthetic construct
MPAAKRVKLDGGDKKYSIGLDIGTNSVGWAVITDEYKVPSKKFKVLGNTDRHSIKKNLIGALLFDSGETAEATRLKRTARRRYTRRKNRICYLQEIFSNEMAKVDDSFFHRLEESFLVEEDKKHERHPIFGNIVDEVAYHEKYPTIYHLRKKLVDSTDKADLRLIYLALAHMIKFRGHFLIEGDLNPDNSDVDKLFIQLVQTYNQLFEENPINASGVDAKAILSARLSKSRRLENLIAQLPGEKKNGLFGNLIALSLGLTPNFKSNFDLAEDAKLQLSKDTYDDDLDNLLAQIGDQYADLFLAAKNLSDAILLSDILRVNTEITKAPLSASMIKRYDEHHQDLTLLKALVRQQLPEKYKEIFFDQSKNGYAGYIDGGASQEEFYKFIKPILEKMDGTEELLVKLNREDLLRKQRTFDNGSIPHQIHLGELHAILRRQEDFYPFLKDNREKIEKILTFRIPYYVGPLARGNSRFAWMTRKSEETITPWNFEEVVDKGASAQSFIERMTNFDKNLPNEKVLPKHSLLYEYFTVYNELTKVKYVTEGMRKPAFLSGEQKKAIVDLLFKTNRKVTVKQLKEDYFKKIECFDSVEISGVEDRFNASLGTYHDLLKIIKDKDFLDNEENEDILEDIVLTLTLFEDREMIEERLKTYAHLFDDKVMKQLKRRRYTGWGRLSRKLINGIRDKQSGKTILDFLKSDGFANRNFMQLIHDDSLTFKEDIQKAQVSGQGDSLHEHIANLAGSPAIKKGILQTVKVVDELVKVMGRHKPENIVIEMARENQTTQKGQKNSRERMKRIEEGIKELGSQILKEHPVENTQLQNEKLYLYYLQNGRDMYVDQELDINRLSDYDVDHIVPQSFLKDDSIDNKVLTRSDKARGKSDNVPSEEVVKKMKNYWRQLLNAKLITQRKFDNLTKAERGGLSELDKAGFIKRQLVETRQITKHVAQILDSRMNTKYDENDKLIREVKVITLKSKLVSDFRKDFQFYKVREINNYHHAHDAYLNAVVGTALIKKYPKLESEFVYGDYKVYDVRKMIAKSEQEIGKATAKYFFYSNIMNFFKTEITLANGEIRKRPLIETNGETGEIVWDKGRDFATVRKVLSMPQVNIVKKTEVQTGGFSKESILPKRNSDKLIARKKDWDPKKYGGFDSPTVAYSVLVVAKVEKGKSKKLKSVKELLGITIMERSSFEKNPIDFLEAKGYKEVKKDLIIKLPKYSLFELENGRKRMLASAGELQKGNELALPSKYVNFLYLASHYEKLKGSPEDNEQKQLFVEQHKHYLDEIIEQISEFSKRVILADANLDKVLSAYNKHRDKPIREQAENIIHLFTLTNLGAPAAFKYFDTTIDRKRYTSTKEVLDATLIHQSITGLYETRIDLSQLGGDGGGGGGSEAAAKGGGGSGGTLQLEEEYRLFEPESTQKQEMDIWLKNFPQAWAETGGMGTAHCQAPVLIQLKATATPISIRQYPMPHEAYQGIKPHIRRMLDQGILKPCQSPWNTPLLPVKKPGTEDYRPVQDLREVNKRVEDIHPTVPNPYNLLSTLPPSHPWYTVLDLKDAFFCLRLHSESQLLFAFEWRDPEIGLSGQLTWTRLPQGFKNSPTLFNEALHSDLADFRVRYPALVLLQYVDDLLLAAATRTECLEGTKALLETLGNKGYRASAKKAQICLQEVTYLGYSLKDGQRWLTKARKEAILSIPVPKNSRQVREFLGTAGYCRLWIPGFAELAAPLYPLTRPGTLFQWGTEQQLAFEDIKKALLSSPALGLPDITKPFELFIDENSGFAKGVLVQKLGPWKRPVAYLSKKLDTVASGWPPCLRMVAAIAILVKDAGKLTLGQPLTILTSHPVEALVRQPPNKWLSNARMTHYQAMLLDAERVHFGPTVSLNPATLLPLPSGGNHHDCLQILAETHGTRPDLTDQPLPDADLTWYTDGSSFIRNGEREAGAAVTTESEVIWAAPLPPGTSAQRAELIALTQALKMAEGKKLTVYTDSRYAFATTHVHGEIYRRRGWLTSEGKEIKNKNEILALLEALFLPKRLSIIHCPGHQKGDSPQAKGNRLADDTAKKAATETHSSLTVLPAGKRTADGSEFEKRTADGSEFESPKKKAKVE

SEQ ID NO: 7671 - protein, 2180 aa, synthetic construct
MPAAKRVKLDGGDKKYSIGLDIGTNSVGWAVITDEYKVPSKKFKVLGNTDRHSIKKNLIGALLFDSGETAEATRLKRTARRRYTRRKNRICYLQEIFSNEMAKVDDSFFHRLEESFLVEEDKKHERHPIFGNIVDEVAYHEKYPTIYHLRKKLVDSTDKADLRLIYLALAHMIKFRGHFLIEGDLNPDNSDVDKLFIQLVQTYNQLFEENPINASGVDAKAILSARLSKSRRLENLIAQLPGEKKNGLFGNLIALSLGLTPNFKSNFDLAEDAKLQLSKDTYDDDLDNLLAQIGDQYADLFLAAKNLSDAILLSDILRVNTEITKAPLSASMIKRYDEHHQDLTLLKALVRQQLPEKYKEIFFDQSKNGYAGYIDGGASQEEFYKFIKPILEKMDGTEELLVKLNREDLLRKQRTFDNGSIPHQIHLGELHAILRRQEDFYPFLKDNREKIEKILTFRIPYYVGPLARGNSRFAWMTRKSEETITPWNFEEVVDKGASAQSFIERMTNFDKNLPNEKVLPKHSLLYEYFTVYNELTKVKYVTEGMRKPAFLSGEQKKAIVDLLFKTNRKVTVKQLKEDYFKKIECFDSVEISGVEDRFNASLGTYHDLLKIIKDKDFLDNEENEDILEDIVLTLTLFEDREMIEERLKTYAHLFDDKVMKQLKRRRYTGWGRLSRKLINGIRDKQSGKTILDFLKSDGFANRNFMQLIHDDSLTFKEDIQKAQVSGQGDSLHEHIANLAGSPAIKKGILQTVKVVDELVKVMGRHKPENIVIEMARENQTTQKGQKNSRERMKRIEEGIKELGSQILKEHPVENTQLQNEKLYLYYLQNGRDMYVDQELDINRLSDYDVDHIVPQSFLKDDSIDNKVLTRSDKARGKSDNVPSEEVVKKMKNYWRQLLNAKLITQRKFDNLTKAERGGLSELDKAGFIKRQLVETRQITKHVAQILDSRMNTKYDENDKLIREVKVITLKSKLVSDFRKDFQFYKVREINNYHHAHDAYLNAVVGTALIKKYPKLESEFVYGDYKVYDVRKMIAKSEQEIGKATAKYFFYSNIMNFFKTEITLANGEIRKRPLIETNGETGEIVWDKGRDFATVRKVLSMPQVNIVKKTEVQTGGFSKESILPKRNSDKLIARKKDWDPKKYGGFDSPTVAYSVLVVAKVEKGKSKKLKSVKELLGITIMERSSFEKNPIDFLEAKGYKEVKKDLIIKLPKYSLFELENGRKRMLASAGELQKGNELALPSKYVNFLYLASHYEKLKGSPEDNEQKQLFVEQHKHYLDEIIEQISEFSKRVILADANLDKVLSAYNKHRDKPIREQAENIIHLFTLTNLGAPAAFKYFDTTIDRKRYTSTKEVLDATLIHQSITGLYETRIDLSQLGGDGGGGGGSEAAAKGGGGSGGMNPLQLLQPLPAEIKGTKLLAHWNSGATITCIPESFLEDEQPIKKTLIKTIHGEKQQNVYYVTFKVKGRKVEAEVIASPYEYILLSPTDVPWLTQQPLQLTILVPLQEYQEKILSKTALPEDQKQQLKTLFVKYDNLWQHWENQVGHRKIRPHNIATGDYPPRPQKQYPINPKAKPSIQIVIDDLLKQGVLTPQNSTMNTPVYPVPKPDGRWRMVLDYREVNKTIPLTAAQNQHSAGILATIVRQKYKTTLDLANGFWAHPITPESYWLTAFTWQGKQYCWTRLPQGFLNSPALFNADVVDLLKEIPNVQVYVDDIYLSHDDPKEHVQQLEKVFQILLQAGYVVSLKKSEIGQKTVEFLGFNITKEGRGLTDTFKTKLLNITPPKDLKQLQSILGKLNFARNFIPNFAELVQPLYNLIAPAKGKYIEWSEENTKQLNMVIEALNTASNLEERLPEQRLVIKVNTSPSAGYVRYYNETGKKPIMYLNYVFSKAELKFSMLEKLLTTMHKALIKAMDLAMGQEILVYSPIVSMTKIQKTPLPERKALPIRWITWMTYLEDPRIQFHYDKTLPELKHIPDVYTSSQSPVKHPSQYEGVFYTDGSAIKSPDPTKSNNAGMGIVHATYKPEYQVLNQWSIPLGNHTAQMAEIAAVEFACKKALKIPGPVLVITDSFYVAESANKELPYWKSNGFVNNKKKPLKHISKWKSIAECLSMKPDITIQHEKGISLQIPVFILKGNALADKLATQGSYVVNAGKRTADGSEFEKRTADGSEFESPKKKAKVE

SEQ ID NO: 7672 - protein, 2098 aa, synthetic construct
MPAAKRVKLDGGDKKYSIGLDIGTNSVGWAVITDEYKVPSKKFKVLGNTDRHSIKKNLIGALLFDSGETAEATRLKRTARRRYTRRKNRICYLQEIFSNEMAKVDDSFFHRLEESFLVEEDKKHERHPIFGNIVDEVAYHEKYPTIYHLRKKLVDSTDKADLRLIYLALAHMIKFRGHFLIEGDLNPDNSDVDKLFIQLVQTYNQLFEENPINASGVDAKAILSARLSKSRRLENLIAQLPGEKKNGLFGNLIALSLGLTPNFKSNFDLAEDAKLQLSKDTYDDDLDNLLAQIGDQYADLFLAAKNLSDAILLSDILRVNTEITKAPLSASMIKRYDEHHQDLTLLKALVRQQLPEKYKEIFFDQSKNGYAGYIDGGASQEEFYKFIKPILEKMDGTEELLVKLNREDLLRKQRTFDNGSIPHQIHLGELHAILRRQEDFYPFLKDNREKIEKILTFRIPYYVGPLARGNSRFAWMTRKSEETITPWNFEEVVDKGASAQSFIERMTNFDKNLPNEKVLPKHSLLYEYFTVYNELTKVKYVTEGMRKPAFLSGEQKKAIVDLLFKTNRKVTVKQLKEDYFKKIECFDSVEISGVEDRFNASLGTYHDLLKIIKDKDFLDNEENEDILEDIVLTLTLFEDREMIEERLKTYAHLFDDKVMKQLKRRRYTGWGRLSRKLINGIRDKQSGKTILDFLKSDGFANRNFMQLIHDDSLTFKEDIQKAQVSGQGDSLHEHIANLAGSPAIKKGILQTVKVVDELVKVMGRHKPENIVIEMARENQTTQKGQKNSRERMKRIEEGIKELGSQILKEHPVENTQLQNEKLYLYYLQNGRDMYVDQELDINRLSDYDVDHIVPQSFLKDDSIDNKVLTRSDKARGKSDNVPSEEVVKKMKNYWRQLLNAKLITQRKFDNLTKAERGGLSELDKAGFIKRQLVETRQITKHVAQILDSRMNTKYDENDKLIREVKVITLKSKLVSDFRKDFQFYKVREINNYHHAHDAYLNAVVGTALIKKYPKLESEFVYGDYKVYDVRKMIAKSEQEIGKATAKYFFYSNIMNFFKTEITLANGEIRKRPLIETNGETGEIVWDKGRDFATVRKVLSMPQVNIVKKTEVQTGGFSKESILPKRNSDKLIARKKDWDPKKYGGFDSPTVAYSVLVVAKVEKGKSKKLKSVKELLGITIMERSSFEKNPIDFLEAKGYKEVKKDLIIKLPKYSLFELENGRKRMLASAGELQKGNELALPSKYVNFLYLASHYEKLKGSPEDNEQKQLFVEQHKHYLDEIIEQISEFSKRVILADANLDKVLSAYNKHRDKPIREQAENIIHLFTLTNLGAPAAFKYFDTTIDRKRYTSTKEVLDATLIHQSITGLYETRIDLSQLGGDGGGGGGSEAAAKGGGGSGGVLNLEEEYRLHEKPVPSSIDPSWLQLFPTVWAERAGMGLANQVPPVVVELRSGASPVAVRQYPMSKEAREGIRPHIQKFLDLGVLVPCRSPWNTPLLPVKKPGTNDYRPVQDLREINKRVQDIHPTVPNPYNLLSSLPPSYTWYSVLDLKDAFFCLRLHPNSQPLFAFEWKDPEKGNTGQLTWTRLPQGFKNSPTLFNEALHRDLAPFRALNPQVVLLQYVDDLLVAAPTYEDCKKGTQKLLQELSKLGYRVSAKKAQLCQREVTYLGYLLKEGKRWLTPARKATVMKIPVPTTPRQVREFLGKAGFCRLFIPGFASLAAPLYPLTKPSIPFIWTEEHQQAFDHIKKALLSAPALALPDLTKPFTLYIDERAGVARGVLTQTLGPWRRPVAYLSKKLDPVASGWPTCLKAVAAVALLLKDADKLTLGQNVTVIASHSLESIVRQPPDRWMTNARMTHYQSLLLNERVSFAPPAVLNPATLLPVESEATPVHRCSEILAEETGTRRDLEDQPLPGVPTWYTDGSSFITEGKRRAGAPIVDGKRTVWASSLPEGTSAQKAELVALTQALRLAEGKNINIYTDSRYAFATAHIHGAIYKQRGWLTSAGKDIKNKEEILALLEAIHLPRRVAIIHCPGHQRGSNPVATGNRRADEAAKQAALSTRVLAGTTKPAGKRTADGSEFEKRTADGSEFESPKKKAKVE

SEQ ID NO: 7673 - protein, 2017 aa, synthetic construct
MPAAKRVKLDGGDKKYSIGLDIGTNSVGWAVITDEYKVPSKKFKVLGNTDRHSIKKNLIGALLFDSGETAEATRLKRTARRRYTRRKNRICYLQEIFSNEMAKVDDSFFHRLEESFLVEEDKKHERHPIFGNIVDEVAYHEKYPTIYHLRKKLVDSTDKADLRLIYLALAHMIKFRGHFLIEGDLNPDNSDVDKLFIQLVQTYNQLFEENPINASGVDAKAILSARLSKSRRLENLIAQLPGEKKNGLFGNLIALSLGLTPNFKSNFDLAEDAKLQLSKDTYDDDLDNLLAQIGDQYADLFLAAKNLSDAILLSDILRVNTEITKAPLSASMIKRYDEHHQDLTLLKALVRQQLPEKYKEIFFDQSKNGYAGYIDGGASQEEFYKFIKPILEKMDGTEELLVKLNREDLLRKQRTFDNGSIPHQIHLGELHAILRRQEDFYPFLKDNREKIEKILTFRIPYYVGPLARGNSRFAWMTRKSEETITPWNFEEVVDKGASAQSFIERMTNFDKNLPNEKVLPKHSLLYEYFTVYNELTKVKYVTEGMRKPAFLSGEQKKAIVDLLFKTNRKVTVKQLKEDYFKKIECFDSVEISGVEDRFNASLGTYHDLLKIIKDKDFLDNEENEDILEDIVLTLTLFEDREMIEERLKTYAHLFDDKVMKQLKRRRYTGWGRLSRKLINGIRDKQSGKTILDFLKSDGFANRNFMQLIHDDSLTFKEDIQKAQVSGQGDSLHEHIANLAGSPAIKKGILQTVKVVDELVKVMGRHKPENIVIEMARENQTTQKGQKNSRERMKRIEEGIKELGSQILKEHPVENTQLQNEKLYLYYLQNGRDMYVDQELDINRLSDYDVDHIVPQSFLKDDSIDNKVLTRSDKARGKSDNVPSEEVVKKMKNYWRQLLNAKLITQRKFDNLTKAERGGLSELDKAGFIKRQLVETRQITKHVAQILDSRMNTKYDENDKLIREVKVITLKSKLVSDFRKDFQFYKVREINNYHHAHDAYLNAVVGTALIKKYPKLESEFVYGDYKVYDVRKMIAKSEQEIGKATAKYFFYSNIMNFFKTEITLANGEIRKRPLIETNGETGEIVWDKGRDFATVRKVLSMPQVNIVKKTEVQTGGFSKESILPKRNSDKLIARKKDWDPKKYGGFDSPTVAYSVLVVAKVEKGKSKKLKSVKELLGITIMERSSFEKNPIDFLEAKGYKEVKKDLIIKLPKYSLFELENGRKRMLASAGELQKGNELALPSKYVNFLYLASHYEKLKGSPEDNEQKQLFVEQHKHYLDEIIEQISEFSKRVILADANLDKVLSAYNKHRDKPIREQAENIIHLFTLTNLGAPAAFKYFDTTIDRKRYTSTKEVLDATLIHQSITGLYETRIDLSQLGGDGGGGGGSEAAAKGGGGSGGAVLGLEHLPRPPEISQFPLNPERLQALQHLVRKALEAGHIEPYTGPGNNPVFPVKKANGTWRFIHDLRATNSLTIDLSSSSPGPPDLSSLPTTLAHLQTIDLKDAFFQIPLPKQFQPYFAFTVPQQCNYGPGTRYAWRVLPQGFKNSPTLFQMQLAHILQPIRQAFPQCTILQYMDDILLASPSHADLQLLSEATMASLISHGLPVSENKTQQTPGTIKFLGQIISPNHLTYDAVPKVPIRSRWALPELQALLGEIQWVSKGTPTLRQPLHSLYCALQPHTDPRDQIYLNPSQVQSLVQLRQALSQNCRSRLVQTLPLLGAIMLTLTGTTTVVFQSKQQWPLVWLHAPLPHTSQCPWGQLLASAVLLLDKYTLQSYGLLCQTIHHNISTQTFNQFIQTSDHPSVPILLHHSHRFKNLGAQTGELWNTFLKTTAPLAPVKALMPVFTLSPVIINTAPCLFSDGSTSQAAYILWDKHILSQRSFPLPPPHKSAQRAELLGLLHGLSSARSWRCLNIFLDSKYLYHYLRTLALGTFQGRSSQAPFQALLPRLLSRKVVYLHHVRSHTNLPDPISRLNALTDALLITPVLQLAGKRTADGSEFEKRTADGSEFESPKKKAKVE

SEQ ID NO: 7674 - protein, 2100 aa, synthetic construct
MPAAKRVKLDGGDKKYSIGLDIGTNSVGWAVITDEYKVPSKKFKVLGNTDRHSIKKNLIGALLFDSGETAEATRLKRTARRRYTRRKNRICYLQEIFSNEMAKVDDSFFHRLEESFLVEEDKKHERHPIFGNIVDEVAYHEKYPTIYHLRKKLVDSTDKADLRLIYLALAHMIKFRGHFLIEGDLNPDNSDVDKLFIQLVQTYNQLFEENPINASGVDAKAILSARLSKSRRLENLIAQLPGEKKNGLFGNLIALSLGLTPNFKSNFDLAEDAKLQLSKDTYDDDLDNLLAQIGDQYADLFLAAKNLSDAILLSDILRVNTEITKAPLSASMIKRYDEHHQDLTLLKALVRQQLPEKYKEIFFDQSKNGYAGYIDGGASQEEFYKFIKPILEKMDGTEELLVKLNREDLLRKQRTFDNGSIPHQIHLGELHAILRRQEDFYPFLKDNREKIEKILTFRIPYYVGPLARGNSRFAWMTRKSEETITPWNFEEVVDKGASAQSFIERMTNFDKNLPNEKVLPKHSLLYEYFTVYNELTKVKYVTEGMRKPAFLSGEQKKAIVDLLFKTNRKVTVKQLKEDYFKKIECFDSVEISGVEDRFNASLGTYHDLLKIIKDKDFLDNEENEDILEDIVLTLTLFEDREMIEERLKTYAHLFDDKVMKQLKRRRYTGWGRLSRKLINGIRDKQSGKTILDFLKSDGFANRNFMQLIHDDSLTFKEDIQKAQVSGQGDSLHEHIANLAGSPAIKKGILQTVKVVDELVKVMGRHKPENIVIEMARENQTTQKGQKNSRERMKRIEEGIKELGSQILKEHPVENTQLQNEKLYLYYLQNGRDMYVDQELDINRLSDYDVDHIVPQSFLKDDSIDNKVLTRSDKARGKSDNVPSEEVVKKMKNYWRQLLNAKLITQRKFDNLTKAERGGLSELDKAGFIKRQLVETRQITKHVAQILDSRMNTKYDENDKLIREVKVITLKSKLVSDFRKDFQFYKVREINNYHHAHDAYLNAVVGTALIKKYPKLESEFVYGDYKVYDVRKMIAKSEQEIGKATAKYFFYSNIMNFFKTEITLANGEIRKRPLIETNGETGEIVWDKGRDFATVRKVLSMPQVNIVKKTEVQTGGFSKESILPKRNSDKLIARKKDWDPKKYGGFDSPTVAYSVLVVAKVEKGKSKKLKSVKELLGITIMERSSFEKNPIDFLEAKGYKEVKKDLIIKLPKYSLFELENGRKRMLASAGELQKGNELALPSKYVNFLYLASHYEKLKGSPEDNEQKQLFVEQHKHYLDEIIEQISEFSKRVILADANLDKVLSAYNKHRDKPIREQAENIIHLFTLTNLGAPAAFKYFDTTIDRKRYTSTKEVLDATLIHQSITGLYETRIDLSQLGGDGGGGGGSEAAAKGGGGSGGTLNLEDEYRLYETSAEPEVSPGSTWLSDFPQAWAETGGMGLAVRQAPLIIPLKATSTPVSIKQYPMSQEAKLGIKPHIQRLLDQGILVPCQSPWNTPLLPVKKPGTNDYRPVQDLREVNKRVEDIHPTVPNPYNLLSGLPPSHRWYTVLDLKDAFFCLRLHPTSQPLFAFEWRDPGMGISGQLTWTRLPQGFKNSPTLFNEALHRDLADFRIQHPDLILLQYVDDILLAATSELDCQQGTRALLLTLGNLGYRASAKKAQLCQKQVKYLGYLLKEGQRWLTEARKETVMGQPTPKTPRQLREFLGKAGFCRLFIPGFAEMAAPLYPLTKPGTLFNWGPDQQKAYQEIKQALLTAPALGLPDLTKPFELFVDEKQGYAKGVLTQKLGPWRRPVAYLSKKLDPVAAGWPPCLRMVAAIAVLRKDAGKLTMGQPLVILAPHAVEALVKQPPDRWLSNARMTHYQAMLLDTDRVQFGPVVALNPATLLPLPEEGAPHDCLEILAETHGTRPDLTDQPIPDADHTWYTDGSSFLQEGQRKAGAAVTTETEVIWARALPAGTSAQRAELIALTQALKMAEGKRLNVYTDSRYAFATAHIHGEIYRRRGWLTSEGREIKNKSEILALLKALFLPKRLSIIHCLGHQKGDSAEARGNRLADQAAREAAIKTPPDTSTLLAGKRTADGSEFEKRTADGSEFESPKKKAKVE

SEQ ID NO: 7675 - protein, 2100 aa, synthetic construct
MPAAKRVKLDGGDKKYSIGLDIGTNSVGWAVITDEYKVPSKKFKVLGNTDRHSIKKNLIGALLFDSGETAEATRLKRTARRRYTRRKNRICYLQEIFSNEMAKVDDSFFHRLEESFLVEEDKKHERHPIFGNIVDEVAYHEKYPTIYHLRKKLVDSTDKADLRLIYLALAHMIKFRGHFLIEGDLNPDNSDVDKLFIQLVQTYNQLFEENPINASGVDAKAILSARLSKSRRLENLIAQLPGEKKNGLFGNLIALSLGLTPNFKSNFDLAEDAKLQLSKDTYDDDLDNLLAQIGDQYADLFLAAKNLSDAILLSDILRVNTEITKAPLSASMIKRYDEHHQDLTLLKALVRQQLPEKYKEIFFDQSKNGYAGYIDGGASQEEFYKFIKPILEKMDGTEELLVKLNREDLLRKQRTFDNGSIPHQIHLGELHAILRRQEDFYPFLKDNREKIEKILTFRIPYYVGPLARGNSRFAWMTRKSEETITPWNFEEVVDKGASAQSFIERMTNFDKNLPNEKVLPKHSLLYEYFTVYNELTKVKYVTEGMRKPAFLSGEQKKAIVDLLFKTNRKVTVKQLKEDYFKKIECFDSVEISGVEDRFNASLGTYHDLLKIIKDKDFLDNEENEDILEDIVLTLTLFEDREMIEERLKTYAHLFDDKVMKQLKRRRYTGWGRLSRKLINGIRDKQSGKTILDFLKSDGFANRNFMQLIHDDSLTFKEDIQKAQVSGQGDSLHEHIANLAGSPAIKKGILQTVKVVDELVKVMGRHKPENIVIEMARENQTTQKGQKNSRERMKRIEEGIKELGSQILKEHPVENTQLQNEKLYLYYLQNGRDMYVDQELDINRLSDYDVDHIVPQSFLKDDSIDNKVLTRSDKARGKSDNVPSEEVVKKMKNYWRQLLNAKLITQRKFDNLTKAERGGLSELDKAGFIKRQLVETRQITKHVAQILDSRMNTKYDENDKLIREVKVITLKSKLVSDFRKDFQFYKVREINNYHHAHDAYLNAVVGTALIKKYPKLESEFVYGDYKVYDVRKMIAKSEQEIGKATAKYFFYSNIMNFFKTEITLANGEIRKRPLIETNGETGEIVWDKGRDFATVRKVLSMPQVNIVKKTEVQTGGFSKESILPKRNSDKLIARKKDWDPKKYGGFDSPTVAYSVLVVAKVEKGKSKKLKSVKELLGITIMERSSFEKNPIDFLEAKGYKEVKKDLIIKLPKYSLFELENGRKRMLASAGELQKGNELALPSKYVNFLYLASHYEKLKGSPEDNEQKQLFVEQHKHYLDEIIEQISEFSKRVILADANLDKVLSAYNKHRDKPIREQAENIIHLFTLTNLGAPAAFKYFDTTIDRKRYTSTKEVLDATLIHQSITGLYETRIDLSQLGGDGGGGGGSEAAAKGGGGSGGTLGIEDEYRLHETSTEPDVSLGSTWLSDFPQAWAETGGMGLAVRQAPLIIPLKATSTPVSIQQYPMSHEARLGIKPHIQRLLDQGILVPCQSPWNTPLLPVKKPGTNDYRPVQDLREVNKRVEDIHPTVPNPYNLLSGLPPSHQWYTVLDLKDAFFCLRLHPTSQPLFAFEWRDPGMGISGQLTWTRLPQGFKNSPTLFNEALHRDLADFRIQHPDLILLQYVDDILLAATSELDCQQGTRALLQTLGDLGYRASAKKAQICQKQVKYLGYLLREGQRWLTEARKETVMGQPVPKTPRQLREFLGTAGFCRLWIPGFAEMAAPLYPLTKPGTLFSWGPDQQKAYQEIKQALLTAPALGLPDLTKPFELFVDEKQGYAKGVLTQKLGPWRRPVAYLSKKLDPVAAGWPPCLRMVAAIAVLTKDAGKLTMGQPLVILAPHAVEALVKQPPDRWLSNARMTHYQAMLLDTDRVQFGPVVALNPATLLPLPEEGAPHDCLEILAETHGTRPDLTDQPIPDADHTWYTDGSSFLQEGQRKAGAAVTTETEVIWAGALPAGTSAQRAELIALTQALKMAEGKRLNVYTDSRYAFATAHIHGEIYRRRGWLTSEGREIKNKSEILALLKALFLPKRLSIIHCLGHQKGDSAEARGNRLADQAAREAAIKTPPDTSTLLAGKRTADGSEFEKRTADGSEFESPKKKAKVE

SEQ ID NO: 7676 - protein, 2100 aa, synthetic construct
MPAAKRVKLDGGDKKYSIGLDIGTNSVGWAVITDEYKVPSKKFKVLGNTDRHSIKKNLIGALLFDSGETAEATRLKRTARRRYTRRKNRICYLQEIFSNEMAKVDDSFFHRLEESFLVEEDKKHERHPIFGNIVDEVAYHEKYPTIYHLRKKLVDSTDKADLRLIYLALAHMIKFRGHFLIEGDLNPDNSDVDKLFIQLVQTYNQLFEENPINASGVDAKAILSARLSKSRRLENLIAQLPGEKKNGLFGNLIALSLGLTPNFKSNFDLAEDAKLQLSKDTYDDDLDNLLAQIGDQYADLFLAAKNLSDAILLSDILRVNTEITKAPLSASMIKRYDEHHQDLTLLKALVRQQLPEKYKEIFFDQSKNGYAGYIDGGASQEEFYKFIKPILEKMDGTEELLVKLNREDLLRKQRTFDNGSIPHQIHLGELHAILRRQEDFYPFLKDNREKIEKILTFRIPYYVGPLARGNSRFAWMTRKSEETITPWNFEEVVDKGASAQSFIERMTNFDKNLPNEKVLPKHSLLYEYFTVYNELTKVKYVTEGMRKPAFLSGEQKKAIVDLLFKTNRKVTVKQLKEDYFKKIECFDSVEISGVEDRFNASLGTYHDLLKIIKDKDFLDNEENEDILEDIVLTLTLFEDREMIEERLKTYAHLFDDKVMKQLKRRRYTGWGRLSRKLINGIRDKQSGKTILDFLKSDGFANRNFMQLIHDDSLTFKEDIQKAQVSGQGDSLHEHIANLAGSPAIKKGILQTVKVVDELVKVMGRHKPENIVIEMARENQTTQKGQKNSRERMKRIEEGIKELGSQILKEHPVENTQLQNEKLYLYYLQNGRDMYVDQELDINRLSDYDVDHIVPQSFLKDDSIDNKVLTRSDKARGKSDNVPSEEVVKKMKNYWRQLLNAKLITQRKFDNLTKAERGGLSELDKAGFIKRQLVETRQITKHVAQILDSRMNTKYDENDKLIREVKVITLKSKLVSDFRKDFQFYKVREINNYHHAHDAYLNAVVGTALIKKYPKLESEFVYGDYKVYDVRKMIAKSEQEIGKATAKYFFYSNIMNFFKTEITLANGEIRKRPLIETNGETGEIVWDKGRDFATVRKVLSMPQVNIVKKTEVQTGGFSKESILPKRNSDKLIARKKDWDPKKYGGFDSPTVAYSVLVVAKVEKGKSKKLKSVKELLGITIMERSSFEKNPIDFLEAKGYKEVKKDLIIKLPKYSLFELENGRKRMLASAGELQKGNELALPSKYVNFLYLASHYEKLKGSPEDNEQKQLFVEQHKHYLDEIIEQISEFSKRVILADANLDKVLSAYNKHRDKPIREQAENIIHLFTLTNLGAPAAFKYFDTTIDRKRYTSTKEVLDATLIHQSITGLYETRIDLSQLGGDGGGGGGSEAAAKGGGGSGGTLNIEDEYRLHETSKEPDVSLGSTWLSDFPQAWAETGGMGLAVRQAPLIIPLKATSTPVSIKQYPMSQEARLGIKPHIQRLLDQGILVPCQSPWNTPLLPVKKPGTNDYRPVQDLREVNKRVEDIHPTVPNPYNLLSGLPPSHQWYTVLDLKDAFFCLRLHPTSQPLFAFEWRDPEMGISGQLTWTRLPQGFKNSPTLFNEALHRDLAGFRIQHPDLILLQYVDDLLLAATSELDCQQGTRALLQTLGDLGYRASAKKAQICQKQVKYLGYLLKEGQRWLTEARKETVMGQPIPKTPRQLREFLGTAGFCRLWIPGFAEMAAPLYPLTKPGTLFNWGPDQQKAFQEIKQALLTAPALGLPDLTKPFELFVDEKQGYAKGVLTQKLGPWRRPVAYLSKKLDPVAAGWPPCLRMVAAIAVLTKDAGKLTMGQPLVILAPHAVEALVKQPPDRWLSNARMTHYQALLLDTDRVQFGPVVALNPATLLPLPEEGLQHDCLDILAEAHGTRSDLMDQPLPDADHTWYTDGSSFLQEGQRKAGAAVTTETEVIWARALPAGTSAQRAELIALTQALKMAEGKKLNVYTDSRYAFATAHIHGEIYRRRGWLTSEGKEIKNKDEILALLKALFLPKRLSIIHCPGHQKGNSAEARGNRMADQAAREVATRETPETSTLLAGKRTADGSEFEKRTADGSEFESPKKKAKVE

SEQ ID NO: 7677 - protein, 2100 aa, synthetic construct
MPAAKRVKLDGGDKKYSIGLDIGTNSVGWAVITDEYKVPSKKFKVLGNTDRHSIKKNLIGALLFDSGETAEATRLKRTARRRYTRRKNRICYLQEIFSNEMAKVDDSFFHRLEESFLVEEDKKHERHPIFGNIVDEVAYHEKYPTIYHLRKKLVDSTDKADLRLIYLALAHMIKFRGHFLIEGDLNPDNSDVDKLFIQLVQTYNQLFEENPINASGVDAKAILSARLSKSRRLENLIAQLPGEKKNGLFGNLIALSLGLTPNFKSNFDLAEDAKLQLSKDTYDDDLDNLLAQIGDQYADLFLAAKNLSDAILLSDILRVNTEITKAPLSASMIKRYDEHHQDLTLLKALVRQQLPEKYKEIFFDQSKNGYAGYIDGGASQEEFYKFIKPILEKMDGTEELLVKLNREDLLRKQRTFDNGSIPHQIHLGELHAILRRQEDFYPFLKDNREKIEKILTFRIPYYVGPLARGNSRFAWMTRKSEETITPWNFEEVVDKGASAQSFIERMTNFDKNLPNEKVLPKHSLLYEYFTVYNELTKVKYVTEGMRKPAFLSGEQKKAIVDLLFKTNRKVTVKQLKEDYFKKIECFDSVEISGVEDRFNASLGTYHDLLKIIKDKDFLDNEENEDILEDIVLTLTLFEDREMIEERLKTYAHLFDDKVMKQLKRRRYTGWGRLSRKLINGIRDKQSGKTILDFLKSDGFANRNFMQLIHDDSLTFKEDIQKAQVSGQGDSLHEHIANLAGSPAIKKGILQTVKVVDELVKVMGRHKPENIVIEMARENQTTQKGQKNSRERMKRIEEGIKELGSQILKEHPVENTQLQNEKLYLYYLQNGRDMYVDQELDINRLSDYDVDHIVPQSFLKDDSIDNKVLTRSDKARGKSDNVPSEEVVKKMKNYWRQLLNAKLITQRKFDNLTKAERGGLSELDKAGFIKRQLVETRQITKHVAQILDSRMNTKYDENDKLIREVKVITLKSKLVSDFRKDFQFYKVREINNYHHAHDAYLNAVVGTALIKKYPKLESEFVYGDYKVYDVRKMIAKSEQEIGKATAKYFFYSNIMNFFKTEITLANGEIRKRPLIETNGETGEIVWDKGRDFATVRKVLSMPQVNIVKKTEVQTGGFSKESILPKRNSDKLIARKKDWDPKKYGGFDSPTVAYSVLVVAKVEKGKSKKLKSVKELLGITIMERSSFEKNPIDFLEAKGYKEVKKDLIIKLPKYSLFELENGRKRMLASAGELQKGNELALPSKYVNFLYLASHYEKLKGSPEDNEQKQLFVEQHKHYLDEIIEQISEFSKRVILADANLDKVLSAYNKHRDKPIREQAENIIHLFTLTNLGAPAAFKYFDTTIDRKRYTSTKEVLDATLIHQSITGLYETRIDLSQLGGDGGGGGGSEAAAKGGGGSGGTLNIEDEYRLHETSKGPDVPLGSTWLSDFPQAWAETGGMGLAVRQAPLIIPLKATSTPVSIKQYPMSQEARLGIKPHIQRLLDQGILVPCQSPWNTPLLPVKKPGTNDYRPVQDLREVNKRVEDIHPTVPNPYNLLSGLPPSHQWYTVLDLKDAFFCLRLHPTSQSLFAFEWRDPEMGISGQLTWTRLPQGFKNSPTLFNEALHRDLADFRIQHPDLILLQYVDDLLLAATSELDCQQGTRALLQTLGDLGYRASAKKAQICQKQVKYLGYLLKEGQRWLTEARKETVMGQPTPKTPRQLREFLGTAGFCRLWIPGFAEMAAPLYPLTKPGTLFEWGPDQQKAYQEIKQALLTAPALGLPDLTKPFELFVDEKQGYAKGVLTQKLGPWRRPVAYLSKKLDPVAAGWPPCLRMVAAIAVLTKDAGKLTMGQPLVILAPHAVEALVKQPPDRWLSNARMTHYQALLLDTDRVQFGPIVALNPATLLPLPEEGLQHDCLDILAEAHGTRPDLTDQPLPDADHTWYTDGSSFLQEGQRKAGAAVTTETEVVWAKALPAGTSAQRAELIALTQALKMAEGKKLNVYTDSRYAFATAHIHGEIYRRRGWLTSEGKEIKNKDEILALLKALFLPKRLSIIHCPGHQKGNRAEARGNRMADQAAREVATRETPETSTLLAGKRTADGSEFEKRTADGSEFESPKKKAKVE

SEQ ID NO: 7678 - protein, 2120 aa, synthetic construct
MPAAKRVKLDGGDKKYSIGLDIGTNSVGWAVITDEYKVPSKKFKVLGNTDRHSIKKNLIGALLFDSGETAEATRLKRTARRRYTRRKNRICYLQEIFSNEMAKVDDSFFHRLEESFLVEEDKKHERHPIFGNIVDEVAYHEKYPTIYHLRKKLVDSTDKADLRLIYLALAHMIKFRGHFLIEGDLNPDNSDVDKLFIQLVQTYNQLFEENPINASGVDAKAILSARLSKSRRLENLIAQLPGEKKNGLFGNLIALSLGLTPNFKSNFDLAEDAKLQLSKDTYDDDLDNLLAQIGDQYADLFLAAKNLSDAILLSDILRVNTEITKAPLSASMIKRYDEHHQDLTLLKALVRQQLPEKYKEIFFDQSKNGYAGYIDGGASQEEFYKFIKPILEKMDGTEELLVKLNREDLLRKQRTFDNGSIPHQIHLGELHAILRRQEDFYPFLKDNREKIEKILTFRIPYYVGPLARGNSRFAWMTRKSEETITPWNFEEVVDKGASAQSFIERMTNFDKNLPNEKVLPKHSLLYEYFTVYNELTKVKYVTEGMRKPAFLSGEQKKAIVDLLFKTNRKVTVKQLKEDYFKKIECFDSVEISGVEDRFNASLGTYHDLLKIIKDKDFLDNEENEDILEDIVLTLTLFEDREMIEERLKTYAHLFDDKVMKQLKRRRYTGWGRLSRKLINGIRDKQSGKTILDFLKSDGFANRNFMQLIHDDSLTFKEDIQKAQVSGQGDSLHEHIANLAGSPAIKKGILQTVKVVDELVKVMGRHKPENIVIEMARENQTTQKGQKNSRERMKRIEEGIKELGSQILKEHPVENTQLQNEKLYLYYLQNGRDMYVDQELDINRLSDYDVDHIVPQSFLKDDSIDNKVLTRSDKARGKSDNVPSEEVVKKMKNYWRQLLNAKLITQRKFDNLTKAERGGLSELDKAGFIKRQLVETRQITKHVAQILDSRMNTKYDENDKLIREVKVITLKSKLVSDFRKDFQFYKVREINNYHHAHDAYLNAVVGTALIKKYPKLESEFVYGDYKVYDVRKMIAKSEQEIGKATAKYFFYSNIMNFFKTEITLANGEIRKRPLIETNGETGEIVWDKGRDFATVRKVLSMPQVNIVKKTEVQTGGFSKESILPKRNSDKLIARKKDWDPKKYGGFDSPTVAYSVLVVAKVEKGKSKKLKSVKELLGITIMERSSFEKNPIDFLEAKGYKEVKKDLIIKLPKYSLFELENGRKRMLASAGELQKGNELALPSKYVNFLYLASHYEKLKGSPEDNEQKQLFVEQHKHYLDEIIEQISEFSKRVILADANLDKVLSAYNKHRDKPIREQAENIIHLFTLTNLGAPAAFKYFDTTIDRKRYTSTKEVLDATLIHQSITGLYETRIDLSQLGGDGGGGGGSEAAAKGGGGSGGVQEISDSRPMLHIYLNGRRFLGLLDTGADKTCIAGRDWPANWPIHQTESSLQGLGMACGVARSSQPLRWQHEDKSGIIHPFVIPTLPFTLWGRDIMKDIKVRLMTDSPDDSQDLMIGAIESNLFADQISWKSDQPVWLNQWPLKQEKLQALQQLVTEQLQLGHLEESNSPWNTPVFVIKKKSGKWRLLQDLRAVNATMHDMGALQPGLPSPPAVPKGWEIIIIDLQDCFFNIKLHPEDCKRFAFSVPSPNFKRPYQRFQWKVLPQGMKNSPTLCQKFVDKAILTVRDKYQDSYIVHYMDDILLAHPSRSIVDEILTSMIQALNKHGLVVSTEKIQKYDNLKYLGTHIQGDSVSYQKLQIRTDKLRTLNDFQKLLGNINWIRPFLKLTTGELKPLFEILNPDSNPISTRKLTPEACKALQLMNERLSTARVKRLDLSQPWSLCILKTEYTPTACLWQDGVVEWIHLPHISPKVITPYDIFCTQLIIKGRHRSKELFSKDPDYIVVPYTKVQFDLLLQEKEDWPISLLGFLGEVHFHLPKDPLLTFTLQTAIIFPHMTSTTPLEKGIVIFTDGSANGRSVTYIQGREPIIKENTQNTAQQAEIVAVITAFEEVSQPFNLYTDSKYVTGLFPEIETATLSPRTKIYTELKHLQRLIHKRQEKFYIGHIRGHTGLPGPLAQGNAYADSLTRILTAAGKRTADGSEFEKRTADGSEFESPKKKAKVE

SEQ ID NO: 7679 - protein, 2098 aa, synthetic construct
MPAAKRVKLDGGDKKYSIGLDIGTNSVGWAVITDEYKVPSKKFKVLGNTDRHSIKKNLIGALLFDSGETAEATRLKRTARRRYTRRKNRICYLQEIFSNEMAKVDDSFFHRLEESFLVEEDKKHERHPIFGNIVDEVAYHEKYPTIYHLRKKLVDSTDKADLRLIYLALAHMIKFRGHFLIEGDLNPDNSDVDKLFIQLVQTYNQLFEENPINASGVDAKAILSARLSKSRRLENLIAQLPGEKKNGLFGNLIALSLGLTPNFKSNFDLAEDAKLQLSKDTYDDDLDNLLAQIGDQYADLFLAAKNLSDAILLSDILRVNTEITKAPLSASMIKRYDEHHQDLTLLKALVRQQLPEKYKEIFFDQSKNGYAGYIDGGASQEEFYKFIKPILEKMDGTEELLVKLNREDLLRKQRTFDNGSIPHQIHLGELHAILRRQEDFYPFLKDNREKIEKILTFRIPYYVGPLARGNSRFAWMTRKSEETITPWNFEEVVDKGASAQSFIERMTNFDKNLPNEKVLPKHSLLYEYFTVYNELTKVKYVTEGMRKPAFLSGEQKKAIVDLLFKTNRKVTVKQLKEDYFKKIECFDSVEISGVEDRFNASLGTYHDLLKIIKDKDFLDNEENEDILEDIVLTLTLFEDREMIEERLKTYAHLFDDKVMKQLKRRRYTGWGRLSRKLINGIRDKQSGKTILDFLKSDGFANRNFMQLIHDDSLTFKEDIQKAQVSGQGDSLHEHIANLAGSPAIKKGILQTVKVVDELVKVMGRHKPENIVIEMARENQTTQKGQKNSRERMKRIEEGIKELGSQILKEHPVENTQLQNEKLYLYYLQNGRDMYVDQELDINRLSDYDVDHIVPQSFLKDDSIDNKVLTRSDKARGKSDNVPSEEVVKKMKNYWRQLLNAKLITQRKFDNLTKAERGGLSELDKAGFIKRQLVETRQITKHVAQILDSRMNTKYDENDKLIREVKVITLKSKLVSDFRKDFQFYKVREINNYHHAHDAYLNAVVGTALIKKYPKLESEFVYGDYKVYDVRKMIAKSEQEIGKATAKYFFYSNIMNFFKTEITLANGEIRKRPLIETNGETGEIVWDKGRDFATVRKVLSMPQVNIVKKTEVQTGGFSKESILPKRNSDKLIARKKDWDPKKYGGFDSPTVAYSVLVVAKVEKGKSKKLKSVKELLGITIMERSSFEKNPIDFLEAKGYKEVKKDLIIKLPKYSLFELENGRKRMLASAGELQKGNELALPSKYVNFLYLASHYEKLKGSPEDNEQKQLFVEQHKHYLDEIIEQISEFSKRVILADANLDKVLSAYNKHRDKPIREQAENIIHLFTLTNLGAPAAFKYFDTTIDRKRYTSTKEVLDATLIHQSITGLYETRIDLSQLGGDGGGGGGSEAAAKGGGGSGGVLNLEEEYRLHEKPVPSSIDPSWLQLFPTVWAERAGMGLANQVPPVVVELRSGASPVAVRQYPMSKEAREGIRPHIQRFLDLGVLVPCQSPWNTPLLPVKKPGTNDYRPVQDLREINKRVQDIHPTVPNPYNLLSSLPPSHTWYSVLDLKDAFFCLKLHPNSQPLFAFEWRDPEKGNTGQLTWTRLPQGFKNSPTLFNEALHRDLAPFRALNPQVVLLQYVDDLLVAAPTYRDCKEGTQKLLQELSKLGYRVSAKKAQLCQKEVTYLGYLLKEGKRWLTPARKATVMKIPPPTTPRQVREFLGTAGFCRLWIPGFASLAAPLYPLTKPSIPFIWTEEHQKAFDRIKEALLSAPALALPDLTKPFTLYVDERAGVARGVLTQTLGPWRRPVAYLSKKLDPVASGWPTCLKAVAAVALLLKDADKLTLGQNVTVIASHSLESIVRQPPDRWMTNARMTHYQSLLLNERVSFAPPAVLNPATLLPVESEATPVHRCSEILAEETGTRRDLKDQPLPGVPAWYTDGSSFIAEGKRRAGAAIVDGKRTVWASSLPEGTSAQKAELVALTQALRLAEGKDINIYTDSRYAFATAHIHGAIYKQRGWLTSAGKDIKNKEEILALLEAIHLPKRVAIIHCPGHQKGNDPVATGNRRADEAAKQAALSTRVLAETTKPAGKRTADGSEFEKRTADGSEFESPKKKAKVE

SEQ ID NO: 7680 - protein, 2102 aa, synthetic construct
MPAAKRVKLDGGDKKYSIGLDIGTNSVGWAVITDEYKVPSKKFKVLGNTDRHSIKKNLIGALLFDSGETAEATRLKRTARRRYTRRKNRICYLQEIFSNEMAKVDDSFFHRLEESFLVEEDKKHERHPIFGNIVDEVAYHEKYPTIYHLRKKLVDSTDKADLRLIYLALAHMIKFRGHFLIEGDLNPDNSDVDKLFIQLVQTYNQLFEENPINASGVDAKAILSARLSKSRRLENLIAQLPGEKKNGLFGNLIALSLGLTPNFKSNFDLAEDAKLQLSKDTYDDDLDNLLAQIGDQYADLFLAAKNLSDAILLSDILRVNTEITKAPLSASMIKRYDEHHQDLTLLKALVRQQLPEKYKEIFFDQSKNGYAGYIDGGASQEEFYKFIKPILEKMDGTEELLVKLNREDLLRKQRTFDNGSIPHQIHLGELHAILRRQEDFYPFLKDNREKIEKILTFRIPYYVGPLARGNSRFAWMTRKSEETITPWNFEEVVDKGASAQSFIERMTNFDKNLPNEKVLPKHSLLYEYFTVYNELTKVKYVTEGMRKPAFLSGEQKKAIVDLLFKTNRKVTVKQLKEDYFKKIECFDSVEISGVEDRFNASLGTYHDLLKIIKDKDFLDNEENEDILEDIVLTLTLFEDREMIEERLKTYAHLFDDKVMKQLKRRRYTGWGRLSRKLINGIRDKQSGKTILDFLKSDGFANRNFMQLIHDDSLTFKEDIQKAQVSGQGDSLHEHIANLAGSPAIKKGILQTVKVVDELVKVMGRHKPENIVIEMARENQTTQKGQKNSRERMKRIEEGIKELGSQILKEHPVENTQLQNEKLYLYYLQNGRDMYVDQELDINRLSDYDVDHIVPQSFLKDDSIDNKVLTRSDKARGKSDNVPSEEVVKKMKNYWRQLLNAKLITQRKFDNLTKAERGGLSELDKAGFIKRQLVETRQITKHVAQILDSRMNTKYDENDKLIREVKVITLKSKLVSDFRKDFQFYKVREINNYHHAHDAYLNAVVGTALIKKYPKLESEFVYGDYKVYDVRKMIAKSEQEIGKATAKYFFYSNIMNFFKTEITLANGEIRKRPLIETNGETGEIVWDKGRDFATVRKVLSMPQVNIVKKTEVQTGGFSKESILPKRNSDKLIARKKDWDPKKYGGFDSPTVAYSVLVVAKVEKGKSKKLKSVKELLGITIMERSSFEKNPIDFLEAKGYKEVKKDLIIKLPKYSLFELENGRKRMLASAGELQKGNELALPSKYVNFLYLASHYEKLKGSPEDNEQKQLFVEQHKHYLDEIIEQISEFSKRVILADANLDKVLSAYNKHRDKPIREQAENIIHLFTLTNLGAPAAFKYFDTTIDRKRYTSTKEVLDATLIHQSITGLYETRIDLSQLGGDGGEAAAKGGGGSEAAAKGGTAPLEEEYRLFLEAPIQNVTLLEQWKREIPKVWAEINPPGLASTQAPIHVQLLSTALPVRVRQYPITLEAKRSLRETIRKFRAAGILRPVHSPWNTPLLPVRKSGTSEYRMVQDLREVNKRVETIHPTVPNPYTLLSLLPPDRIWYSVLDLKDAFFCIPLAPESQLIFAFEWADAEEGESGQLTWTRLPQGFKNSPTLFDEALNRDLQGFRLDHPSVSLLQYVDDLLIAADTQAACLSATRDLLMTLAELGYRVSGKKAQLCQEEVTYLGFKIHKGSRSLSNSRTQAILQIPVPKTKRQVREFLGTIGYCRLWIPGFAELAQPLYAATRGGNDPLVWGEKEEEAFQSLKLALTQPPALALPSLDKPFQLFVEETSGAAKGVLTQALGPWKRPVAYLSKRLDPVAAGWPRCLRAIAAAALLTREASKLTFGQDIEITSSHNLESLLRSPPDKWLTNARITQYQVLLLDPPRVRFKQTAALNPATLLPETDDTLPIHHCLDTLDSLTSTRPDLTDQPLAQAEATLFTDGSSYIRDGKRYAGAAVVTLDSVIWAEPLPIGTSAQKAELIALTKALEWSKDKSVNIYTDSRYAFATLHVHGMIYRERGLLTAGGKAIKNAPEILALLTAVWLPKRVAVMHCKGHQKDDAPTSTGNRRADEVAREVAIRPLSTQATISAGKRTADGSEFEKRTADGSEFESPKKKAKVE

SEQ ID NO: 7681 - protein, 2098 aa, synthetic construct
MPAAKRVKLDGGDKKYSIGLDIGTNSVGWAVITDEYKVPSKKFKVLGNTDRHSIKKNLIGALLFDSGETAEATRLKRTARRRYTRRKNRICYLQEIFSNEMAKVDDSFFHRLEESFLVEEDKKHERHPIFGNIVDEVAYHEKYPTIYHLRKKLVDSTDKADLRLIYLALAHMIKFRGHFLIEGDLNPDNSDVDKLFIQLVQTYNQLFEENPINASGVDAKAILSARLSKSRRLENLIAQLPGEKKNGLFGNLIALSLGLTPNFKSNFDLAEDAKLQLSKDTYDDDLDNLLAQIGDQYADLFLAAKNLSDAILLSDILRVNTEITKAPLSASMIKRYDEHHQDLTLLKALVRQQLPEKYKEIFFDQSKNGYAGYIDGGASQEEFYKFIKPILEKMDGTEELLVKLNREDLLRKQRTFDNGSIPHQIHLGELHAILRRQEDFYPFLKDNREKIEKILTFRIPYYVGPLARGNSRFAWMTRKSEETITPWNFEEVVDKGASAQSFIERMTNFDKNLPNEKVLPKHSLLYEYFTVYNELTKVKYVTEGMRKPAFLSGEQKKAIVDLLFKTNRKVTVKQLKEDYFKKIECFDSVEISGVEDRFNASLGTYHDLLKIIKDKDFLDNEENEDILEDIVLTLTLFEDREMIEERLKTYAHLFDDKVMKQLKRRRYTGWGRLSRKLINGIRDKQSGKTILDFLKSDGFANRNFMQLIHDDSLTFKEDIQKAQVSGQGDSLHEHIANLAGSPAIKKGILQTVKVVDELVKVMGRHKPENIVIEMARENQTTQKGQKNSRERMKRIEEGIKELGSQILKEHPVENTQLQNEKLYLYYLQNGRDMYVDQELDINRLSDYDVDHIVPQSFLKDDSIDNKVLTRSDKARGKSDNVPSEEVVKKMKNYWRQLLNAKLITQRKFDNLTKAERGGLSELDKAGFIKRQLVETRQITKHVAQILDSRMNTKYDENDKLIREVKVITLKSKLVSDFRKDFQFYKVREINNYHHAHDAYLNAVVGTALIKKYPKLESEFVYGDYKVYDVRKMIAKSEQEIGKATAKYFFYSNIMNFFKTEITLANGEIRKRPLIETNGETGEIVWDKGRDFATVRKVLSMPQVNIVKKTEVQTGGFSKESILPKRNSDKLIARKKDWDPKKYGGFDSPTVAYSVLVVAKVEKGKSKKLKSVKELLGITIMERSSFEKNPIDFLEAKGYKEVKKDLIIKLPKYSLFELENGRKRMLASAGELQKGNELALPSKYVNFLYLASHYEKLKGSPEDNEQKQLFVEQHKHYLDEIIEQISEFSKRVILADANLDKVLSAYNKHRDKPIREQAENIIHLFTLTNLGAPAAFKYFDTTIDRKRYTSTKEVLDATLIHQSITGLYETRIDLSQLGGDGGEAAAKGGGGSEAAAKGGVLNLEEEYRLHEKPVPSSIDPSWLQLFPTVWAERAGMGLANQVPPVVVELRSGASPVAVRQYPMSKEAREGIRPHIQKFLDLGVLVPCRSPWNTPLLPVKKPGTNDYRPVQDLREINKRVQDIHPTVPNPYNLLSSLPPSYTWYSVLDLKDAFFCLRLHPNSQPLFAFEWKDPEKGNTGQLTWTRLPQGFKNSPTLFNEALHRDLAPFRALNPQVVLLQYVDDLLVAAPTYEDCKKGTQKLLQELSKLGYRVSAKKAQLCQREVTYLGYLLKEGKRWLTPARKATVMKIPVPTTPRQVREFLGTAGFCRLWIPGFASLAAPLYPLTKPSIPFIWTEEHQQAFDHIKKALLSAPALALPDLTKPFTLYIDERAGVARGVLTQTLGPWRRPVAYLSKKLDPVASGWPTCLKAVAAVALLLKDADKLTLGQNVTVIASHSLESIVRQPPDRWMTNARMTHYQSLLLNERVSFAPPAVLNPATLLPVESEATPVHRCSEILAEETGTRRDLEDQPLPGVPTWYTDGSSFITEGKRRAGAPIVDGKRTVWASSLPEGTSAQKAELVALTQALRLAEGKNINIYTDSRYAFATAHIHGAIYKQRGWLTSAGKDIKNKEEILALLEAIHLPRRVAIIHCPGHQRGSNPVATGNRRADEAAKQAALSTRVLAGTTKPAGKRTADGSEFEKRTADGSEFESPKKKAKVE

SEQ ID NO: 7682 - protein, 2222 aa, synthetic construct
MPAAKRVKLDGGDKKYSIGLDIGTNSVGWAVITDEYKVPSKKFKVLGNTDRHSIKKNLIGALLFDSGETAEATRLKRTARRRYTRRKNRICYLQEIFSNEMAKVDDSFFHRLEESFLVEEDKKHERHPIFGNIVDEVAYHEKYPTIYHLRKKLVDSTDKADLRLIYLALAHMIKFRGHFLIEGDLNPDNSDVDKLFIQLVQTYNQLFEENPINASGVDAKAILSARLSKSRRLENLIAQLPGEKKNGLFGNLIALSLGLTPNFKSNFDLAEDAKLQLSKDTYDDDLDNLLAQIGDQYADLFLAAKNLSDAILLSDILRVNTEITKAPLSASMIKRYDEHHQDLTLLKALVRQQLPEKYKEIFFDQSKNGYAGYIDGGASQEEFYKFIKPILEKMDGTEELLVKLNREDLLRKQRTFDNGSIPHQIHLGELHAILRRQEDFYPFLKDNREKIEKILTFRIPYYVGPLARGNSRFAWMTRKSEETITPWNFEEVVDKGASAQSFIERMTNFDKNLPNEKVLPKHSLLYEYFTVYNELTKVKYVTEGMRKPAFLSGEQKKAIVDLLFKTNRKVTVKQLKEDYFKKIECFDSVEISGVEDRFNASLGTYHDLLKIIKDKDFLDNEENEDILEDIVLTLTLFEDREMIEERLKTYAHLFDDKVMKQLKRRRYTGWGRLSRKLINGIRDKQSGKTILDFLKSDGFANRNFMQLIHDDSLTFKEDIQKAQVSGQGDSLHEHIANLAGSPAIKKGILQTVKVVDELVKVMGRHKPENIVIEMARENQTTQKGQKNSRERMKRIEEGIKELGSQILKEHPVENTQLQNEKLYLYYLQNGRDMYVDQELDINRLSDYDVDHIVPQSFLKDDSIDNKVLTRSDKARGKSDNVPSEEVVKKMKNYWRQLLNAKLITQRKFDNLTKAERGGLSELDKAGFIKRQLVETRQITKHVAQILDSRMNTKYDENDKLIREVKVITLKSKLVSDFRKDFQFYKVREINNYHHAHDAYLNAVVGTALIKKYPKLESEFVYGDYKVYDVRKMIAKSEQEIGKATAKYFFYSNIMNFFKTEITLANGEIRKRPLIETNGETGEIVWDKGRDFATVRKVLSMPQVNIVKKTEVQTGGFSKESILPKRNSDKLIARKKDWDPKKYGGFDSPTVAYSVLVVAKVEKGKSKKLKSVKELLGITIMERSSFEKNPIDFLEAKGYKEVKKDLIIKLPKYSLFELENGRKRMLASAGELQKGNELALPSKYVNFLYLASHYEKLKGSPEDNEQKQLFVEQHKHYLDEIIEQISEFSKRVILADANLDKVLSAYNKHRDKPIREQAENIIHLFTLTNLGAPAAFKYFDTTIDRKRYTSTKEVLDATLIHQSITGLYETRIDLSQLGGDGGEAAAKGGGGSEAAAKGGTLGDQGSRGSDPLPEPRVTLTVEGIPTEFLVNTGAEHSVLTKPMGKMGSKRTVVAGATGSKVYPWTTKRLLKIGQKQVTHSFLVIPECPAPLLGRDLLTKLKAQIQFSTEGPQVTWEDRPAMCLVLNLEEEYRLHEKPVPPSIDPSWLQLFPMVWAEKAGMGLANQVPPVVVELKSDASPVAVRQYPMSKEAREGIRPHIQRFLDLGILVPCQSPWNTPLLPVKKPGTNDYRPVQDLREVNKRVQDIHPTVPNPYNLLSSLPPSHTWYSVLDLKDAFFCLKLHPNSQPLFAFEWRDPEKGNTGQLTWTRLPQGFKNSPTLFNEALHRDLASFRALNPQVVMLQYVDDLLVAAPTYRDCKEGTRRLLQELSKLGYRVSAKKAQLCREEVTYLGYLLKGGKRWLTPARKATVMKIPTPTTPRQVREFLGTAGFCRLWIPGFASLAAPLYPLTRPKVPFTWTEAHQEAFGRIKEALLSAPALALPDLTKPFALYVDEKEGVARGVLTQTLGPWRRPVAYLSKKLDPVASGWPTCLKAIAAVALLLKDADKLTLGQNVLVIAPHNLESIVRQPPDRWMTNARMTHYQSLLLNERVSFAPPAILNPATLLPVESDDTPIHICSEILAEETGTRPDLRDQPLPGVPAWYTDGSSFIMDGRRQAGAAIVDNKRTVWASNLPEGTSAQKAELIALTQALRLAEGKSINIYTDSRYAFATAHVHGAIYKQRGWLTSAGKDIKNKEEILALLEAIHLPKRVAIIHCPGHQRGTDPVATGNRKADEAAKQAAQSTRILTETTKNAGKRTADGSEFEKRTADGSEFESPKKKAKVE

SEQ ID NO: 7683 - protein, 2100 aa, synthetic construct
MPAAKRVKLDGGDKKYSIGLDIGTNSVGWAVITDEYKVPSKKFKVLGNTDRHSIKKNLIGALLFDSGETAEATRLKRTARRRYTRRKNRICYLQEIFSNEMAKVDDSFFHRLEESFLVEEDKKHERHPIFGNIVDEVAYHEKYPTIYHLRKKLVDSTDKADLRLIYLALAHMIKFRGHFLIEGDLNPDNSDVDKLFIQLVQTYNQLFEENPINASGVDAKAILSARLSKSRRLENLIAQLPGEKKNGLFGNLIALSLGLTPNFKSNFDLAEDAKLQLSKDTYDDDLDNLLAQIGDQYADLFLAAKNLSDAILLSDILRVNTEITKAPLSASMIKRYDEHHQDLTLLKALVRQQLPEKYKEIFFDQSKNGYAGYIDGGASQEEFYKFIKPILEKMDGTEELLVKLNREDLLRKQRTFDNGSIPHQIHLGELHAILRRQEDFYPFLKDNREKIEKILTFRIPYYVGPLARGNSRFAWMTRKSEETITPWNFEEVVDKGASAQSFIERMTNFDKNLPNEKVLPKHSLLYEYFTVYNELTKVKYVTEGMRKPAFLSGEQKKAIVDLLFKTNRKVTVKQLKEDYFKKIECFDSVEISGVEDRFNASLGTYHDLLKIIKDKDFLDNEENEDILEDIVLTLTLFEDREMIEERLKTYAHLFDDKVMKQLKRRRYTGWGRLSRKLINGIRDKQSGKTILDFLKSDGFANRNFMQLIHDDSLTFKEDIQKAQVSGQGDSLHEHIANLAGSPAIKKGILQTVKVVDELVKVMGRHKPENIVIEMARENQTTQKGQKNSRERMKRIEEGIKELGSQILKEHPVENTQLQNEKLYLYYLQNGRDMYVDQELDINRLSDYDVDHIVPQSFLKDDSIDNKVLTRSDKARGKSDNVPSEEVVKKMKNYWRQLLNAKLITQRKFDNLTKAERGGLSELDKAGFIKRQLVETRQITKHVAQILDSRMNTKYDENDKLIREVKVITLKSKLVSDFRKDFQFYKVREINNYHHAHDAYLNAVVGTALIKKYPKLESEFVYGDYKVYDVRKMIAKSEQEIGKATAKYFFYSNIMNFFKTEITLANGEIRKRPLIETNGETGEIVWDKGRDFATVRKVLSMPQVNIVKKTEVQTGGFSKESILPKRNSDKLIARKKDWDPKKYGGFDSPTVAYSVLVVAKVEKGKSKKLKSVKELLGITIMERSSFEKNPIDFLEAKGYKEVKKDLIIKLPKYSLFELENGRKRMLASAGELQKGNELALPSKYVNFLYLASHYEKLKGSPEDNEQKQLFVEQHKHYLDEIIEQISEFSKRVILADANLDKVLSAYNKHRDKPIREQAENIIHLFTLTNLGAPAAFKYFDTTIDRKRYTSTKEVLDATLIHQSITGLYETRIDLSQLGGDGGEAAAKGGGGSEAAAKGGTLNLEDEYRLYETSAEPEVSPGSTWLSDFPQAWAETGGMGLAVRQAPLIIPLKATSTPVSIKQYPMSQEAKLGIKPHIQRLLDQGILVPCQSPWNTPLLPVKKPGTNDYRPVQDLREVNKRVEDIHPTVPNPYNLLSGLPPSHRWYTVLDLKDAFFCLRLHPTSQPLFAFEWRDPGMGISGQLTWTRLPQGFKNSPTLFNEALHRDLADFRIQHPDLILLQYVDDILLAATSELDCQQGTRALLLTLGNLGYRASAKKAQLCQKQVKYLGYLLKEGQRWLTEARKETVMGQPTPKTPRQLREFLGTAGFCRLWIPGFAEMAAPLYPLTKPGTLFNWGPDQQKAYQEIKQALLTAPALGLPDLTKPFELFVDEKQGYAKGVLTQKLGPWRRPVAYLSKKLDPVAAGWPPCLRMVAAIAVLRKDAGKLTMGQPLVILAPHAVEALVKQPPDRWLSNARMTHYQAMLLDTDRVQFGPVVALNPATLLPLPEEGAPHDCLEILAETHGTRPDLTDQPIPDADHTWYTDGSSFLQEGQRKAGAAVTTETEVIWARALPAGTSAQRAELIALTQALKMAEGKRLNVYTDSRYAFATAHIHGEIYRRRGWLTSEGREIKNKSEILALLKALFLPKRLSIIHCLGHQKGDSAEARGNRLADQAAREAAIKTPPDTSTLLAGKRTADGSEFEKRTADGSEFESPKKKAKVE

SEQ ID NO: 7684 - protein, 2100 aa, synthetic construct
MPAAKRVKLDGGDKKYSIGLDIGTNSVGWAVITDEYKVPSKKFKVLGNTDRHSIKKNLIGALLFDSGETAEATRLKRTARRRYTRRKNRICYLQEIFSNEMAKVDDSFFHRLEESFLVEEDKKHERHPIFGNIVDEVAYHEKYPTIYHLRKKLVDSTDKADLRLIYLALAHMIKFRGHFLIEGDLNPDNSDVDKLFIQLVQTYNQLFEENPINASGVDAKAILSARLSKSRRLENLIAQLPGEKKNGLFGNLIALSLGLTPNFKSNFDLAEDAKLQLSKDTYDDDLDNLLAQIGDQYADLFLAAKNLSDAILLSDILRVNTEITKAPLSASMIKRYDEHHQDLTLLKALVRQQLPEKYKEIFFDQSKNGYAGYIDGGASQEEFYKFIKPILEKMDGTEELLVKLNREDLLRKQRTFDNGSIPHQIHLGELHAILRRQEDFYPFLKDNREKIEKILTFRIPYYVGPLARGNSRFAWMTRKSEETITPWNFEEVVDKGASAQSFIERMTNFDKNLPNEKVLPKHSLLYEYFTVYNELTKVKYVTEGMRKPAFLSGEQKKAIVDLLFKTNRKVTVKQLKEDYFKKIECFDSVEISGVEDRFNASLGTYHDLLKIIKDKDFLDNEENEDILEDIVLTLTLFEDREMIEERLKTYAHLFDDKVMKQLKRRRYTGWGRLSRKLINGIRDKQSGKTILDFLKSDGFANRNFMQLIHDDSLTFKEDIQKAQVSGQGDSLHEHIANLAGSPAIKKGILQTVKVVDELVKVMGRHKPENIVIEMARENQTTQKGQKNSRERMKRIEEGIKELGSQILKEHPVENTQLQNEKLYLYYLQNGRDMYVDQELDINRLSDYDVDHIVPQSFLKDDSIDNKVLTRSDKARGKSDNVPSEEVVKKMKNYWRQLLNAKLITQRKFDNLTKAERGGLSELDKAGFIKRQLVETRQITKHVAQILDSRMNTKYDENDKLIREVKVITLKSKLVSDFRKDFQFYKVREINNYHHAHDAYLNAVVGTALIKKYPKLESEFVYGDYKVYDVRKMIAKSEQEIGKATAKYFFYSNIMNFFKTEITLANGEIRKRPLIETNGETGEIVWDKGRDFATVRKVLSMPQVNIVKKTEVQTGGFSKESILPKRNSDKLIARKKDWDPKKYGGFDSPTVAYSVLVVAKVEKGKSKKLKSVKELLGITIMERSSFEKNPIDFLEAKGYKEVKKDLIIKLPKYSLFELENGRKRMLASAGELQKGNELALPSKYVNFLYLASHYEKLKGSPEDNEQKQLFVEQHKHYLDEIIEQISEFSKRVILADANLDKVLSAYNKHRDKPIREQAENIIHLFTLTNLGAPAAFKYFDTTIDRKRYTSTKEVLDATLIHQSITGLYETRIDLSQLGGDGGEAAAKGGGGSEAAAKGGTLGIEDEYRLHETSTEPDVSLGSTWLSDFPQAWAETGGMGLAVRQAPLIIPLKATSTPVSIQQYPMSHEARLGIKPHIQRLLDQGILVPCQSPWNTPLLPVKKPGTNDYRPVQDLREVNKRVEDIHPTVPNPYNLLSGLPPSHQWYTVLDLKDAFFCLRLHPTSQPLFAFEWRDPGMGISGQLTWTRLPQGFKNSPTLFNEALHRDLADFRIQHPDLILLQYVDDILLAATSELDCQQGTRALLQTLGDLGYRASAKKAQICQKQVKYLGYLLREGQRWLTEARKETVMGQPVPKTPRQLREFLGTAGFCRLWIPGFAEMAAPLYPLTKPGTLFSWGPDQQKAYQEIKQALLTAPALGLPDLTKPFELFVDEKQGYAKGVLTQKLGPWRRPVAYLSKKLDPVAAGWPPCLRMVAAIAVLTKDAGKLTMGQPLVILAPHAVEALVKQPPDRWLSNARMTHYQAMLLDTDRVQFGPVVALNPATLLPLPEEGAPHDCLEILAETHGTRPDLTDQPIPDADHTWYTDGSSFLQEGQRKAGAAVTTETEVIWAGALPAGTSAQRAELIALTQALKMAEGKRLNVYTDSRYAFATAHIHGEIYRRRGWLTSEGREIKNKSEILALLKALFLPKRLSIIHCLGHQKGDSAEARGNRLADQAAREAAIKTPPDTSTLLAGKRTADGSEFEKRTADGSEFESPKKKAKVE

SEQ ID NO: 7685 - protein, 2100 aa, synthetic construct
MPAAKRVKLDGGDKKYSIGLDIGTNSVGWAVITDEYKVPSKKFKVLGNTDRHSIKKNLIGALLFDSGETAEATRLKRTARRRYTRRKNRICYLQEIFSNEMAKVDDSFFHRLEESFLVEEDKKHERHPIFGNIVDEVAYHEKYPTIYHLRKKLVDSTDKADLRLIYLALAHMIKFRGHFLIEGDLNPDNSDVDKLFIQLVQTYNQLFEENPINASGVDAKAILSARLSKSRRLENLIAQLPGEKKNGLFGNLIALSLGLTPNFKSNFDLAEDAKLQLSKDTYDDDLDNLLAQIGDQYADLFLAAKNLSDAILLSDILRVNTEITKAPLSASMIKRYDEHHQDLTLLKALVRQQLPEKYKEIFFDQSKNGYAGYIDGGASQEEFYKFIKPILEKMDGTEELLVKLNREDLLRKQRTFDNGSIPHQIHLGELHAILRRQEDFYPFLKDNREKIEKILTFRIPYYVGPLARGNSRFAWMTRKSEETITPWNFEEVVDKGASAQSFIERMTNFDKNLPNEKVLPKHSLLYEYFTVYNELTKVKYVTEGMRKPAFLSGEQKKAIVDLLFKTNRKVTVKQLKEDYFKKIECFDSVEISGVEDRFNASLGTYHDLLKIIKDKDFLDNEENEDILEDIVLTLTLFEDREMIEERLKTYAHLFDDKVMKQLKRRRYTGWGRLSRKLINGIRDKQSGKTILDFLKSDGFANRNFMQLIHDDSLTFKEDIQKAQVSGQGDSLHEHIANLAGSPAIKKGILQTVKVVDELVKVMGRHKPENIVIEMARENQTTQKGQKNSRERMKRIEEGIKELGSQILKEHPVENTQLQNEKLYLYYLQNGRDMYVDQELDINRLSDYDVDHIVPQSFLKDDSIDNKVLTRSDKARGKSDNVPSEEVVKKMKNYWRQLLNAKLITQRKFDNLTKAERGGLSELDKAGFIKRQLVETRQITKHVAQILDSRMNTKYDENDKLIREVKVITLKSKLVSDFRKDFQFYKVREINNYHHAHDAYLNAVVGTALIKKYPKLESEFVYGDYKVYDVRKMIAKSEQEIGKATAKYFFYSNIMNFFKTEITLANGEIRKRPLIETNGETGEIVWDKGRDFATVRKVLSMPQVNIVKKTEVQTGGFSKESILPKRNSDKLIARKKDWDPKKYGGFDSPTVAYSVLVVAKVEKGKSKKLKSVKELLGITIMERSSFEKNPIDFLEAKGYKEVKKDLIIKLPKYSLFELENGRKRMLASAGELQKGNELALPSKYVNFLYLASHYEKLKGSPEDNEQKQLFVEQHKHYLDEIIEQISEFSKRVILADANLDKVLSAYNKHRDKPIREQAENIIHLFTLTNLGAPAAFKYFDTTIDRKRYTSTKEVLDATLIHQSITGLYETRIDLSQLGGDGGEAAAKGGGGSEAAAKGGTLNIEDEYRLHETSKGPDVPLGSTWLSDFPQAWAETGGMGLAVRQAPLIIPLKATSTPVSIKQYPMSQEARLGIKPHIQRLLDQGILVPCQSPWNTPLLPVKKPGTNDYRPVQDLREVNKRVEDIHPTVPNPYNLLSGLPPSHQWYTVLDLKDAFFCLRLHPTSQSLFAFEWRDPEMGISGQLTWTRLPQGFKNSPTLFNEALHRDLADFRIQHPDLILLQYVDDLLLAATSELDCQQGTRALLQTLGDLGYRASAKKAQICQKQVKYLGYLLKEGQRWLTEARKETVMGQPTPKTPRQLREFLGTAGFCRLWIPGFAEMAAPLYPLTKPGTLFEWGPDQQKAYQEIKQALLTAPALGLPDLTKPFELFVDEKQGYAKGVLTQKLGPWRRPVAYLSKKLDPVAAGWPPCLRMVAAIAVLTKDAGKLTMGQPLVILAPHAVEALVKQPPDRWLSNARMTHYQALLLDTDRVQFGPIVALNPATLLPLPEEGLQHDCLDILAEAHGTRPDLTDQPLPDADHTWYTDGSSFLQEGQRKAGAAVTTETEVVWAKALPAGTSAQRAELIALTQALKMAEGKKLNVYTDSRYAFATAHIHGEIYRRRGWLTSEGKEIKNKDEILALLKALFLPKRLSIIHCPGHQKGNRAEARGNRMADQAAREVATRETPETSTLLAGKRTADGSEFEKRTADGSEFESPKKKAKVE

SEQ ID NO: 7686 - protein, 2100 aa, synthetic construct
MPAAKRVKLDGGDKKYSIGLDIGTNSVGWAVITDEYKVPSKKFKVLGNTDRHSIKKNLIGALLFDSGETAEATRLKRTARRRYTRRKNRICYLQEIFSNEMAKVDDSFFHRLEESFLVEEDKKHERHPIFGNIVDEVAYHEKYPTIYHLRKKLVDSTDKADLRLIYLALAHMIKFRGHFLIEGDLNPDNSDVDKLFIQLVQTYNQLFEENPINASGVDAKAILSARLSKSRRLENLIAQLPGEKKNGLFGNLIALSLGLTPNFKSNFDLAEDAKLQLSKDTYDDDLDNLLAQIGDQYADLFLAAKNLSDAILLSDILRVNTEITKAPLSASMIKRYDEHHQDLTLLKALVRQQLPEKYKEIFFDQSKNGYAGYIDGGASQEEFYKFIKPILEKMDGTEELLVKLNREDLLRKQRTFDNGSIPHQIHLGELHAILRRQEDFYPFLKDNREKIEKILTFRIPYYVGPLARGNSRFAWMTRKSEETITPWNFEEVVDKGASAQSFIERMTNFDKNLPNEKVLPKHSLLYEYFTVYNELTKVKYVTEGMRKPAFLSGEQKKAIVDLLFKTNRKVTVKQLKEDYFKKIECFDSVEISGVEDRFNASLGTYHDLLKIIKDKDFLDNEENEDILEDIVLTLTLFEDREMIEERLKTYAHLFDDKVMKQLKRRRYTGWGRLSRKLINGIRDKQSGKTILDFLKSDGFANRNFMQLIHDDSLTFKEDIQKAQVSGQGDSLHEHIANLAGSPAIKKGILQTVKVVDELVKVMGRHKPENIVIEMARENQTTQKGQKNSRERMKRIEEGIKELGSQILKEHPVENTQLQNEKLYLYYLQNGRDMYVDQELDINRLSDYDVDHIVPQSFLKDDSIDNKVLTRSDKARGKSDNVPSEEVVKKMKNYWRQLLNAKLITQRKFDNLTKAERGGLSELDKAGFIKRQLVETRQITKHVAQILDSRMNTKYDENDKLIREVKVITLKSKLVSDFRKDFQFYKVREINNYHHAHDAYLNAVVGTALIKKYPKLESEFVYGDYKVYDVRKMIAKSEQEIGKATAKYFFYSNIMNFFKTEITLANGEIRKRPLIETNGETGEIVWDKGRDFATVRKVLSMPQVNIVKKTEVQTGGFSKESILPKRNSDKLIARKKDWDPKKYGGFDSPTVAYSVLVVAKVEKGKSKKLKSVKELLGITIMERSSFEKNPIDFLEAKGYKEVKKDLIIKLPKYSLFELENGRKRMLASAGELQKGNELALPSKYVNFLYLASHYEKLKGSPEDNEQKQLFVEQHKHYLDEIIEQISEFSKRVILADANLDKVLSAYNKHRDKPIREQAENIIHLFTLTNLGAPAAFKYFDTTIDRKRYTSTKEVLDATLIHQSITGLYETRIDLSQLGGDGGEAAAKGGGGSEAAAKGGTLNIEDEYRLHEISTEPDVSPGSTWLSDFPQAWAETGGMGLAVRQAPLIIPLKATSTPVSIKQYPMSQEAKLGIKPHIQRLLDQGILVPCQSPWNTPLLPVKKPGTNDYRPVQGLREVNKRVEDIHPTVPNPYNLLSGLPTSHRWYTVLDLKDAFFCLRLHPTSQPLFASEWRDPGMGISGQLTWTRLPQGFKNSPTLFNEALHRGLADFRIQHPDLILLQYVDDLLLAATSELDCQQGTRALLKTLGNLGYRASAKKAQICQKQVKYLGYLLREGQRWLTEARKETVMGQPTPKTPRQLREFLGKAGFCRLFIPRFAEMAAPLYPLTKPGTLFNWGPDQQKAYHEIKQALLTAPALGLPDLTKPFELFVDEKQGYAKGVLTQKLGPWRRPVAYLSKKLDPVAAGWPPCLRMVAAIAVLTKDAGKLTMGQPLVILAPHAVEALVKQPPDRWLSNARMTHYQAMLLDTDRVQFGPVVALNPATLLPLPEEGAPHDCLEILAETHGTEPDLTDQPIPDADHTWYTDGSSFLQEGQRKAGAAVTTETEVIWARALPAGTSAQRAELIALTQALKMAEGKRLNVYTDSRYAFATAHIHGEIYKRRGWLTSEGREIKNKSEILALLKALFLPKRLSIIHCLGHQKGDSAEARGNRLADQAAREAAIKTPPDTSTLLAGKRTADGSEFEKRTADGSEFESPKKKAKVE

SEQ ID NO: 7687 - protein, 2098 aa, synthetic construct
MPAAKRVKLDGGDKKYSIGLDIGTNSVGWAVITDEYKVPSKKFKVLGNTDRHSIKKNLIGALLFDSGETAEATRLKRTARRRYTRRKNRICYLQEIFSNEMAKVDDSFFHRLEESFLVEEDKKHERHPIFGNIVDEVAYHEKYPTIYHLRKKLVDSTDKADLRLIYLALAHMIKFRGHFLIEGDLNPDNSDVDKLFIQLVQTYNQLFEENPINASGVDAKAILSARLSKSRRLENLIAQLPGEKKNGLFGNLIALSLGLTPNFKSNFDLAEDAKLQLSKDTYDDDLDNLLAQIGDQYADLFLAAKNLSDAILLSDILRVNTEITKAPLSASMIKRYDEHHQDLTLLKALVRQQLPEKYKEIFFDQSKNGYAGYIDGGASQEEFYKFIKPILEKMDGTEELLVKLNREDLLRKQRTFDNGSIPHQIHLGELHAILRRQEDFYPFLKDNREKIEKILTFRIPYYVGPLARGNSRFAWMTRKSEETITPWNFEEVVDKGASAQSFIERMTNFDKNLPNEKVLPKHSLLYEYFTVYNELTKVKYVTEGMRKPAFLSGEQKKAIVDLLFKTNRKVTVKQLKEDYFKKIECFDSVEISGVEDRFNASLGTYHDLLKIIKDKDFLDNEENEDILEDIVLTLTLFEDREMIEERLKTYAHLFDDKVMKQLKRRRYTGWGRLSRKLINGIRDKQSGKTILDFLKSDGFANRNFMQLIHDDSLTFKEDIQKAQVSGQGDSLHEHIANLAGSPAIKKGILQTVKVVDELVKVMGRHKPENIVIEMARENQTTQKGQKNSRERMKRIEEGIKELGSQILKEHPVENTQLQNEKLYLYYLQNGRDMYVDQELDINRLSDYDVDHIVPQSFLKDDSIDNKVLTRSDKARGKSDNVPSEEVVKKMKNYWRQLLNAKLITQRKFDNLTKAERGGLSELDKAGFIKRQLVETRQITKHVAQILDSRMNTKYDENDKLIREVKVITLKSKLVSDFRKDFQFYKVREINNYHHAHDAYLNAVVGTALIKKYPKLESEFVYGDYKVYDVRKMIAKSEQEIGKATAKYFFYSNIMNFFKTEITLANGEIRKRPLIETNGETGEIVWDKGRDFATVRKVLSMPQVNIVKKTEVQTGGFSKESILPKRNSDKLIARKKDWDPKKYGGFDSPTVAYSVLVVAKVEKGKSKKLKSVKELLGITIMERSSFEKNPIDFLEAKGYKEVKKDLIIKLPKYSLFELENGRKRMLASAGELQKGNELALPSKYVNFLYLASHYEKLKGSPEDNEQKQLFVEQHKHYLDEIIEQISEFSKRVILADANLDKVLSAYNKHRDKPIREQAENIIHLFTLTNLGAPAAFKYFDTTIDRKRYTSTKEVLDATLIHQSITGLYETRIDLSQLGGDGGEAAAKGGGGSEAAAKGGVLNLEEEYRLHEKPVPSSIDPSWLQLFPTVWAERAGMGLANQVPPVVVELRSGASPVAVRQYPMSKEAREGIRPHIQRFLDLGVLVPCQSPWNTPLLPVKKPGTNDYRPVQDLREINKRVQDIHPTVPNPYNLLSSLPPSHTWYSVLDLKDAFFCLKLHPNSQPLFAFEWRDPEKGNTGQLTWTRLPQGFKNSPTLFNEALHRDLAPFRALNPQVVLLQYVDDLLVAAPTYRDCKEGTQKLLQELSKLGYRVSAKKAQLCQKEVTYLGYLLKEGKRWLTPARKATVMKIPPPTTPRQVREFLGTAGFCRLWIPGFASLAAPLYPLTKPSIPFIWTEEHQKAFDRIKEALLSAPALALPDLTKPFTLYVDERAGVARGVLTQTLGPWRRPVAYLSKKLDPVASGWPTCLKAVAAVALLLKDADKLTLGQNVTVIASHSLESIVRQPPDRWMTNARMTHYQSLLLNERVSFAPPAVLNPATLLPVESEATPVHRCSEILAEETGTRRDLKDQPLPGVPAWYTDGSSFIAEGKRRAGAAIVDGKRTVWASSLPEGTSAQKAELVALTQALRLAEGKDINIYTDSRYAFATAHIHGAIYKQRGWLTSAGKDIKNKEEILALLEAIHLPKRVAIIHCPGHQKGNDPVATGNRRADEAAKQAALSTRVLAETTKPAGKRTADGSEFEKRTADGSEFESPKKKAKVE

SEQ ID NO: 7688 - protein, 2100 aa, synthetic construct
MPAAKRVKLDGGDKKYSIGLDIGTNSVGWAVITDEYKVPSKKFKVLGNTDRHSIKKNLIGALLFDSGETAEATRLKRTARRRYTRRKNRICYLQEIFSNEMAKVDDSFFHRLEESFLVEEDKKHERHPIFGNIVDEVAYHEKYPTIYHLRKKLVDSTDKADLRLIYLALAHMIKFRGHFLIEGDLNPDNSDVDKLFIQLVQTYNQLFEENPINASGVDAKAILSARLSKSRRLENLIAQLPGEKKNGLFGNLIALSLGLTPNFKSNFDLAEDAKLQLSKDTYDDDLDNLLAQIGDQYADLFLAAKNLSDAILLSDILRVNTEITKAPLSASMIKRYDEHHQDLTLLKALVRQQLPEKYKEIFFDQSKNGYAGYIDGGASQEEFYKFIKPILEKMDGTEELLVKLNREDLLRKQRTFDNGSIPHQIHLGELHAILRRQEDFYPFLKDNREKIEKILTFRIPYYVGPLARGNSRFAWMTRKSEETITPWNFEEVVDKGASAQSFIERMTNFDKNLPNEKVLPKHSLLYEYFTVYNELTKVKYVTEGMRKPAFLSGEQKKAIVDLLFKTNRKVTVKQLKEDYFKKIECFDSVEISGVEDRFNASLGTYHDLLKIIKDKDFLDNEENEDILEDIVLTLTLFEDREMIEERLKTYAHLFDDKVMKQLKRRRYTGWGRLSRKLINGIRDKQSGKTILDFLKSDGFANRNFMQLIHDDSLTFKEDIQKAQVSGQGDSLHEHIANLAGSPAIKKGILQTVKVVDELVKVMGRHKPENIVIEMARENQTTQKGQKNSRERMKRIEEGIKELGSQILKEHPVENTQLQNEKLYLYYLQNGRDMYVDQELDINRLSDYDVDHIVPQSFLKDDSIDNKVLTRSDKARGKSDNVPSEEVVKKMKNYWRQLLNAKLITQRKFDNLTKAERGGLSELDKAGFIKRQLVETRQITKHVAQILDSRMNTKYDENDKLIREVKVITLKSKLVSDFRKDFQFYKVREINNYHHAHDAYLNAVVGTALIKKYPKLESEFVYGDYKVYDVRKMIAKSEQEIGKATAKYFFYSNIMNFFKTEITLANGEIRKRPLIETNGETGEIVWDKGRDFATVRKVLSMPQVNIVKKTEVQTGGFSKESILPKRNSDKLIARKKDWDPKKYGGFDSPTVAYSVLVVAKVEKGKSKKLKSVKELLGITIMERSSFEKNPIDFLEAKGYKEVKKDLIIKLPKYSLFELENGRKRMLASAGELQKGNELALPSKYVNFLYLASHYEKLKGSPEDNEQKQLFVEQHKHYLDEIIEQISEFSKRVILADANLDKVLSAYNKHRDKPIREQAENIIHLFTLTNLGAPAAFKYFDTTIDRKRYTSTKEVLDATLIHQSITGLYETRIDLSQLGGDGGEAAAKGGGGSEAAAKGGTLNIEDEYRLHETSKEPDVPLGSTWLSDFPQAWAETGGMGLAVRQAPLIIPLKATSTPVSIKQYPMSQEARLGIKPHIQRLLDQGILVPCQSPWNTPLLPVKKPGTNDYRPVQDLREVNKRVEDIHPTVPNPYNLLSGLPPSHQWYTVLDLKDAFFCLRLHPTSQPLFAFEWRDPEMGISGQLTWTRLPQGFKNSPTLFDEALHRDLADFRIQHPDLILLQYVDDLLLAATSEQDCQRGTRALLQTLGNLGYRASAKKAQICQKQVKYLGYLLKEGQRWLTEARKETVMGQPTPKTPRQLREFLGTAGFCRLWIPGFAEMAAPLYPLTKTGTLFNWGPDQQKAYQEIKQALLTAPALGLPDLTKPFELFVDEKQGYAKGVLTQKLGPWRRPVAYLSKKLDPVAAGWPPCLRMVAAIAVLTKDAGKLTMGQPLVILAPHAVEALVKQPPDRWLSNARMTHYQAMLLDTDRVQFGPVVALNPATLLPLPEKEAPHDCLEILAETHGTRPDLTDQPIPDADYTWYTDGSSFLQEGQRRAGAAVTTETEVIWARALPAGTSAQRAELIALTQALKMAEGKKLNVYTDSRYAFATAHVHGEIYRRRGLLTSEGREIKNKNEILALLKALFLPKRLSIIHCPGHQKGNSAEARGNRMADQAAREAAMKAVLETSTLLAGKRTADGSEFEKRTADGSEFESPKKKAKVE

SEQ ID NO: 7689 - protein, 2103 aa, synthetic construct
MPAAKRVKLDGGDKKYSIGLDIGTNSVGWAVITDEYKVPSKKFKVLGNTDRHSIKKNLIGALLFDSGETAEATRLKRTARRRYTRRKNRICYLQEIFSNEMAKVDDSFFHRLEESFLVEEDKKHERHPIFGNIVDEVAYHEKYPTIYHLRKKLVDSTDKADLRLIYLALAHMIKFRGHFLIEGDLNPDNSDVDKLFIQLVQTYNQLFEENPINASGVDAKAILSARLSKSRRLENLIAQLPGEKKNGLFGNLIALSLGLTPNFKSNFDLAEDAKLQLSKDTYDDDLDNLLAQIGDQYADLFLAAKNLSDAILLSDILRVNTEITKAPLSASMIKRYDEHHQDLTLLKALVRQQLPEKYKEIFFDQSKNGYAGYIDGGASQEEFYKFIKPILEKMDGTEELLVKLNREDLLRKQRTFDNGSIPHQIHLGELHAILRRQEDFYPFLKDNREKIEKILTFRIPYYVGPLARGNSRFAWMTRKSEETITPWNFEEVVDKGASAQSFIERMTNFDKNLPNEKVLPKHSLLYEYFTVYNELTKVKYVTEGMRKPAFLSGEQKKAIVDLLFKTNRKVTVKQLKEDYFKKIECFDSVEISGVEDRFNASLGTYHDLLKIIKDKDFLDNEENEDILEDIVLTLTLFEDREMIEERLKTYAHLFDDKVMKQLKRRRYTGWGRLSRKLINGIRDKQSGKTILDFLKSDGFANRNFMQLIHDDSLTFKEDIQKAQVSGQGDSLHEHIANLAGSPAIKKGILQTVKVVDELVKVMGRHKPENIVIEMARENQTTQKGQKNSRERMKRIEEGIKELGSQILKEHPVENTQLQNEKLYLYYLQNGRDMYVDQELDINRLSDYDVDHIVPQSFLKDDSIDNKVLTRSDKARGKSDNVPSEEVVKKMKNYWRQLLNAKLITQRKFDNLTKAERGGLSELDKAGFIKRQLVETRQITKHVAQILDSRMNTKYDENDKLIREVKVITLKSKLVSDFRKDFQFYKVREINNYHHAHDAYLNAVVGTALIKKYPKLESEFVYGDYKVYDVRKMIAKSEQEIGKATAKYFFYSNIMNFFKTEITLANGEIRKRPLIETNGETGEIVWDKGRDFATVRKVLSMPQVNIVKKTEVQTGGFSKESILPKRNSDKLIARKKDWDPKKYGGFDSPTVAYSVLVVAKVEKGKSKKLKSVKELLGITIMERSSFEKNPIDFLEAKGYKEVKKDLIIKLPKYSLFELENGRKRMLASAGELQKGNELALPSKYVNFLYLASHYEKLKGSPEDNEQKQLFVEQHKHYLDEIIEQISEFSKRVILADANLDKVLSAYNKHRDKPIREQAENIIHLFTLTNLGAPAAFKYFDTTIDRKRYTSTKEVLDATLIHQSITGLYETRIDLSQLGGDGGSGSETPGTSESATPESGGTAPLEEEYRLFLEAPIQNVTLLEQWKREIPKVWAEINPPGLASTQAPIHVQLLSTALPVRVRQYPITLEAKRSLRETIRKFRAAGILRPVHSPWNTPLLPVRKSGTSEYRMVQDLREVNKRVETIHPTVPNPYTLLSLLPPDRIWYSVLDLKDAFFCIPLAPESQLIFAFEWADAEEGESGQLTWTRLPQGFKNSPTLFNEALNRDLQGFRLDHPSVSLLQYVDDLLIAADTQAACLSATRDLLMTLAELGYRVSGKKAQLCQEEVTYLGFKIHKGSRSLSNSRTQAILQIPVPKTKRQVREFLGTIGYCRLWIPGFAELAQPLYAATRPGNDPLVWGEKEEEAFQSLKLALTQPPALALPSLDKPFQLFVEETSGAAKGVLTQALGPWKRPVAYLSKRLDPVAAGWPRCLRAIAAAALLTREASKLTFGQDIEITSSHNLESLLRSPPDKWLTNARITQYQVLLLDPPRVRFKQTAALNPATLLPETDDTLPIHHCLDTLDSLTSTRPDLTDQPLAQAEATLFTDGSSYIRDGKRYAGAAVVTLDSVIWAEPLPIGTSAQKAELIALTKALEWSKDKSVNIYTDSRYAFATLHVHGMIYRERGWLTAGGKAIKNAPEILALLTAVWLPKRVAVMHCKGHQKDDAPTSTGNRRADEVAREVAIRPLSTQATISAGKRTADGSEFEKRTADGSEFESPKKKAKVE

SEQ ID NO: 7690 - protein, 2178 aa, synthetic construct
MPAAKRVKLDGGDKKYSIGLDIGTNSVGWAVITDEYKVPSKKFKVLGNTDRHSIKKNLIGALLFDSGETAEATRLKRTARRRYTRRKNRICYLQEIFSNEMAKVDDSFFHRLEESFLVEEDKKHERHPIFGNIVDEVAYHEKYPTIYHLRKKLVDSTDKADLRLIYLALAHMIKFRGHFLIEGDLNPDNSDVDKLFIQLVQTYNQLFEENPINASGVDAKAILSARLSKSRRLENLIAQLPGEKKNGLFGNLIALSLGLTPNFKSNFDLAEDAKLQLSKDTYDDDLDNLLAQIGDQYADLFLAAKNLSDAILLSDILRVNTEITKAPLSASMIKRYDEHHQDLTLLKALVRQQLPEKYKEIFFDQSKNGYAGYIDGGASQEEFYKFIKPILEKMDGTEELLVKLNREDLLRKQRTFDNGSIPHQIHLGELHAILRRQEDFYPFLKDNREKIEKILTFRIPYYVGPLARGNSRFAWMTRKSEETITPWNFEEVVDKGASAQSFIERMTNFDKNLPNEKVLPKHSLLYEYFTVYNELTKVKYVTEGMRKPAFLSGEQKKAIVDLLFKTNRKVTVKQLKEDYFKKIECFDSVEISGVEDRFNASLGTYHDLLKIIKDKDFLDNEENEDILEDIVLTLTLFEDREMIEERLKTYAHLFDDKVMKQLKRRRYTGWGRLSRKLINGIRDKQSGKTILDFLKSDGFANRNFMQLIHDDSLTFKEDIQKAQVSGQGDSLHEHIANLAGSPAIKKGILQTVKVVDELVKVMGRHKPENIVIEMARENQTTQKGQKNSRERMKRIEEGIKELGSQILKEHPVENTQLQNEKLYLYYLQNGRDMYVDQELDINRLSDYDVDHIVPQSFLKDDSIDNKVLTRSDKARGKSDNVPSEEVVKKMKNYWRQLLNAKLITQRKFDNLTKAERGGLSELDKAGFIKRQLVETRQITKHVAQILDSRMNTKYDENDKLIREVKVITLKSKLVSDFRKDFQFYKVREINNYHHAHDAYLNAVVGTALIKKYPKLESEFVYGDYKVYDVRKMIAKSEQEIGKATAKYFFYSNIMNFFKTEITLANGEIRKRPLIETNGETGEIVWDKGRDFATVRKVLSMPQVNIVKKTEVQTGGFSKESILPKRNSDKLIARKKDWDPKKYGGFDSPTVAYSVLVVAKVEKGKSKKLKSVKELLGITIMERSSFEKNPIDFLEAKGYKEVKKDLIIKLPKYSLFELENGRKRMLASAGELQKGNELALPSKYVNFLYLASHYEKLKGSPEDNEQKQLFVEQHKHYLDEIIEQISEFSKRVILADANLDKVLSAYNKHRDKPIREQAENIIHLFTLTNLGAPAAFKYFDTTIDRKRYTSTKEVLDATLIHQSITGLYETRIDLSQLGGDGGSGSETPGTSESATPESGGMDLLKPLTVERKGVKIKGYWNSQADITCVPKDLLQGEEPVRQQNVTTIHGTQEGDVYYVNLKIDGRRINTEVIGTTLDYAIITPGDVPWILKKPLELTIKLDLEEQQGTLLNNSILSKKGKEELKQLFEKYSALWQSWENQVGHRRIRPHKIATGTVKPTPQKQYHINPKAKPDIQIVINDLLKQGVLIQKESTMNTPVYPVPKPNGRWRMVLDYRAVNKVTPLIAVQNQHSYGILGSLFKGRYKTTIDLSNGFWAHPIVPEDYWITAFTWQGKQYCWTVLPQGFLNSPGLFTGDVVDLLQGIPNVEVYVDDVYISHDSEKEHLEYLDILFNRLKEAGYIISLKKSNIANSIVDFLGFQITNEGRGLTDTFKEKLENITAPTTLKQLQSILGLLNFARNFIPDFTELIAPLYALIPKSTKNYVPWQIEHSTTLETLITKLNGAEYLQGRKGDKTLIMKVNASYTTGYIRYYNEGEKKPISYVSIVFSKTELKFTELEKLLTTVHKGLLKALDLSMGQNIHVYSPIVSMQNIQKTPQTAKKALASRWLSWLSYLEDPRIRFFYDPQMPALKDLPAVDTGKDNKKHPSNFQHIFYTDGSAITSPTKEGHLNAGMGIVYFINKDGNLQKQQEWSISLGNHTAQFAEIAAFEFALKKCLPLGGNILVVTDSNYVAKAYNEELDVWASNGFVNNRKKPLKHISKWKSVADLKRLRPDVVVTHEPGHQKLDSSPHAYGNNLADQLATQASFKVHAGKRTADGSEFEKRTADGSEFESPKKKAKVE

SEQ ID NO: 7691 - protein, 2100 aa, synthetic construct
MPAAKRVKLDGGDKKYSIGLDIGTNSVGWAVITDEYKVPSKKFKVLGNTDRHSIKKNLIGALLFDSGETAEATRLKRTARRRYTRRKNRICYLQEIFSNEMAKVDDSFFHRLEESFLVEEDKKHERHPIFGNIVDEVAYHEKYPTIYHLRKKLVDSTDKADLRLIYLALAHMIKFRGHFLIEGDLNPDNSDVDKLFIQLVQTYNQLFEENPINASGVDAKAILSARLSKSRRLENLIAQLPGEKKNGLFGNLIALSLGLTPNFKSNFDLAEDAKLQLSKDTYDDDLDNLLAQIGDQYADLFLAAKNLSDAILLSDILRVNTEITKAPLSASMIKRYDEHHQDLTLLKALVRQQLPEKYKEIFFDQSKNGYAGYIDGGASQEEFYKFIKPILEKMDGTEELLVKLNREDLLRKQRTFDNGSIPHQIHLGELHAILRRQEDFYPFLKDNREKIEKILTFRIPYYVGPLARGNSRFAWMTRKSEETITPWNFEEVVDKGASAQSFIERMTNFDKNLPNEKVLPKHSLLYEYFTVYNELTKVKYVTEGMRKPAFLSGEQKKAIVDLLFKTNRKVTVKQLKEDYFKKIECFDSVEISGVEDRFNASLGTYHDLLKIIKDKDFLDNEENEDILEDIVLTLTLFEDREMIEERLKTYAHLFDDKVMKQLKRRRYTGWGRLSRKLINGIRDKQSGKTILDFLKSDGFANRNFMQLIHDDSLTFKEDIQKAQVSGQGDSLHEHIANLAGSPAIKKGILQTVKVVDELVKVMGRHKPENIVIEMARENQTTQKGQKNSRERMKRIEEGIKELGSQILKEHPVENTQLQNEKLYLYYLQNGRDMYVDQELDINRLSDYDVDHIVPQSFLKDDSIDNKVLTRSDKARGKSDNVPSEEVVKKMKNYWRQLLNAKLITQRKFDNLTKAERGGLSELDKAGFIKRQLVETRQITKHVAQILDSRMNTKYDENDKLIREVKVITLKSKLVSDFRKDFQFYKVREINNYHHAHDAYLNAVVGTALIKKYPKLESEFVYGDYKVYDVRKMIAKSEQEIGKATAKYFFYSNIMNFFKTEITLANGEIRKRPLIETNGETGEIVWDKGRDFATVRKVLSMPQVNIVKKTEVQTGGFSKESILPKRNSDKLIARKKDWDPKKYGGFDSPTVAYSVLVVAKVEKGKSKKLKSVKELLGITIMERSSFEKNPIDFLEAKGYKEVKKDLIIKLPKYSLFELENGRKRMLASAGELQKGNELALPSKYVNFLYLASHYEKLKGSPEDNEQKQLFVEQHKHYLDEIIEQISEFSKRVILADANLDKVLSAYNKHRDKPIREQAENIIHLFTLTNLGAPAAFKYFDTTIDRKRYTSTKEVLDATLIHQSITGLYETRIDLSQLGGDGGSGSETPGTSESATPESGGTLQLEEEYRLFEPESTQKQEMDIWLKNFPQAWAETGGMGTAHCQAPVLIQLKATATPISIRQYPMPHEAYQGIKPHIRRMLDQGILKPCQSPWNTPLLPVKKPGTEDYRPVQDLREVNKRVEDIHPTVPNPYNLLSTLPPSHPWYTVLDLKDAFFCLRLHSESQLLFAFEWRDPEIGLSGQLTWTRLPQGFKNSPTLFNEALHSDLADFRVRYPALVLLQYVDDLLLAAATRTECLEGTKALLETLGNKGYRASAKKAQICLQEVTYLGYSLKDGQRWLTKARKEAILSIPVPKNSRQVREFLGTAGYCRLWIPGFAELAAPLYPLTRPGTLFQWGTEQQLAFEDIKKALLSSPALGLPDITKPFELFIDENSGFAKGVLVQKLGPWKRPVAYLSKKLDTVASGWPPCLRMVAAIAILVKDAGKLTLGQPLTILTSHPVEALVRQPPNKWLSNARMTHYQAMLLDAERVHFGPTVSLNPATLLPLPSGGNHHDCLQILAETHGTRPDLTDQPLPDADLTWYTDGSSFIRNGEREAGAAVTTESEVIWAAPLPPGTSAQRAELIALTQALKMAEGKKLTVYTDSRYAFATTHVHGEIYRRRGWLTSEGKEIKNKNEILALLEALFLPKRLSIIHCPGHQKGDSPQAKGNRLADDTAKKAATETHSSLTVLPAGKRTADGSEFEKRTADGSEFESPKKKAKVE

SEQ ID NO: 7692 - protein, 2011 aa, synthetic construct
MPAAKRVKLDGGDKKYSIGLDIGTNSVGWAVITDEYKVPSKKFKVLGNTDRHSIKKNLIGALLFDSGETAEATRLKRTARRRYTRRKNRICYLQEIFSNEMAKVDDSFFHRLEESFLVEEDKKHERHPIFGNIVDEVAYHEKYPTIYHLRKKLVDSTDKADLRLIYLALAHMIKFRGHFLIEGDLNPDNSDVDKLFIQLVQTYNQLFEENPINASGVDAKAILSARLSKSRRLENLIAQLPGEKKNGLFGNLIALSLGLTPNFKSNFDLAEDAKLQLSKDTYDDDLDNLLAQIGDQYADLFLAAKNLSDAILLSDILRVNTEITKAPLSASMIKRYDEHHQDLTLLKALVRQQLPEKYKEIFFDQSKNGYAGYIDGGASQEEFYKFIKPILEKMDGTEELLVKLNREDLLRKQRTFDNGSIPHQIHLGELHAILRRQEDFYPFLKDNREKIEKILTFRIPYYVGPLARGNSRFAWMTRKSEETITPWNFEEVVDKGASAQSFIERMTNFDKNLPNEKVLPKHSLLYEYFTVYNELTKVKYVTEGMRKPAFLSGEQKKAIVDLLFKTNRKVTVKQLKEDYFKKIECFDSVEISGVEDRFNASLGTYHDLLKIIKDKDFLDNEENEDILEDIVLTLTLFEDREMIEERLKTYAHLFDDKVMKQLKRRRYTGWGRLSRKLINGIRDKQSGKTILDFLKSDGFANRNFMQLIHDDSLTFKEDIQKAQVSGQGDSLHEHIANLAGSPAIKKGILQTVKVVDELVKVMGRHKPENIVIEMARENQTTQKGQKNSRERMKRIEEGIKELGSQILKEHPVENTQLQNEKLYLYYLQNGRDMYVDQELDINRLSDYDVDHIVPQSFLKDDSIDNKVLTRSDKARGKSDNVPSEEVVKKMKNYWRQLLNAKLITQRKFDNLTKAERGGLSELDKAGFIKRQLVETRQITKHVAQILDSRMNTKYDENDKLIREVKVITLKSKLVSDFRKDFQFYKVREINNYHHAHDAYLNAVVGTALIKKYPKLESEFVYGDYKVYDVRKMIAKSEQEIGKATAKYFFYSNIMNFFKTEITLANGEIRKRPLIETNGETGEIVWDKGRDFATVRKVLSMPQVNIVKKTEVQTGGFSKESILPKRNSDKLIARKKDWDPKKYGGFDSPTVAYSVLVVAKVEKGKSKKLKSVKELLGITIMERSSFEKNPIDFLEAKGYKEVKKDLIIKLPKYSLFELENGRKRMLASAGELQKGNELALPSKYVNFLYLASHYEKLKGSPEDNEQKQLFVEQHKHYLDEIIEQISEFSKRVILADANLDKVLSAYNKHRDKPIREQAENIIHLFTLTNLGAPAAFKYFDTTIDRKRYTSTKEVLDATLIHQSITGLYETRIDLSQLGGDGGSGSETPGTSESATPESGGPLGTSDSPVTHADPIDWKSEEPVWVDQWPLTQEKLSAAQQLVQEQLRLGHIEPSTSAWNSPIFVIKKKSGKWRLLQDLRKVNETMMHMGALQPGLPTPSPIPDKSYIIVIDLKDCFYTIPLAPQDCKRFAFSLPSVNFKEPMQRYQWRVLPQGMTNSPTLCQKFVATAIAPVRQRFPQLYLVHYMDDILLAHTDEHLLYQAFSILKQHLSLNGLVIADEKIQTHFPYNYLGFSLYPRVYNTQLVKLQTDHLKTLNDFQKLLGDINWIRPYLKLPTYTLQPLFDILKGDSDPASPRTLSLEGRTALQSIEEAIRQQQITYCDYQRSWGLYILPTPRAPTGVLYQDKPLRWIYLSATPTKHLLPYYELVAKIIAKGRHEAIQYFGMEPPFICVPYALEQQDWLFQFSDNWSIAFANYPGQITHHYPSDKLLQFASSHAFIFPKIVRRQPIPEATLIFTDGSSNGTAALIINHQTYYAQTSFSSAQVVELFAVHQALLTVPTSFNLFTDSSYVVGALQMIETVPIIGTTSPEVLNLFTLIQQVLHCRQHPCFFGHIRAHSTLPGALVQGNHTADVLTKQVFFQSAGKRTADGSEFEKRTADGSEFESPKKKAKVE

SEQ ID NO: 7693 - protein, 2223 aa, synthetic construct
MPAAKRVKLDGGDKKYSIGLDIGTNSVGWAVITDEYKVPSKKFKVLGNTDRHSIKKNLIGALLFDSGETAEATRLKRTARRRYTRRKNRICYLQEIFSNEMAKVDDSFFHRLEESFLVEEDKKHERHPIFGNIVDEVAYHEKYPTIYHLRKKLVDSTDKADLRLIYLALAHMIKFRGHFLIEGDLNPDNSDVDKLFIQLVQTYNQLFEENPINASGVDAKAILSARLSKSRRLENLIAQLPGEKKNGLFGNLIALSLGLTPNFKSNFDLAEDAKLQLSKDTYDDDLDNLLAQIGDQYADLFLAAKNLSDAILLSDILRVNTEITKAPLSASMIKRYDEHHQDLTLLKALVRQQLPEKYKEIFFDQSKNGYAGYIDGGASQEEFYKFIKPILEKMDGTEELLVKLNREDLLRKQRTFDNGSIPHQIHLGELHAILRRQEDFYPFLKDNREKIEKILTFRIPYYVGPLARGNSRFAWMTRKSEETITPWNFEEVVDKGASAQSFIERMTNFDKNLPNEKVLPKHSLLYEYFTVYNELTKVKYVTEGMRKPAFLSGEQKKAIVDLLFKTNRKVTVKQLKEDYFKKIECFDSVEISGVEDRFNASLGTYHDLLKIIKDKDFLDNEENEDILEDIVLTLTLFEDREMIEERLKTYAHLFDDKVMKQLKRRRYTGWGRLSRKLINGIRDKQSGKTILDFLKSDGFANRNFMQLIHDDSLTFKEDIQKAQVSGQGDSLHEHIANLAGSPAIKKGILQTVKVVDELVKVMGRHKPENIVIEMARENQTTQKGQKNSRERMKRIEEGIKELGSQILKEHPVENTQLQNEKLYLYYLQNGRDMYVDQELDINRLSDYDVDHIVPQSFLKDDSIDNKVLTRSDKARGKSDNVPSEEVVKKMKNYWRQLLNAKLITQRKFDNLTKAERGGLSELDKAGFIKRQLVETRQITKHVAQILDSRMNTKYDENDKLIREVKVITLKSKLVSDFRKDFQFYKVREINNYHHAHDAYLNAVVGTALIKKYPKLESEFVYGDYKVYDVRKMIAKSEQEIGKATAKYFFYSNIMNFFKTEITLANGEIRKRPLIETNGETGEIVWDKGRDFATVRKVLSMPQVNIVKKTEVQTGGFSKESILPKRNSDKLIARKKDWDPKKYGGFDSPTVAYSVLVVAKVEKGKSKKLKSVKELLGITIMERSSFEKNPIDFLEAKGYKEVKKDLIIKLPKYSLFELENGRKRMLASAGELQKGNELALPSKYVNFLYLASHYEKLKGSPEDNEQKQLFVEQHKHYLDEIIEQISEFSKRVILADANLDKVLSAYNKHRDKPIREQAENIIHLFTLTNLGAPAAFKYFDTTIDRKRYTSTKEVLDATLIHQSITGLYETRIDLSQLGGDGGSGSETPGTSESATPESGGTLGDQGSRGSDPLPEPRVTLTVEGIPTEFLVNTGAEHSVLTKPMGKMGSKRTVVAGATGSKVYPWTTKRLLKIGQKQVTHSFLVIPECPAPLLGRDLLTKLKAQIQFSTEGPQVTWEDRPAMCLVLNLEEEYRLHEKPVPPSIDPSWLQLFPMVWAEKAGMGLANQVPPVVVELKSDASPVAVRQYPMSKEAREGIRPHIQRFLDLGILVPCQSPWNTPLLPVKKPGTNDYRPVQDLREVNKRVQDIHPTVPNPYNLLSSLPPSHTWYSVLDLKDAFFCLKLHPNSQPLFAFEWRDPEKGNTGQLTWTRLPQGFKNSPTLFDEALHRDLASFRALNPQVVMLQYVDDLLVAAPTYRDCKEGTRRLLQELSKLGYRVSAKKAQLCREEVTYLGYLLKGGKRWLTPARKATVMKIPTPTTPRQVREFLGTAGFCRLWIPGFASLAAPLYPLTREKVPFTWTEAHQEAFGRIKEALLSAPALALPDLTKPFALYVDEKEGVARGVLTQTLGPWRRPVAYLSKKLDPVASGWPTCLKAIAAVALLLKDADKLTLGQNVLVIAPHNLESIVRQPPDRWMTNARMTHYQSLLLNERVSFAPPAILNPATLLPVESDDTPIHICSEILAEETGTRPDLRDQPLPGVPAWYTDGSSFIMDGRRQAGAAIVDNKRTVWASNLPEGTSAQKAELIALTQALRLAEGKSINIYTDSRYAFATAHVHGAIYKQRGLLTSAGKDIKNKEEILALLEAIHLPKRVAIIHCPGHQRGTDPVATGNRKADEAAKQAAQSTRILTETTKNAGKRTADGSEFEKRTADGSEFESPKKKAKVE

SEQ ID NO: 7694 - protein, 2132 aa, synthetic construct
MPAAKRVKLDGGDKKYSIGLDIGTNSVGWAVITDEYKVPSKKFKVLGNTDRHSIKKNLIGALLFDSGETAEATRLKRTARRRYTRRKNRICYLQEIFSNEMAKVDDSFFHRLEESFLVEEDKKHERHPIFGNIVDEVAYHEKYPTIYHLRKKLVDSTDKADLRLIYLALAHMIKFRGHFLIEGDLNPDNSDVDKLFIQLVQTYNQLFEENPINASGVDAKAILSARLSKSRRLENLIAQLPGEKKNGLFGNLIALSLGLTPNFKSNFDLAEDAKLQLSKDTYDDDLDNLLAQIGDQYADLFLAAKNLSDAILLSDILRVNTEITKAPLSASMIKRYDEHHQDLTLLKALVRQQLPEKYKEIFFDQSKNGYAGYIDGGASQEEFYKFIKPILEKMDGTEELLVKLNREDLLRKQRTFDNGSIPHQIHLGELHAILRRQEDFYPFLKDNREKIEKILTFRIPYYVGPLARGNSRFAWMTRKSEETITPWNFEEVVDKGASAQSFIERMTNFDKNLPNEKVLPKHSLLYEYFTVYNELTKVKYVTEGMRKPAFLSGEQKKAIVDLLFKTNRKVTVKQLKEDYFKKIECFDSVEISGVEDRFNASLGTYHDLLKIIKDKDFLDNEENEDILEDIVLTLTLFEDREMIEERLKTYAHLFDDKVMKQLKRRRYTGWGRLSRKLINGIRDKQSGKTILDFLKSDGFANRNFMQLIHDDSLTFKEDIQKAQVSGQGDSLHEHIANLAGSPAIKKGILQTVKVVDELVKVMGRHKPENIVIEMARENQTTQKGQKNSRERMKRIEEGIKELGSQILKEHPVENTQLQNEKLYLYYLQNGRDMYVDQELDINRLSDYDVDHIVPQSFLKDDSIDNKVLTRSDKARGKSDNVPSEEVVKKMKNYWRQLLNAKLITQRKFDNLTKAERGGLSELDKAGFIKRQLVETRQITKHVAQILDSRMNTKYDENDKLIREVKVITLKSKLVSDFRKDFQFYKVREINNYHHAHDAYLNAVVGTALIKKYPKLESEFVYGDYKVYDVRKMIAKSEQEIGKATAKYFFYSNIMNFFKTEITLANGEIRKRPLIETNGETGEIVWDKGRDFATVRKVLSMPQVNIVKKTEVQTGGFSKESILPKRNSDKLIARKKDWDPKKYGGFDSPTVAYSVLVVAKVEKGKSKKLKSVKELLGITIMERSSFEKNPIDFLEAKGYKEVKKDLIIKLPKYSLFELENGRKRMLASAGELQKGNELALPSKYVNFLYLASHYEKLKGSPEDNEQKQLFVEQHKHYLDEIIEQISEFSKRVILADANLDKVLSAYNKHRDKPIREQAENIIHLFTLTNLGAPAAFKYFDTTIDRKRYTSTKEVLDATLIHQSITGLYETRIDLSQLGGDGGSGSETPGTSESATPESGGLLGRDLLTKLKAQIQFSTEGPQVTWEDRPAMCLVLNLEEEYRLHEKPVPPSIDPSWLQLFPMVWAEKAGMGLANQVPPVVVELKSDASPVAVRQYPMSKEAREGIRPHIQRFLDLGILVPCQSPWNTPLLPVKKPGTNDYRPVQDLREVNKRVQDIHPTVPNPYNLLSSLPPSHTWYSVLDLKDAFFCLKLHPNSQPLFAFEWRDPEKGNTGQLTWTRLPQGFKNSPTLFNEALHRDLASFRALNPQVVMLQYVDDLLVAAPTYRDCKEGTRRLLQELSKLGYRVSAKKAQLCREEVTYLGYLLKGGKRWLTPARKATVMKIPTPTTPRQVREFLGKAGFCRLFIPGFASLAAPLYPLTRPKVPFTWTEAHQEAFGRIKEALLSAPALALPDLTKPFALYVDEKEGVARGVLTQTLGPWRRPVAYLSKKLDPVASGWPTCLKAIAAVALLLKDADKLTLGQNVLVIAPHNLESIVRQPPDRWMTNARMTHYQSLLLNERVSFAPPAILNPATLLPVESDDTPIHICSEILAEETGTRPDLRDQPLPGVPAWYTDGSSFIMDGRRQAGAAIVDNKRTVWASNLPEGTSAQKAELIALTQALRLAEGKSINIYTDSRYAFATAHVHGAIYKQRGWLTSAGKDIKNKEEILALLEAIHLPKRVAIIHCPGHQRGTDPVATGNRKADEAAKQAAQSTRILTETTKNAGKRTADGSEFEKRTADGSEFESPKKKAKVE

SEQ ID NO: 7695 - protein, 2223 aa, synthetic construct
MPAAKRVKLDGGDKKYSIGLDIGTNSVGWAVITDEYKVPSKKFKVLGNTDRHSIKKNLIGALLFDSGETAEATRLKRTARRRYTRRKNRICYLQEIFSNEMAKVDDSFFHRLEESFLVEEDKKHERHPIFGNIVDEVAYHEKYPTIYHLRKKLVDSTDKADLRLIYLALAHMIKFRGHFLIEGDLNPDNSDVDKLFIQLVQTYNQLFEENPINASGVDAKAILSARLSKSRRLENLIAQLPGEKKNGLFGNLIALSLGLTPNFKSNFDLAEDAKLQLSKDTYDDDLDNLLAQIGDQYADLFLAAKNLSDAILLSDILRVNTEITKAPLSASMIKRYDEHHQDLTLLKALVRQQLPEKYKEIFFDQSKNGYAGYIDGGASQEEFYKFIKPILEKMDGTEELLVKLNREDLLRKQRTFDNGSIPHQIHLGELHAILRRQEDFYPFLKDNREKIEKILTFRIPYYVGPLARGNSRFAWMTRKSEETITPWNFEEVVDKGASAQSFIERMTNFDKNLPNEKVLPKHSLLYEYFTVYNELTKVKYVTEGMRKPAFLSGEQKKAIVDLLFKTNRKVTVKQLKEDYFKKIECFDSVEISGVEDRFNASLGTYHDLLKIIKDKDFLDNEENEDILEDIVLTLTLFEDREMIEERLKTYAHLFDDKVMKQLKRRRYTGWGRLSRKLINGIRDKQSGKTILDFLKSDGFANRNFMQLIHDDSLTFKEDIQKAQVSGQGDSLHEHIANLAGSPAIKKGILQTVKVVDELVKVMGRHKPENIVIEMARENQTTQKGQKNSRERMKRIEEGIKELGSQILKEHPVENTQLQNEKLYLYYLQNGRDMYVDQELDINRLSDYDVDHIVPQSFLKDDSIDNKVLTRSDKARGKSDNVPSEEVVKKMKNYWRQLLNAKLITQRKFDNLTKAERGGLSELDKAGFIKRQLVETRQITKHVAQILDSRMNTKYDENDKLIREVKVITLKSKLVSDFRKDFQFYKVREINNYHHAHDAYLNAVVGTALIKKYPKLESEFVYGDYKVYDVRKMIAKSEQEIGKATAKYFFYSNIMNFFKTEITLANGEIRKRPLIETNGETGEIVWDKGRDFATVRKVLSMPQVNIVKKTEVQTGGFSKESILPKRNSDKLIARKKDWDPKKYGGFDSPTVAYSVLVVAKVEKGKSKKLKSVKELLGITIMERSSFEKNPIDFLEAKGYKEVKKDLIIKLPKYSLFELENGRKRMLASAGELQKGNELALPSKYVNFLYLASHYEKLKGSPEDNEQKQLFVEQHKHYLDEIIEQISEFSKRVILADANLDKVLSAYNKHRDKPIREQAENIIHLFTLTNLGAPAAFKYFDTTIDRKRYTSTKEVLDATLIHQSITGLYETRIDLSQLGGDGGSGSETPGTSESATPESGGTLGDQGSRGSDPLPEPRVTLTVEGIPTEFLVNTGAEHSVLTKPMGKMGSKRTVVAGATGSKVYPWTTKRLLKIGQKQVTHSFLVIPECPAPLLGRDLLTKLKAQIQFSTEGPQVTWEDRPAMCLVLNLEEEYRLHEKPVPPSIDPSWLQLFPMVWAEKAGMGLANQVPPVVVELKSDASPVAVRQYPMSKEAREGIRPHIQRFLDLGILVPCQSPWNTPLLPVKKPGTNDYRPVQDLREVNKRVQDIHPTVPNPYNLLSSLPPSHTWYSVLDLKDAFFCLKLHPNSQPLFAFEWRDPEKGNTGQLTWTRLPQGFKNSPTLFNEALHRDLASFRALNPQVVMLQYVDDLLVAAPTYRDCKEGTRRLLQELSKLGYRVSAKKAQLCREEVTYLGYLLKGGKRWLTPARKATVMKIPTPTTPRQVREFLGTAGFCRLWIPGFASLAAPLYPLTRPKVPFTWTEAHQEAFGRIKEALLSAPALALPDLTKPFALYVDEKEGVARGVLTQTLGPWRRPVAYLSKKLDPVASGWPTCLKAIAAVALLLKDADKLTLGQNVLVIAPHNLESIVRQPPDRWMTNARMTHYQSLLLNERVSFAPPAILNPATLLPVESDDTPIHICSEILAEETGTRPDLRDQPLPGVPAWYTDGSSFIMDGRRQAGAAIVDNKRTVWASNLPEGTSAQKAELIALTQALRLAEGKSINIYTDSRYAFATAHVHGAIYKQRGWLTSAGKDIKNKEEILALLEAIHLPKRVAIIHCPGHQRGTDPVATGNRKADEAAKQAAQSTRILTETTKNAGKRTADGSEFEKRTADGSEFESPKKKAKVE

SEQ ID NO: 7696 - protein, 2101 aa, synthetic construct
MPAAKRVKLDGGDKKYSIGLDIGTNSVGWAVITDEYKVPSKKFKVLGNTDRHSIKKNLIGALLFDSGETAEATRLKRTARRRYTRRKNRICYLQEIFSNEMAKVDDSFFHRLEESFLVEEDKKHERHPIFGNIVDEVAYHEKYPTIYHLRKKLVDSTDKADLRLIYLALAHMIKFRGHFLIEGDLNPDNSDVDKLFIQLVQTYNQLFEENPINASGVDAKAILSARLSKSRRLENLIAQLPGEKKNGLFGNLIALSLGLTPNFKSNFDLAEDAKLQLSKDTYDDDLDNLLAQIGDQYADLFLAAKNLSDAILLSDILRVNTEITKAPLSASMIKRYDEHHQDLTLLKALVRQQLPEKYKEIFFDQSKNGYAGYIDGGASQEEFYKFIKPILEKMDGTEELLVKLNREDLLRKQRTFDNGSIPHQIHLGELHAILRRQEDFYPFLKDNREKIEKILTFRIPYYVGPLARGNSRFAWMTRKSEETITPWNFEEVVDKGASAQSFIERMTNFDKNLPNEKVLPKHSLLYEYFTVYNELTKVKYVTEGMRKPAFLSGEQKKAIVDLLFKTNRKVTVKQLKEDYFKKIECFDSVEISGVEDRFNASLGTYHDLLKIIKDKDFLDNEENEDILEDIVLTLTLFEDREMIEERLKTYAHLFDDKVMKQLKRRRYTGWGRLSRKLINGIRDKQSGKTILDFLKSDGFANRNFMQLIHDDSLTFKEDIQKAQVSGQGDSLHEHIANLAGSPAIKKGILQTVKVVDELVKVMGRHKPENIVIEMARENQTTQKGQKNSRERMKRIEEGIKELGSQILKEHPVENTQLQNEKLYLYYLQNGRDMYVDQELDINRLSDYDVDHIVPQSFLKDDSIDNKVLTRSDKARGKSDNVPSEEVVKKMKNYWRQLLNAKLITQRKFDNLTKAERGGLSELDKAGFIKRQLVETRQITKHVAQILDSRMNTKYDENDKLIREVKVITLKSKLVSDFRKDFQFYKVREINNYHHAHDAYLNAVVGTALIKKYPKLESEFVYGDYKVYDVRKMIAKSEQEIGKATAKYFFYSNIMNFFKTEITLANGEIRKRPLIETNGETGEIVWDKGRDFATVRKVLSMPQVNIVKKTEVQTGGFSKESILPKRNSDKLIARKKDWDPKKYGGFDSPTVAYSVLVVAKVEKGKSKKLKSVKELLGITIMERSSFEKNPIDFLEAKGYKEVKKDLIIKLPKYSLFELENGRKRMLASAGELQKGNELALPSKYVNFLYLASHYEKLKGSPEDNEQKQLFVEQHKHYLDEIIEQISEFSKRVILADANLDKVLSAYNKHRDKPIREQAENIIHLFTLTNLGAPAAFKYFDTTIDRKRYTSTKEVLDATLIHQSITGLYETRIDLSQLGGDGGSGSETPGTSESATPESGGTLNLEDEYRLYETSAEPEVSPGSTWLSDFPQAWAETGGMGLAVRQAPLIIPLKATSTPVSIKQYPMSQEAKLGIKPHIQRLLDQGILVPCQSPWNTPLLPVKKPGTNDYRPVQDLREVNKRVEDIHPTVPNPYNLLSGLPPSHRWYTVLDLKDAFFCLRLHPTSQPLFAFEWRDPGMGISGQLTWTRLPQGFKNSPTLFNEALHRDLADFRIQHPDLILLQYVDDILLAATSELDCQQGTRALLLTLGNLGYRASAKKAQLCQKQVKYLGYLLKEGQRWLTEARKETVMGQPTPKTPRQLREFLGTAGFCRLWIPGFAEMAAPLYPLTKPGTLFNWGPDQQKAYQEIKQALLTAPALGLPDLTKPFELFVDEKQGYAKGVLTQKLGPWRRPVAYLSKKLDPVAAGWPPCLRMVAAIAVLRKDAGKLTMGQPLVILAPHAVEALVKQPPDRWLSNARMTHYQAMLLDTDRVQFGPVVALNPATLLPLPEEGAPHDCLEILAETHGTRPDLTDQPIPDADHTWYTDGSSFLQEGQRKAGAAVTTETEVIWARALPAGTSAQRAELIALTQALKMAEGKRLNVYTDSRYAFATAHIHGEIYRRRGWLTSEGREIKNKSEILALLKALFLPKRLSIIHCLGHQKGDSAEARGNRLADQAAREAAIKTPPDTSTLLAGKRTADGSEFEKRTADGSEFESPKKKAKVE

SEQ ID NO: 7697 - protein, 2101 aa, synthetic construct
MPAAKRVKLDGGDKKYSIGLDIGTNSVGWAVITDEYKVPSKKFKVLGNTDRHSIKKNLIGALLFDSGETAEATRLKRTARRRYTRRKNRICYLQEIFSNEMAKVDDSFFHRLEESFLVEEDKKHERHPIFGNIVDEVAYHEKYPTIYHLRKKLVDSTDKADLRLIYLALAHMIKFRGHFLIEGDLNPDNSDVDKLFIQLVQTYNQLFEENPINASGVDAKAILSARLSKSRRLENLIAQLPGEKKNGLFGNLIALSLGLTPNFKSNFDLAEDAKLQLSKDTYDDDLDNLLAQIGDQYADLFLAAKNLSDAILLSDILRVNTEITKAPLSASMIKRYDEHHQDLTLLKALVRQQLPEKYKEIFFDQSKNGYAGYIDGGASQEEFYKFIKPILEKMDGTEELLVKLNREDLLRKQRTFDNGSIPHQIHLGELHAILRRQEDFYPFLKDNREKIEKILTFRIPYYVGPLARGNSRFAWMTRKSEETITPWNFEEVVDKGASAQSFIERMTNFDKNLPNEKVLPKHSLLYEYFTVYNELTKVKYVTEGMRKPAFLSGEQKKAIVDLLFKTNRKVTVKQLKEDYFKKIECFDSVEISGVEDRFNASLGTYHDLLKIIKDKDFLDNEENEDILEDIVLTLTLFEDREMIEERLKTYAHLFDDKVMKQLKRRRYTGWGRLSRKLINGIRDKQSGKTILDFLKSDGFANRNFMQLIHDDSLTFKEDIQKAQVSGQGDSLHEHIANLAGSPAIKKGILQTVKVVDELVKVMGRHKPENIVIEMARENQTTQKGQKNSRERMKRIEEGIKELGSQILKEHPVENTQLQNEKLYLYYLQNGRDMYVDQELDINRLSDYDVDHIVPQSFLKDDSIDNKVLTRSDKARGKSDNVPSEEVVKKMKNYWRQLLNAKLITQRKFDNLTKAERGGLSELDKAGFIKRQLVETRQITKHVAQILDSRMNTKYDENDKLIREVKVITLKSKLVSDFRKDFQFYKVREINNYHHAHDAYLNAVVGTALIKKYPKLESEFVYGDYKVYDVRKMIAKSEQEIGKATAKYFFYSNIMNFFKTEITLANGEIRKRPLIETNGETGEIVWDKGRDFATVRKVLSMPQVNIVKKTEVQTGGFSKESILPKRNSDKLIARKKDWDPKKYGGFDSPTVAYSVLVVAKVEKGKSKKLKSVKELLGITIMERSSFEKNPIDFLEAKGYKEVKKDLIIKLPKYSLFELENGRKRMLASAGELQKGNELALPSKYVNFLYLASHYEKLKGSPEDNEQKQLFVEQHKHYLDEIIEQISEFSKRVILADANLDKVLSAYNKHRDKPIREQAENIIHLFTLTNLGAPAAFKYFDTTIDRKRYTSTKEVLDATLIHQSITGLYETRIDLSQLGGDGGSGSETPGTSESATPESGGTLNLEDEYRLYETSAEPEVSPGSTWLSDFPQAWAETGGMGLAVRQAPLIIPLKATSTPVSIKQYPMSQEAKLGIKPHIQRLLDQGILVPCQSPWNTPLLPVKKPGTNDYRPVQDLREVNKRVEDIHPTVPNPYNLLSGLPPSHRWYTVLDLKDAFFCLRLHPTSQPLFAFEWRDPGMGISGQLTWTRLPQGFKNSPTLFNEALHRDLADFRIQHPDLILLQYVDDILLAATSELDCQQGTRALLLTLGNLGYRASAKKAQLCQKQVKYLGYLLKEGQRWLTEARKETVMGQPTPKTPRQLREFLGKAGFCRLFIPGFAEMAAPLYPLTKPGTLFNWGPDQQKAYQEIKQALLTAPALGLPDLTKPFELFVDEKQGYAKGVLTQKLGPWRRPVAYLSKKLDPVAAGWPPCLRMVAAIAVLRKDAGKLTMGQPLVILAPHAVEALVKQPPDRWLSNARMTHYQAMLLDTDRVQFGPVVALNPATLLPLPEEGAPHDCLEILAETHGTRPDLTDQPIPDADHTWYTDGSSFLQEGQRKAGAAVTTETEVIWARALPAGTSAQRAELIALTQALKMAEGKRLNVYTDSRYAFATAHIHGEIYRRRGWLTSEGREIKNKSEILALLKALFLPKRLSIIHCLGHQKGDSAEARGNRLADQAAREAAIKTPPDTSTLLAGKRTADGSEFEKRTADGSEFESPKKKAKVE

SEQ ID NO: 7698 - protein, 2101 aa, synthetic construct
MPAAKRVKLDGGDKKYSIGLDIGTNSVGWAVITDEYKVPSKKFKVLGNTDRHSIKKNLIGALLFDSGETAEATRLKRTARRRYTRRKNRICYLQEIFSNEMAKVDDSFFHRLEESFLVEEDKKHERHPIFGNIVDEVAYHEKYPTIYHLRKKLVDSTDKADLRLIYLALAHMIKFRGHFLIEGDLNPDNSDVDKLFIQLVQTYNQLFEENPINASGVDAKAILSARLSKSRRLENLIAQLPGEKKNGLFGNLIALSLGLTPNFKSNFDLAEDAKLQLSKDTYDDDLDNLLAQIGDQYADLFLAAKNLSDAILLSDILRVNTEITKAPLSASMIKRYDEHHQDLTLLKALVRQQLPEKYKEIFFDQSKNGYAGYIDGGASQEEFYKFIKPILEKMDGTEELLVKLNREDLLRKQRTFDNGSIPHQIHLGELHAILRRQEDFYPFLKDNREKIEKILTFRIPYYVGPLARGNSRFAWMTRKSEETITPWNFEEVVDKGASAQSFIERMTNFDKNLPNEKVLPKHSLLYEYFTVYNELTKVKYVTEGMRKPAFLSGEQKKAIVDLLFKTNRKVTVKQLKEDYFKKIECFDSVEISGVEDRFNASLGTYHDLLKIIKDKDFLDNEENEDILEDIVLTLTLFEDREMIEERLKTYAHLFDDKVMKQLKRRRYTGWGRLSRKLINGIRDKQSGKTILDFLKSDGFANRNFMQLIHDDSLTFKEDIQKAQVSGQGDSLHEHIANLAGSPAIKKGILQTVKVVDELVKVMGRHKPENIVIEMARENQTTQKGQKNSRERMKRIEEGIKELGSQILKEHPVENTQLQNEKLYLYYLQNGRDMYVDQELDINRLSDYDVDHIVPQSFLKDDSIDNKVLTRSDKARGKSDNVPSEEVVKKMKNYWRQLLNAKLITQRKFDNLTKAERGGLSELDKAGFIKRQLVETRQITKHVAQILDSRMNTKYDENDKLIREVKVITLKSKLVSDFRKDFQFYKVREINNYHHAHDAYLNAVVGTALIKKYPKLESEFVYGDYKVYDVRKMIAKSEQEIGKATAKYFFYSNIMNFFKTEITLANGEIRKRPLIETNGETGEIVWDKGRDFATVRKVLSMPQVNIVKKTEVQTGGFSKESILPKRNSDKLIARKKDWDPKKYGGFDSPTVAYSVLVVAKVEKGKSKKLKSVKELLGITIMERSSFEKNPIDFLEAKGYKEVKKDLIIKLPKYSLFELENGRKRMLASAGELQKGNELALPSKYVNFLYLASHYEKLKGSPEDNEQKQLFVEQHKHYLDEIIEQISEFSKRVILADANLDKVLSAYNKHRDKPIREQAENIIHLFTLTNLGAPAAFKYFDTTIDRKRYTSTKEVLDATLIHQSITGLYETRIDLSQLGGDGGSGSETPGTSESATPESGGTLGIEDEYRLHETSTEPDVSLGSTWLSDFPQAWAETGGMGLAVRQAPLIIPLKATSTPVSIQQYPMSHEARLGIKPHIQRLLDQGILVPCQSPWNTPLLPVKKPGTNDYRPVQDLREVNKRVEDIHPTVPNPYNLLSGLPPSHQWYTVLDLKDAFFCLRLHPTSQPLFAFEWRDPGMGISGQLTWTRLPQGFKNSPTLFNEALHRDLADFRIQHPDLILLQYVDDILLAATSELDCQQGTRALLQTLGDLGYRASAKKAQICQKQVKYLGYLLREGQRWLTEARKETVMGQPVPKTPRQLREFLGTAGFCRLWIPGFAEMAAPLYPLTKPGTLFSWGPDQQKAYQEIKQALLTAPALGLPDLTKPFELFVDEKQGYAKGVLTQKLGPWRRPVAYLSKKLDPVAAGWPPCLRMVAAIAVLTKDAGKLTMGQPLVILAPHAVEALVKQPPDRWLSNARMTHYQAMLLDTDRVQFGPVVALNPATLLPLPEEGAPHDCLEILAETHGTRPDLTDQPIPDADHTWYTDGSSFLQEGQRKAGAAVTTETEVIWAGALPAGTSAQRAELIALTQALKMAEGKRLNVYTDSRYAFATAHIHGEIYRRRGWLTSEGREIKNKSEILALLKALFLPKRLSIIHCLGHQKGDSAEARGNRLADQAAREAAIKTPPDTSTLLAGKRTADGSEFEKRTADGSEFESPKKKAKVE

SEQ ID NO: 7699 - protein, 2101 aa, synthetic construct
MPAAKRVKLDGGDKKYSIGLDIGTNSVGWAVITDEYKVPSKKFKVLGNTDRHSIKKNLIGALLFDSGETAEATRLKRTARRRYTRRKNRICYLQEIFSNEMAKVDDSFFHRLEESFLVEEDKKHERHPIFGNIVDEVAYHEKYPTIYHLRKKLVDSTDKADLRLIYLALAHMIKFRGHFLIEGDLNPDNSDVDKLFIQLVQTYNQLFEENPINASGVDAKAILSARLSKSRRLENLIAQLPGEKKNGLFGNLIALSLGLTPNFKSNFDLAEDAKLQLSKDTYDDDLDNLLAQIGDQYADLFLAAKNLSDAILLSDILRVNTEITKAPLSASMIKRYDEHHQDLTLLKALVRQQLPEKYKEIFFDQSKNGYAGYIDGGASQEEFYKFIKPILEKMDGTEELLVKLNREDLLRKQRTFDNGSIPHQIHLGELHAILRRQEDFYPFLKDNREKIEKILTFRIPYYVGPLARGNSRFAWMTRKSEETITPWNFEEVVDKGASAQSFIERMTNFDKNLPNEKVLPKHSLLYEYFTVYNELTKVKYVTEGMRKPAFLSGEQKKAIVDLLFKTNRKVTVKQLKEDYFKKIECFDSVEISGVEDRFNASLGTYHDLLKIIKDKDFLDNEENEDILEDIVLTLTLFEDREMIEERLKTYAHLFDDKVMKQLKRRRYTGWGRLSRKLINGIRDKQSGKTILDFLKSDGFANRNFMQLIHDDSLTFKEDIQKAQVSGQGDSLHEHIANLAGSPAIKKGILQTVKVVDELVKVMGRHKPENIVIEMARENQTTQKGQKNSRERMKRIEEGIKELGSQILKEHPVENTQLQNEKLYLYYLQNGRDMYVDQELDINRLSDYDVDHIVPQSFLKDDSIDNKVLTRSDKARGKSDNVPSEEVVKKMKNYWRQLLNAKLITQRKFDNLTKAERGGLSELDKAGFIKRQLVETRQITKHVAQILDSRMNTKYDENDKLIREVKVITLKSKLVSDFRKDFQFYKVREINNYHHAHDAYLNAVVGTALIKKYPKLESEFVYGDYKVYDVRKMIAKSEQEIGKATAKYFFYSNIMNFFKTEITLANGEIRKRPLIETNGETGEIVWDKGRDFATVRKVLSMPQVNIVKKTEVQTGGFSKESILPKRNSDKLIARKKDWDPKKYGGFDSPTVAYSVLVVAKVEKGKSKKLKSVKELLGITIMERSSFEKNPIDFLEAKGYKEVKKDLIIKLPKYSLFELENGRKRMLASAGELQKGNELALPSKYVNFLYLASHYEKLKGSPEDNEQKQLFVEQHKHYLDEIIEQISEFSKRVILADANLDKVLSAYNKHRDKPIREQAENIIHLFTLTNLGAPAAFKYFDTTIDRKRYTSTKEVLDATLIHQSITGLYETRIDLSQLGGDGGSGSETPGTSESATPESGGTLNIEDEYRLHETSKEPDVSLGSTWLSDFPQAWAETGGMGLAVRQAPLIIPLKATSTPVSIKQYPMSQEARLGIKPHIQRLLDQGILVPCQSPWNTPLLPVKKPGTNDYRPVQDLREVNKRVEDIHPTVPNPYNLLSGLPPSHQWYTVLDLKDAFFCLRLHPTSQPLFAFEWRDPEMGISGQLTWTRLPQGFKNSPTLFNEALHRDLAGFRIQHPDLILLQYVDDLLLAATSELDCQQGTRALLQTLGDLGYRASAKKAQICQKQVKYLGYLLKEGQRWLTEARKETVMGQPIPKTPRQLREFLGTAGFCRLWIPGFAEMAAPLYPLTKPGTLFNWGPDQQKAFQEIKQALLTAPALGLPDLTKPFELFVDEKQGYAKGVLTQKLGPWRRPVAYLSKKLDPVAAGWPPCLRMVAAIAVLTKDAGKLTMGQPLVILAPHAVEALVKQPPDRWLSNARMTHYQALLLDTDRVQFGPVVALNPATLLPLPEEGLQHDCLDILAEAHGTRSDLMDQPLPDADHTWYTDGSSFLQEGQRKAGAAVTTETEVIWARALPAGTSAQRAELIALTQALKMAEGKKLNVYTDSRYAFATAHIHGEIYRRRGWLTSEGKEIKNKDEILALLKALFLPKRLSIIHCPGHQKGNSAEARGNRMADQAAREVATRETPETSTLLAGKRTADGSEFEKRTADGSEFESPKKKAKVE

SEQ ID NO: 7700 - protein, 2101 aa, synthetic construct
MPAAKRVKLDGGDKKYSIGLDIGTNSVGWAVITDEYKVPSKKFKVLGNTDRHSIKKNLIGALLFDSGETAEATRLKRTARRRYTRRKNRICYLQEIFSNEMAKVDDSFFHRLEESFLVEEDKKHERHPIFGNIVDEVAYHEKYPTIYHLRKKLVDSTDKADLRLIYLALAHMIKFRGHFLIEGDLNPDNSDVDKLFIQLVQTYNQLFEENPINASGVDAKAILSARLSKSRRLENLIAQLPGEKKNGLFGNLIALSLGLTPNFKSNFDLAEDAKLQLSKDTYDDDLDNLLAQIGDQYADLFLAAKNLSDAILLSDILRVNTEITKAPLSASMIKRYDEHHQDLTLLKALVRQQLPEKYKEIFFDQSKNGYAGYIDGGASQEEFYKFIKPILEKMDGTEELLVKLNREDLLRKQRTFDNGSIPHQIHLGELHAILRRQEDFYPFLKDNREKIEKILTFRIPYYVGPLARGNSRFAWMTRKSEETITPWNFEEVVDKGASAQSFIERMTNFDKNLPNEKVLPKHSLLYEYFTVYNELTKVKYVTEGMRKPAFLSGEQKKAIVDLLFKTNRKVTVKQLKEDYFKKIECFDSVEISGVEDRFNASLGTYHDLLKIIKDKDFLDNEENEDILEDIVLTLTLFEDREMIEERLKTYAHLFDDKVMKQLKRRRYTGWGRLSRKLINGIRDKQSGKTILDFLKSDGFANRNFMQLIHDDSLTFKEDIQKAQVSGQGDSLHEHIANLAGSPAIKKGILQTVKVVDELVKVMGRHKPENIVIEMARENQTTQKGQKNSRERMKRIEEGIKELGSQILKEHPVENTQLQNEKLYLYYLQNGRDMYVDQELDINRLSDYDVDHIVPQSFLKDDSIDNKVLTRSDKARGKSDNVPSEEVVKKMKNYWRQLLNAKLITQRKFDNLTKAERGGLSELDKAGFIKRQLVETRQITKHVAQILDSRMNTKYDENDKLIREVKVITLKSKLVSDFRKDFQFYKVREINNYHHAHDAYLNAVVGTALIKKYPKLESEFVYGDYKVYDVRKMIAKSEQEIGKATAKYFFYSNIMNFFKTEITLANGEIRKRPLIETNGETGEIVWDKGRDFATVRKVLSMPQVNIVKKTEVQTGGFSKESILPKRNSDKLIARKKDWDPKKYGGFDSPTVAYSVLVVAKVEKGKSKKLKSVKELLGITIMERSSFEKNPIDFLEAKGYKEVKKDLIIKLPKYSLFELENGRKRMLASAGELQKGNELALPSKYVNFLYLASHYEKLKGSPEDNEQKQLFVEQHKHYLDEIIEQISEFSKRVILADANLDKVLSAYNKHRDKPIREQAENIIHLFTLTNLGAPAAFKYFDTTIDRKRYTSTKEVLDATLIHQSITGLYETRIDLSQLGGDGGSGSETPGTSESATPESGGTLNIEDEYRLHETSKGPDVPLGSTWLSDFPQAWAETGGMGLAVRQAPLIIPLKATSTPVSIKQYPMSQEARLGIKPHIQRLLDQGILVPCQSPWNTPLLPVKKPGTNDYRPVQDLREVNKRVEDIHPTVPNPYNLLSGLPPSHQWYTVLDLKDAFFCLRLHPTSQSLFAFEWRDPEMGISGQLTWTRLPQGFKNSPTLFDEALHRDLADFRIQHPDLILLQYVDDLLLAATSELDCQQGTRALLQTLGDLGYRASAKKAQICQKQVKYLGYLLKEGQRWLTEARKETVMGQPTPKTPRQLREFLGTAGFCRLWIPGFAEMAAPLYPLTKTGTLFEWGPDQQKAYQEIKQALLTAPALGLPDLTKPFELFVDEKQGYAKGVLTQKLGPWRRPVAYLSKKLDPVAAGWPPCLRMVAAIAVLTKDAGKLTMGQPLVILAPHAVEALVKQPPDRWLSNARMTHYQALLLDTDRVQFGPIVALNPATLLPLPEEGLQHDCLDILAEAHGTRPDLTDQPLPDADHTWYTDGSSFLQEGQRKAGAAVTTETEVVWAKALPAGTSAQRAELIALTQALKMAEGKKLNVYTDSRYAFATAHIHGEIYRRRGLLTSEGKEIKNKDEILALLKALFLPKRLSIIHCPGHQKGNRAEARGNRMADQAAREVATRETPETSTLLAGKRTADGSEFEKRTADGSEFESPKKKAKVE

SEQ ID NO: 7701 - protein, 2095 aa, synthetic construct
MPAAKRVKLDGGDKKYSIGLDIGTNSVGWAVITDEYKVPSKKFKVLGNTDRHSIKKNLIGALLFDSGETAEATRLKRTARRRYTRRKNRICYLQEIFSNEMAKVDDSFFHRLEESFLVEEDKKHERHPIFGNIVDEVAYHEKYPTIYHLRKKLVDSTDKADLRLIYLALAHMIKFRGHFLIEGDLNPDNSDVDKLFIQLVQTYNQLFEENPINASGVDAKAILSARLSKSRRLENLIAQLPGEKKNGLFGNLIALSLGLTPNFKSNFDLAEDAKLQLSKDTYDDDLDNLLAQIGDQYADLFLAAKNLSDAILLSDILRVNTEITKAPLSASMIKRYDEHHQDLTLLKALVRQQLPEKYKEIFFDQSKNGYAGYIDGGASQEEFYKFIKPILEKMDGTEELLVKLNREDLLRKQRTFDNGSIPHQIHLGELHAILRRQEDFYPFLKDNREKIEKILTFRIPYYVGPLARGNSRFAWMTRKSEETITPWNFEEVVDKGASAQSFIERMTNFDKNLPNEKVLPKHSLLYEYFTVYNELTKVKYVTEGMRKPAFLSGEQKKAIVDLLFKTNRKVTVKQLKEDYFKKIECFDSVEISGVEDRFNASLGTYHDLLKIIKDKDFLDNEENEDILEDIVLTLTLFEDREMIEERLKTYAHLFDDKVMKQLKRRRYTGWGRLSRKLINGIRDKQSGKTILDFLKSDGFANRNFMQLIHDDSLTFKEDIQKAQVSGQGDSLHEHIANLAGSPAIKKGILQTVKVVDELVKVMGRHKPENIVIEMARENQTTQKGQKNSRERMKRIEEGIKELGSQILKEHPVENTQLQNEKLYLYYLQNGRDMYVDQELDINRLSDYDVDHIVPQSFLKDDSIDNKVLTRSDKARGKSDNVPSEEVVKKMKNYWRQLLNAKLITQRKFDNLTKAERGGLSELDKAGFIKRQLVETRQITKHVAQILDSRMNTKYDENDKLIREVKVITLKSKLVSDFRKDFQFYKVREINNYHHAHDAYLNAVVGTALIKKYPKLESEFVYGDYKVYDVRKMIAKSEQEIGKATAKYFFYSNIMNFFKTEITLANGEIRKRPLIETNGETGEIVWDKGRDFATVRKVLSMPQVNIVKKTEVQTGGFSKESILPKRNSDKLIARKKDWDPKKYGGFDSPTVAYSVLVVAKVEKGKSKKLKSVKELLGITIMERSSFEKNPIDFLEAKGYKEVKKDLIIKLPKYSLFELENGRKRMLASAGELQKGNELALPSKYVNFLYLASHYEKLKGSPEDNEQKQLFVEQHKHYLDEIIEQISEFSKRVILADANLDKVLSAYNKHRDKPIREQAENIIHLFTLTNLGAPAAFKYFDTTIDRKRYTSTKEVLDATLIHQSITGLYETRIDLSQLGGDGGSGSETPGTSESATPESGGTLQLDDEYRLYSPLVKPDQNIQFWLEQFPQAWAETAGMGLAKQVPPQVIQLKASATPVSVRQYPLSKEAQEGIRPHVQRLIQQGILVPVQSPWNTPLLPVRKPGTNDYRPVQDLREVNKRVQDIHPTVPNPYNLLCALPPQRSWYTVLDLKDAFFCLRLHPTSQPLFAFEWRDPGTGRTGQLTWTRLPQGFKNSPTIFDEALHRDLANFRIQHPQVTLLQYVDDLLLAGATKQDCLEGTKALLLELSDLGYRASAKKAQICRREVTYLGYSLRDGQRWLTEARKKTVVQIPAPTTAKQVREFLGTAGFCRLWIPGFATLAAPLYPLTKEKGEFSWAPEHQKAFDAIKKALLSAPALALPDVTKPFTLYVDERKGVARGVLTQTLGPWRRPVAYLSKKLDPVASGWPVCLKAIAAVAILVKDADKLTLGQNITVIAPHALENIVRQPPDRWMTNARMTHYQSLLLTERVTFAPPAALNPATLLPEETDEPVTHDCHQLLIEETGVRKDLTDIPLTGEVLTWFTDGSSYVVEGKRMAGAAVVDGTRTIWASSLPEGTSAQKAELMALTQALRLAEGKSINIYTDSRYAFATAHVHGAIYKQRGLLTSAGREIKNKEEILSLLEALHLPKRLAIIHCPGHQKAKDPISRGNQMADRVAKQAAQGVNLLAGKRTADGSEFEKRTADGSEFESPKKKAKVE

SEQ ID NO: 7702 - protein, 2095 aa, synthetic construct; identical to SEQ ID NO: 7701

SEQ ID NO: 7703 - protein, 2181 aa, synthetic construct
MPAAKRVKLDGGDKKYSIGLDIGTNSVGWAVITDEYKVPSKKFKVLGNTDRHSIKKNLIGALLFDSGETAEATRLKRTARRRYTRRKNRICYLQEIFSNEMAKVDDSFFHRLEESFLVEEDKKHERHPIFGNIVDEVAYHEKYPTIYHLRKKLVDSTDKADLRLIYLALAHMIKFRGHFLIEGDLNPDNSDVDKLFIQLVQTYNQLFEENPINASGVDAKAILSARLSKSRRLENLIAQLPGEKKNGLFGNLIALSLGLTPNFKSNFDLAEDAKLQLSKDTYDDDLDNLLAQIGDQYADLFLAAKNLSDAILLSDILRVNTEITKAPLSASMIKRYDEHHQDLTLLKALVRQQLPEKYKEIFFDQSKNGYAGYIDGGASQEEFYKFIKPILEKMDGTEELLVKLNREDLLRKQRTFDNGSIPHQIHLGELHAILRRQEDFYPFLKDNREKIEKILTFRIPYYVGPLARGNSRFAWMTRKSEETITPWNFEEVVDKGASAQSFIERMTNFDKNLPNEKVLPKHSLLYEYFTVYNELTKVKYVTEGMRKPAFLSGEQKKAIVDLLFKTNRKVTVKQLKEDYFKKIECFDSVEISGVEDRFNASLGTYHDLLKIIKDKDFLDNEENEDILEDIVLTLTLFEDREMIEERLKTYAHLFDDKVMKQLKRRRYTGWGRLSRKLINGIRDKQSGKTILDFLKSDGFANRNFMQLIHDDSLTFKEDIQKAQVSGQGDSLHEHIANLAGSPAIKKGILQTVKVVDELVKVMGRHKPENIVIEMARENQTTQKGQKNSRERMKRIEEGIKELGSQILKEHPVENTQLQNEKLYLYYLQNGRDMYVDQELDINRLSDYDVDHIVPQSFLKDDSIDNKVLTRSDKARGKSDNVPSEEVVKKMKNYWRQLLNAKLITQRKFDNLTKAERGGLSELDKAGFIKRQLVETRQITKHVAQILDSRMNTKYDENDKLIREVKVITLKSKLVSDFRKDFQFYKVREINNYHHAHDAYLNAVVGTALIKKYPKLESEFVYGDYKVYDVRKMIAKSEQEIGKATAKYFFYSNIMNFFKTEITLANGEIRKRPLIETNGETGEIVWDKGRDFATVRKVLSMPQVNIVKKTEVQTGGFSKESILPKRNSDKLIARKKDWDPKKYGGFDSPTVAYSVLVVAKVEKGKSKKLKSVKELLGITIMERSSFEKNPIDFLEAKGYKEVKKDLIIKLPKYSLFELENGRKRMLASAGELQKGNELALPSKYVNFLYLASHYEKLKGSPEDNEQKQLFVEQHKHYLDEIIEQISEFSKRVILADANLDKVLSAYNKHRDKPIREQAENIIHLFTLTNLGAPAAFKYFDTTIDRKRYTSTKEVLDATLIHQSITGLYETRIDLSQLGGDGGSGSETPGTSESATPESGGMDPLQLLQPLEAEIKGTKLKAHWNSGATITCVPEAFLEDERPIQTMLIKTIHGEKQQDVYYLTFKVQGRKVEAEVLASPYDYILLNPSDVPWLMKKPLQLTVLVPLHEYQERLLQQTALPKEQKELLQKLFLKYDALWQHWENQVGHRRIKPHNIATGTLAPRPQKQYPINPKAKPSIQIVIDDLLKQGVLIQQNSTMNTPVYPVPKPDGKWRMVLDYREVNKTIPLIAAQNQHSAGILSSIYRGKYKTTLDLTNGFWAHPITPESYWLTAFTWQGKQYCWTRLPQGFLNSPALFNADVVDLLKEIPNVQAYVDDIYISHDDPQEHLEQLEKIFSILLNAGYVVSLKKSEIAQREVEFLGFNITKEGRGLTDTFKQKLLNITPPKDLKQLQSILGLLNFARNFIPNYSELVKPLYTIVAPANGKFISWTEDNSNQLQHIISVLNQADNLEERNPETRLIIKVNSSPSAGYIRYYNEGSKRPIMYVNYIFSKAEAKFTQTEKLLTTMHKGLIKAMDLAMGQEILVYSPIVSMTKIQRTPLPERKALPVRWITWMTYLEDPRIQFHYDKSLPELQQIPNVTEDVIAKTKHPSEFAMVFYTDGSAIKHPDVNKSHSAGMGIAQVQFIPEYKIVHQWSIPLGDHTAQLAEIAAVEFACKKALKISGPVLIVTDSFYVAESANKELPYWKSNGFLNNKKKPLRHVSKWKSIAECLQLKPDIIIMHEKGHQQPMTTLHTEGNNLADKLATQGSYVVHAGKRTADGSEFEKRTADGSEFESPKKKAKVE

SEQ ID NO: 7704 - protein, 2092 aa, synthetic construct
MPAAKRVKLDGGDKKYSIGLDIGTNSVGWAVITDEYKVPSKKFKVLGNTDRHSIKKNLIGALLFDSGETAEATRLKRTARRRYTRRKNRICYLQEIFSNEMAKVDDSFFHRLEESFLVEEDKKHERHPIFGNIVDEVAYHEKYPTIYHLRKKLVDSTDKADLRLIYLALAHMIKFRGHFLIEGDLNPDNSDVDKLFIQLVQTYNQLFEENPINASGVDAKAILSARLSKSRRLENLIAQLPGEKKNGLFGNLIALSLGLTPNFKSNFDLAEDAKLQLSKDTYDDDLDNLLAQIGDQYADLFLAAKNLSDAILLSDILRVNTEITKAPLSASMIKRYDEHHQDLTLLKALVRQQLPEKYKEIFFDQSKNGYAGYIDGGASQEEFYKFIKPILEKMDGTEELLVKLNREDLLRKQRTFDNGSIPHQIHLGELHAILRRQEDFYPFLKDNREKIEKILTFRIPYYVGPLARGNSRFAWMTRKSEETITPWNFEEVVDKGASAQSFIERMTNFDKNLPNEKVLPKHSLLYEYFTVYNELTKVKYVTEGMRKPAFLSGEQKKAIVDLLFKTNRKVTVKQLKEDYFKKIECFDSVEISGVEDRFNASLGTYHDLLKIIKDKDFLDNEENEDILEDIVLTLTLFEDREMIEERLKTYAHLFDDKVMKQLKRRRYTGWGRLSRKLINGIRDKQSGKTILDFLKSDGFANRNFMQLIHDDSLTFKEDIQKAQVSGQGDSLHEHIANLAGSPAIKKGILQTVKVVDELVKVMGRHKPENIVIEMARENQTTQKGQKNSRERMKRIEEGIKELGSQILKEHPVENTQLQNEKLYLYYLQNGRDMYVDQELDINRLSDYDVDHIVPQSFLKDDSIDNKVLTRSDKARGKSDNVPSEEVVKKMKNYWRQLLNAKLITQRKFDNLTKAERGGLSELDKAGFIKRQLVETRQITKHVAQILDSRMNTKYDENDKLIREVKVITLKSKLVSDFRKDFQFYKVREINNYHHAHDAYLNAVVGTALIKKYPKLESEFVYGDYKVYDVRKMIAKSEQEIGKATAKYFFYSNIMNFFKTEITLANGEIRKRPLIETNGETGEIVWDKGRDFATVRKVLSMPQVNIVKKTEVQTGGFSKESILPKRNSDKLIARKKDWDPKKYGGFDSPTVAYSVLVVAKVEKGKSKKLKSVKELLGITIMERSSFEKNPIDFLEAKGYKEVKKDLIIKLPKYSLFELENGRKRMLASAGELQKGNELALPSKYVNFLYLASHYEKLKGSPEDNEQKQLFVEQHKHYLDEIIEQISEFSKRVILADANLDKVLSAYNKHRDKPIREQAENIIHLFTLTNLGAPAAFKYFDTTIDRKRYTSTKEVLDATLIHQSITGLYETRIDLSQLGGDGGSGSETPGTSESATPESGGIPWLMKKPLQLTTLVPLQEYEERLLKQTMLTGSYKEKLQSLFLKYDALWQHWENQVGHRRIKPHHIATGTVNPRPQKQYPINPKAKASIQTVINDLLKQGVLIQQNSIMNTPVYPVPKPDGKWRMVLDYREVNKTIPLIAAQNQHSAGILSSIFRGKYKTTLDLSNGFWAHSITPESYWLTAFTWLGQQYCWTRLPQGFLNSPALFTADVVDLLKEVPNVQVYVDDIYISHDDPREHLEQLEKVFSLLLNAGYVVSLKKSEIAQHEVEFLGFNITKEGRGLTETFKQKLLNITPPRDLKQLQSILGLLNFARNFIPNFSELVKPLYNIIATANGKYITWTTDNSQQLQNIISMLNSAENLEERNPEVRLIMKVNTSPSAGYIRFYNEFAKRPIMYLNYVYTKAEVKFTNTEKLLTTIHKGLIKALDLGMGQEILVYSPIVSMTKIQKTPLPERKALPIRWITWMSYLEDPRIQFHYDKTLPELQQVPTVTDDIIAKIKHPSEFSMVFYTDGSAIKHPNVNKSHNAGMGIAQVQFKPEFTVINTWSIPLGDHTAQLAEVAAVEFACKKALKIDGPVLIVTDSFYVAESVNKELPYWQSNGFFNNKKKPLKHVSKWKSIADCIQLKPDIIIIHEKGHQPTASTFHTEGNNLADKLATQGSYVVNAGKRTADGSEFEKRTADGSEFESPKKKAKVE

SEQ ID NO: 7705 - protein, 2181 aa, synthetic construct
MPAAKRVKLDGGDKKYSIGLDIGTNSVGWAVITDEYKVPSKKFKVLGNTDRHSIKKNLIGALLFDSGETAEATRLKRTARRRYTRRKNRICYLQEIFSNEMAKVDDSFFHRLEESFLVEEDKKHERHPIFGNIVDEVAYHEKYPTIYHLRKKLVDSTDKADLRLIYLALAHMIKFRGHFLIEGDLNPDNSDVDKLFIQLVQTYNQLFEENPINASGVDAKAILSARLSKSRRLENLIAQLPGEKKNGLFGNLIALSLGLTPNFKSNFDLAEDAKLQLSKDTYDDDLDNLLAQIGDQYADLFLAAKNLSDAILLSDILRVNTEITKAPLSASMIKRYDEHHQDLTLLKALVRQQLPEKYKEIFFDQSKNGYAGYIDGGASQEEFYKFIKPILEKMDGTEELLVKLNREDLLRKQRTFDNGSIPHQIHLGELHAILRRQEDFYPFLKDNREKIEKILTFRIPYYVGPLARGNSRFAWMTRKSEETITPWNFEEVVDKGASAQSFIERMTNFDKNLPNEKVLPKHSLLYEYFTVYNELTKVKYVTEGMRKPAFLSGEQKKAIVDLLFKTNRKVTVKQLKEDYFKKIECFDSVEISGVEDRFNASLGTYHDLLKIIKDKDFLDNEENEDILEDIVLTLTLFEDREMIEERLKTYAHLFDDKVMKQLKRRRYTGWGRLSRKLINGIRDKQSGKTILDFLKSDGFANRNFMQLIHDDSLTFKEDIQKAQVSGQGDSLHEHIANLAGSPAIKKGILQTVKVVDELVKVMGRHKPENIVIEMARENQTTQKGQKNSRERMKRIEEGIKELGSQILKEHPVENTQLQNEKLYLYYLQNGRDMYVDQELDINRLSDYDVDHIVPQSFLKDDSIDNKVLTRSDKARGKSDNVPSEEVVKKMKNYWRQLLNAKLITQRKFDNLTKAERGGLSELDKAGFIKRQLVETRQITKHVAQILDSRMNTKYDENDKLIREVKVITLKSKLVSDFRKDFQFYKVREINNYHHAHDAYLNAVVGTALIKKYPKLESEFVYGDYKVYDVRKMIAKSEQEIGKATAKYFFYSNIMNFFKTEITLANGEIRKRPLIETNGETGEIVWDKGRDFATVRKVLSMPQVNIVKKTEVQTGGFSKESILPKRNSDKLIARKKDWDPKKYGGFDSPTVAYSVLVVAKVEKGKSKKLKSVKELLGITIMERSSFEKNPIDFLEAKGYKEVKKDLIIKLPKYSLFELENGRKRMLASAGELQKGNELALPSKYVNFLYLASHYEKLKGSPEDNEQKQLFVEQHKHYLDEIIEQISEFSKRVILADANLDKVLSAYNKHRDKPIREQAENIIHLFTLTNLGAPAAFKYFDTTIDRKRYTSTKEVLDATLIHQSITGLYETRIDLSQLGGDGGSGSETPGTSESATPESGGMDPLQLLQPLEAEIKGTKLKAHWNSGATITCVPQAFLEEEVPIKNIWIKTIHGEKEQPVYYLTFKIQGRKVEAEVISSPYDYILVSPSDIPWLMKKPLQLTTLVPLQEYEERLLKQTMLTGSYKEKLQSLFLKYDALWQHWENQVGHRRIKPHHIATGTVNPRPQKQYPINPKAKASIQTVINDLLKQGVLIQQNSIMNTPVYPVPKPDGKWRMVLDYREVNKTIPLIAAQNQHSAGILSSIFRGKYKTTLDLSNGFWAHSITPESYWLTAFTWLGQQYCWTRLPQGFLNSPALFNADVVDLLKEVPNVQVYVDDIYISHDDPREHLEQLEKVFSLLLNAGYVVSLKKSEIAQHEVEFLGFNITKEGRGLTETFKQKLLNITPPRDLKQLQSILGLLNFARNFIPNFSELVKPLYNIIATAPGKYITWTTDNSQQLQNIISMLNSAENLEERNPEVRLIMKVNTSPSAGYIRFYNEFAKRPIMYLNYVYTKAEVKFTNTEKLLTTIHKGLIKALDLGMGQEILVYSPIVSMTKIQKTPLPERKALPIRWITWMSYLEDPRIQFHYDKTLPELQQVPTVTDDIIAKIKHPSEFSMVFYTDGSAIKHPNVNKSHNAGMGIAQVQFKPEFTVINTWSIPLGDHTAQLAEVAAVEFACKKALKIDGPVLIVTDSFYVAESVNKELPYWQSNGFFNNKKKPLKHVSKWKSIADCIQLKPDIIIIHEKGHQPTASTFHTEGNNLADKLATQGSYVVNAGKRTADGSEFEKRTADGSEFESPKKKAKVE

SEQ ID NO: 7706 - protein, 2101 aa, synthetic construct
MPAAKRVKLDGGDKKYSIGLDIGTNSVGWAVITDEYKVPSKKFKVLGNTDRHSIKKNLIGALLFDSGETAEATRLKRTARRRYTRRKNRICYLQEIFSNEMAKVDDSFFHRLEESFLVEEDKKHERHPIFGNIVDEVAYHEKYPTIYHLRKKLVDSTDKADLRLIYLALAHMIKFRGHFLIEGDLNPDNSDVDKLFIQLVQTYNQLFEENPINASGVDAKAILSARLSKSRRLENLIAQLPGEKKNGLFGNLIALSLGLTPNFKSNFDLAEDAKLQLSKDTYDDDLDNLLAQIGDQYADLFLAAKNLSDAILLSDILRVNTEITKAPLSASMIKRYDEHHQDLTLLKALVRQQLPEKYKEIFFDQSKNGYAGYIDGGASQEEFYKFIKPILEKMDGTEELLVKLNREDLLRKQRTFDNGSIPHQIHLGELHAILRRQEDFYPFLKDNREKIEKILTFRIPYYVGPLARGNSRFAWMTRKSEETITPWNFEEVVDKGASAQSFIERMTNFDKNLPNEKVLPKHSLLYEYFTVYNELTKVKYVTEGMRKPAFLSGEQKKAIVDLLFKTNRKVTVKQLKEDYFKKIECFDSVEISGVEDRFNASLGTYHDLLKIIKDKDFLDNEENEDILEDIVLTLTLFEDREMIEERLKTYAHLFDDKVMKQLKRRRYTGWGRLSRKLINGIRDKQSGKTILDFLKSDGFANRNFMQLIHDDSLTFKEDIQKAQVSGQGDSLHEHIANLAGSPAIKKGILQTVKVVDELVKVMGRHKPENIVIEMARENQTTQKGQKNSRERMKRIEEGIKELGSQILKEHPVENTQLQNEKLYLYYLQNGRDMYVDQELDINRLSDYDVDHIVPQSFLKDDSIDNKVLTRSDKARGKSDNVPSEEVVKKMKNYWRQLLNAKLITQRKFDNLTKAERGGLSELDKAGFIKRQLVETRQITKHVAQILDSRMNTKYDENDKLIREVKVITLKSKLVSDFRKDFQFYKVREINNYHHAHDAYLNAVVGTALIKKYPKLESEFVYGDYKVYDVRKMIAKSEQEIGKATAKYFFYSNIMNFFKTEITLANGEIRKRPLIETNGETGEIVWDKGRDFATVRKVLSMPQVNIVKKTEVQTGGFSKESILPKRNSDKLIARKKDWDPKKYGGFDSPTVAYSVLVVAKVEKGKSKKLKSVKELLGITIMERSSFEKNPIDFLEAKGYKEVKKDLIIKLPKYSLFELENGRKRMLASAGELQKGNELALPSKYVNFLYLASHYEKLKGSPEDNEQKQLFVEQHKHYLDEIIEQISEFSKRVILADANLDKVLSAYNKHRDKPIREQAENIIHLFTLTNLGAPAAFKYFDTTIDRKRYTSTKEVLDATLIHQSITGLYETRIDLSQLGGDGGSGSETPGTSESATPESGGTLNIEDEYRLHETSKEPDVPLGSTWLSDFPQAWAETGGMGLAVRQAPLIIPLKATSTPVSIKQYPMSQEARLGIKPHIQRLLDQGILVPCQSPWNTPLLPVKKPGTNDYRPVQDLREVNKRVEDIHPTVPNPYNLLSGLPPSHQWYTVLDLKDAFFCLRLHPTSQPLFAFEWRDPEMGISGQLTWTRLPQGFKNSPTLFNEALHRDLADFRIQHPDLILLQYVDDLLLAATSEQDCQRGTRALLQTLGNLGYRASAKKAQICQKQVKYLGYLLKEGQRWLTEARKETVMGQPTPKTPRQLREFLGTAGFCRLWIPGFAEMAAPLYPLTKPGTLFNWGPDQQKAYQEIKQALLTAPALGLPDLTKPFELFVDEKQGYAKGVLTQKLGPWRRPVAYLSKKLDPVAAGWPPCLRMVAAIAVLTKDAGKLTMGQPLVILAPHAVEALVKQPPDRWLSNARMTHYQAMLLDTDRVQFGPVVALNPATLLPLPEKEAPHDCLEILAETHGTRPDLTDQPIPDADYTWYTDGSSFLQEGQRRAGAAVTTETEVIWARALPAGTSAQRAELIALTQALKMAEGKKLNVYTDSRYAFATAHVHGEIYRRRGWLTSEGREIKNKNEILALLKALFLPKRLSIIHCPGHQKGNSAEARGNRMADQAAREAAMKAVLETSTLLAGKRTADGSEFEKRTADGSEFESPKKKAKVE

SEQ ID NO: 7707 - protein, 2099 aa, synthetic construct
MPAAKRVKLDGGDKKYSIGLDIGTNSVGWAVITDEYKVPSKKFKVLGNTDRHSIKKNLIGALLFDSGETAEATRLKRTARRRYTRRKNRICYLQEIFSNEMAKVDDSFFHRLEESFLVEEDKKHERHPIFGNIVDEVAYHEKYPTIYHLRKKLVDSTDKADLRLIYLALAHMIKFRGHFLIEGDLNPDNSDVDKLFIQLVQTYNQLFEENPINASGVDAKAILSARLSKSRRLENLIAQLPGEKKNGLFGNLIALSLGLTPNFKSNFDLAEDAKLQLSKDTYDDDLDNLLAQIGDQYADLFLAAKNLSDAILLSDILRVNTEITKAPLSASMIKRYDEHHQDLTLLKALVRQQLPEKYKEIFFDQSKNGYAGYIDGGASQEEFYKFIKPILEKMDGTEELLVKLNREDLLRKQRTFDNGSIPHQIHLGELHAILRRQEDFYPFLKDNREKIEKILTFRIPYYVGPLARGNSRFAWMTRKSEETITPWNFEEVVDKGASAQSFIERMTNFDKNLPNEKVLPKHSLLYEYFTVYNELTKVKYVTEGMRKPAFLSGEQKKAIVDLLFKTNRKVTVKQLKEDYFKKIECFDSVEISGVEDRFNASLGTYHDLLKIIKDKDFLDNEENEDILEDIVLTLTLFEDREMIEERLKTYAHLFDDKVMKQLKRRRYTGWGRLSRKLINGIRDKQSGKTILDFLKSDGFANRNFMQLIHDDSLTFKEDIQKAQVSGQGDSLHEHIANLAGSPAIKKGILQTVKVVDELVKVMGRHKPENIVIEMARENQTTQKGQKNSRERMKRIEEGIKELGSQILKEHPVENTQLQNEKLYLYYLQNGRDMYVDQELDINRLSDYDVDHIVPQSFLKDDSIDNKVLTRSDKARGKSDNVPSEEVVKKMKNYWRQLLNAKLITQRKFDNLTKAERGGLSELDKAGFIKRQLVETRQITKHVAQILDSRMNTKYDENDKLIREVKVITLKSKLVSDFRKDFQFYKVREINNYHHAHDAYLNAVVGTALIKKYPKLESEFVYGDYKVYDVRKMIAKSEQEIGKATAKYFFYSNIMNFFKTEITLANGEIRKRPLIETNGETGEIVWDKGRDFATVRKVLSMPQVNIVKKTEVQTGGFSKESILPKRNSDKLIARKKDWDPKKYGGFDSPTVAYSVLVVAKVEKGKSKKLKSVKELLGITIMERSSFEKNPIDFLEAKGYKEVKKDLIIKLPKYSLFELENGRKRMLASAGELQKGNELALPSKYVNFLYLASHYEKLKGSPEDNEQKQLFVEQHKHYLDEIIEQISEFSKRVILADANLDKVLSAYNKHRDKPIREQAENIIHLFTLTNLGAPAAFKYFDTTIDRKRYTSTKEVLDATLIHQSITGLYETRIDLSQLGGDGGGSAGSAAGSGEFGGTAPLEEEYRLFLEAPIQNVTLLEQWKREIPKVWAEINPPGLASTQAPIHVQLLSTALPVRVRQYPITLEAKRSLRETIRKFRAAGILRPVHSPWNTPLLPVRKSGTSEYRMVQDLREVNKRVETIHPTVPNPYTLLSLLPPDRIWYSVLDLKDAFFCIPLAPESQLIFAFEWADAEEGESGQLTWTRLPQGFKNSPTLFNEALNRDLQGFRLDHPSVSLLQYVDDLLIAADTQAACLSATRDLLMTLAELGYRVSGKKAQLCQEEVTYLGFKIHKGSRSLSNSRTQAILQIPVPKTKRQVREFLGTIGYCRLWIPGFAELAQPLYAATRPGNDPLVWGEKEEEAFQSLKLALTQPPALALPSLDKPFQLFVEETSGAAKGVLTQALGPWKRPVAYLSKRLDPVAAGWPRCLRAIAAAALLTREASKLTFGQDIEITSSHNLESLLRSPPDKWLTNARITQYQVLLLDPPRVRFKQTAALNPATLLPETDDTLPIHHCLDTLDSLTSTRPDLTDQPLAQAEATLFTDGSSYIRDGKRYAGAAVVTLDSVIWAEPLPIGTSAQKAELIALTKALEWSKDKSVNIYTDSRYAFATLHVHGMIYRERGWLTAGGKAIKNAPEILALLTAVWLPKRVAVMHCKGHQKDDAPTSTGNRRADEVAREVAIRPLSTQATISAGKRTADGSEFEKRTADGSEFESPKKKAKVE

SEQ ID NO: 7708 - protein, 2002 aa, synthetic construct
MPAAKRVKLDGGDKKYSIGLDIGTNSVGWAVITDEYKVPSKKFKVLGNTDRHSIKKNLIGALLFDSGETAEATRLKRTARRRYTRRKNRICYLQEIFSNEMAKVDDSFFHRLEESFLVEEDKKHERHPIFGNIVDEVAYHEKYPTIYHLRKKLVDSTDKADLRLIYLALAHMIKFRGHFLIEGDLNPDNSDVDKLFIQLVQTYNQLFEENPINASGVDAKAILSARLSKSRRLENLIAQLPGEKKNGLFGNLIALSLGLTPNFKSNFDLAEDAKLQLSKDTYDDDLDNLLAQIGDQYADLFLAAKNLSDAILLSDILRVNTEITKAPLSASMIKRYDEHHQDLTLLKALVRQQLPEKYKEIFFDQSKNGYAGYIDGGASQEEFYKFIKPILEKMDGTEELLVKLNREDLLRKQRTFDNGSIPHQIHLGELHAILRRQEDFYPFLKDNREKIEKILTFRIPYYVGPLARGNSRFAWMTRKSEETITPWNFEEVVDKGASAQSFIERMTNFDKNLPNEKVLPKHSLLYEYFTVYNELTKVKYVTEGMRKPAFLSGEQKKAIVDLLFKTNRKVTVKQLKEDYFKKIECFDSVEISGVEDRFNASLGTYHDLLKIIKDKDFLDNEENEDILEDIVLTLTLFEDREMIEERLKTYAHLFDDKVMKQLKRRRYTGWGRLSRKLINGIRDKQSGKTILDFLKSDGFANRNFMQLIHDDSLTFKEDIQKAQVSGQGDSLHEHIANLAGSPAIKKGILQTVKVVDELVKVMGRHKPENIVIEMARENQTTQKGQKNSRERMKRIEEGIKELGSQILKEHPVENTQLQNEKLYLYYLQNGRDMYVDQELDINRLSDYDVDHIVPQSFLKDDSIDNKVLTRSDKARGKSDNVPSEEVVKKMKNYWRQLLNAKLITQRKFDNLTKAERGGLSELDKAGFIKRQLVETRQITKHVAQILDSRMNTKYDENDKLIREVKVITLKSKLVSDFRKDFQFYKVREINNYHHAHDAYLNAVVGTALIKKYPKLESEFVYGDYKVYDVRKMIAKSEQEIGKATAKYFFYSNIMNFFKTEITLANGEIRKRPLIETNGETGEIVWDKGRDFATVRKVLSMPQVNIVKKTEVQTGGFSKESILPKRNSDKLIARKKDWDPKKYGGFDSPTVAYSVLVVAKVEKGKSKKLKSVKELLGITIMERSSFEKNPIDFLEAKGYKEVKKDLIIKLPKYSLFELENGRKRMLASAGELQKGNELALPSKYVNFLYLASHYEKLKGSPEDNEQKQLFVEQHKHYLDEIIEQISEFSKRVILADANLDKVLSAYNKHRDKPIREQAENIIHLFTLTNLGAPAAFKYFDTTIDRKRYTSTKEVLDATLIHQSITGLYETRIDLSQLGGDGGGSAGSAAGSGEFGGGVLDTPPSHIGLEHLPPPPEVPQFPLNLERLQALQDLVHRSLEAGYISPWDGPGNNPVFPVRKPNGAWRFVHDLRATNALTKPIPALSPGPPDLTAPPTHPPHIICLDLKDAFFQIPVEDRFRFYLSFTLPSPGGLQPHRRFAWRVLPQGFINSPALFQRALQEPLRQVSAAFSQSLLVSYMDDILYASPTEEQRSQCYQALAARLRDLGFQVASEKTSQTPSPVPFLGQMVHEQIVTYQSLPTLQISSPISLHQLQAVLGDLQWVSRGTPTTRRPLQLLYSSLKRHHDPRAIIQLSPEQLQGIAELRQALSHNARSRYNEQEPLLAYVHLTRAGSTLVLFQKGAQFPLAYFQTPLTDNQASPWGLLLLLGCQYLQTQALSSYAKPILKYYHNLPKTSLDNWIQSSEDPRVQELLQLWPQISSQGIQPPGPWKTLITRAEVFLTPQFSPDPIPAALCLFSDGATGRGAYCLWKDHLLDFQAVPAPESAQKGELAGLLAGLAAAPPEPVNIWVDSKYLYSLLRTWVLGAWLQPDPVPSYALLYKSLLRHPAIVVGHVRSHSSASHPIASLNNYVDQLAGKRTADGSEFEKRTADGSEFESPKKKAKVE

SEQ ID NO: 7709 - protein, 2088 aa, synthetic construct
MPAAKRVKLDGGDKKYSIGLDIGTNSVGWAVITDEYKVPSKKFKVLGNTDRHSIKKNLIGALLFDSGETAEATRLKRTARRRYTRRKNRICYLQEIFSNEMAKVDDSFFHRLEESFLVEEDKKHERHPIFGNIVDEVAYHEKYPTIYHLRKKLVDSTDKADLRLIYLALAHMIKFRGHFLIEGDLNPDNSDVDKLFIQLVQTYNQLFEENPINASGVDAKAILSARLSKSRRLENLIAQLPGEKKNGLFGNLIALSLGLTPNFKSNFDLAEDAKLQLSKDTYDDDLDNLLAQIGDQYADLFLAAKNLSDAILLSDILRVNTEITKAPLSASMIKRYDEHHQDLTLLKALVRQQLPEKYKEIFFDQSKNGYAGYIDGGASQEEFYKFIKPILEKMDGTEELLVKLNREDLLRKQRTFDNGSIPHQIHLGELHAILRRQEDFYPFLKDNREKIEKILTFRIPYYVGPLARGNSRFAWMTRKSEETITPWNFEEVVDKGASAQSFIERMTNFDKNLPNEKVLPKHSLLYEYFTVYNELTKVKYVTEGMRKPAFLSGEQKKAIVDLLFKTNRKVTVKQLKEDYFKKIECFDSVEISGVEDRFNASLGTYHDLLKIIKDKDFLDNEENEDILEDIVLTLTLFEDREMIEERLKTYAHLFDDKVMKQLKRRRYTGWGRLSRKLINGIRDKQSGKTILDFLKSDGFANRNFMQLIHDDSLTFKEDIQKAQVSGQGDSLHEHIANLAGSPAIKKGILQTVKVVDELVKVMGRHKPENIVIEMARENQTTQKGQKNSRERMKRIEEGIKELGSQILKEHPVENTQLQNEKLYLYYLQNGRDMYVDQELDINRLSDYDVDHIVPQSFLKDDSIDNKVLTRSDKARGKSDNVPSEEVVKKMKNYWRQLLNAKLITQRKFDNLTKAERGGLSELDKAGFIKRQLVETRQITKHVAQILDSRMNTKYDENDKLIREVKVITLKSKLVSDFRKDFQFYKVREINNYHHAHDAYLNAVVGTALIKKYPKLESEFVYGDYKVYDVRKMIAKSEQEIGKATAKYFFYSNIMNFFKTEITLANGEIRKRPLIETNGETGEIVWDKGRDFATVRKVLSMPQVNIVKKTEVQTGGFSKESILPKRNSDKLIARKKDWDPKKYGGFDSPTVAYSVLVVAKVEKGKSKKLKSVKELLGITIMERSSFEKNPIDFLEAKGYKEVKKDLIIKLPKYSLFELENGRKRMLASAGELQKGNELALPSKYVNFLYLASHYEKLKGSPEDNEQKQLFVEQHKHYLDEIIEQISEFSKRVILADANLDKVLSAYNKHRDKPIREQAENIIHLFTLTNLGAPAAFKYFDTTIDRKRYTSTKEVLDATLIHQSITGLYETRIDLSQLGGDGGGSAGSAAGSGEFGGVPWILKKPLELTIKLDLEEQQGTLLNNSILSKKGKEELKQLFEKYSALWQSWENQVGHRRIRPHKIATGTVKPTPQKQYHINPKAKPDIQIVINDLLKQGVLIQKESTMNTPVYPVPKPNGRWRMVLDYRAVNKVTPLIAVQNQHSYGILGSLFKGRYKTTIDLSNGFWAHPIVPEDYWITAFTWQGKQYCWTVLPQGFLNSPGLFTGDVVDLLQGIPNVEVYVDDVYISHDSEKEHLEYLDILFNRLKEAGYIISLKKSNIANSIVDFLGFQITNEGRGLTDTFKEKLENITAPTTLKQLQSILGLLNFARNFIPDFTELIAPLYALIPKSTKNYVPWQIEHSTTLETLITKLNGAEYLQGRKGDKTLIMKVNASYTTGYIRYYNEGEKKPISYVSIVFSKTELKFTELEKLLTTVHKGLLKALDLSMGQNIHVYSPIVSMQNIQKTPQTAKKALASRWLSWLSYLEDPRIRFFYDPQMPALKDLPAVDTGKDNKKHPSNFQHIFYTDGSAITSPTKEGHLNAGMGIVYFINKDGNLQKQQEWSISLGNHTAQFAEIAAFEFALKKCLPLGGNILVVTDSNYVAKAYNEELDVWASNGFVNNRKKPLKHISKWKSVADLKRLRPDVVVTHEPGHQKLDSSPHAYGNNLADQLATQASFKVHAGKRTADGSEFEKRTADGSEFESPKKKAKVE

SEQ ID NO: 7710 - protein, 2088 aa, synthetic construct
MPAAKRVKLDGGDKKYSIGLDIGTNSVGWAVITDEYKVPSKKFKVLGNTDRHSIKKNLIGALLFDSGETAEATRLKRTARRRYTRRKNRICYLQEIFSNEMAKVDDSFFHRLEESFLVEEDKKHERHPIFGNIVDEVAYHEKYPTIYHLRKKLVDSTDKADLRLIYLALAHMIKFRGHFLIEGDLNPDNSDVDKLFIQLVQTYNQLFEENPINASGVDAKAILSARLSKSRRLENLIAQLPGEKKNGLFGNLIALSLGLTPNFKSNFDLAEDAKLQLSKDTYDDDLDNLLAQIGDQYADLFLAAKNLSDAILLSDILRVNTEITKAPLSASMIKRYDEHHQDLTLLKALVRQQLPEKYKEIFFDQSKNGYAGYIDGGASQEEFYKFIKPILEKMDGTEELLVKLNREDLLRKQRTFDNGSIPHQIHLGELHAILRRQEDFYPFLKDNREKIEKILTFRIPYYVGPLARGNSRFAWMTRKSEETITPWNFEEVVDKGASAQSFIERMTNFDKNLPNEKVLPKHSLLYEYFTVYNELTKVKYVTEGMRKPAFLSGEQKKAIVDLLFKTNRKVTVKQLKEDYFKKIECFDSVEISGVEDRFNASLGTYHDLLKIIKDKDFLDNEENEDILEDIVLTLTLFEDREMIEERLKTYAHLFDDKVMKQLKRRRYTGWGRLSRKLINGIRDKQSGKTILDFLKSDGFANRNFMQLIHDDSLTFKEDIQKAQVSGQGDSLHEHIANLAGSPAIKKGILQTVKVVDELVKVMGRHKPENIVIEMARENQTTQKGQKNSRERMKRIEEGIKELGSQILKEHPVENTQLQNEKLYLYYLQNGRDMYVDQELDINRLSDYDVDHIVPQSFLKDDSIDNKVLTRSDKARGKSDNVPSEEVVKKMKNYWRQLLNAKLITQRKFDNLTKAERGGLSELDKAGFIKRQLVETRQITKHVAQILDSRMNTKYDENDKLIREVKVITLKSKLVSDFRKDFQFYKVREINNYHHAHDAYLNAVVGTALIKKYPKLESEFVYGDYKVYDVRKMIAKSEQEIGKATAKYFFYSNIMNFFKTEITLANGEIRKRPLIETNGETGEIVWDKGRDFATVRKVLSMPQVNIVKKTEVQTGGFSKESILPKRNSDKLIARKKDWDPKKYGGFDSPTVAYSVLVVAKVEKGKSKKLKSVKELLGITIMERSSFEKNPIDFLEAKGYKEVKKDLIIKLPKYSLFELENGRKRMLASAGELQKGNELALPSKYVNFLYLASHYEKLKGSPEDNEQKQLFVEQHKHYLDEIIEQISEFSKRVILADANLDKVLSAYNKHRDKPIREQAENIIHLFTLTNLGAPAAFKYFDTTIDRKRYTSTKEVLDATLIHQSITGLYETRIDLSQLGGDGGGSAGSAAGSGEFGGVPWILKKPLELTIKLDLEEQQGTLLNNSILSKKGKEELKQLFEKYSALWQSWENQVGHRRIRPHKIATGTVKPTPQKQYHINPKAKPDIQIVINDLLKQGVLIQKESTMNTPVYPVPKPNGRWRMVLDYRAVNKVTPLIAVQNQHSYGILGSLFKGRYKTTIDLSNGFWAHPIVPEDYWITAFTWQGKQYCWTVLPQGFLNSPGLFNGDVVDLLQGIPNVEVYVDDVYISHDSEKEHLEYLDILFNRLKEAGYIISLKKSNIANSIVDFLGFQITNEGRGLTDTFKEKLENITAPTTLKQLQSILGLLNFARNFIPDFTELIAPLYALIPKSPKNYVPWQIEHSTTLETLITKLNGAEYLQGRKGDKTLIMKVNASYTTGYIRYYNEGEKKPISYVSIVFSKTELKFTELEKLLTTVHKGLLKALDLSMGQNIHVYSPIVSMQNIQKTPQTAKKALASRWLSWLSYLEDPRIRFFYDPQMPALKDLPAVDTGKDNKKHPSNFQHIFYTDGSAITSPTKEGHLNAGMGIVYFINKDGNLQKQQEWSISLGNHTAQFAEIAAFEFALKKCLPLGGNILVVTDSNYVAKAYNEELDVWASNGFVNNRKKPLKHISKWKSVADLKRLRPDVVVTHEPGHQKLDSSPHAYGNNLADQLATQASFKVHAGKRTADGSEFEKRTADGSEFESPKKKAKVE

SEQ ID NO: 7711 - protein, 2096 aa, synthetic construct
MPAAKRVKLDGGDKKYSIGLDIGTNSVGWAVITDEYKVPSKKFKVLGNTDRHSIKKNLIGALLFDSGETAEATRLKRTARRRYTRRKNRICYLQEIFSNEMAKVDDSFFHRLEESFLVEEDKKHERHPIFGNIVDEVAYHEKYPTIYHLRKKLVDSTDKADLRLIYLALAHMIKFRGHFLIEGDLNPDNSDVDKLFIQLVQTYNQLFEENPINASGVDAKAILSARLSKSRRLENLIAQLPGEKKNGLFGNLIALSLGLTPNFKSNFDLAEDAKLQLSKDTYDDDLDNLLAQIGDQYADLFLAAKNLSDAILLSDILRVNTEITKAPLSASMIKRYDEHHQDLTLLKALVRQQLPEKYKEIFFDQSKNGYAGYIDGGASQEEFYKFIKPILEKMDGTEELLVKLNREDLLRKQRTFDNGSIPHQIHLGELHAILRRQEDFYPFLKDNREKIEKILTFRIPYYVGPLARGNSRFAWMTRKSEETITPWNFEEVVDKGASAQSFIERMTNFDKNLPNEKVLPKHSLLYEYFTVYNELTKVKYVTEGMRKPAFLSGEQKKAIVDLLFKTNRKVTVKQLKEDYFKKIECFDSVEISGVEDRFNASLGTYHDLLKIIKDKDFLDNEENEDILEDIVLTLTLFEDREMIEERLKTYAHLFDDKVMKQLKRRRYTGWGRLSRKLINGIRDKQSGKTILDFLKSDGFANRNFMQLIHDDSLTFKEDIQKAQVSGQGDSLHEHIANLAGSPAIKKGILQTVKVVDELVKVMGRHKPENIVIEMARENQTTQKGQKNSRERMKRIEEGIKELGSQILKEHPVENTQLQNEKLYLYYLQNGRDMYVDQELDINRLSDYDVDHIVPQSFLKDDSIDNKVLTRSDKARGKSDNVPSEEVVKKMKNYWRQLLNAKLITQRKFDNLTKAERGGLSELDKAGFIKRQLVETRQITKHVAQILDSRMNTKYDENDKLIREVKVITLKSKLVSDFRKDFQFYKVREINNYHHAHDAYLNAVVGTALIKKYPKLESEFVYGDYKVYDVRKMIAKSEQEIGKATAKYFFYSNIMNFFKTEITLANGEIRKRPLIETNGETGEIVWDKGRDFATVRKVLSMPQVNIVKKTEVQTGGFSKESILPKRNSDKLIARKKDWDPKKYGGFDSPTVAYSVLVVAKVEKGKSKKLKSVKELLGITIMERSSFEKNPIDFLEAKGYKEVKKDLIIKLPKYSLFELENGRKRMLASAGELQKGNELALPSKYVNFLYLASHYEKLKGSPEDNEQKQLFVEQHKHYLDEIIEQISEFSKRVILADANLDKVLSAYNKHRDKPIREQAENIIHLFTLTNLGAPAAFKYFDTTIDRKRYTSTKEVLDATLIHQSITGLYETRIDLSQLGGDGGGSAGSAAGSGEFGGTLQLEEEYRLFEPESTQKQEMDIWLKNFPQAWAETGGMGTAHCQAPVLIQLKATATPISIRQYPMPHEAYQGIKPHIRRMLDQGILKPCQSPWNTPLLPVKKPGTEDYRPVQDLREVNKRVEDIHPTVPNPYNLLSTLPPSHPWYTVLDLKDAFFCLRLHSESQLLFAFEWRDPEIGLSGQLTWTRLPQGFKNSPTLFNEALHSDLADFRVRYPALVLLQYVDDLLLAAATRTECLEGTKALLETLGNKGYRASAKKAQICLQEVTYLGYSLKDGQRWLTKARKEAILSIPVPKNSRQVREFLGKAGYCRLFIPGFAELAAPLYPLTRPGTLFQWGTEQQLAFEDIKKALLSSPALGLPDITKPFELFIDENSGFAKGVLVQKLGPWKRPVAYLSKKLDTVASGWPPCLRMVAAIAILVKDAGKLTLGQPLTILTSHPVEALVRQPPNKWLSNARMTHYQAMLLDAERVHFGPTVSLNPATLLPLPSGGNHHDCLQILAETHGTRPDLTDQPLPDADLTWYTDGSSFIRNGEREAGAAVTTESEVIWAAPLPPGTSAQRAELIALTQALKMAEGKKLTVYTDSRYAFATTHVHGEIYRRRGWLTSEGKEIKNKNEILALLEALFLPKRLSIIHCPGHQKGDSPQAKGNRLADDTAKKAATETHSSLTVLPAGKRTADGSEFEKRTADGSEFESPKKKAKVE

SEQ ID NO: 7712 - protein, 2095 aa, synthetic construct
MPAAKRVKLDGGDKKYSIGLDIGTNSVGWAVITDEYKVPSKKFKVLGNTDRHSIKKNLIGALLFDSGETAEATRLKRTARRRYTRRKNRICYLQEIFSNEMAKVDDSFFHRLEESFLVEEDKKHERHPIFGNIVDEVAYHEKYPTIYHLRKKLVDSTDKADLRLIYLALAHMIKFRGHFLIEGDLNPDNSDVDKLFIQLVQTYNQLFEENPINASGVDAKAILSARLSKSRRLENLIAQLPGEKKNGLFGNLIALSLGLTPNFKSNFDLAEDAKLQLSKDTYDDDLDNLLAQIGDQYADLFLAAKNLSDAILLSDILRVNTEITKAPLSASMIKRYDEHHQDLTLLKALVRQQLPEKYKEIFFDQSKNGYAGYIDGGASQEEFYKFIKPILEKMDGTEELLVKLNREDLLRKQRTFDNGSIPHQIHLGELHAILRRQEDFYPFLKDNREKIEKILTFRIPYYVGPLARGNSRFAWMTRKSEETITPWNFEEVVDKGASAQSFIERMTNFDKNLPNEKVLPKHSLLYEYFTVYNELTKVKYVTEGMRKPAFLSGEQKKAIVDLLFKTNRKVTVKQLKEDYFKKIECFDSVEISGVEDRFNASLGTYHDLLKIIKDKDFLDNEENEDILEDIVLTLTLFEDREMIEERLKTYAHLFDDKVMKQLKRRRYTGWGRLSRKLINGIRDKQSGKTILDFLKSDGFANRNFMQLIHDDSLTFKEDIQKAQVSGQGDSLHEHIANLAGSPAIKKGILQTVKVVDELVKVMGRHKPENIVIEMARENQTTQKGQKNSRERMKRIEEGIKELGSQILKEHPVENTQLQNEKLYLYYLQNGRDMYVDQELDINRLSDYDVDHIVPQSFLKDDSIDNKVLTRSDKARGKSDNVPSEEVVKKMKNYWRQLLNAKLITQRKFDNLTKAERGGLSELDKAGFIKRQLVETRQITKHVAQILDSRMNTKYDENDKLIREVKVITLKSKLVSDFRKDFQFYKVREINNYHHAHDAYLNAVVGTALIKKYPKLESEFVYGDYKVYDVRKMIAKSEQEIGKATAKYFFYSNIMNFFKTEITLANGEIRKRPLIETNGETGEIVWDKGRDFATVRKVLSMPQVNIVKKTEVQTGGFSKESILPKRNSDKLIARKKDWDPKKYGGFDSPTVAYSVLVVAKVEKGKSKKLKSVKELLGITIMERSSFEKNPIDFLEAKGYKEVKKDLIIKLPKYSLFELENGRKRMLASAGELQKGNELALPSKYVNFLYLASHYEKLKGSPEDNEQKQLFVEQHKHYLDEIIEQISEFSKRVILADANLDKVLSAYNKHRDKPIREQAENIIHLFTLTNLGAPAAFKYFDTTIDRKRYTSTKEVLDATLIHQSITGLYETRIDLSQLGGDGGGSAGSAAGSGEFGGVLNLEEEYRLHEKPVPSSIDPSWLQLFPTVWAERAGMGLANQVPPVVVELRSGASPVAVRQYPMSKEAREGIRPHIQKFLDLGVLVPCRSPWNTPLLPVKKPGTNDYRPVQDLREINKRVQDIHPTVPNPYNLLSSLPPSYTWYSVLDLKDAFFCLRLHPNSQPLFAFEWKDPEKGNTGQLTWTRLPQGFKNSPTLFNEALHRDLAPFRALNPQVVLLQYVDDLLVAAPTYEDCKKGTQKLLQELSKLGYRVSAKKAQLCQREVTYLGYLLKEGKRWLTPARKATVMKIPVPTTPRQVREFLGKAGFCRLFIPGFASLAAPLYPLTKPSIPFIWTEEHQQAFDHIKKALLSAPALALPDLTKPFTLYIDERAGVARGVLTQTLGPWRRPVAYLSKKLDPVASGWPTCLKAVAAVALLLKDADKLTLGQNVTVIASHSLESIVRQPPDRWMTNARMTHYQSLLLNERVSFAPPAVLNPATLLPVESEATPVHRCSEILAEETGTRRDLEDQPLPGVPTWYTDGSSFITEGKRRAGAPIVDGKRTVWASSLPEGTSAQKAELVALTQALRLAEGKNINIYTDSRYAFATAHIHGAIYKQRGWLTSAGKDIKNKEEILALLEAIHLPRRVAIIHCPGHQRGSNPVATGNRRADEAAKQAALSTRVLAGTTKPAGKRTADGSEFEKRTADGSEFESPKKKAKVE

SEQ ID NO: 7713 - protein, 2219 aa, synthetic construct
MPAAKRVKLDGGDKKYSIGLDIGTNSVGWAVITDEYKVPSKKFKVLGNTDRHSIKKNLIGALLFDSGETAEATRLKRTARRRYTRRKNRICYLQEIFSNEMAKVDDSFFHRLEESFLVEEDKKHERHPIFGNIVDEVAYHEKYPTIYHLRKKLVDSTDKADLRLIYLALAHMIKFRGHFLIEGDLNPDNSDVDKLFIQLVQTYNQLFEENPINASGVDAKAILSARLSKSRRLENLIAQLPGEKKNGLFGNLIALSLGLTPNFKSNFDLAEDAKLQLSKDTYDDDLDNLLAQIGDQYADLFLAAKNLSDAILLSDILRVNTEITKAPLSASMIKRYDEHHQDLTLLKALVRQQLPEKYKEIFFDQSKNGYAGYIDGGASQEEFYKFIKPILEKMDGTEELLVKLNREDLLRKQRTFDNGSIPHQIHLGELHAILRRQEDFYPFLKDNREKIEKILTFRIPYYVGPLARGNSRFAWMTRKSEETITPWNFEEVVDKGASAQSFIERMTNFDKNLPNEKVLPKHSLLYEYFTVYNELTKVKYVTEGMRKPAFLSGEQKKAIVDLLFKTNRKVTVKQLKEDYFKKIECFDSVEISGVEDRFNASLGTYHDLLKIIKDKDFLDNEENEDILEDIVLTLTLFEDREMIEERLKTYAHLFDDKVMKQLKRRRYTGWGRLSRKLINGIRDKQSGKTILDFLKSDGFANRNFMQLIHDDSLTFKEDIQKAQVSGQGDSLHEHIANLAGSPAIKKGILQTVKVVDELVKVMGRHKPENIVIEMARENQTTQKGQKNSRERMKRIEEGIKELGSQILKEHPVENTQLQNEKLYLYYLQNGRDMYVDQELDINRLSDYDVDHIVPQSFLKDDSIDNKVLTRSDKARGKSDNVPSEEVVKKMKNYWRQLLNAKLITQRKFDNLTKAERGGLSELDKAGFIKRQLVETRQITKHVAQILDSRMNTKYDENDKLIREVKVITLKSKLVSDFRKDFQFYKVREINNYHHAHDAYLNAVVGTALIKKYPKLESEFVYGDYKVYDVRKMIAKSEQEIGKATAKYFFYSNIMNFFKTEITLANGEIRKRPLIETNGETGEIVWDKGRDFATVRKVLSMPQVNIVKKTEVQTGGFSKESILPKRNSDKLIARKKDWDPKKYGGFDSPTVAYSVLVVAKVEKGKSKKLKSVKELLGITIMERSSFEKNPIDFLEAKGYKEVKKDLIIKLPKYSLFELENGRKRMLASAGELQKGNELALPSKYVNFLYLASHYEKLKGSPEDNEQKQLFVEQHKHYLDEIIEQISEFSKRVILADANLDKVLSAYNKHRDKPIREQAENIIHLFTLTNLGAPAAFKYFDTTIDRKRYTSTKEVLDATLIHQSITGLYETRIDLSQLGGDGGGSAGSAAGSGEFGGTLGDQGSRGSDPLPEPRVTLTVEGIPTEFLVNTGAEHSVLTKPMGKMGSKRTVVAGATGSKVYPWTTKRLLKIGQKQVTHSFLVIPECPAPLLGRDLLTKLKAQIQFSTEGPQVTWEDRPAMCLVLNLEEEYRLHEKPVPPSIDPSWLQLFPMVWAEKAGMGLANQVPPVVVELKSDASPVAVRQYPMSKEAREGIRPHIQRFLDLGILVPCQSPWNTPLLPVKKPGTNDYRPVQDLREVNKRVQDIHPTVPNPYNLLSSLPPSHTWYSVLDLKDAFFCLKLHPNSQPLFAFEWRDPEKGNTGQLTWTRLPQGFKNSPTLFDEALHRDLASFRALNPQVVMLQYVDDLLVAAPTYRDCKEGTRRLLQELSKLGYRVSAKKAQLCREEVTYLGYLLKGGKRWLTPARKATVMKIPTPTTPRQVREFLGTAGFCRLWIPGFASLAAPLYPLTREKVPFTWTEAHQEAFGRIKEALLSAPALALPDLTKPFALYVDEKEGVARGVLTQTLGPWRRPVAYLSKKLDPVASGWPTCLKAIAAVALLLKDADKLTLGQNVLVIAPHNLESIVRQPPDRWMTNARMTHYQSLLLNERVSFAPPAILNPATLLPVESDDTPIHICSEILAEETGTRPDLRDQPLPGVPAWYTDGSSFIMDGRRQAGAAIVDNKRTVWASNLPEGTSAQKAELIALTQALRLAEGKSINIYTDSRYAFATAHVHGAIYKQRGLLTSAGKDIKNKEEILALLEAIHLPKRVAIIHCPGHQRGTDPVATGNRKADEAAKQAAQSTRILTETTKNAGKRTADGSEFEKRTADGSEFESPKKKAKVE

SEQ ID NO: 7714 - protein, 2128 aa, synthetic construct
MPAAKRVKLDGGDKKYSIGLDIGTNSVGWAVITDEYKVPSKKFKVLGNTDRHSIKKNLIGALLFDSGETAEATRLKRTARRRYTRRKNRICYLQEIFSNEMAKVDDSFFHRLEESFLVEEDKKHERHPIFGNIVDEVAYHEKYPTIYHLRKKLVDSTDKADLRLIYLALAHMIKFRGHFLIEGDLNPDNSDVDKLFIQLVQTYNQLFEENPINASGVDAKAILSARLSKSRRLENLIAQLPGEKKNGLFGNLIALSLGLTPNFKSNFDLAEDAKLQLSKDTYDDDLDNLLAQIGDQYADLFLAAKNLSDAILLSDILRVNTEITKAPLSASMIKRYDEHHQDLTLLKALVRQQLPEKYKEIFFDQSKNGYAGYIDGGASQEEFYKFIKPILEKMDGTEELLVKLNREDLLRKQRTFDNGSIPHQIHLGELHAILRRQEDFYPFLKDNREKIEKILTFRIPYYVGPLARGNSRFAWMTRKSEETITPWNFEEVVDKGASAQSFIERMTNFDKNLPNEKVLPKHSLLYEYFTVYNELTKVKYVTEGMRKPAFLSGEQKKAIVDLLFKTNRKVTVKQLKEDYFKKIECFDSVEISGVEDRFNASLGTYHDLLKIIKDKDFLDNEENEDILEDIVLTLTLFEDREMIEERLKTYAHLFDDKVMKQLKRRRYTGWGRLSRKLINGIRDKQSGKTILDFLKSDGFANRNFMQLIHDDSLTFKEDIQKAQVSGQGDSLHEHIANLAGSPAIKKGILQTVKVVDELVKVMGRHKPENIVIEMARENQTTQKGQKNSRERMKRIEEGIKELGSQILKEHPVENTQLQNEKLYLYYLQNGRDMYVDQELDINRLSDYDVDHIVPQSFLKDDSIDNKVLTRSDKARGKSDNVPSEEVVKKMKNYWRQLLNAKLITQRKFDNLTKAERGGLSELDKAGFIKRQLVETRQITKHVAQILDSRMNTKYDENDKLIREVKVITLKSKLVSDFRKDFQFYKVREINNYHHAHDAYLNAVVGTALIKKYPKLESEFVYGDYKVYDVRKMIAKSEQEIGKATAKYFFYSNIMNFFKTEITLANGEIRKRPLIETNGETGEIVWDKGRDFATVRKVLSMPQVNIVKKTEVQTGGFSKESILPKRNSDKLIARKKDWDPKKYGGFDSPTVAYSVLVVAKVEKGKSKKLKSVKELLGITIMERSSFEKNPIDFLEAKGYKEVKKDLIIKLPKYSLFELENGRKRMLASAGELQKGNELALPSKYVNFLYLASHYEKLKGSPEDNEQKQLFVEQHKHYLDEIIEQISEFSKRVILADANLDKVLSAYNKHRDKPIREQAENIIHLFTLTNLGAPAAFKYFDTTIDRKRYTSTKEVLDATLIHQSITGLYETRIDLSQLGGDGGGSAGSAAGSGEFGGLLGRDLLTKLKAQIQFSTEGPQVTWEDRPAMCLVLNLEEEYRLHEKPVPPSIDPSWLQLFPMVWAEKAGMGLANQVPPVVVELKSDASPVAVRQYPMSKEAREGIRPHIQRFLDLGILVPCQSPWNTPLLPVKKPGTNDYRPVQDLREVNKRVQDIHPTVPNPYNLLSSLPPSHTWYSVLDLKDAFFCLKLHPNSQPLFAFEWRDPEKGNTGQLTWTRLPQGFKNSPTLFNEALHRDLASFRALNPQVVMLQYVDDLLVAAPTYRDCKEGTRRLLQELSKLGYRVSAKKAQLCREEVTYLGYLLKGGKRWLTPARKATVMKIPTPTTPRQVREFLGTAGFCRLWIPGFASLAAPLYPLTRPKVPFTWTEAHQEAFGRIKEALLSAPALALPDLTKPFALYVDEKEGVARGVLTQTLGPWRRPVAYLSKKLDPVASGWPTCLKAIAAVALLLKDADKLTLGQNVLVIAPHNLESIVRQPPDRWMTNARMTHYQSLLLNERVSFAPPAILNPATLLPVESDDTPIHICSEILAEETGTRPDLRDQPLPGVPAWYTDGSSFIMDGRRQAGAAIVDNKRTVWASNLPEGTSAQKAELIALTQALRLAEGKSINIYTDSRYAFATAHVHGAIYKQRGWLTSAGKDIKNKEEILALLEAIHLPKRVAIIHCPGHQRGTDPVATGNRKADEAAKQAAQSTRILTETTKNAGKRTADGSEFEKRTADGSEFESPKKKAKVE

SEQ ID NO: 7715 - protein, 2219 aa, synthetic construct
MPAAKRVKLDGGDKKYSIGLDIGTNSVGWAVITDEYKVPSKKFKVLGNTDRHSIKKNLIGALLFDSGETAEATRLKRTARRRYTRRKNRICYLQEIFSNEMAKVDDSFFHRLEESFLVEEDKKHERHPIFGNIVDEVAYHEKYPTIYHLRKKLVDSTDKADLRLIYLALAHMIKFRGHFLIEGDLNPDNSDVDKLFIQLVQTYNQLFEENPINASGVDAKAILSARLSKSRRLENLIAQLPGEKKNGLFGNLIALSLGLTPNFKSNFDLAEDAKLQLSKDTYDDDLDNLLAQIGDQYADLFLAAKNLSDAILLSDILRVNTEITKAPLSASMIKRYDEHHQDLTLLKALVRQQLPEKYKEIFFDQSKNGYAGYIDGGASQEEFYKFIKPILEKMDGTEELLVKLNREDLLRKQRTFDNGSIPHQIHLGELHAILRRQEDFYPFLKDNREKIEKILTFRIPYYVGPLARGNSRFAWMTRKSEETITPWNFEEVVDKGASAQSFIERMTNFDKNLPNEKVLPKHSLLYEYFTVYNELTKVKYVTEGMRKPAFLSGEQKKAIVDLLFKTNRKVTVKQLKEDYFKKIECFDSVEISGVEDRFNASLGTYHDLLKIIKDKDFLDNEENEDILEDIVLTLTLFEDREMIEERLKTYAHLFDDKVMKQLKRRRYTGWGRLSRKLINGIRDKQSGKTILDFLKSDGFANRNFMQLIHDDSLTFKEDIQKAQVSGQGDSLHEHIANLAGSPAIKKGILQTVKVVDELVKVMGRHKPENIVIEMARENQTTQKGQKNSRERMKRIEEGIKELGSQILKEHPVENTQLQNEKLYLYYLQNGRDMYVDQELDINRLSDYDVDHIVPQSFLKDDSIDNKVLTRSDKARGKSDNVPSEEVVKKMKNYWRQLLNAKLITQRKFDNLTKAERGGLSELDKAGFIKRQLVETRQITKHVAQILDSRMNTKYDENDKLIREVKVITLKSKLVSDFRKDFQFYKVREINNYHHAHDAYLNAVVGTALIKKYPKLESEFVYGDYKVYDVRKMIAKSEQEIGKATAKYFFYSNIMNFFKTEITLANGEIRKRPLIETNGETGEIVWDKGRDFATVRKVLSMPQVNIVKKTEVQTGGFSKESILPKRNSDKLIARKKDWDPKKYGGFDSPTVAYSVLVVAKVEKGKSKKLKSVKELLGITIMERSSFEKNPIDFLEAKGYKEVKKDLIIKLPKYSLFELENGRKRMLASAGELQKGNELALPSKYVNFLYLASHYEKLKGSPEDNEQKQLFVEQHKHYLDEIIEQISEFSKRVILADANLDKVLSAYNKHRDKPIREQAENIIHLFTLTNLGAPAAFKYFDTTIDRKRYTSTKEVLDATLIHQSITGLYETRIDLSQLGGDGGGSAGSAAGSGEFGGTLGDQGSRGSDPLPEPRVTLTVEGIPTEFLVNTGAEHSVLTKPMGKMGSKRTVVAGATGSKVYPWTTKRLLKIGQKQVTHSFLVIPECPAPLLGRDLLTKLKAQIQFSTEGPQVTWEDRPAMCLVLNLEEEYRLHEKPVPPSIDPSWLQLFPMVWAEKAGMGLANQVPPVVVELKSDASPVAVRQYPMSKEAREGIRPHIQRFLDLGILVPCQSPWNTPLLPVKKPGTNDYRPVQDLREVNKRVQDIHPTVPNPYNLLSSLPPSHTWYSVLDLKDAFFCLKLHPNSQPLFAFEWRDPEKGNTGQLTWTRLPQGFKNSPTLFNEALHRDLASFRALNPQVVMLQYVDDLLVAAPTYRDCKEGTRRLLQELSKLGYRVSAKKAQLCREEVTYLGYLLKGGKRWLTPARKATVMKIPTPTTPRQVREFLGTAGFCRLWIPGFASLAAPLYPLTRPKVPFTWTEAHQEAFGRIKEALLSAPALALPDLTKPFALYVDEKEGVARGVLTQTLGPWRRPVAYLSKKLDPVASGWPTCLKAIAAVALLLKDADKLTLGQNVLVIAPHNLESIVRQPPDRWMTNARMTHYQSLLLNERVSFAPPAILNPATLLPVESDDTPIHICSEILAEETGTRPDLRDQPLPGVPAWYTDGSSFIMDGRRQAGAAIVDNKRTVWASNLPEGTSAQKAELIALTQALRLAEGKSINIYTDSRYAFATAHVHGAIYKQRGWLTSAGKDIKNKEEILALLEAIHLPKRVAIIHCPGHQRGTDPVATGNRKADEAAKQAAQSTRILTETTKNAGKRTADGSEFEKRTADGSEFESPKKKAKVE

SEQ ID NO: 7716 - protein, 2097 aa, synthetic construct
MPAAKRVKLDGGDKKYSIGLDIGTNSVGWAVITDEYKVPSKKFKVLGNTDRHSIKKNLIGALLFDSGETAEATRLKRTARRRYTRRKNRICYLQEIFSNEMAKVDDSFFHRLEESFLVEEDKKHERHPIFGNIVDEVAYHEKYPTIYHLRKKLVDSTDKADLRLIYLALAHMIKFRGHFLIEGDLNPDNSDVDKLFIQLVQTYNQLFEENPINASGVDAKAILSARLSKSRRLENLIAQLPGEKKNGLFGNLIALSLGLTPNFKSNFDLAEDAKLQLSKDTYDDDLDNLLAQIGDQYADLFLAAKNLSDAILLSDILRVNTEITKAPLSASMIKRYDEHHQDLTLLKALVRQQLPEKYKEIFFDQSKNGYAGYIDGGASQEEFYKFIKPILEKMDGTEELLVKLNREDLLRKQRTFDNGSIPHQIHLGELHAILRRQEDFYPFLKDNREKIEKILTFRIPYYVGPLARGNSRFAWMTRKSEETITPWNFEEVVDKGASAQSFIERMTNFDKNLPNEKVLPKHSLLYEYFTVYNELTKVKYVTEGMRKPAFLSGEQKKAIVDLLFKTNRKVTVKQLKEDYFKKIECFDSVEISGVEDRFNASLGTYHDLLKIIKDKDFLDNEENEDILEDIVLTLTLFEDREMIEERLKTYAHLFDDKVMKQLKRRRYTGWGRLSRKLINGIRDKQSGKTILDFLKSDGFANRNFMQLIHDDSLTFKEDIQKAQVSGQGDSLHEHIANLAGSPAIKKGILQTVKVVDELVKVMGRHKPENIVIEMARENQTTQKGQKNSRERMKRIEEGIKELGSQILKEHPVENTQLQNEKLYLYYLQNGRDMYVDQELDINRLSDYDVDHIVPQSFLKDDSIDNKVLTRSDKARGKSDNVPSEEVVKKMKNYWRQLLNAKLITQRKFDNLTKAERGGLSELDKAGFIKRQLVETRQITKHVAQILDSRMNTKYDENDKLIREVKVITLKSKLVSDFRKDFQFYKVREINNYHHAHDAYLNAVVGTALIKKYPKLESEFVYGDYKVYDVRKMIAKSEQEIGKATAKYFFYSNIMNFFKTEITLANGEIRKRPLIETNGETGEIVWDKGRDFATVRKVLSMPQVNIVKKTEVQTGGFSKESILPKRNSDKLIARKKDWDPKKYGGFDSPTVAYSVLVVAKVEKGKSKKLKSVKELLGITIMERSSFEKNPIDFLEAKGYKEVKKDLIIKLPKYSLFELENGRKRMLASAGELQKGNELALPSKYVNFLYLASHYEKLKGSPEDNEQKQLFVEQHKHYLDEIIEQISEFSKRVILADANLDKVLSAYNKHRDKPIREQAENIIHLFTLTNLGAPAAFKYFDTTIDRKRYTSTKEVLDATLIHQSITGLYETRIDLSQLGGDGGGSAGSAAGSGEFGGTLNLEDEYRLYETSAEPEVSPGSTWLSDFPQAWAETGGMGLAVRQAPLIIPLKATSTPVSIKQYPMSQEAKLGIKPHIQRLLDQGILVPCQSPWNTPLLPVKKPGTNDYRPVQDLREVNKRVEDIHPTVPNPYNLLSGLPPSHRWYTVLDLKDAFFCLRLHPTSQPLFAFEWRDPGMGISGQLTWTRLPQGFKNSPTLFNEALHRDLADFRIQHPDLILLQYVDDILLAATSELDCQQGTRALLLTLGNLGYRASAKKAQLCQKQVKYLGYLLKEGQRWLTEARKETVMGQPTPKTPRQLREFLGTAGFCRLWIPGFAEMAAPLYPLTKPGTLFNWGPDQQKAYQEIKQALLTAPALGLPDLTKPFELFVDEKQGYAKGVLTQKLGPWRRPVAYLSKKLDPVAAGWPPCLRMVAAIAVLRKDAGKLTMGQPLVILAPHAVEALVKQPPDRWLSNARMTHYQAMLLDTDRVQFGPVVALNPATLLPLPEEGAPHDCLEILAETHGTRPDLTDQPIPDADHTWYTDGSSFLQEGQRKAGAAVTTETEVIWARALPAGTSAQRAELIALTQALKMAEGKRLNVYTDSRYAFATAHIHGEIYRRRGWLTSEGREIKNKSEILALLKALFLPKRLSIIHCLGHQKGDSAEARGNRLADQAAREAAIKTPPDTSTLLAGKRTADGSEFEKRTADGSEFESPKKKAKVE

SEQ ID NO: 7717 - protein, 2097 aa, synthetic construct
MPAAKRVKLDGGDKKYSIGLDIGTNSVGWAVITDEYKVPSKKFKVLGNTDRHSIKKNLIGALLFDSGETAEATRLKRTARRRYTRRKNRICYLQEIFSNEMAKVDDSFFHRLEESFLVEEDKKHERHPIFGNIVDEVAYHEKYPTIYHLRKKLVDSTDKADLRLIYLALAHMIKFRGHFLIEGDLNPDNSDVDKLFIQLVQTYNQLFEENPINASGVDAKAILSARLSKSRRLENLIAQLPGEKKNGLFGNLIALSLGLTPNFKSNFDLAEDAKLQLSKDTYDDDLDNLLAQIGDQYADLFLAAKNLSDAILLSDILRVNTEITKAPLSASMIKRYDEHHQDLTLLKALVRQQLPEKYKEIFFDQSKNGYAGYIDGGASQEEFYKFIKPILEKMDGTEELLVKLNREDLLRKQRTFDNGSIPHQIHLGELHAILRRQEDFYPFLKDNREKIEKILTFRIPYYVGPLARGNSRFAWMTRKSEETITPWNFEEVVDKGASAQSFIERMTNFDKNLPNEKVLPKHSLLYEYFTVYNELTKVKYVTEGMRKPAFLSGEQKKAIVDLLFKTNRKVTVKQLKEDYFKKIECFDSVEISGVEDRFNASLGTYHDLLKIIKDKDFLDNEENEDILEDIVLTLTLFEDREMIEERLKTYAHLFDDKVMKQLKRRRYTGWGRLSRKLINGIRDKQSGKTILDFLKSDGFANRNFMQLIHDDSLTFKEDIQKAQVSGQGDSLHEHIANLAGSPAIKKGILQTVKVVDELVKVMGRHKPENIVIEMARENQTTQKGQKNSRERMKRIEEGIKELGSQILKEHPVENTQLQNEKLYLYYLQNGRDMYVDQELDINRLSDYDVDHIVPQSFLKDDSIDNKVLTRSDKARGKSDNVPSEEVVKKMKNYWRQLLNAKLITQRKFDNLTKAERGGLSELDKAGFIKRQLVETRQITKHVAQILDSRMNTKYDENDKLIREVKVITLKSKLVSDFRKDFQFYKVREINNYHHAHDAYLNAVVGTALIKKYPKLESEFVYGDYKVYDVRKMIAKSEQEIGKATAKYFFYSNIMNFFKTEITLANGEIRKRPLIETNGETGEIVWDKGRDFATVRKVLSMPQVNIVKKTEVQTGGFSKESILPKRNSDKLIARKKDWDPKKYGGFDSPTVAYSVLVVAKVEKGKSKKLKSVKELLGITIMERSSFEKNPIDFLEAKGYKEVKKDLIIKLPKYSLFELENGRKRMLASAGELQKGNELALPSKYVNFLYLASHYEKLKGSPEDNEQKQLFVEQHKHYLDEIIEQISEFSKRVILADANLDKVLSAYNKHRDKPIREQAENIIHLFTLTNLGAPAAFKYFDTTIDRKRYTSTKEVLDATLIHQSITGLYETRIDLSQLGGDGGGSAGSAAGSGEFGGTLNIEDEHRLHETSKEPDVSLGSTWLSDFPQAWAETGGMGLAVRQAPLIIPLKATSTPVSIKQYPMSQEARLGIKPHIQRLLDQGILVPCQSPWNTPLLPVKKPGTNDYRPVQDLREVNKRVEDIHPTVPNPYNLLSGLPPSHQWYTVLDLKDAFFCLRLHPTSQPLFAFEWRDPEMGISGQLTWTRLPQGFKNSPTLFDEALHRDLADFRIQHPDLILLQYVDDLLLAATSELDCQQGTRALLQTLGNLGYRASAKKAQICQKQVKYLGYLLKEGQRWLTEARKETVMGQPTPKTPRQLREFLGTAGFCRLWIPGFAEMAAPLYPLTKTGTLFNWGPDQQKAYQEIKQALLTAPALGLPDLTKPFELFVDEKQGYAKGVLTQKLGPWRRPVAYLSKKLDPVAAGWPPCLRMVAAIAVLTKDAGKLTMGQPLVILAPHAVEALVKQPPDRWLSNARMTHYQALLLDTDRVQFGPVVALNPATLLPLPEEGLQHNCLDILAEAHGTRPDLTDQPLPDADHTWYTDGSSLLQEGQRKAGAAVTTETEVIWAKALPAGTSAQRAELIALTQALKMAEGKKLNVYTDSRYAFATAHIHGEIYRRRGLLTSEGKEIKNKDEILALLKALFLPKRLSIIHCPGHQKGHSAEARGNRMADQAARKAAITETPDTSTLLAGKRTADGSEFEKRTADGSEFESPKKKAKVE

SEQ ID NO: 7718 - protein, 2177 aa, synthetic construct
MPAAKRVKLDGGDKKYSIGLDIGTNSVGWAVITDEYKVPSKKFKVLGNTDRHSIKKNLIGALLFDSGETAEATRLKRTARRRYTRRKNRICYLQEIFSNEMAKVDDSFFHRLEESFLVEEDKKHERHPIFGNIVDEVAYHEKYPTIYHLRKKLVDSTDKADLRLIYLALAHMIKFRGHFLIEGDLNPDNSDVDKLFIQLVQTYNQLFEENPINASGVDAKAILSARLSKSRRLENLIAQLPGEKKNGLFGNLIALSLGLTPNFKSNFDLAEDAKLQLSKDTYDDDLDNLLAQIGDQYADLFLAAKNLSDAILLSDILRVNTEITKAPLSASMIKRYDEHHQDLTLLKALVRQQLPEKYKEIFFDQSKNGYAGYIDGGASQEEFYKFIKPILEKMDGTEELLVKLNREDLLRKQRTFDNGSIPHQIHLGELHAILRRQEDFYPFLKDNREKIEKILTFRIPYYVGPLARGNSRFAWMTRKSEETITPWNFEEVVDKGASAQSFIERMTNFDKNLPNEKVLPKHSLLYEYFTVYNELTKVKYVTEGMRKPAFLSGEQKKAIVDLLFKTNRKVTVKQLKEDYFKKIECFDSVEISGVEDRFNASLGTYHDLLKIIKDKDFLDNEENEDILEDIVLTLTLFEDREMIEERLKTYAHLFDDKVMKQLKRRRYTGWGRLSRKLINGIRDKQSGKTILDFLKSDGFANRNFMQLIHDDSLTFKEDIQKAQVSGQGDSLHEHIANLAGSPAIKKGILQTVKVVDELVKVMGRHKPENIVIEMARENQTTQKGQKNSRERMKRIEEGIKELGSQILKEHPVENTQLQNEKLYLYYLQNGRDMYVDQELDINRLSDYDVDHIVPQSFLKDDSIDNKVLTRSDKARGKSDNVPSEEVVKKMKNYWRQLLNAKLITQRKFDNLTKAERGGLSELDKAGFIKRQLVETRQITKHVAQILDSRMNTKYDENDKLIREVKVITLKSKLVSDFRKDFQFYKVREINNYHHAHDAYLNAVVGTALIKKYPKLESEFVYGDYKVYDVRKMIAKSEQEIGKATAKYFFYSNIMNFFKTEITLANGEIRKRPLIETNGETGEIVWDKGRDFATVRKVLSMPQVNIVKKTEVQTGGFSKESILPKRNSDKLIARKKDWDPKKYGGFDSPTVAYSVLVVAKVEKGKSKKLKSVKELLGITIMERSSFEKNPIDFLEAKGYKEVKKDLIIKLPKYSLFELENGRKRMLASAGELQKGNELALPSKYVNFLYLASHYEKLKGSPEDNEQKQLFVEQHKHYLDEIIEQISEFSKRVILADANLDKVLSAYNKHRDKPIREQAENIIHLFTLTNLGAPAAFKYFDTTIDRKRYTSTKEVLDATLIHQSITGLYETRIDLSQLGGDGGGSAGSAAGSGEFGGMDPLQLLQPLEAEIKGTKLKAHWNSGATITCVPQAFLEEEVPIKNIWIKTIHGEKEQPVYYLTFKIQGRKVEAEVISSPYDYILVSPSDIPWLMKKPLQLTTLVPLQEYEERLLKQTMLTGSYKEKLQSLFLKYDALWQHWENQVGHRRIKPHHIATGTVNPRPQKQYPINPKAKASIQTVINDLLKQGVLIQQNSIMNTPVYPVPKPDGKWRMVLDYREVNKTIPLIAAQNQHSAGILSSIFRGKYKTTLDLSNGFWAHSITPESYWLTAFTWLGQQYCWTRLPQGFLNSPALFNADVVDLLKEVPNVQVYVDDIYISHDDPREHLEQLEKVFSLLLNAGYVVSLKKSEIAQHEVEFLGFNITKEGRGLTETFKQKLLNITPPRDLKQLQSILGLLNFARNFIPNFSELVKPLYNIIATAPGKYITWTTDNSQQLQNIISMLNSAENLEERNPEVRLIMKVNTSPSAGYIRFYNEFAKRPIMYLNYVYTKAEVKFTNTEKLLTTIHKGLIKALDLGMGQEILVYSPIVSMTKIQKTPLPERKALPIRWITWMSYLEDPRIQFHYDKTLPELQQVPTVTDDIIAKIKHPSEFSMVFYTDGSAIKHPNVNKSHNAGMGIAQVQFKPEFTVINTWSIPLGDHTAQLAEVAAVEFACKKALKIDGPVLIVTDSFYVAESVNKELPYWQSNGFFNNKKKPLKHVSKWKSIADCIQLKPDIIIIHEKGHQPTASTFHTEGNNLADKLATQGSYVVNAGKRTADGSEFEKRTADGSEFESPKKKAKVE

SEQ ID NO: 7719 - protein, 2097 aa, synthetic construct
MPAAKRVKLDGGDKKYSIGLDIGTNSVGWAVITDEYKVPSKKFKVLGNTDRHSIKKNLIGALLFDSGETAEATRLKRTARRRYTRRKNRICYLQEIFSNEMAKVDDSFFHRLEESFLVEEDKKHERHPIFGNIVDEVAYHEKYPTIYHLRKKLVDSTDKADLRLIYLALAHMIKFRGHFLIEGDLNPDNSDVDKLFIQLVQTYNQLFEENPINASGVDAKAILSARLSKSRRLENLIAQLPGEKKNGLFGNLIALSLGLTPNFKSNFDLAEDAKLQLSKDTYDDDLDNLLAQIGDQYADLFLAAKNLSDAILLSDILRVNTEITKAPLSASMIKRYDEHHQDLTLLKALVRQQLPEKYKEIFFDQSKNGYAGYIDGGASQEEFYKFIKPILEKMDGTEELLVKLNREDLLRKQRTFDNGSIPHQIHLGELHAILRRQEDFYPFLKDNREKIEKILTFRIPYYVGPLARGNSRFAWMTRKSEETITPWNFEEVVDKGASAQSFIERMTNFDKNLPNEKVLPKHSLLYEYFTVYNELTKVKYVTEGMRKPAFLSGEQKKAIVDLLFKTNRKVTVKQLKEDYFKKIECFDSVEISGVEDRFNASLGTYHDLLKIIKDKDFLDNEENEDILEDIVLTLTLFEDREMIEERLKTYAHLFDDKVMKQLKRRRYTGWGRLSRKLINGIRDKQSGKTILDFLKSDGFANRNFMQLIHDDSLTFKEDIQKAQVSGQGDSLHEHIANLAGSPAIKKGILQTVKVVDELVKVMGRHKPENIVIEMARENQTTQKGQKNSRERMKRIEEGIKELGSQILKEHPVENTQLQNEKLYLYYLQNGRDMYVDQELDINRLSDYDVDHIVPQSFLKDDSIDNKVLTRSDKARGKSDNVPSEEVVKKMKNYWRQLLNAKLITQRKFDNLTKAERGGLSELDKAGFIKRQLVETRQITKHVAQILDSRMNTKYDENDKLIREVKVITLKSKLVSDFRKDFQFYKVREINNYHHAHDAYLNAVVGTALIKKYPKLESEFVYGDYKVYDVRKMIAKSEQEIGKATAKYFFYSNIMNFFKTEITLANGEIRKRPLIETNGETGEIVWDKGRDFATVRKVLSMPQVNIVKKTEVQTGGFSKESILPKRNSDKLIARKKDWDPKKYGGFDSPTVAYSVLVVAKVEKGKSKKLKSVKELLGITIMERSSFEKNPIDFLEAKGYKEVKKDLIIKLPKYSLFELENGRKRMLASAGELQKGNELALPSKYVNFLYLASHYEKLKGSPEDNEQKQLFVEQHKHYLDEIIEQISEFSKRVILADANLDKVLSAYNKHRDKPIREQAENIIHLFTLTNLGAPAAFKYFDTTIDRKRYTSTKEVLDATLIHQSITGLYETRIDLSQLGGDGGGSAGSAAGSGEFGGTLNIEDEYRLHETSKEPDVPLGSTWLSDFPQAWAETGGMGLAVRQAPLIIPLKATSTPVSIKQYPMSQEARLGIKPHIQRLLDQGILVPCQSPWNTPLLPVKKPGTNDYRPVQDLREVNKRVEDIHPTVPNPYNLLSGLPPSHQWYTVLDLKDAFFCLRLHPTSQPLFAFEWRDPEMGISGQLTWTRLPQGFKNSPTLFNEALHRDLADFRIQHPDLILLQYVDDLLLAATSEQDCQRGTRALLQTLGNLGYRASAKKAQICQKQVKYLGYLLKEGQRWLTEARKETVMGQPTPKTPRQLREFLGTAGFCRLWIPGFAEMAAPLYPLTKPGTLFNWGPDQQKAYQEIKQALLTAPALGLPDLTKPFELFVDEKQGYAKGVLTQKLGPWRRPVAYLSKKLDPVAAGWPPCLRMVAAIAVLTKDAGKLTMGQPLVILAPHAVEALVKQPPDRWLSNARMTHYQAMLLDTDRVQFGPVVALNPATLLPLPEKEAPHDCLEILAETHGTRPDLTDQPIPDADYTWYTDGSSFLQEGQRRAGAAVTTETEVIWARALPAGTSAQRAELIALTQALKMAEGKKLNVYTDSRYAFATAHVHGEIYRRRGWLTSEGREIKNKNEILALLKALFLPKRLSIIHCPGHQKGNSAEARGNRMADQAAREAAMKAVLETSTLLAGKRTADGSEFEKRTADGSEFESPKKKAKVE

SEQ ID NO: 7720 - protein, 2120 aa, synthetic construct
MPAAKRVKLDGGDKKYSIGLDIGTNSVGWAVITDEYKVPSKKFKVLGNTDRHSIKKNLIGALLFDSGETAEATRLKRTARRRYTRRKNRICYLQEIFSNEMAKVDDSFFHRLEESFLVEEDKKHERHPIFGNIVDEVAYHEKYPTIYHLRKKLVDSTDKADLRLIYLALAHMIKFRGHFLIEGDLNPDNSDVDKLFIQLVQTYNQLFEENPINASGVDAKAILSARLSKSRRLENLIAQLPGEKKNGLFGNLIALSLGLTPNFKSNFDLAEDAKLQLSKDTYDDDLDNLLAQIGDQYADLFLAAKNLSDAILLSDILRVNTEITKAPLSASMIKRYDEHHQDLTLLKALVRQQLPEKYKEIFFDQSKNGYAGYIDGGASQEEFYKFIKPILEKMDGTEELLVKLNREDLLRKQRTFDNGSIPHQIHLGELHAILRRQEDFYPFLKDNREKIEKILTFRIPYYVGPLARGNSRFAWMTRKSEETITPWNFEEVVDKGASAQSFIERMTNFDKNLPNEKVLPKHSLLYEYFTVYNELTKVKYVTEGMRKPAFLSGEQKKAIVDLLFKTNRKVTVKQLKEDYFKKIECFDSVEISGVEDRFNASLGTYHDLLKIIKDKDFLDNEENEDILEDIVLTLTLFEDREMIEERLKTYAHLFDDKVMKQLKRRRYTGWGRLSRKLINGIRDKQSGKTILDFLKSDGFANRNFMQLIHDDSLTFKEDIQKAQVSGQGDSLHEHIANLAGSPAIKKGILQTVKVVDELVKVMGRHKPENIVIEMARENQTTQKGQKNSRERMKRIEEGIKELGSQILKEHPVENTQLQNEKLYLYYLQNGRDMYVDQELDINRLSDYDVDHIVPQSFLKDDSIDNKVLTRSDKARGKSDNVPSEEVVKKMKNYWRQLLNAKLITQRKFDNLTKAERGGLSELDKAGFIKRQLVETRQITKHVAQILDSRMNTKYDENDKLIREVKVITLKSKLVSDFRKDFQFYKVREINNYHHAHDAYLNAVVGTALIKKYPKLESEFVYGDYKVYDVRKMIAKSEQEIGKATAKYFFYSNIMNFFKTEITLANGEIRKRPLIETNGETGEIVWDKGRDFATVRKVLSMPQVNIVKKTEVQTGGFSKESILPKRNSDKLIARKKDWDPKKYGGFDSPTVAYSVLVVAKVEKGKSKKLKSVKELLGITIMERSSFEKNPIDFLEAKGYKEVKKDLIIKLPKYSLFELENGRKRMLASAGELQKGNELALPSKYVNFLYLASHYEKLKGSPEDNEQKQLFVEQHKHYLDEIIEQISEFSKRVILADANLDKVLSAYNKHRDKPIREQAENIIHLFTLTNLGAPAAFKYFDTTIDRKRYTSTKEVLDATLIHQSITGLYETRIDLSQLGGDGGSGGSSGGSSGSETPGTSESATPESSGGSSGGSSGGTAPLEEEYRLFLEAPIQNVTLLEQWKREIPKVWAEINPPGLASTQAPIHVQLLSTALPVRVRQYPITLEAKRSLRETIRKFRAAGILRPVHSPWNTPLLPVRKSGTSEYRMVQDLREVNKRVETIHPTVPNPYTLLSLLPPDRIWYSVLDLKDAFFCIPLAPESQLIFAFEWADAEEGESGQLTWTRLPQGFKNSPTLFDEALNRDLQGFRLDHPSVSLLQYVDDLLIAADTQAACLSATRDLLMTLAELGYRVSGKKAQLCQEEVTYLGFKIHKGSRSLSNSRTQAILQIPVPKTKRQVREFLGTIGYCRLWIPGFAELAQPLYAATRGGNDPLVWGEKEEEAFQSLKLALTQPPALALPSLDKPFQLFVEETSGAAKGVLTQALGPWKRPVAYLSKRLDPVAAGWPRCLRAIAAAALLTREASKLTFGQDIEITSSHNLESLLRSPPDKWLTNARITQYQVLLLDPPRVRFKQTAALNPATLLPETDDTLPIHHCLDTLDSLTSTRPDLTDQPLAQAEATLFTDGSSYIRDGKRYAGAAVVTLDSVIWAEPLPIGTSAQKAELIALTKALEWSKDKSVNIYTDSRYAFATLHVHGMIYRERGLLTAGGKAIKNAPEILALLTAVWLPKRVAVMHCKGHQKDDAPTSTGNRRADEVAREVAIRPLSTQATISAGKRTADGSEFEKRTADGSEFESPKKKAKVE

SEQ ID NO: 7721 - protein, 2120 aa, synthetic construct
MPAAKRVKLDGGDKKYSIGLDIGTNSVGWAVITDEYKVPSKKFKVLGNTDRHSIKKNLIGALLFDSGETAEATRLKRTARRRYTRRKNRICYLQEIFSNEMAKVDDSFFHRLEESFLVEEDKKHERHPIFGNIVDEVAYHEKYPTIYHLRKKLVDSTDKADLRLIYLALAHMIKFRGHFLIEGDLNPDNSDVDKLFIQLVQTYNQLFEENPINASGVDAKAILSARLSKSRRLENLIAQLPGEKKNGLFGNLIALSLGLTPNFKSNFDLAEDAKLQLSKDTYDDDLDNLLAQIGDQYADLFLAAKNLSDAILLSDILRVNTEITKAPLSASMIKRYDEHHQDLTLLKALVRQQLPEKYKEIFFDQSKNGYAGYIDGGASQEEFYKFIKPILEKMDGTEELLVKLNREDLLRKQRTFDNGSIPHQIHLGELHAILRRQEDFYPFLKDNREKIEKILTFRIPYYVGPLARGNSRFAWMTRKSEETITPWNFEEVVDKGASAQSFIERMTNFDKNLPNEKVLPKHSLLYEYFTVYNELTKVKYVTEGMRKPAFLSGEQKKAIVDLLFKTNRKVTVKQLKEDYFKKIECFDSVEISGVEDRFNASLGTYHDLLKIIKDKDFLDNEENEDILEDIVLTLTLFEDREMIEERLKTYAHLFDDKVMKQLKRRRYTGWGRLSRKLINGIRDKQSGKTILDFLKSDGFANRNFMQLIHDDSLTFKEDIQKAQVSGQGDSLHEHIANLAGSPAIKKGILQTVKVVDELVKVMGRHKPENIVIEMARENQTTQKGQKNSRERMKRIEEGIKELGSQILKEHPVENTQLQNEKLYLYYLQNGRDMYVDQELDINRLSDYDVDHIVPQSFLKDDSIDNKVLTRSDKARGKSDNVPSEEVVKKMKNYWRQLLNAKLITQRKFDNLTKAERGGLSELDKAGFIKRQLVETRQITKHVAQILDSRMNTKYDENDKLIREVKVITLKSKLVSDFRKDFQFYKVREINNYHHAHDAYLNAVVGTALIKKYPKLESEFVYGDYKVYDVRKMIAKSEQEIGKATAKYFFYSNIMNFFKTEITLANGEIRKRPLIETNGETGEIVWDKGRDFATVRKVLSMPQVNIVKKTEVQTGGFSKESILPKRNSDKLIARKKDWDPKKYGGFDSPTVAYSVLVVAKVEKGKSKKLKSVKELLGITIMERSSFEKNPIDFLEAKGYKEVKKDLIIKLPKYSLFELENGRKRMLASAGELQKGNELALPSKYVNFLYLASHYEKLKGSPEDNEQKQLFVEQHKHYLDEIIEQISEFSKRVILADANLDKVLSAYNKHRDKPIREQAENIIHLFTLTNLGAPAAFKYFDTTIDRKRYTSTKEVLDATLIHQSITGLYETRIDLSQLGGDGGSGGSSGGSSGSETPGTSESATPESSGGSSGGSSGGTAPLEEEYRLFLEAPIQNVTLLEQWKREIPKVWAEINPPGLASTQAPIHVQLLSTALPVRVRQYPITLEAKRSLRETIRKFRAAGILRPVHSPWNTPLLPVRKSGTSEYRMVQDLREVNKRVETIHPTVPNPYTLLSLLPPDRIWYSVLDLKDAFFCIPLAPESQLIFAFEWADAEEGESGQLTWTRLPQGFKNSPTLFNEALNRDLQGFRLDHPSVSLLQYVDDLLIAADTQAACLSATRDLLMTLAELGYRVSGKKAQLCQEEVTYLGFKIHKGSRSLSNSRTQAILQIPVPKTKRQVREFLGTIGYCRLWIPGFAELAQPLYAATRPGNDPLVWGEKEEEAFQSLKLALTQPPALALPSLDKPFQLFVEETSGAAKGVLTQALGPWKRPVAYLSKRLDPVAAGWPRCLRAIAAAALLTREASKLTFGQDIEITSSHNLESLLRSPPDKWLTNARITQYQVLLLDPPRVRFKQTAALNPATLLPETDDTLPIHHCLDTLDSLTSTRPDLTDQPLAQAEATLFTDGSSYIRDGKRYAGAAVVTLDSVIWAEPLPIGTSAQKAELIALTKALEWSKDKSVNIYTDSRYAFATLHVHGMIYRERGWLTAGGKAIKNAPEILALLTAVWLPKRVAVMHCKGHQKDDAPTSTGNRRADEVAREVAIRPLSTQATISAGKRTADGSEFEKRTADGSEFESPKKKAKVE

SEQ ID NO: 7722 - protein, 2124 aa, synthetic construct
MPAAKRVKLDGGDKKYSIGLDIGTNSVGWAVITDEYKVPSKKFKVLGNTDRHSIKKNLIGALLFDSGETAEATRLKRTARRRYTRRKNRICYLQEIFSNEMAKVDDSFFHRLEESFLVEEDKKHERHPIFGNIVDEVAYHEKYPTIYHLRKKLVDSTDKADLRLIYLALAHMIKFRGHFLIEGDLNPDNSDVDKLFIQLVQTYNQLFEENPINASGVDAKAILSARLSKSRRLENLIAQLPGEKKNGLFGNLIALSLGLTPNFKSNFDLAEDAKLQLSKDTYDDDLDNLLAQIGDQYADLFLAAKNLSDAILLSDILRVNTEITKAPLSASMIKRYDEHHQDLTLLKALVRQQLPEKYKEIFFDQSKNGYAGYIDGGASQEEFYKFIKPILEKMDGTEELLVKLNREDLLRKQRTFDNGSIPHQIHLGELHAILRRQEDFYPFLKDNREKIEKILTFRIPYYVGPLARGNSRFAWMTRKSEETITPWNFEEVVDKGASAQSFIERMTNFDKNLPNEKVLPKHSLLYEYFTVYNELTKVKYVTEGMRKPAFLSGEQKKAIVDLLFKTNRKVTVKQLKEDYFKKIECFDSVEISGVEDRFNASLGTYHDLLKIIKDKDFLDNEENEDILEDIVLTLTLFEDREMIEERLKTYAHLFDDKVMKQLKRRRYTGWGRLSRKLINGIRDKQSGKTILDFLKSDGFANRNFMQLIHDDSLTFKEDIQKAQVSGQGDSLHEHIANLAGSPAIKKGILQTVKVVDELVKVMGRHKPENIVIEMARENQTTQKGQKNSRERMKRIEEGIKELGSQILKEHPVENTQLQNEKLYLYYLQNGRDMYVDQELDINRLSDYDVDHIVPQSFLKDDSIDNKVLTRSDKARGKSDNVPSEEVVKKMKNYWRQLLNAKLITQRKFDNLTKAERGGLSELDKAGFIKRQLVETRQITKHVAQILDSRMNTKYDENDKLIREVKVITLKSKLVSDFRKDFQFYKVREINNYHHAHDAYLNAVVGTALIKKYPKLESEFVYGDYKVYDVRKMIAKSEQEIGKATAKYFFYSNIMNFFKTEITLANGEIRKRPLIETNGETGEIVWDKGRDFATVRKVLSMPQVNIVKKTEVQTGGFSKESILPKRNSDKLIARKKDWDPKKYGGFDSPTVAYSVLVVAKVEKGKSKKLKSVKELLGITIMERSSFEKNPIDFLEAKGYKEVKKDLIIKLPKYSLFELENGRKRMLASAGELQKGNELALPSKYVNFLYLASHYEKLKGSPEDNEQKQLFVEQHKHYLDEIIEQISEFSKRVILADANLDKVLSAYNKHRDKPIREQAENIIHLFTLTNLGAPAAFKYFDTTIDRKRYTSTKEVLDATLIHQSITGLYETRIDLSQLGGDGGSGGSSGGSSGSETPGTSESATPESSGGSSGGSSGGTVSLQDEHRLFDIPVTTSLPDVWLQDFPQAWAETGGLGRAKCQAPIIIDLKPTAVPVSIKQYPMSLEAHMGIRQHIIKFLELGVLRPCRSPWNTPLLPVKKPGTQDYRPVQDLREINKRTVDIHPTVPNPYNLLSTLKPDYSWYTVLDLKDAFFCLPLAPQSQELFAFEWKDPERGISGQLTWTRLPQGFKNSPTLFDEALHRDLTDFRTQHPEVTLLQYVDDLLLAAPTKKACTQGTRHLLQELGEKGYRASAKKAQICQTKVTYLGYILSEGKRWLTPGRIETVARIPPPRNPREVREFLGTAGFCRLWIPGFAELAAPLYALTKESTPFTWQTEHQLAFEALKKALLSAPALGLPDTSKPFTLFLDERQGIAKGVLTQKLGPWKRPVAYLSKKLDPVAAGWPPCLRIMAATAMLVKDSAKLTLGQPLTVITPHTLEAIVRQPPDRWITNARLTHYQALLLDTDRVQFGPPVTLNPATLLPVPENQPSPHDCRQVLAETHGTREDLKDQELPDADHTWYTDGSSYLDSGTRRAGAAVVDGHNTIWAQSLPPGTSAQKAELIALTKALELSKGKKANIYTDSRYAFATAHTHGSIYERRGLLTSEGKEIKNKAEIIALLKALFLPQEVAIIHCPGHQKGQDPVAVGNRQADRVARQAAMAEVLTLATEPDNTSHITAGKRTADGSEFEKRTADGSEFESPKKKAKVE

SEQ ID NO: 7723 - protein, 2124 aa, synthetic construct
MPAAKRVKLDGGDKKYSIGLDIGTNSVGWAVITDEYKVPSKKFKVLGNTDRHSIKKNLIGALLFDSGETAEATRLKRTARRRYTRRKNRICYLQEIFSNEMAKVDDSFFHRLEESFLVEEDKKHERHPIFGNIVDEVAYHEKYPTIYHLRKKLVDSTDKADLRLIYLALAHMIKFRGHFLIEGDLNPDNSDVDKLFIQLVQTYNQLFEENPINASGVDAKAILSARLSKSRRLENLIAQLPGEKKNGLFGNLIALSLGLTPNFKSNFDLAEDAKLQLSKDTYDDDLDNLLAQIGDQYADLFLAAKNLSDAILLSDILRVNTEITKAPLSASMIKRYDEHHQDLTLLKALVRQQLPEKYKEIFFDQSKNGYAGYIDGGASQEEFYKFIKPILEKMDGTEELLVKLNREDLLRKQRTFDNGSIPHQIHLGELHAILRRQEDFYPFLKDNREKIEKILTFRIPYYVGPLARGNSRFAWMTRKSEETITPWNFEEVVDKGASAQSFIERMTNFDKNLPNEKVLPKHSLLYEYFTVYNELTKVKYVTEGMRKPAFLSGEQKKAIVDLLFKTNRKVTVKQLKEDYFKKIECFDSVEISGVEDRFNASLGTYHDLLKIIKDKDFLDNEENEDILEDIVLTLTLFEDREMIEERLKTYAHLFDDKVMKQLKRRRYTGWGRLSRKLINGIRDKQSGKTILDFLKSDGFANRNFMQLIHDDSLTFKEDIQKAQVSGQGDSLHEHIANLAGSPAIKKGILQTVKVVDELVKVMGRHKPENIVIEMARENQTTQKGQKNSRERMKRIEEGIKELGSQILKEHPVENTQLQNEKLYLYYLQNGRDMYVDQELDINRLSDYDVDHIVPQSFLKDDSIDNKVLTRSDKARGKSDNVPSEEVVKKMKNYWRQLLNAKLITQRKFDNLTKAERGGLSELDKAGFIKRQLVETRQITKHVAQILDSRMNTKYDENDKLIREVKVITLKSKLVSDFRKDFQFYKVREINNYHHAHDAYLNAVVGTALIKKYPKLESEFVYGDYKVYDVRKMIAKSEQEIGKATAKYFFYSNIMNFFKTEITLANGEIRKRPLIETNGETGEIVWDKGRDFATVRKVLSMPQVNIVKKTEVQTGGFSKESILPKRNSDKLIARKKDWDPKKYGGFDSPTVAYSVLVVAKVEKGKSKKLKSVKELLGITIMERSSFEKNPIDFLEAKGYKEVKKDLIIKLPKYSLFELENGRKRMLASAGELQKGNELALPSKYVNFLYLASHYEKLKGSPEDNEQKQLFVEQHKHYLDEIIEQISEFSKRVILADANLDKVLSAYNKHRDKPIREQAENIIHLFTLTNLGAPAAFKYFDTTIDRKRYTSTKEVLDATLIHQSITGLYETRIDLSQLGGDGGSGGSSGGSSGSETPGTSESATPESSGGSSGGSSGGTVSLQDEHRLFDIPVTTSLPDVWLQDFPQAWAETGGLGRAKCQAPIIIDLKPTAVPVSIKQYPMSLEAHMGIRQHIIKFLELGVLRPCRSPWNTPLLPVKKPGTQDYRPVQDLREINKRTVDIHPTVPNPYNLLSTLKPDYSWYTVLDLKDAFFCLPLAPQSQELFAFEWKDPERGISGQLTWTRLPQGFKNSPTLFNEALHRDLTDFRTQHPEVTLLQYVDDLLLAAPTKKACTQGTRHLLQELGEKGYRASAKKAQICQTKVTYLGYILSEGKRWLTPGRIETVARIPPPRNPREVREFLGTAGFCRLWIPGFAELAAPLYALTKPSTPFTWQTEHQLAFEALKKALLSAPALGLPDTSKPFTLFLDERQGIAKGVLTQKLGPWKRPVAYLSKKLDPVAAGWPPCLRIMAATAMLVKDSAKLTLGQPLTVITPHTLEAIVRQPPDRWITNARLTHYQALLLDTDRVQFGPPVTLNPATLLPVPENQPSPHDCRQVLAETHGTREDLKDQELPDADHTWYTDGSSYLDSGTRRAGAAVVDGHNTIWAQSLPPGTSAQKAELIALTKALELSKGKKANIYTDSRYAFATAHTHGSIYERRGWLTSEGKEIKNKAEIIALLKALFLPQEVAIIHCPGHQKGQDPVAVGNRQADRVARQAAMAEVLTLATEPDNTSHITAGKRTADGSEFEKRTADGSEFESPKKKAKVE

SEQ ID NO: 7724 - protein, 2109 aa, synthetic construct
MPAAKRVKLDGGDKKYSIGLDIGTNSVGWAVITDEYKVPSKKFKVLGNTDRHSIKKNLIGALLFDSGETAEATRLKRTARRRYTRRKNRICYLQEIFSNEMAKVDDSFFHRLEESFLVEEDKKHERHPIFGNIVDEVAYHEKYPTIYHLRKKLVDSTDKADLRLIYLALAHMIKFRGHFLIEGDLNPDNSDVDKLFIQLVQTYNQLFEENPINASGVDAKAILSARLSKSRRLENLIAQLPGEKKNGLFGNLIALSLGLTPNFKSNFDLAEDAKLQLSKDTYDDDLDNLLAQIGDQYADLFLAAKNLSDAILLSDILRVNTEITKAPLSASMIKRYDEHHQDLTLLKALVRQQLPEKYKEIFFDQSKNGYAGYIDGGASQEEFYKFIKPILEKMDGTEELLVKLNREDLLRKQRTFDNGSIPHQIHLGELHAILRRQEDFYPFLKDNREKIEKILTFRIPYYVGPLARGNSRFAWMTRKSEETITPWNFEEVVDKGASAQSFIERMTNFDKNLPNEKVLPKHSLLYEYFTVYNELTKVKYVTEGMRKPAFLSGEQKKAIVDLLFKTNRKVTVKQLKEDYFKKIECFDSVEISGVEDRFNASLGTYHDLLKIIKDKDFLDNEENEDILEDIVLTLTLFEDREMIEERLKTYAHLFDDKVMKQLKRRRYTGWGRLSRKLINGIRDKQSGKTILDFLKSDGFANRNFMQLIHDDSLTFKEDIQKAQVSGQGDSLHEHIANLAGSPAIKKGILQTVKVVDELVKVMGRHKPENIVIEMARENQTTQKGQKNSRERMKRIEEGIKELGSQILKEHPVENTQLQNEKLYLYYLQNGRDMYVDQELDINRLSDYDVDHIVPQSFLKDDSIDNKVLTRSDKARGKSDNVPSEEVVKKMKNYWRQLLNAKLITQRKFDNLTKAERGGLSELDKAGFIKRQLVETRQITKHVAQILDSRMNTKYDENDKLIREVKVITLKSKLVSDFRKDFQFYKVREINNYHHAHDAYLNAVVGTALIKKYPKLESEFVYGDYKVYDVRKMIAKSEQEIGKATAKYFFYSNIMNFFKTEITLANGEIRKRPLIETNGETGEIVWDKGRDFATVRKVLSMPQVNIVKKTEVQTGGFSKESILPKRNSDKLIARKKDWDPKKYGGFDSPTVAYSVLVVAKVEKGKSKKLKSVKELLGITIMERSSFEKNPIDFLEAKGYKEVKKDLIIKLPKYSLFELENGRKRMLASAGELQKGNELALPSKYVNFLYLASHYEKLKGSPEDNEQKQLFVEQHKHYLDEIIEQISEFSKRVILADANLDKVLSAYNKHRDKPIREQAENIIHLFTLTNLGAPAAFKYFDTTIDRKRYTSTKEVLDATLIHQSITGLYETRIDLSQLGGDGGSGGSSGGSSGSETPGTSESATPESSGGSSGGSSGGVPWILKKPLELTIKLDLEEQQGTLLNNSILSKKGKEELKQLFEKYSALWQSWENQVGHRRIRPHKIATGTVKPTPQKQYHINPKAKPDIQIVINDLLKQGVLIQKESTMNTPVYPVPKPNGRWRMVLDYRAVNKVTPLIAVQNQHSYGILGSLFKGRYKTTIDLSNGFWAHPIVPEDYWITAFTWQGKQYCWTVLPQGFLNSPGLFTGDVVDLLQGIPNVEVYVDDVYISHDSEKEHLEYLDILFNRLKEAGYIISLKKSNIANSIVDFLGFQITNEGRGLTDTFKEKLENITAPTTLKQLQSILGLLNFARNFIPDFTELIAPLYALIPKSTKNYVPWQIEHSTTLETLITKLNGAEYLQGRKGDKTLIMKVNASYTTGYIRYYNEGEKKPISYVSIVFSKTELKFTELEKLLTTVHKGLLKALDLSMGQNIHVYSPIVSMQNIQKTPQTAKKALASRWLSWLSYLEDPRIRFFYDPQMPALKDLPAVDTGKDNKKHPSNFQHIFYTDGSAITSPTKEGHLNAGMGIVYFINKDGNLQKQQEWSISLGNHTAQFAEIAAFEFALKKCLPLGGNILVVTDSNYVAKAYNEELDVWASNGFVNNRKKPLKHISKWKSVADLKRLRPDVVVTHEPGHQKLDSSPHAYGNNLADQLATQASFKVHAGKRTADGSEFEKRTADGSEFESPKKKAKVE

SEQ ID NO: 7725 - protein, 2109 aa, synthetic construct
MPAAKRVKLDGGDKKYSIGLDIGTNSVGWAVITDEYKVPSKKFKVLGNTDRHSIKKNLIGALLFDSGETAEATRLKRTARRRYTRRKNRICYLQEIFSNEMAKVDDSFFHRLEESFLVEEDKKHERHPIFGNIVDEVAYHEKYPTIYHLRKKLVDSTDKADLRLIYLALAHMIKFRGHFLIEGDLNPDNSDVDKLFIQLVQTYNQLFEENPINASGVDAKAILSARLSKSRRLENLIAQLPGEKKNGLFGNLIALSLGLTPNFKSNFDLAEDAKLQLSKDTYDDDLDNLLAQIGDQYADLFLAAKNLSDAILLSDILRVNTEITKAPLSASMIKRYDEHHQDLTLLKALVRQQLPEKYKEIFFDQSKNGYAGYIDGGASQEEFYKFIKPILEKMDGTEELLVKLNREDLLRKQRTFDNGSIPHQIHLGELHAILRRQEDFYPFLKDNREKIEKILTFRIPYYVGPLARGNSRFAWMTRKSEETITPWNFEEVVDKGASAQSFIERMTNFDKNLPNEKVLPKHSLLYEYFTVYNELTKVKYVTEGMRKPAFLSGEQKKAIVDLLFKTNRKVTVKQLKEDYFKKIECFDSVEISGVEDRFNASLGTYHDLLKIIKDKDFLDNEENEDILEDIVLTLTLFEDREMIEERLKTYAHLFDDKVMKQLKRRRYTGWGRLSRKLINGIRDKQSGKTILDFLKSDGFANRNFMQLIHDDSLTFKEDIQKAQVSGQGDSLHEHIANLAGSPAIKKGILQTVKVVDELVKVMGRHKPENIVIEMARENQTTQKGQKNSRERMKRIEEGIKELGSQILKEHPVENTQLQNEKLYLYYLQNGRDMYVDQELDINRLSDYDVDHIVPQSFLKDDSIDNKVLTRSDKARGKSDNVPSEEVVKKMKNYWRQLLNAKLITQRKFDNLTKAERGGLSELDKAGFIKRQLVETRQITKHVAQILDSRMNTKYDENDKLIREVKVITLKSKLVSDFRKDFQFYKVREINNYHHAHDAYLNAVVGTALIKKYPKLESEFVYGDYKVYDVRKMIAKSEQEIGKATAKYFFYSNIMNFFKTEITLANGEIRKRPLIETNGETGEIVWDKGRDFATVRKVLSMPQVNIVKKTEVQTGGFSKESILPKRNSDKLIARKKDWDPKKYGGFDSPTVAYSVLVVAKVEKGKSKKLKSVKELLGITIMERSSFEKNPIDFLEAKGYKEVKKDLIIKLPKYSLFELENGRKRMLASAGELQKGNELALPSKYVNFLYLASHYEKLKGSPEDNEQKQLFVEQHKHYLDEIIEQISEFSKRVILADANLDKVLSAYNKHRDKPIREQAENIIHLFTLTNLGAPAAFKYFDTTIDRKRYTSTKEVLDATLIHQSITGLYETRIDLSQLGGDGGSGGSSGGSSGSETPGTSESATPESSGGSSGGSSGGVPWLTQQPLQLTILVPLQEYQEKILSKTALPEDQKQQLKTLFVKYDNLWQHWENQVGHRKIRPHNIATGDYPPRPQKQYPINPKAKPSIQIVIDDLLKQGVLTPQNSTMNTPVYPVPKPDGRWRMVLDYREVNKTIPLTAAQNQHSAGILATIVRQKYKTTLDLANGFWAHPITPESYWLTAFTWQGKQYCWTRLPQGFLNSPALFNADVVDLLKEIPNVQVYVDDIYLSHDDPKEHVQQLEKVFQILLQAGYVVSLKKSEIGQKTVEFLGFNITKEGRGLTDTFKTKLLNITPPKDLKQLQSILGLLNFARNFIPNFAELVQPLYNLIAPAKGKYIEWSEENTKQLNMVIEALNTASNLEERLPEQRLVIKVNTSPSAGYVRYYNETGKKPIMYLNYVFSKAELKFSMLEKLLTTMHKALIKAMDLAMGQEILVYSPIVSMTKIQKTPLPERKALPIRWITWMTYLEDPRIQFHYDKTLPELKHIPDVYTSSQSPVKHPSQYEGVFYTDGSAIKSPDPTKSNNAGMGIVHATYKPEYQVLNQWSIPLGNHTAQMAEIAAVEFACKKALKIPGPVLVITDSFYVAESANKELPYWKSNGFVNNKKKPLKHISKWKSIAECLSMKPDITIQHEKGISLQIPVFILKGNALADKLATQGSYVVNAGKRTADGSEFEKRTADGSEFESPKKKAKVE

SEQ ID NO: 7726 - protein, 2198 aa, synthetic construct
MPAAKRVKLDGGDKKYSIGLDIGTNSVGWAVITDEYKVPSKKFKVLGNTDRHSIKKNLIGALLFDSGETAEATRLKRTARRRYTRRKNRICYLQEIFSNEMAKVDDSFFHRLEESFLVEEDKKHERHPIFGNIVDEVAYHEKYPTIYHLRKKLVDSTDKADLRLIYLALAHMIKFRGHFLIEGDLNPDNSDVDKLFIQLVQTYNQLFEENPINASGVDAKAILSARLSKSRRLENLIAQLPGEKKNGLFGNLIALSLGLTPNFKSNFDLAEDAKLQLSKDTYDDDLDNLLAQIGDQYADLFLAAKNLSDAILLSDILRVNTEITKAPLSASMIKRYDEHHQDLTLLKALVRQQLPEKYKEIFFDQSKNGYAGYIDGGASQEEFYKFIKPILEKMDGTEELLVKLNREDLLRKQRTFDNGSIPHQIHLGELHAILRRQEDFYPFLKDNREKIEKILTFRIPYYVGPLARGNSRFAWMTRKSEETITPWNFEEVVDKGASAQSFIERMTNFDKNLPNEKVLPKHSLLYEYFTVYNELTKVKYVTEGMRKPAFLSGEQKKAIVDLLFKTNRKVTVKQLKEDYFKKIECFDSVEISGVEDRFNASLGTYHDLLKIIKDKDFLDNEENEDILEDIVLTLTLFEDREMIEERLKTYAHLFDDKVMKQLKRRRYTGWGRLSRKLINGIRDKQSGKTILDFLKSDGFANRNFMQLIHDDSLTFKEDIQKAQVSGQGDSLHEHIANLAGSPAIKKGILQTVKVVDELVKVMGRHKPENIVIEMARENQTTQKGQKNSRERMKRIEEGIKELGSQILKEHPVENTQLQNEKLYLYYLQNGRDMYVDQELDINRLSDYDVDHIVPQSFLKDDSIDNKVLTRSDKARGKSDNVPSEEVVKKMKNYWRQLLNAKLITQRKFDNLTKAERGGLSELDKAGFIKRQLVETRQITKHVAQILDSRMNTKYDENDKLIREVKVITLKSKLVSDFRKDFQFYKVREINNYHHAHDAYLNAVVGTALIKKYPKLESEFVYGDYKVYDVRKMIAKSEQEIGKATAKYFFYSNIMNFFKTEITLANGEIRKRPLIETNGETGEIVWDKGRDFATVRKVLSMPQVNIVKKTEVQTGGFSKESILPKRNSDKLIARKKDWDPKKYGGFDSPTVAYSVLVVAKVEKGKSKKLKSVKELLGITIMERSSFEKNPIDFLEAKGYKEVKKDLIIKLPKYSLFELENGRKRMLASAGELQKGNELALPSKYVNFLYLASHYEKLKGSPEDNEQKQLFVEQHKHYLDEIIEQISEFSKRVILADANLDKVLSAYNKHRDKPIREQAENIIHLFTLTNLGAPAAFKYFDTTIDRKRYTSTKEVLDATLIHQSITGLYETRIDLSQLGGDGGSGGSSGGSSGSETPGTSESATPESSGGSSGGSSGGMNPLQLLQPLPAEIKGTKLLAHWNSGATITCIPESFLEDEQPIKKTLIKTIHGEKQQNVYYVTFKVKGRKVEAEVIASPYEYILLSPTDVPWLTQQPLQLTILVPLQEYQEKILSKTALPEDQKQQLKTLFVKYDNLWQHWENQVGHRKIRPHNIATGDYPPRPQKQYPINPKAKPSIQIVIDDLLKQGVLTPQNSTMNTPVYPVPKPDGRWRMVLDYREVNKTIPLTAAQNQHSAGILATIVRQKYKTTLDLANGFWAHPITPESYWLTAFTWQGKQYCWTRLPQGFLNSPALFNADVVDLLKEIPNVQVYVDDIYLSHDDPKEHVQQLEKVFQILLQAGYVVSLKKSEIGQKTVEFLGFNITKEGRGLTDTFKTKLLNITPPKDLKQLQSILGLLNFARNFIPNFAELVQPLYNLIAPAKGKYIEWSEENTKQLNMVIEALNTASNLEERLPEQRLVIKVNTSPSAGYVRYYNETGKKPIMYLNYVFSKAELKFSMLEKLLTTMHKALIKAMDLAMGQEILVYSPIVSMTKIQKTPLPERKALPIRWITWMTYLEDPRIQFHYDKTLPELKHIPDVYTSSQSPVKHPSQYEGVFYTDGSAIKSPDPTKSNNAGMGIVHATYKPEYQVLNQWSIPLGNHTAQMAEIAAVEFACKKALKIPGPVLVITDSFYVAESANKELPYWKSNGFVNNKKKPLKHISKWKSIAECLSMKPDITIQHEKGISLQIPVFILKGNALADKLATQGSYVVNAGKRTADGSEFEKRTADGSEFESPKKKAKVE

SEQ ID NO: 7727 - protein, 2149 aa, synthetic construct
MPAAKRVKLDGGDKKYSIGLDIGTNSVGWAVITDEYKVPSKKFKVLGNTDRHSIKKNLIGALLFDSGETAEATRLKRTARRRYTRRKNRICYLQEIFSNEMAKVDDSFFHRLEESFLVEEDKKHERHPIFGNIVDEVAYHEKYPTIYHLRKKLVDSTDKADLRLIYLALAHMIKFRGHFLIEGDLNPDNSDVDKLFIQLVQTYNQLFEENPINASGVDAKAILSARLSKSRRLENLIAQLPGEKKNGLFGNLIALSLGLTPNFKSNFDLAEDAKLQLSKDTYDDDLDNLLAQIGDQYADLFLAAKNLSDAILLSDILRVNTEITKAPLSASMIKRYDEHHQDLTLLKALVRQQLPEKYKEIFFDQSKNGYAGYIDGGASQEEFYKFIKPILEKMDGTEELLVKLNREDLLRKQRTFDNGSIPHQIHLGELHAILRRQEDFYPFLKDNREKIEKILTFRIPYYVGPLARGNSRFAWMTRKSEETITPWNFEEVVDKGASAQSFIERMTNFDKNLPNEKVLPKHSLLYEYFTVYNELTKVKYVTEGMRKPAFLSGEQKKAIVDLLFKTNRKVTVKQLKEDYFKKIECFDSVEISGVEDRFNASLGTYHDLLKIIKDKDFLDNEENEDILEDIVLTLTLFEDREMIEERLKTYAHLFDDKVMKQLKRRRYTGWGRLSRKLINGIRDKQSGKTILDFLKSDGFANRNFMQLIHDDSLTFKEDIQKAQVSGQGDSLHEHIANLAGSPAIKKGILQTVKVVDELVKVMGRHKPENIVIEMARENQTTQKGQKNSRERMKRIEEGIKELGSQILKEHPVENTQLQNEKLYLYYLQNGRDMYVDQELDINRLSDYDVDHIVPQSFLKDDSIDNKVLTRSDKARGKSDNVPSEEVVKKMKNYWRQLLNAKLITQRKFDNLTKAERGGLSELDKAGFIKRQLVETRQITKHVAQILDSRMNTKYDENDKLIREVKVITLKSKLVSDFRKDFQFYKVREINNYHHAHDAYLNAVVGTALIKKYPKLESEFVYGDYKVYDVRKMIAKSEQEIGKATAKYFFYSNIMNFFKTEITLANGEIRKRPLIETNGETGEIVWDKGRDFATVRKVLSMPQVNIVKKTEVQTGGFSKESILPKRNSDKLIARKKDWDPKKYGGFDSPTVAYSVLVVAKVEKGKSKKLKSVKELLGITIMERSSFEKNPIDFLEAKGYKEVKKDLIIKLPKYSLFELENGRKRMLASAGELQKGNELALPSKYVNFLYLASHYEKLKGSPEDNEQKQLFVEQHKHYLDEIIEQISEFSKRVILADANLDKVLSAYNKHRDKPIREQAENIIHLFTLTNLGAPAAFKYFDTTIDRKRYTSTKEVLDATLIHQSITGLYETRIDLSQLGGDGGSGGSSGGSSGSETPGTSESATPESSGGSSGGSSGGLLGRDLLTKLKAQIQFSTEGPQVTWEDRPAMCLVLNLEEEYRLHEKPVPPSIDPSWLQLFPMVWAEKAGMGLANQVPPVVVELKSDASPVAVRQYPMSKEAREGIRPHIQRFLDLGILVPCQSPWNTPLLPVKKPGTNDYRPVQDLREVNKRVQDIHPTVPNPYNLLSSLPPSHTWYSVLDLKDAFFCLKLHPNSQPLFAFEWRDPEKGNTGQLTWTRLPQGFKNSPTLFDEALHRDLASFRALNPQVVMLQYVDDLLVAAPTYRDCKEGTRRLLQELSKLGYRVSAKKAQLCREEVTYLGYLLKGGKRWLTPARKATVMKIPTPTTPRQVREFLGTAGFCRLWIPGFASLAAPLYPLTREKVPFTWTEAHQEAFGRIKEALLSAPALALPDLTKPFALYVDEKEGVARGVLTQTLGPWRRPVAYLSKKLDPVASGWPTCLKAIAAVALLLKDADKLTLGQNVLVIAPHNLESIVRQPPDRWMTNARMTHYQSLLLNERVSFAPPAILNPATLLPVESDDTPIHICSEILAEETGTRPDLRDQPLPGVPAWYTDGSSFIMDGRRQAGAAIVDNKRTVWASNLPEGTSAQKAELIALTQALRLAEGKSINIYTDSRYAFATAHVHGAIYKQRGLLTSAGKDIKNKEEILALLEAIHLPKRVAIIHCPGHQRGTDPVATGNRKADEAAKQAAQSTRILTETTKNAGKRTADGSEFEKRTADGSEFESPKKKAKVE

SEQ ID NO: 7728 - protein, 2149 aa, synthetic construct
MPAAKRVKLDGGDKKYSIGLDIGTNSVGWAVITDEYKVPSKKFKVLGNTDRHSIKKNLIGALLFDSGETAEATRLKRTARRRYTRRKNRICYLQEIFSNEMAKVDDSFFHRLEESFLVEEDKKHERHPIFGNIVDEVAYHEKYPTIYHLRKKLVDSTDKADLRLIYLALAHMIKFRGHFLIEGDLNPDNSDVDKLFIQLVQTYNQLFEENPINASGVDAKAILSARLSKSRRLENLIAQLPGEKKNGLFGNLIALSLGLTPNFKSNFDLAEDAKLQLSKDTYDDDLDNLLAQIGDQYADLFLAAKNLSDAILLSDILRVNTEITKAPLSASMIKRYDEHHQDLTLLKALVRQQLPEKYKEIFFDQSKNGYAGYIDGGASQEEFYKFIKPILEKMDGTEELLVKLNREDLLRKQRTFDNGSIPHQIHLGELHAILRRQEDFYPFLKDNREKIEKILTFRIPYYVGPLARGNSRFAWMTRKSEETITPWNFEEVVDKGASAQSFIERMTNFDKNLPNEKVLPKHSLLYEYFTVYNELTKVKYVTEGMRKPAFLSGEQKKAIVDLLFKTNRKVTVKQLKEDYFKKIECFDSVEISGVEDRFNASLGTYHDLLKIIKDKDFLDNEENEDILEDIVLTLTLFEDREMIEERLKTYAHLFDDKVMKQLKRRRYTGWGRLSRKLINGIRDKQSGKTILDFLKSDGFANRNFMQLIHDDSLTFKEDIQKAQVSGQGDSLHEHIANLAGSPAIKKGILQTVKVVDELVKVMGRHKPENIVIEMARENQTTQKGQKNSRERMKRIEEGIKELGSQILKEHPVENTQLQNEKLYLYYLQNGRDMYVDQELDINRLSDYDVDHIVPQSFLKDDSIDNKVLTRSDKARGKSDNVPSEEVVKKMKNYWRQLLNAKLITQRKFDNLTKAERGGLSELDKAGFIKRQLVETRQITKHVAQILDSRMNTKYDENDKLIREVKVITLKSKLVSDFRKDFQFYKVREINNYHHAHDAYLNAVVGTALIKKYPKLESEFVYGDYKVYDVRKMIAKSEQEIGKATAKYFFYSNIMNFFKTEITLANGEIRKRPLIETNGETGEIVWDKGRDFATVRKVLSMPQVNIVKKTEVQTGGFSKESILPKRNSDKLIARKKDWDPKKYGGFDSPTVAYSVLVVAKVEKGKSKKLKSVKELLGITIMERSSFEKNPIDFLEAKGYKEVKKDLIIKLPKYSLFELENGRKRMLASAGELQKGNELALPSKYVNFLYLASHYEKLKGSPEDNEQKQLFVEQHKHYLDEIIEQISEFSKRVILADANLDKVLSAYNKHRDKPIREQAENIIHLFTLTNLGAPAAFKYFDTTIDRKRYTSTKEVLDATLIHQSITGLYETRIDLSQLGGDGGSGGSSGGSSGSETPGTSESATPESSGGSSGGSSGGLLGRDLLTKLKAQIQFSTEGPQVTWEDRPAMCLVLNLEEEYRLHEKPVPPSIDPSWLQLFPMVWAEKAGMGLANQVPPVVVELKSDASPVAVRQYPMSKEAREGIRPHIQRFLDLGILVPCQSPWNTPLLPVKKPGTNDYRPVQDLREVNKRVQDIHPTVPNPYNLLSSLPPSHTWYSVLDLKDAFFCLKLHPNSQPLFAFEWRDPEKGNTGQLTWTRLPQGFKNSPTLFNEALHRDLASFRALNPQVVMLQYVDDLLVAAPTYRDCKEGTRRLLQELSKLGYRVSAKKAQLCREEVTYLGYLLKGGKRWLTPARKATVMKIPTPTTPRQVREFLGKAGFCRLFIPGFASLAAPLYPLTRPKVPFTWTEAHQEAFGRIKEALLSAPALALPDLTKPFALYVDEKEGVARGVLTQTLGPWRRPVAYLSKKLDPVASGWPTCLKAIAAVALLLKDADKLTLGQNVLVIAPHNLESIVRQPPDRWMTNARMTHYQSLLLNERVSFAPPAILNPATLLPVESDDTPIHICSEILAEETGTRPDLRDQPLPGVPAWYTDGSSFIMDGRRQAGAAIVDNKRTVWASNLPEGTSAQKAELIALTQALRLAEGKSINIYTDSRYAFATAHVHGAIYKQRGWLTSAGKDIKNKEEILALLEAIHLPKRVAIIHCPGHQRGTDPVATGNRKADEAAKQAAQSTRILTETTKNAGKRTADGSEFEKRTADGSEFESPKKKAKVE

SEQ ID NO: 7729 - protein, 2118 aa, synthetic construct
MPAAKRVKLDGGDKKYSIGLDIGTNSVGWAVITDEYKVPSKKFKVLGNTDRHSIKKNLIGALLFDSGETAEATRLKRTARRRYTRRKNRICYLQEIFSNEMAKVDDSFFHRLEESFLVEEDKKHERHPIFGNIVDEVAYHEKYPTIYHLRKKLVDSTDKADLRLIYLALAHMIKFRGHFLIEGDLNPDNSDVDKLFIQLVQTYNQLFEENPINASGVDAKAILSARLSKSRRLENLIAQLPGEKKNGLFGNLIALSLGLTPNFKSNFDLAEDAKLQLSKDTYDDDLDNLLAQIGDQYADLFLAAKNLSDAILLSDILRVNTEITKAPLSASMIKRYDEHHQDLTLLKALVRQQLPEKYKEIFFDQSKNGYAGYIDGGASQEEFYKFIKPILEKMDGTEELLVKLNREDLLRKQRTFDNGSIPHQIHLGELHAILRRQEDFYPFLKDNREKIEKILTFRIPYYVGPLARGNSRFAWMTRKSEETITPWNFEEVVDKGASAQSFIERMTNFDKNLPNEKVLPKHSLLYEYFTVYNELTKVKYVTEGMRKPAFLSGEQKKAIVDLLFKTNRKVTVKQLKEDYFKKIECFDSVEISGVEDRFNASLGTYHDLLKIIKDKDFLDNEENEDILEDIVLTLTLFEDREMIEERLKTYAHLFDDKVMKQLKRRRYTGWGRLSRKLINGIRDKQSGKTILDFLKSDGFANRNFMQLIHDDSLTFKEDIQKAQVSGQGDSLHEHIANLAGSPAIKKGILQTVKVVDELVKVMGRHKPENIVIEMARENQTTQKGQKNSRERMKRIEEGIKELGSQILKEHPVENTQLQNEKLYLYYLQNGRDMYVDQELDINRLSDYDVDHIVPQSFLKDDSIDNKVLTRSDKARGKSDNVPSEEVVKKMKNYWRQLLNAKLITQRKFDNLTKAERGGLSELDKAGFIKRQLVETRQITKHVAQILDSRMNTKYDENDKLIREVKVITLKSKLVSDFRKDFQFYKVREINNYHHAHDAYLNAVVGTALIKKYPKLESEFVYGDYKVYDVRKMIAKSEQEIGKATAKYFFYSNIMNFFKTEITLANGEIRKRPLIETNGETGEIVWDKGRDFATVRKVLSMPQVNIVKKTEVQTGGFSKESILPKRNSDKLIARKKDWDPKKYGGFDSPTVAYSVLVVAKVEKGKSKKLKSVKELLGITIMERSSFEKNPIDFLEAKGYKEVKKDLIIKLPKYSLFELENGRKRMLASAGELQKGNELALPSKYVNFLYLASHYEKLKGSPEDNEQKQLFVEQHKHYLDEIIEQISEFSKRVILADANLDKVLSAYNKHRDKPIREQAENIIHLFTLTNLGAPAAFKYFDTTIDRKRYTSTKEVLDATLIHQSITGLYETRIDLSQLGGDGGSGGSSGGSSGSETPGTSESATPESSGGSSGGSSGGTLNLEDEYRLYETSAEPEVSPGSTWLSDFPQAWAETGGMGLAVRQAPLIIPLKATSTPVSIKQYPMSQEAKLGIKPHIQRLLDQGILVPCQSPWNTPLLPVKKPGTNDYRPVQDLREVNKRVEDIHPTVPNPYNLLSGLPPSHRWYTVLDLKDAFFCLRLHPTSQPLFAFEWRDPGMGISGQLTWTRLPQGFKNSPTLFNEALHRDLADFRIQHPDLILLQYVDDILLAATSELDCQQGTRALLLTLGNLGYRASAKKAQLCQKQVKYLGYLLKEGQRWLTEARKETVMGQPTPKTPRQLREFLGKAGFCRLFIPGFAEMAAPLYPLTKPGTLFNWGPDQQKAYQEIKQALLTAPALGLPDLTKPFELFVDEKQGYAKGVLTQKLGPWRRPVAYLSKKLDPVAAGWPPCLRMVAAIAVLRKDAGKLTMGQPLVILAPHAVEALVKQPPDRWLSNARMTHYQAMLLDTDRVQFGPVVALNPATLLPLPEEGAPHDCLEILAETHGTRPDLTDQPIPDADHTWYTDGSSFLQEGQRKAGAAVTTETEVIWARALPAGTSAQRAELIALTQALKMAEGKRLNVYTDSRYAFATAHIHGEIYRRRGWLTSEGREIKNKSEILALLKALFLPKRLSIIHCLGHQKGDSAEARGNRLADQAAREAAIKTPPDTSTLLAGKRTADGSEFEKRTADGSEFESPKKKAKVE

SEQ ID NO: 7730 - protein, 2118 aa, synthetic construct
MPAAKRVKLDGGDKKYSIGLDIGTNSVGWAVITDEYKVPSKKFKVLGNTDRHSIKKNLIGALLFDSGETAEATRLKRTARRRYTRRKNRICYLQEIFSNEMAKVDDSFFHRLEESFLVEEDKKHERHPIFGNIVDEVAYHEKYPTIYHLRKKLVDSTDKADLRLIYLALAHMIKFRGHFLIEGDLNPDNSDVDKLFIQLVQTYNQLFEENPINASGVDAKAILSARLSKSRRLENLIAQLPGEKKNGLFGNLIALSLGLTPNFKSNFDLAEDAKLQLSKDTYDDDLDNLLAQIGDQYADLFLAAKNLSDAILLSDILRVNTEITKAPLSASMIKRYDEHHQDLTLLKALVRQQLPEKYKEIFFDQSKNGYAGYIDGGASQEEFYKFIKPILEKMDGTEELLVKLNREDLLRKQRTFDNGSIPHQIHLGELHAILRRQEDFYPFLKDNREKIEKILTFRIPYYVGPLARGNSRFAWMTRKSEETITPWNFEEVVDKGASAQSFIERMTNFDKNLPNEKVLPKHSLLYEYFTVYNELTKVKYVTEGMRKPAFLSGEQKKAIVDLLFKTNRKVTVKQLKEDYFKKIECFDSVEISGVEDRFNASLGTYHDLLKIIKDKDFLDNEENEDILEDIVLTLTLFEDREMIEERLKTYAHLFDDKVMKQLKRRRYTGWGRLSRKLINGIRDKQSGKTILDFLKSDGFANRNFMQLIHDDSLTFKEDIQKAQVSGQGDSLHEHIANLAGSPAIKKGILQTVKVVDELVKVMGRHKPENIVIEMARENQTTQKGQKNSRERMKRIEEGIKELGSQILKEHPVENTQLQNEKLYLYYLQNGRDMYVDQELDINRLSDYDVDHIVPQSFLKDDSIDNKVLTRSDKARGKSDNVPSEEVVKKMKNYWRQLLNAKLITQRKFDNLTKAERGGLSELDKAGFIKRQLVETRQITKHVAQILDSRMNTKYDENDKLIREVKVITLKSKLVSDFRKDFQFYKVREINNYHHAHDAYLNAVVGTALIKKYPKLESEFVYGDYKVYDVRKMIAKSEQEIGKATAKYFFYSNIMNFFKTEITLANGEIRKRPLIETNGETGEIVWDKGRDFATVRKVLSMPQVNIVKKTEVQTGGFSKESILPKRNSDKLIARKKDWDPKKYGGFDSPTVAYSVLVVAKVEKGKSKKLKSVKELLGITIMERSSFEKNPIDFLEAKGYKEVKKDLIIKLPKYSLFELENGRKRMLASAGELQKGNELALPSKYVNFLYLASHYEKLKGSPEDNEQKQLFVEQHKHYLDEIIEQISEFSKRVILADANLDKVLSAYNKHRDKPIREQAENIIHLFTLTNLGAPAAFKYFDTTIDRKRYTSTKEVLDATLIHQSITGLYETRIDLSQLGGDGGSGGSSGGSSGSETPGTSESATPESSGGSSGGSSGGTLNIEDEYRLHETSKEPDVSLGSTWLSDFPQAWAETGGMGLAVRQAPLIIPLKATSTPVSIKQYPMSQEARLGIKPHIQRLLDQGILVPCQSPWNTPLLPVKKPGTNDYRPVQDLREVNKRVEDIHPTVPNPYNLLSGLPPSHQWYTVLDLKDAFFCLRLHPTSQPLFAFEWRDPEMGISGQLTWTRLPQGFKNSPTLFNEALHRDLAGFRIQHPDLILLQYVDDLLLAATSELDCQQGTRALLQTLGDLGYRASAKKAQICQKQVKYLGYLLKEGQRWLTEARKETVMGQPIPKTPRQLREFLGTAGFCRLWIPGFAEMAAPLYPLTKPGTLFNWGPDQQKAFQEIKQALLTAPALGLPDLTKPFELFVDEKQGYAKGVLTQKLGPWRRPVAYLSKKLDPVAAGWPPCLRMVAAIAVLTKDAGKLTMGQPLVILAPHAVEALVKQPPDRWLSNARMTHYQALLLDTDRVQFGPVVALNPATLLPLPEEGLQHDCLDILAEAHGTRSDLMDQPLPDADHTWYTDGSSFLQEGQRKAGAAVTTETEVIWARALPAGTSAQRAELIALTQALKMAEGKKLNVYTDSRYAFATAHIHGEIYRRRGWLTSEGKEIKNKDEILALLKALFLPKRLSIIHCPGHQKGNSAEARGNRMADQAAREVATRETPETSTLLAGKRTADGSEFEKRTADGSEFESPKKKAKVE

SEQ ID NO: 7731 - protein, 2118 aa, synthetic construct
MPAAKRVKLDGGDKKYSIGLDIGTNSVGWAVITDEYKVPSKKFKVLGNTDRHSIKKNLIGALLFDSGETAEATRLKRTARRRYTRRKNRICYLQEIFSNEMAKVDDSFFHRLEESFLVEEDKKHERHPIFGNIVDEVAYHEKYPTIYHLRKKLVDSTDKADLRLIYLALAHMIKFRGHFLIEGDLNPDNSDVDKLFIQLVQTYNQLFEENPINASGVDAKAILSARLSKSRRLENLIAQLPGEKKNGLFGNLIALSLGLTPNFKSNFDLAEDAKLQLSKDTYDDDLDNLLAQIGDQYADLFLAAKNLSDAILLSDILRVNTEITKAPLSASMIKRYDEHHQDLTLLKALVRQQLPEKYKEIFFDQSKNGYAGYIDGGASQEEFYKFIKPILEKMDGTEELLVKLNREDLLRKQRTFDNGSIPHQIHLGELHAILRRQEDFYPFLKDNREKIEKILTFRIPYYVGPLARGNSRFAWMTRKSEETITPWNFEEVVDKGASAQSFIERMTNFDKNLPNEKVLPKHSLLYEYFTVYNELTKVKYVTEGMRKPAFLSGEQKKAIVDLLFKTNRKVTVKQLKEDYFKKIECFDSVEISGVEDRFNASLGTYHDLLKIIKDKDFLDNEENEDILEDIVLTLTLFEDREMIEERLKTYAHLFDDKVMKQLKRRRYTGWGRLSRKLINGIRDKQSGKTILDFLKSDGFANRNFMQLIHDDSLTFKEDIQKAQVSGQGDSLHEHIANLAGSPAIKKGILQTVKVVDELVKVMGRHKPENIVIEMARENQTTQKGQKNSRERMKRIEEGIKELGSQILKEHPVENTQLQNEKLYLYYLQNGRDMYVDQELDINRLSDYDVDHIVPQSFLKDDSIDNKVLTRSDKARGKSDNVPSEEVVKKMKNYWRQLLNAKLITQRKFDNLTKAERGGLSELDKAGFIKRQLVETRQITKHVAQILDSRMNTKYDENDKLIREVKVITLKSKLVSDFRKDFQFYKVREINNYHHAHDAYLNAVVGTALIKKYPKLESEFVYGDYKVYDVRKMIAKSEQEIGKATAKYFFYSNIMNFFKTEITLANGEIRKRPLIETNGETGEIVWDKGRDFATVRKVLSMPQVNIVKKTEVQTGGFSKESILPKRNSDKLIARKKDWDPKKYGGFDSPTVAYSVLVVAKVEKGKSKKLKSVKELLGITIMERSSFEKNPIDFLEAKGYKEVKKDLIIKLPKYSLFELENGRKRMLASAGELQKGNELALPSKYVNFLYLASHYEKLKGSPEDNEQKQLFVEQHKHYLDEIIEQISEFSKRVILADANLDKVLSAYNKHRDKPIREQAENIIHLFTLTNLGAPAAFKYFDTTIDRKRYTSTKEVLDATLIHQSITGLYETRIDLSQLGGDGGSGGSSGGSSGSETPGTSESATPESSGGSSGGSSGGTLNIEDEHRLHETSKEPDVSLGSTWLSDFPQAWAETGGMGLAVRQAPLIIPLKATSTPVSIKQYPMSQEARLGIKPHIQRLLDQGILVPCQSPWNTPLLPVKKPGTNDYRPVQDLREVNKRVEDIHPTVPNPYNLLSGLPPSHQWYTVLDLKDAFFCLRLHPTSQPLFAFEWRDPEMGISGQLTWTRLPQGFKNSPTLFDEALHRDLADFRIQHPDLILLQYVDDLLLAATSELDCQQGTRALLQTLGNLGYRASAKKAQICQKQVKYLGYLLKEGQRWLTEARKETVMGQPTPKTPRQLREFLGTAGFCRLWIPGFAEMAAPLYPLTKTGTLFNWGPDQQKAYQEIKQALLTAPALGLPDLTKPFELFVDEKQGYAKGVLTQKLGPWRRPVAYLSKKLDPVAAGWPPCLRMVAAIAVLTKDAGKLTMGQPLVILAPHAVEALVKQPPDRWLSNARMTHYQALLLDTDRVQFGPVVALNPATLLPLPEEGLQHNCLDILAEAHGTRPDLTDQPLPDADHTWYTDGSSLLQEGQRKAGAAVTTETEVIWAKALPAGTSAQRAELIALTQALKMAEGKKLNVYTDSRYAFATAHIHGEIYRRRGLLTSEGKEIKNKDEILALLKALFLPKRLSIIHCPGHQKGHSAEARGNRMADQAARKAAITETPDTSTLLAGKRTADGSEFEKRTADGSEFESPKKKAKVE

SEQ ID NO: 7732 - protein, 2118 aa, synthetic construct; identical to SEQ ID NO: 7731

SEQ ID NO: 7733 - protein, 2138 aa, synthetic construct
MPAAKRVKLDGGDKKYSIGLDIGTNSVGWAVITDEYKVPSKKFKVLGNTDRHSIKKNLIGALLFDSGETAEATRLKRTARRRYTRRKNRICYLQEIFSNEMAKVDDSFFHRLEESFLVEEDKKHERHPIFGNIVDEVAYHEKYPTIYHLRKKLVDSTDKADLRLIYLALAHMIKFRGHFLIEGDLNPDNSDVDKLFIQLVQTYNQLFEENPINASGVDAKAILSARLSKSRRLENLIAQLPGEKKNGLFGNLIALSLGLTPNFKSNFDLAEDAKLQLSKDTYDDDLDNLLAQIGDQYADLFLAAKNLSDAILLSDILRVNTEITKAPLSASMIKRYDEHHQDLTLLKALVRQQLPEKYKEIFFDQSKNGYAGYIDGGASQEEFYKFIKPILEKMDGTEELLVKLNREDLLRKQRTFDNGSIPHQIHLGELHAILRRQEDFYPFLKDNREKIEKILTFRIPYYVGPLARGNSRFAWMTRKSEETITPWNFEEVVDKGASAQSFIERMTNFDKNLPNEKVLPKHSLLYEYFTVYNELTKVKYVTEGMRKPAFLSGEQKKAIVDLLFKTNRKVTVKQLKEDYFKKIECFDSVEISGVEDRFNASLGTYHDLLKIIKDKDFLDNEENEDILEDIVLTLTLFEDREMIEERLKTYAHLFDDKVMKQLKRRRYTGWGRLSRKLINGIRDKQSGKTILDFLKSDGFANRNFMQLIHDDSLTFKEDIQKAQVSGQGDSLHEHIANLAGSPAIKKGILQTVKVVDELVKVMGRHKPENIVIEMARENQTTQKGQKNSRERMKRIEEGIKELGSQILKEHPVENTQLQNEKLYLYYLQNGRDMYVDQELDINRLSDYDVDHIVPQSFLKDDSIDNKVLTRSDKARGKSDNVPSEEVVKKMKNYWRQLLNAKLITQRKFDNLTKAERGGLSELDKAGFIKRQLVETRQITKHVAQILDSRMNTKYDENDKLIREVKVITLKSKLVSDFRKDFQFYKVREINNYHHAHDAYLNAVVGTALIKKYPKLESEFVYGDYKVYDVRKMIAKSEQEIGKATAKYFFYSNIMNFFKTEITLANGEIRKRPLIETNGETGEIVWDKGRDFATVRKVLSMPQVNIVKKTEVQTGGFSKESILPKRNSDKLIARKKDWDPKKYGGFDSPTVAYSVLVVAKVEKGKSKKLKSVKELLGITIMERSSFEKNPIDFLEAKGYKEVKKDLIIKLPKYSLFELENGRKRMLASAGELQKGNELALPSKYVNFLYLASHYEKLKGSPEDNEQKQLFVEQHKHYLDEIIEQISEFSKRVILADANLDKVLSAYNKHRDKPIREQAENIIHLFTLTNLGAPAAFKYFDTTIDRKRYTSTKEVLDATLIHQSITGLYETRIDLSQLGGDGGSGGSSGGSSGSETPGTSESATPESSGGSSGGSSGGWVQEISDSRPMLHIYLNGRRFLGLLNTGADKTCIAGRDWPANWPIHQTESSLQGLGMACGVARSSQPLRWQHEDKSGIIHPFVIPTLPFTLWGRDIMKDIKVRLMTDSPDDSQDLMIGAIESNLFADQISWKSDQPVWLNQWPLKQEKLQALQQLVTEQLQLGHLEESNSPWNTPVFVIKKKSGKWRLLQDLRAVNATMHDMGALQPGLPSPVAVPKGWEIIIIDLQDCFFNIKLHPEDCKRFAFSVPSPNFKRPYQRFQWKVLPQGMKNSPTLCQKFVDKAILTVRDKYQDSYIVHYMDDILLAHPSRSIVDEILTSMIQALNKHGLVVSTEKIQKYDNLKYLGTHIQGDSVSYQKLQIRTDKLRTLNDFQKLLGNINWIRPFLKLTTGELKPLFEILNGDSNPISTRKLTPEACKALQLMNERLSTARVKRLDLSQPWSLCILKTEYTPTACLWQDGVVEWIHLPHISPKVITPYDIFCTQLIIKGRHRSKELFSKDPDYIVVPYTKVQFDLLLQEKEDWPISLLGFLGEVHFHLPKDPLLTFTLQTAIIFPHMTSTTPLEKGIVIFTDGSANGRSVTYIQGREPIIKENTQNTAQQAEIVAVITAFEEVSQPFNLYTDSKYVTGLFPEIETATLSPRTKIYTELKHLQRLIHKRQEKFYIGHIRGHTGLPGPLAQGNAYADSLTRILTAGKRTADGSEFEKRTADGSEFESPKKKAKVE

SEQ ID NO: 7734 - protein, 2110 aa, synthetic construct
MPAAKRVKLDGGDKKYSIGLDIGTNSVGWAVITDEYKVPSKKFKVLGNTDRHSIKKNLIGALLFDSGETAEATRLKRTARRRYTRRKNRICYLQEIFSNEMAKVDDSFFHRLEESFLVEEDKKHERHPIFGNIVDEVAYHEKYPTIYHLRKKLVDSTDKADLRLIYLALAHMIKFRGHFLIEGDLNPDNSDVDKLFIQLVQTYNQLFEENPINASGVDAKAILSARLSKSRRLENLIAQLPGEKKNGLFGNLIALSLGLTPNFKSNFDLAEDAKLQLSKDTYDDDLDNLLAQIGDQYADLFLAAKNLSDAILLSDILRVNTEITKAPLSASMIKRYDEHHQDLTLLKALVRQQLPEKYKEIFFDQSKNGYAGYIDGGASQEEFYKFIKPILEKMDGTEELLVKLNREDLLRKQRTFDNGSIPHQIHLGELHAILRRQEDFYPFLKDNREKIEKILTFRIPYYVGPLARGNSRFAWMTRKSEETITPWNFEEVVDKGASAQSFIERMTNFDKNLPNEKVLPKHSLLYEYFTVYNELTKVKYVTEGMRKPAFLSGEQKKAIVDLLFKTNRKVTVKQLKEDYFKKIECFDSVEISGVEDRFNASLGTYHDLLKIIKDKDFLDNEENEDILEDIVLTLTLFEDREMIEERLKTYAHLFDDKVMKQLKRRRYTGWGRLSRKLINGIRDKQSGKTILDFLKSDGFANRNFMQLIHDDSLTFKEDIQKAQVSGQGDSLHEHIANLAGSPAIKKGILQTVKVVDELVKVMGRHKPENIVIEMARENQTTQKGQKNSRERMKRIEEGIKELGSQILKEHPVENTQLQNEKLYLYYLQNGRDMYVDQELDINRLSDYDVDHIVPQSFLKDDSIDNKVLTRSDKARGKSDNVPSEEVVKKMKNYWRQLLNAKLITQRKFDNLTKAERGGLSELDKAGFIKRQLVETRQITKHVAQILDSRMNTKYDENDKLIREVKVITLKSKLVSDFRKDFQFYKVREINNYHHAHDAYLNAVVGTALIKKYPKLESEFVYGDYKVYDVRKMIAKSEQEIGKATAKYFFYSNIMNFFKTEITLANGEIRKRPLIETNGETGEIVWDKGRDFATVRKVLSMPQVNIVKKTEVQTGGFSKESILPKRNSDKLIARKKDWDPKKYGGFDSPTVAYSVLVVAKVEKGKSKKLKSVKELLGITIMERSSFEKNPIDFLEAKGYKEVKKDLIIKLPKYSLFELENGRKRMLASAGELQKGNELALPSKYVNFLYLASHYEKLKGSPEDNEQKQLFVEQHKHYLDEIIEQISEFSKRVILADANLDKVLSAYNKHRDKPIREQAENIIHLFTLTNLGAPAAFKYFDTTIDRKRYTSTKEVLDATLIHQSITGLYETRIDLSQLGGDGGSGGSSGGSSGSETPGTSESATPESSGGSSGGSSGGLDDEYRLYSPLVKPDQNIQFWLEQFPQAWAETAGMGLAKQVPPQVIQLKASATPVSVRQYPLSKEAQEGIRPHVQRLIQQGILVPVQSPWNTPLLPVRKPGTNDYRPVQDLREVNKRVQDIHPTVPNPYNLLCALPPQRSWYTVLDLKDAFFCLRLHPTSQPLFAFEWRDPGTGRTGQLTWTRLPQGFKNSPTIFNEALHRDLANFRIQHPQVTLLQYVDDLLLAGATKQDCLEGTKALLLELSDLGYRASAKKAQICRREVTYLGYSLRDGQRWLTEARKKTVVQIPAPTTAKQVREFLGKAGFCRLFIPGFATLAAPLYPLTKPKGEFSWAPEHQKAFDAIKKALLSAPALALPDVTKPFTLYVDERKGVARGVLTQTLGPWRRPVAYLSKKLDPVASGWPVCLKAIAAVAILVKDADKLTLGQNITVIAPHALENIVRQPPDRWMTNARMTHYQSLLLTERVTFAPPAALNPATLLPEETDEPVTHDCHQLLIEETGVRKDLTDIPLTGEVLTWFTDGSSYVVEGKRMAGAAVVDGTRTIWASSLPEGTSAQKAELMALTQALRLAEGKSINIYTDSRYAFATAHVHGAIYKQRGWLTSAGREIKNKEEILSLLEALHLPKRLAIIHCPGHQKAKDPISRGNQMADRVAKQAAQGVNLLPAGKRTADGSEFEKRTADGSEFESPKKKAKVE

SEQ ID NO: 7735 - protein, 2110 aa, synthetic construct; identical to SEQ ID NO: 7734

SEQ ID NO: 7736 - protein, 2109 aa, synthetic construct
MPAAKRVKLDGGDKKYSIGLDIGTNSVGWAVITDEYKVPSKKFKVLGNTDRHSIKKNLIGALLFDSGETAEATRLKRTARRRYTRRKNRICYLQEIFSNEMAKVDDSFFHRLEESFLVEEDKKHERHPIFGNIVDEVAYHEKYPTIYHLRKKLVDSTDKADLRLIYLALAHMIKFRGHFLIEGDLNPDNSDVDKLFIQLVQTYNQLFEENPINASGVDAKAILSARLSKSRRLENLIAQLPGEKKNGLFGNLIALSLGLTPNFKSNFDLAEDAKLQLSKDTYDDDLDNLLAQIGDQYADLFLAAKNLSDAILLSDILRVNTEITKAPLSASMIKRYDEHHQDLTLLKALVRQQLPEKYKEIFFDQSKNGYAGYIDGGASQEEFYKFIKPILEKMDGTEELLVKLNREDLLRKQRTFDNGSIPHQIHLGELHAILRRQEDFYPFLKDNREKIEKILTFRIPYYVGPLARGNSRFAWMTRKSEETITPWNFEEVVDKGASAQSFIERMTNFDKNLPNEKVLPKHSLLYEYFTVYNELTKVKYVTEGMRKPAFLSGEQKKAIVDLLFKTNRKVTVKQLKEDYFKKIECFDSVEISGVEDRFNASLGTYHDLLKIIKDKDFLDNEENEDILEDIVLTLTLFEDREMIEERLKTYAHLFDDKVMKQLKRRRYTGWGRLSRKLINGIRDKQSGKTILDFLKSDGFANRNFMQLIHDDSLTFKEDIQKAQVSGQGDSLHEHIANLAGSPAIKKGILQTVKVVDELVKVMGRHKPENIVIEMARENQTTQKGQKNSRERMKRIEEGIKELGSQILKEHPVENTQLQNEKLYLYYLQNGRDMYVDQELDINRLSDYDVDHIVPQSFLKDDSIDNKVLTRSDKARGKSDNVPSEEVVKKMKNYWRQLLNAKLITQRKFDNLTKAERGGLSELDKAGFIKRQLVETRQITKHVAQILDSRMNTKYDENDKLIREVKVITLKSKLVSDFRKDFQFYKVREINNYHHAHDAYLNAVVGTALIKKYPKLESEFVYGDYKVYDVRKMIAKSEQEIGKATAKYFFYSNIMNFFKTEITLANGEIRKRPLIETNGETGEIVWDKGRDFATVRKVLSMPQVNIVKKTEVQTGGFSKESILPKRNSDKLIARKKDWDPKKYGGFDSPTVAYSVLVVAKVEKGKSKKLKSVKELLGITIMERSSFEKNPIDFLEAKGYKEVKKDLIIKLPKYSLFELENGRKRMLASAGELQKGNELALPSKYVNFLYLASHYEKLKGSPEDNEQKQLFVEQHKHYLDEIIEQISEFSKRVILADANLDKVLSAYNKHRDKPIREQAENIIHLFTLTNLGAPAAFKYFDTTIDRKRYTSTKEVLDATLIHQSITGLYETRIDLSQLGGDGGSGGSSGGSSGSETPGTSESATPESSGGSSGGSSGGVPWLMKKPLQLTVLVPLHEYQERLLQQTALPKEQKELLQKLFLKYDALWQHWENQVGHRRIKPHNIATGTLAPRPQKQYPINPKAKPSIQIVIDDLLKQGVLIQQNSTMNTPVYPVPKPDGKWRMVLDYREVNKTIPLIAAQNQHSAGILSSIYRGKYKTTLDLTNGFWAHPITPESYWLTAFTWQGKQYCWTRLPQGFLNSPALFTADVVDLLKEIPNVQAYVDDIYISHDDPQEHLEQLEKIFSILLNAGYVVSLKKSEIAQREVEFLGFNITKEGRGLTDTFKQKLLNITPPKDLKQLQSILGLLNFARNFIPNYSELVKPLYTIVANANGKFISWTEDNSNQLQHIISVLNQADNLEERNPETRLIIKVNSSPSAGYIRYYNEGSKRPIMYVNYIFSKAEAKFTQTEKLLTTMHKGLIKAMDLAMGQEILVYSPIVSMTKIQRTPLPERKALPVRWITWMTYLEDPRIQFHYDKSLPELQQIPNVTEDVIAKTKHPSEFAMVFYTDGSAIKHPDVNKSHSAGMGIAQVQFIPEYKIVHQWSIPLGDHTAQLAEIAAVEFACKKALKISGPVLIVTDSFYVAESANKELPYWKSNGFLNNKKKPLRHVSKWKSIAECLQLKPDIIIMHEKGHQQPMTTLHTEGNNLADKLATQGSYVVHAGKRTADGSEFEKRTADGSEFESPKKKAKVE

SEQ ID NO: 7737 - protein, 2109 aa, synthetic construct
MPAAKRVKLDGGDKKYSIGLDIGTNSVGWAVITDEYKVPSKKFKVLGNTDRHSIKKNLIGALLFDSGETAEATRLKRTARRRYTRRKNRICYLQEIFSNEMAKVDDSFFHRLEESFLVEEDKKHERHPIFGNIVDEVAYHEKYPTIYHLRKKLVDSTDKADLRLIYLALAHMIKFRGHFLIEGDLNPDNSDVDKLFIQLVQTYNQLFEENPINASGVDAKAILSARLSKSRRLENLIAQLPGEKKNGLFGNLIALSLGLTPNFKSNFDLAEDAKLQLSKDTYDDDLDNLLAQIGDQYADLFLAAKNLSDAILLSDILRVNTEITKAPLSASMIKRYDEHHQDLTLLKALVRQQLPEKYKEIFFDQSKNGYAGYIDGGASQEEFYKFIKPILEKMDGTEELLVKLNREDLLRKQRTFDNGSIPHQIHLGELHAILRRQEDFYPFLKDNREKIEKILTFRIPYYVGPLARGNSRFAWMTRKSEETITPWNFEEVVDKGASAQSFIERMTNFDKNLPNEKVLPKHSLLYEYFTVYNELTKVKYVTEGMRKPAFLSGEQKKAIVDLLFKTNRKVTVKQLKEDYFKKIECFDSVEISGVEDRFNASLGTYHDLLKIIKDKDFLDNEENEDILEDIVLTLTLFEDREMIEERLKTYAHLFDDKVMKQLKRRRYTGWGRLSRKLINGIRDKQSGKTILDFLKSDGFANRNFMQLIHDDSLTFKEDIQKAQVSGQGDSLHEHIANLAGSPAIKKGILQTVKVVDELVKVMGRHKPENIVIEMARENQTTQKGQKNSRERMKRIEEGIKELGSQILKEHPVENTQLQNEKLYLYYLQNGRDMYVDQELDINRLSDYDVDHIVPQSFLKDDSIDNKVLTRSDKARGKSDNVPSEEVVKKMKNYWRQLLNAKLITQRKFDNLTKAERGGLSELDKAGFIKRQLVETRQITKHVAQILDSRMNTKYDENDKLIREVKVITLKSKLVSDFRKDFQFYKVREINNYHHAHDAYLNAVVGTALIKKYPKLESEFVYGDYKVYDVRKMIAKSEQEIGKATAKYFFYSNIMNFFKTEITLANGEIRKRPLIETNGETGEIVWDKGRDFATVRKVLSMPQVNIVKKTEVQTGGFSKESILPKRNSDKLIARKKDWDPKKYGGFDSPTVAYSVLVVAKVEKGKSKKLKSVKELLGITIMERSSFEKNPIDFLEAKGYKEVKKDLIIKLPKYSLFELENGRKRMLASAGELQKGNELALPSKYVNFLYLASHYEKLKGSPEDNEQKQLFVEQHKHYLDEIIEQISEFSKRVILADANLDKVLSAYNKHRDKPIREQAENIIHLFTLTNLGAPAAFKYFDTTIDRKRYTSTKEVLDATLIHQSITGLYETRIDLSQLGGDGGSGGSSGGSSGSETPGTSESATPESSGGSSGGSSGGVPWLMKKPLQLTVLVPLHEYQERLLQQTALPKEQKELLQKLFLKYDALWQHWENQVGHRRIKPHNIATGTLAPRPQKQYPINPKAKPSIQIVIDDLLKQGVLIQQNSTMNTPVYPVPKPDGKWRMVLDYREVNKTIPLIAAQNQHSAGILSSIYRGKYKTTLDLTNGFWAHPITPESYWLTAFTWQGKQYCWTRLPQGFLNSPALFNADVVDLLKEIPNVQAYVDDIYISHDDPQEHLEQLEKIFSILLNAGYVVSLKKSEIAQREVEFLGFNITKEGRGLTDTFKQKLLNITPPKDLKQLQSILGLLNFARNFIPNYSELVKPLYTIVAPANGKFISWTEDNSNQLQHIISVLNQADNLEERNPETRLIIKVNSSPSAGYIRYYNEGSKRPIMYVNYIFSKAEAKFTQTEKLLTTMHKGLIKAMDLAMGQEILVYSPIVSMTKIQRTPLPERKALPVRWITWMTYLEDPRIQFHYDKSLPELQQIPNVTEDVIAKTKHPSEFAMVFYTDGSAIKHPDVNKSHSAGMGIAQVQFIPEYKIVHQWSIPLGDHTAQLAEIAAVEFACKKALKISGPVLIVTDSFYVAESANKELPYWKSNGFLNNKKKPLRHVSKWKSIAECLQLKPDIIIMHEKGHQQPMTTLHTEGNNLADKLATQGSYVVHAGKRTADGSEFEKRTADGSEFESPKKKAKVE

SEQ ID NO: 7738 - protein, 2198 aa, synthetic construct
MPAAKRVKLDGGDKKYSIGLDIGTNSVGWAVITDEYKVPSKKFKVLGNTDRHSIKKNLIGALLFDSGETAEATRLKRTARRRYTRRKNRICYLQEIFSNEMAKVDDSFFHRLEESFLVEEDKKHERHPIFGNIVDEVAYHEKYPTIYHLRKKLVDSTDKADLRLIYLALAHMIKFRGHFLIEGDLNPDNSDVDKLFIQLVQTYNQLFEENPINASGVDAKAILSARLSKSRRLENLIAQLPGEKKNGLFGNLIALSLGLTPNFKSNFDLAEDAKLQLSKDTYDDDLDNLLAQIGDQYADLFLAAKNLSDAILLSDILRVNTEITKAPLSASMIKRYDEHHQDLTLLKALVRQQLPEKYKEIFFDQSKNGYAGYIDGGASQEEFYKFIKPILEKMDGTEELLVKLNREDLLRKQRTFDNGSIPHQIHLGELHAILRRQEDFYPFLKDNREKIEKILTFRIPYYVGPLARGNSRFAWMTRKSEETITPWNFEEVVDKGASAQSFIERMTNFDKNLPNEKVLPKHSLLYEYFTVYNELTKVKYVTEGMRKPAFLSGEQKKAIVDLLFKTNRKVTVKQLKEDYFKKIECFDSVEISGVEDRFNASLGTYHDLLKIIKDKDFLDNEENEDILEDIVLTLTLFEDREMIEERLKTYAHLFDDKVMKQLKRRRYTGWGRLSRKLINGIRDKQSGKTILDFLKSDGFANRNFMQLIHDDSLTFKEDIQKAQVSGQGDSLHEHIANLAGSPAIKKGILQTVKVVDELVKVMGRHKPENIVIEMARENQTTQKGQKNSRERMKRIEEGIKELGSQILKEHPVENTQLQNEKLYLYYLQNGRDMYVDQELDINRLSDYDVDHIVPQSFLKDDSIDNKVLTRSDKARGKSDNVPSEEVVKKMKNYWRQLLNAKLITQRKFDNLTKAERGGLSELDKAGFIKRQLVETRQITKHVAQILDSRMNTKYDENDKLIREVKVITLKSKLVSDFRKDFQFYKVREINNYHHAHDAYLNAVVGTALIKKYPKLESEFVYGDYKVYDVRKMIAKSEQEIGKATAKYFFYSNIMNFFKTEITLANGEIRKRPLIETNGETGEIVWDKGRDFATVRKVLSMPQVNIVKKTEVQTGGFSKESILPKRNSDKLIARKKDWDPKKYGGFDSPTVAYSVLVVAKVEKGKSKKLKSVKELLGITIMERSSFEKNPIDFLEAKGYKEVKKDLIIKLPKYSLFELENGRKRMLASAGELQKGNELALPSKYVNFLYLASHYEKLKGSPEDNEQKQLFVEQHKHYLDEIIEQISEFSKRVILADANLDKVLSAYNKHRDKPIREQAENIIHLFTLTNLGAPAAFKYFDTTIDRKRYTSTKEVLDATLIHQSITGLYETRIDLSQLGGDGGSGGSSGGSSGSETPGTSESATPESSGGSSGGSSGGMDPLQLLQPLEAEIKGTKLKAHWNSGATITCVPEAFLEDERPIQTMLIKTIHGEKQQDVYYLTFKVQGRKVEAEVLASPYDYILLNPSDVPWLMKKPLQLTVLVPLHEYQERLLQQTALPKEQKELLQKLFLKYDALWQHWENQVGHRRIKPHNIATGTLAPRPQKQYPINPKAKPSIQIVIDDLLKQGVLIQQNSTMNTPVYPVPKPDGKWRMVLDYREVNKTIPLIAAQNQHSAGILSSIYRGKYKTTLDLTNGFWAHPITPESYWLTAFTWQGKQYCWTRLPQGFLNSPALFNADVVDLLKEIPNVQAYVDDIYISHDDPQEHLEQLEKIFSILLNAGYVVSLKKSEIAQREVEFLGFNITKEGRGLTDTFKQKLLNITPPKDLKQLQSILGKLNFARNFIPNYSELVKPLYTIVAPANGKFISWTEDNSNQLQHIISVLNQADNLEERNPETRLIIKVNSSPSAGYIRYYNEGSKRPIMYVNYIFSKAEAKFTQTEKLLTTMHKGLIKAMDLAMGQEILVYSPIVSMTKIQRTPLPERKALPVRWITWMTYLEDPRIQFHYDKSLPELQQIPNVTEDVIAKTKHPSEFAMVFYTDGSAIKHPDVNKSHSAGMGIAQVQFIPEYKIVHQWSIPLGDHTAQLAEIAAVEFACKKALKISGPVLIVTDSFYVAESANKELPYWKSNGFLNNKKKPLRHVSKWKSIAECLQLKPDIIIMHEKGHQQPMTTLHTEGNNLADKLATQGSYVVHAGKRTADGSEFEKRTADGSEFESPKKKAKVE

SEQ ID NO: 7739 - protein, 2109 aa, synthetic construct
MPAAKRVKLDGGDKKYSIGLDIGTNSVGWAVITDEYKVPSKKFKVLGNTDRHSIKKNLIGALLFDSGETAEATRLKRTARRRYTRRKNRICYLQEIFSNEMAKVDDSFFHRLEESFLVEEDKKHERHPIFGNIVDEVAYHEKYPTIYHLRKKLVDSTDKADLRLIYLALAHMIKFRGHFLIEGDLNPDNSDVDKLFIQLVQTYNQLFEENPINASGVDAKAILSARLSKSRRLENLIAQLPGEKKNGLFGNLIALSLGLTPNFKSNFDLAEDAKLQLSKDTYDDDLDNLLAQIGDQYADLFLAAKNLSDAILLSDILRVNTEITKAPLSASMIKRYDEHHQDLTLLKALVRQQLPEKYKEIFFDQSKNGYAGYIDGGASQEEFYKFIKPILEKMDGTEELLVKLNREDLLRKQRTFDNGSIPHQIHLGELHAILRRQEDFYPFLKDNREKIEKILTFRIPYYVGPLARGNSRFAWMTRKSEETITPWNFEEVVDKGASAQSFIERMTNFDKNLPNEKVLPKHSLLYEYFTVYNELTKVKYVTEGMRKPAFLSGEQKKAIVDLLFKTNRKVTVKQLKEDYFKKIECFDSVEISGVEDRFNASLGTYHDLLKIIKDKDFLDNEENEDILEDIVLTLTLFEDREMIEERLKTYAHLFDDKVMKQLKRRRYTGWGRLSRKLINGIRDKQSGKTILDFLKSDGFANRNFMQLIHDDSLTFKEDIQKAQVSGQGDSLHEHIANLAGSPAIKKGILQTVKVVDELVKVMGRHKPENIVIEMARENQTTQKGQKNSRERMKRIEEGIKELGSQILKEHPVENTQLQNEKLYLYYLQNGRDMYVDQELDINRLSDYDVDHIVPQSFLKDDSIDNKVLTRSDKARGKSDNVPSEEVVKKMKNYWRQLLNAKLITQRKFDNLTKAERGGLSELDKAGFIKRQLVETRQITKHVAQILDSRMNTKYDENDKLIREVKVITLKSKLVSDFRKDFQFYKVREINNYHHAHDAYLNAVVGTALIKKYPKLESEFVYGDYKVYDVRKMIAKSEQEIGKATAKYFFYSNIMNFFKTEITLANGEIRKRPLIETNGETGEIVWDKGRDFATVRKVLSMPQVNIVKKTEVQTGGFSKESILPKRNSDKLIARKKDWDPKKYGGFDSPTVAYSVLVVAKVEKGKSKKLKSVKELLGITIMERSSFEKNPIDFLEAKGYKEVKKDLIIKLPKYSLFELENGRKRMLASAGELQKGNELALPSKYVNFLYLASHYEKLKGSPEDNEQKQLFVEQHKHYLDEIIEQISEFSKRVILADANLDKVLSAYNKHRDKPIREQAENIIHLFTLTNLGAPAAFKYFDTTIDRKRYTSTKEVLDATLIHQSITGLYETRIDLSQLGGDGGSGGSSGGSSGSETPGTSESATPESSGGSSGGSSGGIPWLMKKPLQLTTLVPLQEYEERLLKQTMLTGSYKEKLQSLFLKYDALWQHWENQVGHRRIKPHHIATGTVNPRPQKQYPINPKAKASIQTVINDLLKQGVLIQQNSIMNTPVYPVPKPDGKWRMVLDYREVNKTIPLIAAQNQHSAGILSSIFRGKYKTTLDLSNGFWAHSITPESYWLTAFTWLGQQYCWTRLPQGFLNSPALFNADVVDLLKEVPNVQVYVDDIYISHDDPREHLEQLEKVFSLLLNAGYVVSLKKSEIAQHEVEFLGFNITKEGRGLTETFKQKLLNITPPRDLKQLQSILGLLNFARNFIPNFSELVKPLYNIIATAPGKYITWTTDNSQQLQNIISMLNSAENLEERNPEVRLIMKVNTSPSAGYIRFYNEFAKRPIMYLNYVYTKAEVKFTNTEKLLTTIHKGLIKALDLGMGQEILVYSPIVSMTKIQKTPLPERKALPIRWITWMSYLEDPRIQFHYDKTLPELQQVPTVTDDIIAKIKHPSEFSMVFYTDGSAIKHPNVNKSHNAGMGIAQVQFKPEFTVINTWSIPLGDHTAQLAEVAAVEFACKKALKIDGPVLIVTDSFYVAESVNKELPYWQSNGFFNNKKKPLKHVSKWKSIADCIQLKPDIIIIHEKGHQPTASTFHTEGNNLADKLATQGSYVVNAGKRTADGSEFEKRTADGSEFESPKKKAKVE

SEQ ID NO: 7740 - protein, 2198 aa, synthetic construct
MPAAKRVKLDGGDKKYSIGLDIGTNSVGWAVITDEYKVPSKKFKVLGNTDRHSIKKNLIGALLFDSGETAEATRLKRTARRRYTRRKNRICYLQEIFSNEMAKVDDSFFHRLEESFLVEEDKKHERHPIFGNIVDEVAYHEKYPTIYHLRKKLVDSTDKADLRLIYLALAHMIKFRGHFLIEGDLNPDNSDVDKLFIQLVQTYNQLFEENPINASGVDAKAILSARLSKSRRLENLIAQLPGEKKNGLFGNLIALSLGLTPNFKSNFDLAEDAKLQLSKDTYDDDLDNLLAQIGDQYADLFLAAKNLSDAILLSDILRVNTEITKAPLSASMIKRYDEHHQDLTLLKALVRQQLPEKYKEIFFDQSKNGYAGYIDGGASQEEFYKFIKPILEKMDGTEELLVKLNREDLLRKQRTFDNGSIPHQIHLGELHAILRRQEDFYPFLKDNREKIEKILTFRIPYYVGPLARGNSRFAWMTRKSEETITPWNFEEVVDKGASAQSFIERMTNFDKNLPNEKVLPKHSLLYEYFTVYNELTKVKYVTEGMRKPAFLSGEQKKAIVDLLFKTNRKVTVKQLKEDYFKKIECFDSVEISGVEDRFNASLGTYHDLLKIIKDKDFLDNEENEDILEDIVLTLTLFEDREMIEERLKTYAHLFDDKVMKQLKRRRYTGWGRLSRKLINGIRDKQSGKTILDFLKSDGFANRNFMQLIHDDSLTFKEDIQKAQVSGQGDSLHEHIANLAGSPAIKKGILQTVKVVDELVKVMGRHKPENIVIEMARENQTTQKGQKNSRERMKRIEEGIKELGSQILKEHPVENTQLQNEKLYLYYLQNGRDMYVDQELDINRLSDYDVDHIVPQSFLKDDSIDNKVLTRSDKARGKSDNVPSEEVVKKMKNYWRQLLNAKLITQRKFDNLTKAERGGLSELDKAGFIKRQLVETRQITKHVAQILDSRMNTKYDENDKLIREVKVITLKSKLVSDFRKDFQFYKVREINNYHHAHDAYLNAVVGTALIKKYPKLESEFVYGDYKVYDVRKMIAKSEQEIGKATAKYFFYSNIMNFFKTEITLANGEIRKRPLIETNGETGEIVWDKGRDFATVRKVLSMPQVNIVKKTEVQTGGFSKESILPKRNSDKLIARKKDWDPKKYGGFDSPTVAYSVLVVAKVEKGKSKKLKSVKELLGITIMERSSFEKNPIDFLEAKGYKEVKKDLIIKLPKYSLFELENGRKRMLASAGELQKGNELALPSKYVNFLYLASHYEKLKGSPEDNEQKQLFVEQHKHYLDEIIEQISEFSKRVILADANLDKVLSAYNKHRDKPIREQAENIIHLFTLTNLGAPAAFKYFDTTIDRKRYTSTKEVLDATLIHQSITGLYETRIDLSQLGGDGGSGGSSGGSSGSETPGTSESATPESSGGSSGGSSGGMDPLQLLQPLEAEIKGTKLKAHWNSGATITCVPQAFLEEEVPIKNIWIKTIHGEKEQPVYYLTFKIQGRKVEAEVISSPYDYILVSPSDIPWLMKKPLQLTTLVPLQEYEERLLKQTMLTGSYKEKLQSLFLKYDALWQHWENQVGHRRIKPHHIATGTVNPRPQKQYPINPKAKASIQTVINDLLKQGVLIQQNSIMNTPVYPVPKPDGKWRMVLDYREVNKTIPLIAAQNQHSAGILSSIFRGKYKTTLDLSNGFWAHSITPESYWLTAFTWLGQQYCWTRLPQGFLNSPALFNADVVDLLKEVPNVQVYVDDIYISHDDPREHLEQLEKVFSLLLNAGYVVSLKKSEIAQHEVEFLGFNITKEGRGLTETFKQKLLNITPPRDLKQLQSILGLLNFARNFIPNFSELVKPLYNIIATAPGKYITWTTDNSQQLQNIISMLNSAENLEERNPEVRLIMKVNTSPSAGYIRFYNEFAKRPIMYLNYVYTKAEVKFTNTEKLLTTIHKGLIKALDLGMGQEILVYSPIVSMTKIQKTPLPERKALPIRWITWMSYLEDPRIQFHYDKTLPELQQVPTVTDDIIAKIKHPSEFSMVFYTDGSAIKHPNVNKSHNAGMGIAQVQFKPEFTVINTWSIPLGDHTAQLAEVAAVEFACKKALKIDGPVLIVTDSFYVAESVNKELPYWQSNGFFNNKKKPLKHVSKWKSIADCIQLKPDIIIIHEKGHQPTASTFHTEGNNLADKLATQGSYVVNAGKRTADGSEFEKRTADGSEFESPKKKAKVE

SEQ ID NO: 7741 - protein, 2116 aa, synthetic construct
MPAAKRVKLDGGDKKYSIGLDIGTNSVGWAVITDEYKVPSKKFKVLGNTDRHSIKKNLIGALLFDSGETAEATRLKRTARRRYTRRKNRICYLQEIFSNEMAKVDDSFFHRLEESFLVEEDKKHERHPIFGNIVDEVAYHEKYPTIYHLRKKLVDSTDKADLRLIYLALAHMIKFRGHFLIEGDLNPDNSDVDKLFIQLVQTYNQLFEENPINASGVDAKAILSARLSKSRRLENLIAQLPGEKKNGLFGNLIALSLGLTPNFKSNFDLAEDAKLQLSKDTYDDDLDNLLAQIGDQYADLFLAAKNLSDAILLSDILRVNTEITKAPLSASMIKRYDEHHQDLTLLKALVRQQLPEKYKEIFFDQSKNGYAGYIDGGASQEEFYKFIKPILEKMDGTEELLVKLNREDLLRKQRTFDNGSIPHQIHLGELHAILRRQEDFYPFLKDNREKIEKILTFRIPYYVGPLARGNSRFAWMTRKSEETITPWNFEEVVDKGASAQSFIERMTNFDKNLPNEKVLPKHSLLYEYFTVYNELTKVKYVTEGMRKPAFLSGEQKKAIVDLLFKTNRKVTVKQLKEDYFKKIECFDSVEISGVEDRFNASLGTYHDLLKIIKDKDFLDNEENEDILEDIVLTLTLFEDREMIEERLKTYAHLFDDKVMKQLKRRRYTGWGRLSRKLINGIRDKQSGKTILDFLKSDGFANRNFMQLIHDDSLTFKEDIQKAQVSGQGDSLHEHIANLAGSPAIKKGILQTVKVVDELVKVMGRHKPENIVIEMARENQTTQKGQKNSRERMKRIEEGIKELGSQILKEHPVENTQLQNEKLYLYYLQNGRDMYVDQELDINRLSDYDVDHIVPQSFLKDDSIDNKVLTRSDKARGKSDNVPSEEVVKKMKNYWRQLLNAKLITQRKFDNLTKAERGGLSELDKAGFIKRQLVETRQITKHVAQILDSRMNTKYDENDKLIREVKVITLKSKLVSDFRKDFQFYKVREINNYHHAHDAYLNAVVGTALIKKYPKLESEFVYGDYKVYDVRKMIAKSEQEIGKATAKYFFYSNIMNFFKTEITLANGEIRKRPLIETNGETGEIVWDKGRDFATVRKVLSMPQVNIVKKTEVQTGGFSKESILPKRNSDKLIARKKDWDPKKYGGFDSPTVAYSVLVVAKVEKGKSKKLKSVKELLGITIMERSSFEKNPIDFLEAKGYKEVKKDLIIKLPKYSLFELENGRKRMLASAGELQKGNELALPSKYVNFLYLASHYEKLKGSPEDNEQKQLFVEQHKHYLDEIIEQISEFSKRVILADANLDKVLSAYNKHRDKPIREQAENIIHLFTLTNLGAPAAFKYFDTTIDRKRYTSTKEVLDATLIHQSITGLYETRIDLSQLGGDGGSGGSSGGSSGSETPGTSESATPESSGGSSGGSSGGVLNLEEEYRLHEKPVPSSIDPSWLQLFPTVWAERAGMGLANQVPPVVVELRSGASPVAVRQYPMSKEAREGIRPHIQRFLDLGVLVPCQSPWNTPLLPVKKPGTNDYRPVQDLREINKRVQDIHPTVPNPYNLLSSLPPSHTWYSVLDLKDAFFCLKLHPNSQPLFAFEWRDPEKGNTGQLTWTRLPQGFKNSPTLFDEALHRDLAPFRALNPQVVLLQYVDDLLVAAPTYRDCKEGTQKLLQELSKLGYRVSAKKAQLCQKEVTYLGYLLKEGKRWLTPARKATVMKIPPPTTPRQVREFLGTAGFCRLWIPGFASLAAPLYPLTKESIPFIWTEEHQKAFDRIKEALLSAPALALPDLTKPFTLYVDERAGVARGVLTQTLGPWRRPVAYLSKKLDPVASGWPTCLKAVAAVALLLKDADKLTLGQNVTVIASHSLESIVRQPPDRWMTNARMTHYQSLLLNERVSFAPPAVLNPATLLPVESEATPVHRCSEILAEETGTRRDLKDQPLPGVPAWYTDGSSFIAEGKRRAGAAIVDGKRTVWASSLPEGTSAQKAELVALTQALRLAEGKDINIYTDSRYAFATAHIHGAIYKQRGLLTSAGKDIKNKEEILALLEAIHLPKRVAIIHCPGHQKGNDPVATGNRRADEAAKQAALSTRVLAETTKPAGKRTADGSEFEKRTADGSEFESPKKKAKVE

SEQ ID NO: 7742 - protein, 2116 aa, synthetic construct
MPAAKRVKLDGGDKKYSIGLDIGTNSVGWAVITDEYKVPSKKFKVLGNTDRHSIKKNLIGALLFDSGETAEATRLKRTARRRYTRRKNRICYLQEIFSNEMAKVDDSFFHRLEESFLVEEDKKHERHPIFGNIVDEVAYHEKYPTIYHLRKKLVDSTDKADLRLIYLALAHMIKFRGHFLIEGDLNPDNSDVDKLFIQLVQTYNQLFEENPINASGVDAKAILSARLSKSRRLENLIAQLPGEKKNGLFGNLIALSLGLTPNFKSNFDLAEDAKLQLSKDTYDDDLDNLLAQIGDQYADLFLAAKNLSDAILLSDILRVNTEITKAPLSASMIKRYDEHHQDLTLLKALVRQQLPEKYKEIFFDQSKNGYAGYIDGGASQEEFYKFIKPILEKMDGTEELLVKLNREDLLRKQRTFDNGSIPHQIHLGELHAILRRQEDFYPFLKDNREKIEKILTFRIPYYVGPLARGNSRFAWMTRKSEETITPWNFEEVVDKGASAQSFIERMTNFDKNLPNEKVLPKHSLLYEYFTVYNELTKVKYVTEGMRKPAFLSGEQKKAIVDLLFKTNRKVTVKQLKEDYFKKIECFDSVEISGVEDRFNASLGTYHDLLKIIKDKDFLDNEENEDILEDIVLTLTLFEDREMIEERLKTYAHLFDDKVMKQLKRRRYTGWGRLSRKLINGIRDKQSGKTILDFLKSDGFANRNFMQLIHDDSLTFKEDIQKAQVSGQGDSLHEHIANLAGSPAIKKGILQTVKVVDELVKVMGRHKPENIVIEMARENQTTQKGQKNSRERMKRIEEGIKELGSQILKEHPVENTQLQNEKLYLYYLQNGRDMYVDQELDINRLSDYDVDHIVPQSFLKDDSIDNKVLTRSDKARGKSDNVPSEEVVKKMKNYWRQLLNAKLITQRKFDNLTKAERGGLSELDKAGFIKRQLVETRQITKHVAQILDSRMNTKYDENDKLIREVKVITLKSKLVSDFRKDFQFYKVREINNYHHAHDAYLNAVVGTALIKKYPKLESEFVYGDYKVYDVRKMIAKSEQEIGKATAKYFFYSNIMNFFKTEITLANGEIRKRPLIETNGETGEIVWDKGRDFATVRKVLSMPQVNIVKKTEVQTGGFSKESILPKRNSDKLIARKKDWDPKKYGGFDSPTVAYSVLVVAKVEKGKSKKLKSVKELLGITIMERSSFEKNPIDFLEAKGYKEVKKDLIIKLPKYSLFELENGRKRMLASAGELQKGNELALPSKYVNFLYLASHYEKLKGSPEDNEQKQLFVEQHKHYLDEIIEQISEFSKRVILADANLDKVLSAYNKHRDKPIREQAENIIHLFTLTNLGAPAAFKYFDTTIDRKRYTSTKEVLDATLIHQSITGLYETRIDLSQLGGDGGSGGSSGGSSGSETPGTSESATPESSGGSSGGSSGGVLNLEEEYRLHEKPVPSSIDPSWLQLFPTVWAERAGMGLANQVPPVVVELRSGASPVAVRQYPMSKEAREGIRPHIQRFLDLGVLVPCQSPWNTPLLPVKKPGTNDYRPVQDLREINKRVQDIHPTVPNPYNLLSSLPPSHTWYSVLDLKDAFFCLKLHPNSQPLFAFEWRDPEKGNTGQLTWTRLPQGFKNSPTLFNEALHRDLAPFRALNPQVVLLQYVDDLLVAAPTYRDCKEGTQKLLQELSKLGYRVSAKKAQLCQKEVTYLGYLLKEGKRWLTPARKATVMKIPPPTTPRQVREFLGTAGFCRLWIPGFASLAAPLYPLTKPSIPFIWTEEHQKAFDRIKEALLSAPALALPDLTKPFTLYVDERAGVARGVLTQTLGPWRRPVAYLSKKLDPVASGWPTCLKAVAAVALLLKDADKLTLGQNVTVIASHSLESIVRQPPDRWMTNARMTHYQSLLLNERVSFAPPAVLNPATLLPVESEATPVHRCSEILAEETGTRRDLKDQPLPGVPAWYTDGSSFIAEGKRRAGAAIVDGKRTVWASSLPEGTSAQKAELVALTQALRLAEGKDINIYTDSRYAFATAHIHGAIYKQRGWLTSAGKDIKNKEEILALLEAIHLPKRVAIIHCPGHQKGNDPVATGNRRADEAAKQAALSTRVLAETTKPAGKRTADGSEFEKRTADGSEFESPKKKAKVE

SEQ ID NO: 7743 - protein, 2116 aa, synthetic construct
MPAAKRVKLDGGDKKYSIGLDIGTNSVGWAVITDEYKVPSKKFKVLGNTDRHSIKKNLIGALLFDSGETAEATRLKRTARRRYTRRKNRICYLQEIFSNEMAKVDDSFFHRLEESFLVEEDKKHERHPIFGNIVDEVAYHEKYPTIYHLRKKLVDSTDKADLRLIYLALAHMIKFRGHFLIEGDLNPDNSDVDKLFIQLVQTYNQLFEENPINASGVDAKAILSARLSKSRRLENLIAQLPGEKKNGLFGNLIALSLGLTPNFKSNFDLAEDAKLQLSKDTYDDDLDNLLAQIGDQYADLFLAAKNLSDAILLSDILRVNTEITKAPLSASMIKRYDEHHQDLTLLKALVRQQLPEKYKEIFFDQSKNGYAGYIDGGASQEEFYKFIKPILEKMDGTEELLVKLNREDLLRKQRTFDNGSIPHQIHLGELHAILRRQEDFYPFLKDNREKIEKILTFRIPYYVGPLARGNSRFAWMTRKSEETITPWNFEEVVDKGASAQSFIERMTNFDKNLPNEKVLPKHSLLYEYFTVYNELTKVKYVTEGMRKPAFLSGEQKKAIVDLLFKTNRKVTVKQLKEDYFKKIECFDSVEISGVEDRFNASLGTYHDLLKIIKDKDFLDNEENEDILEDIVLTLTLFEDREMIEERLKTYAHLFDDKVMKQLKRRRYTGWGRLSRKLINGIRDKQSGKTILDFLKSDGFANRNFMQLIHDDSLTFKEDIQKAQVSGQGDSLHEHIANLAGSPAIKKGILQTVKVVDELVKVMGRHKPENIVIEMARENQTTQKGQKNSRERMKRIEEGIKELGSQILKEHPVENTQLQNEKLYLYYLQNGRDMYVDQELDINRLSDYDVDHIVPQSFLKDDSIDNKVLTRSDKARGKSDNVPSEEVVKKMKNYWRQLLNAKLITQRKFDNLTKAERGGLSELDKAGFIKRQLVETRQITKHVAQILDSRMNTKYDENDKLIREVKVITLKSKLVSDFRKDFQFYKVREINNYHHAHDAYLNAVVGTALIKKYPKLESEFVYGDYKVYDVRKMIAKSEQEIGKATAKYFFYSNIMNFFKTEITLANGEIRKRPLIETNGETGEIVWDKGRDFATVRKVLSMPQVNIVKKTEVQTGGFSKESILPKRNSDKLIARKKDWDPKKYGGFDSPTVAYSVLVVAKVEKGKSKKLKSVKELLGITIMERSSFEKNPIDFLEAKGYKEVKKDLIIKLPKYSLFELENGRKRMLASAGELQKGNELALPSKYVNFLYLASHYEKLKGSPEDNEQKQLFVEQHKHYLDEIIEQISEFSKRVILADANLDKVLSAYNKHRDKPIREQAENIIHLFTLTNLGAPAAFKYFDTTIDRKRYTSTKEVLDATLIHQSITGLYETRIDLSQLGGDGGSGGSSGGSSGSETPGTSESATPESSGGSSGGSSGGVLNLEEEYRLHEKPVPSSIDPSWLQLFPTVWAERAGMGLANQVPPVVVELRSGASPVAVRQYPMSKEAREGIRPHIQRFLDLGVLVPCQSPWNTPLLPVKKPGTNDYRPVQDLREINKRVQDIHPTVPNPYNLLSSLPPSHTWYSVLDLKDAFFCLKLHPNSQPLFAFEWRDPEKGNTGQLTWTRLPQGFKNSPTLFNEALHRDLAPFRALNPQVVLLQYVDDLLVAAPTYRDCKEGTQKLLQELSKLGYRVSAKKAQLCQKEVTYLGYLLKEGKRWLTPARKATVMKIPPPTTPRQVREFLGKAGFCRLFIPGFASLAAPLYPLTKPSIPFIWTEEHQKAFDRIKEALLSAPALALPDLTKPFTLYVDERAGVARGVLTQTLGPWRRPVAYLSKKLDPVASGWPTCLKAVAAVALLLKDADKLTLGQNVTVIASHSLESIVRQPPDRWMTNARMTHYQSLLLNERVSFAPPAVLNPATLLPVESEATPVHRCSEILAEETGTRRDLKDQPLPGVPAWYTDGSSFIAEGKRRAGAAIVDGKRTVWASSLPEGTSAQKAELVALTQALRLAEGKDINIYTDSRYAFATAHIHGAIYKQRGWLTSAGKDIKNKEEILALLEAIHLPKRVAIIHCPGHQKGNDPVATGNRRADEAAKQAALSTRVLAETTKPAGKRTADGSEFEKRTADGSEFESPKKKAKVE

SEQ ID NO: 7744-16000 - skipped (8257 entries)

SEQ ID NO: 16001 - protein, 2280 aa, synthetic construct
MPAAKRVKLDGGDKKYSIGLDIGTNSVGWAVITDEYKVPSKKFKVLGNTDRHSIKKNLIGALLFDSGETAEATRLKRTARRRYTRRKNRICYLQEIFSNEMAKVDDSFFHRLEESFLVEEDKKHERHPIFGNIVDEVAYHEKYPTIYHLRKKLVDSTDKADLRLIYLALAHMIKFRGHFLIEGDLNPDNSDVDKLFIQLVQTYNQLFEENPINASGVDAKAILSARLSKSRRLENLIAQLPGEKKNGLFGNLIALSLGLTPNFKSNFDLAEDAKLQLSKDTYDDDLDNLLAQIGDQYADLFLAAKNLSDAILLSDILRVNTEITKAPLSASMIKRYDEHHQDLTLLKALVRQQLPEKYKEIFFDQSKNGYAGYIDGGASQEEFYKFIKPILEKMDGTEELLVKLNREDLLRKQRTFDNGSIPHQIHLGELHAILRRQEDFYPFLKDNREKIEKILTFRIPYYVGPLARGNSRFAWMTRKSEETITPWNFEEVVDKGASAQSFIERMTNFDKNLPNEKVLPKHSLLYEYFTVYNELTKVKYVTEGMRKPAFLSGEQKKAIVDLLFKTNRKVTVKQLKEDYFKKIECFDSVEISGVEDRFNASLGTYHDLLKIIKDKDFLDNEENEDILEDIVLTLTLFEDREMIEERLKTYAHLFDDKVMKQLKRRRYTGWGRLSRKLINGIRDKQSGKTILDFLKSDGFANRNFMQLIHDDSLTFKEDIQKAQVSGQGDSLHEHIANLAGSPAIKKGILQTVKVVDELVKVMGRHKPENIVIEMARENQTTQKGQKNSRERMKRIEEGIKELGSQILKEHPVENTQLQNEKLYLYYLQNGRDMYVDQELDINRLSDYDVDHIVPQSFLKDDSIDNKVLTRSDKARGKSDNVPSEEVVKKMKNYWRQLLNAKLITQRKFDNLTKAERGGLSELDKAGFIKRQLVETRQITKHVAQILDSRMNTKYDENDKLIREVKVITLKSKLVSDFRKDFQFYKVREINNYHHAHDAYLNAVVGTALIKKYPKLESEFVYGDYKVYDVRKMIAKSEQEIGKATAKYFFYSNIMNFFKTEITLANGEIRKRPLIETNGETGEIVWDKGRDFATVRKVLSMPQVNIVKKTEVQTGGFSKESILPKRNSDKLIARKKDWDPKKYGGFDSPTVAYSVLVVAKVEKGKSKKLKSVKELLGITIMERSSFEKNPIDFLEAKGYKEVKKDLIIKLPKYSLFELENGRKRMLASAGELQKGNELALPSKYVNFLYLASHYEKLKGSPEDNEQKQLFVEQHKHYLDEIIEQISEFSKRVILADANLDKVLSAYNKHRDKPIREQAENIIHLFTLTNLGAPAAFKYFDTTIDRKRYTSTKEVLDATLIHQSITGLYETRIDLSQLGGDAEAAAKEAAAKEAAAKEAAAKALEAEAAAKEAAAKEAAAKEAAAKAMASNFTQFVLVDNGGTGDVTVAPSNFANGIAEWISSNSRSQAYKVTCSVRQSSAQNRKYTIKVEVPKGAWRSYLNMELTIPIFATNSDCELIVKAMQGLLKDGNPIPSAIAANSGIYAEAAAKEAAAKEAAAKEAAAKALEAEAAAKEAAAKEAAAKEAAAKATAPLEEEYRLFLEAPIQNVTLLEQWKREIPKVWAEINPPGLASTQAPIHVQLLSTALPVRVRQYPITLEAKRSLRETIRKFRAAGILRPVHSPWNTPLLPVRKSGTSEYRMVQDLREVNKRVETIHPTVPNPYTLLSLLPPDRIWYSVLDLKDAFFCIPLAPESQLIFAFEWADAEEGESGQLTWTRLPQGFKNSPTLFNEALNRDLQGFRLDHPSVSLLQYVDDLLIAADTQAACLSATRDLLMTLAELGYRVSGKKAQLCQEEVTYLGFKIHKGSRSLSNSRTQAILQIPVPKTKRQVREFLGKIGYCRLFIPGFAELAQPLYAATRPGNDPLVWGEKEEEAFQSLKLALTQPPALALPSLDKPFQLFVEETSGAAKGVLTQALGPWKRPVAYLSKRLDPVAAGWPRCLRAIAAAALLTREASKLTFGQDIEITSSHNLESLLRSPPDKWLTNARITQYQVLLLDPPRVRFKQTAALNPATLLPETDDTLPIHHCLDTLDSLTSTRPDLTDQPLAQAEATLFTDGSSYIRDGKRYAGAAVVTLDSVIWAEPLPIGTSAQKAELIALTKALEWSKDKSVNIYTDSRYAFATLHVHGMIYRERGWLTAGGKAIKNAPEILALLTAVWLPKRVAVMHCKGHQKDDAPTSTGNRRADEVAREVAIRPLSTQATISKRTADGSEFESPKKKAKVE

SEQ ID NO: 16002 - protein, 2267 aa, synthetic construct
MPAAKRVKLDGGDKKYSIGLDIGTNSVGWAVITDEYKVPSKKFKVLGNTDRHSIKKNLIGALLFDSGETAEATRLKRTARRRYTRRKNRICYLQEIFSNEMAKVDDSFFHRLEESFLVEEDKKHERHPIFGNIVDEVAYHEKYPTIYHLRKKLVDSTDKADLRLIYLALAHMIKFRGHFLIEGDLNPDNSDVDKLFIQLVQTYNQLFEENPINASGVDAKAILSARLSKSRRLENLIAQLPGEKKNGLFGNLIALSLGLTPNFKSNFDLAEDAKLQLSKDTYDDDLDNLLAQIGDQYADLFLAAKNLSDAILLSDILRVNTEITKAPLSASMIKRYDEHHQDLTLLKALVRQQLPEKYKEIFFDQSKNGYAGYIDGGASQEEFYKFIKPILEKMDGTEELLVKLNREDLLRKQRTFDNGSIPHQIHLGELHAILRRQEDFYPFLKDNREKIEKILTFRIPYYVGPLARGNSRFAWMTRKSEETITPWNFEEVVDKGASAQSFIERMTNFDKNLPNEKVLPKHSLLYEYFTVYNELTKVKYVTEGMRKPAFLSGEQKKAIVDLLFKTNRKVTVKQLKEDYFKKIECFDSVEISGVEDRFNASLGTYHDLLKIIKDKDFLDNEENEDILEDIVLTLTLFEDREMIEERLKTYAHLFDDKVMKQLKRRRYTGWGRLSRKLINGIRDKQSGKTILDFLKSDGFANRNFMQLIHDDSLTFKEDIQKAQVSGQGDSLHEHIANLAGSPAIKKGILQTVKVVDELVKVMGRHKPENIVIEMARENQTTQKGQKNSRERMKRIEEGIKELGSQILKEHPVENTQLQNEKLYLYYLQNGRDMYVDQELDINRLSDYDVDHIVPQSFLKDDSIDNKVLTRSDKARGKSDNVPSEEVVKKMKNYWRQLLNAKLITQRKFDNLTKAERGGLSELDKAGFIKRQLVETRQITKHVAQILDSRMNTKYDENDKLIREVKVITLKSKLVSDFRKDFQFYKVREINNYHHAHDAYLNAVVGTALIKKYPKLESEFVYGDYKVYDVRKMIAKSEQEIGKATAKYFFYSNIMNFFKTEITLANGEIRKRPLIETNGETGEIVWDKGRDFATVRKVLSMPQVNIVKKTEVQTGGFSKESILPKRNSDKLIARKKDWDPKKYGGFDSPTVAYSVLVVAKVEKGKSKKLKSVKELLGITIMERSSFEKNPIDFLEAKGYKEVKKDLIIKLPKYSLFELENGRKRMLASAGELQKGNELALPSKYVNFLYLASHYEKLKGSPEDNEQKQLFVEQHKHYLDEIIEQISEFSKRVILADANLDKVLSAYNKHRDKPIREQAENIIHLFTLTNLGAPAAFKYFDTTIDRKRYTSTKEVLDATLIHQSITGLYETRIDLSQLGGDAEAAAKEAAAKEAAAKEAAAKALEAEAAAKEAAAKEAAAKEAAAKAMASNFTQFVLVDNGGTGDVTVAPSNFANGIAEWISSNSRSQAYKVTCSVRQSSAQNRKYTIKVEVPKGAWRSYLNMELTIPIFATNSDCELIVKAMQGLLKDGNPIPSAIAANSGIYSGGSSGGSSGSETPGTSESATPESSGGSSGGSSTAPLEEEYRLFLEAPIQNVTLLEQWKREIPKVWAEINPPGLASTQAPIHVQLLSTALPVRVRQYPITLEAKRSLRETIRKFRAAGILRPVHSPWNTPLLPVRKSGTSEYRMVQDLREVNKRVETIHPTVPNPYTLLSLLPPDRIWYSVLDLKDAFFCIPLAPESQLIFAFEWADAEEGESGQLTWTRLPQGFKNSPTLFNEALNRDLQGFRLDHPSVSLLQYVDDLLIAADTQAACLSATRDLLMTLAELGYRVSGKKAQLCQEEVTYLGFKIHKGSRSLSNSRTQAILQIPVPKTKRQVREFLGKIGYCRLFIPGFAELAQPLYAATRPGNDPLVWGEKEEEAFQSLKLALTQPPALALPSLDKPFQLFVEETSGAAKGVLTQALGPWKRPVAYLSKRLDPVAAGWPRCLRAIAAAALLTREASKLTFGQDIEITSSHNLESLLRSPPDKWLTNARITQYQVLLLDPPRVRFKQTAALNPATLLPETDDTLPIHHCLDTLDSLTSTRPDLTDQPLAQAEATLFTDGSSYIRDGKRYAGAAVVTLDSVIWAEPLPIGTSAQKAELIALTKALEWSKDKSVNIYTDSRYAFATLHVHGMIYRERGWLTAGGKAIKNAPEILALLTAVWLPKRVAVMHCKGHQKDDAPTSTGNRRADEVAREVAIRPLSTQATISKRTADGSEFESPKKKAKVE

SEQ ID NO: 16003 - protein, 2252 aa, synthetic construct
MPAAKRVKLDGGDKKYSIGLDIGTNSVGWAVITDEYKVPSKKFKVLGNTDRHSIKKNLIGALLFDSGETAEATRLKRTARRRYTRRKNRICYLQEIFSNEMAKVDDSFFHRLEESFLVEEDKKHERHPIFGNIVDEVAYHEKYPTIYHLRKKLVDSTDKADLRLIYLALAHMIKFRGHFLIEGDLNPDNSDVDKLFIQLVQTYNQLFEENPINASGVDAKAILSARLSKSRRLENLIAQLPGEKKNGLFGNLIALSLGLTPNFKSNFDLAEDAKLQLSKDTYDDDLDNLLAQIGDQYADLFLAAKNLSDAILLSDILRVNTEITKAPLSASMIKRYDEHHQDLTLLKALVRQQLPEKYKEIFFDQSKNGYAGYIDGGASQEEFYKFIKPILEKMDGTEELLVKLNREDLLRKQRTFDNGSIPHQIHLGELHAILRRQEDFYPFLKDNREKIEKILTFRIPYYVGPLARGNSRFAWMTRKSEETITPWNFEEVVDKGASAQSFIERMTNFDKNLPNEKVLPKHSLLYEYFTVYNELTKVKYVTEGMRKPAFLSGEQKKAIVDLLFKTNRKVTVKQLKEDYFKKIECFDSVEISGVEDRFNASLGTYHDLLKIIKDKDFLDNEENEDILEDIVLTLTLFEDREMIEERLKTYAHLFDDKVMKQLKRRRYTGWGRLSRKLINGIRDKQSGKTILDFLKSDGFANRNFMQLIHDDSLTFKEDIQKAQVSGQGDSLHEHIANLAGSPAIKKGILQTVKVVDELVKVMGRHKPENIVIEMARENQTTQKGQKNSRERMKRIEEGIKELGSQILKEHPVENTQLQNEKLYLYYLQNGRDMYVDQELDINRLSDYDVDHIVPQSFLKDDSIDNKVLTRSDKARGKSDNVPSEEVVKKMKNYWRQLLNAKLITQRKFDNLTKAERGGLSELDKAGFIKRQLVETRQITKHVAQILDSRMNTKYDENDKLIREVKVITLKSKLVSDFRKDFQFYKVREINNYHHAHDAYLNAVVGTALIKKYPKLESEFVYGDYKVYDVRKMIAKSEQEIGKATAKYFFYSNIMNFFKTEITLANGEIRKRPLIETNGETGEIVWDKGRDFATVRKVLSMPQVNIVKKTEVQTGGFSKESILPKRNSDKLIARKKDWDPKKYGGFDSPTVAYSVLVVAKVEKGKSKKLKSVKELLGITIMERSSFEKNPIDFLEAKGYKEVKKDLIIKLPKYSLFELENGRKRMLASAGELQKGNELALPSKYVNFLYLASHYEKLKGSPEDNEQKQLFVEQHKHYLDEIIEQISEFSKRVILADANLDKVLSAYNKHRDKPIREQAENIIHLFTLTNLGAPAAFKYFDTTIDRKRYTSTKEVLDATLIHQSITGLYETRIDLSQLGGDAEAAAKEAAAKEAAAKEAAAKALEAEAAAKEAAAKEAAAKEAAAKAMASNFTQFVLVDNGGTGDVTVAPSNFANGIAEWISSNSRSQAYKVTCSVRQSSAQNRKYTIKVEVPKGAWRSYLNMELTIPIFATNSDCELIVKAMQGLLKDGNPIPSAIAANSGIYGSSGSSGSSGSSGSSGSSTAPLEEEYRLFLEAPIQNVTLLEQWKREIPKVWAEINPPGLASTQAPIHVQLLSTALPVRVRQYPITLEAKRSLRETIRKFRAAGILRPVHSPWNTPLLPVRKSGTSEYRMVQDLREVNKRVETIHPTVPNPYTLLSLLPPDRIWYSVLDLKDAFFCIPLAPESQLIFAFEWADAEEGESGQLTWTRLPQGFKNSPTLFNEALNRDLQGFRLDHPSVSLLQYVDDLLIAADTQAACLSATRDLLMTLAELGYRVSGKKAQLCQEEVTYLGFKIHKGSRSLSNSRTQAILQIPVPKTKRQVREFLGKIGYCRLFIPGFAELAQPLYAATRPGNDPLVWGEKEEEAFQSLKLALTQPPALALPSLDKPFQLFVEETSGAAKGVLTQALGPWKRPVAYLSKRLDPVAAGWPRCLRAIAAAALLTREASKLTFGQDIEITSSHNLESLLRSPPDKWLTNARITQYQVLLLDPPRVRFKQTAALNPATLLPETDDTLPIHHCLDTLDSLTSTRPDLTDQPLAQAEATLFTDGSSYIRDGKRYAGAAVVTLDSVIWAEPLPIGTSAQKAELIALTKALEWSKDKSVNIYTDSRYAFATLHVHGMIYRERGWLTAGGKAIKNAPEILALLTAVWLPKRVAVMHCKGHQKDDAPTSTGNRRADEVAREVAIRPLSTQATISKRTADGSEFESPKKKAKVE

SEQ ID NO: 16004 - protein, 2245 aa, synthetic construct
MPAAKRVKLDGGDKKYSIGLDIGTNSVGWAVITDEYKVPSKKFKVLGNTDRHSIKKNLIGALLFDSGETAEATRLKRTARRRYTRRKNRICYLQEIFSNEMAKVDDSFFHRLEESFLVEEDKKHERHPIFGNIVDEVAYHEKYPTIYHLRKKLVDSTDKADLRLIYLALAHMIKFRGHFLIEGDLNPDNSDVDKLFIQLVQTYNQLFEENPINASGVDAKAILSARLSKSRRLENLIAQLPGEKKNGLFGNLIALSLGLTPNFKSNFDLAEDAKLQLSKDTYDDDLDNLLAQIGDQYADLFLAAKNLSDAILLSDILRVNTEITKAPLSASMIKRYDEHHQDLTLLKALVRQQLPEKYKEIFFDQSKNGYAGYIDGGASQEEFYKFIKPILEKMDGTEELLVKLNREDLLRKQRTFDNGSIPHQIHLGELHAILRRQEDFYPFLKDNREKIEKILTFRIPYYVGPLARGNSRFAWMTRKSEETITPWNFEEVVDKGASAQSFIERMTNFDKNLPNEKVLPKHSLLYEYFTVYNELTKVKYVTEGMRKPAFLSGEQKKAIVDLLFKTNRKVTVKQLKEDYFKKIECFDSVEISGVEDRFNASLGTYHDLLKIIKDKDFLDNEENEDILEDIVLTLTLFEDREMIEERLKTYAHLFDDKVMKQLKRRRYTGWGRLSRKLINGIRDKQSGKTILDFLKSDGFANRNFMQLIHDDSLTFKEDIQKAQVSGQGDSLHEHIANLAGSPAIKKGILQTVKVVDELVKVMGRHKPENIVIEMARENQTTQKGQKNSRERMKRIEEGIKELGSQILKEHPVENTQLQNEKLYLYYLQNGRDMYVDQELDINRLSDYDVDHIVPQSFLKDDSIDNKVLTRSDKARGKSDNVPSEEVVKKMKNYWRQLLNAKLITQRKFDNLTKAERGGLSELDKAGFIKRQLVETRQITKHVAQILDSRMNTKYDENDKLIREVKVITLKSKLVSDFRKDFQFYKVREINNYHHAHDAYLNAVVGTALIKKYPKLESEFVYGDYKVYDVRKMIAKSEQEIGKATAKYFFYSNIMNFFKTEITLANGEIRKRPLIETNGETGEIVWDKGRDFATVRKVLSMPQVNIVKKTEVQTGGFSKESILPKRNSDKLIARKKDWDPKKYGGFDSPTVAYSVLVVAKVEKGKSKKLKSVKELLGITIMERSSFEKNPIDFLEAKGYKEVKKDLIIKLPKYSLFELENGRKRMLASAGELQKGNELALPSKYVNFLYLASHYEKLKGSPEDNEQKQLFVEQHKHYLDEIIEQISEFSKRVILADANLDKVLSAYNKHRDKPIREQAENIIHLFTLTNLGAPAAFKYFDTTIDRKRYTSTKEVLDATLIHQSITGLYETRIDLSQLGGDAEAAAKEAAAKEAAAKEAAAKALEAEAAAKEAAAKEAAAKEAAAKAMASNFTQFVLVDNGGTGDVTVAPSNFANGIAEWISSNSRSQAYKVTCSVRQSSAQNRKYTIKVEVPKGAWRSYLNMELTIPIFATNSDCELIVKAMQGLLKDGNPIPSAIAANSGIYGSSGGGEAAAKTAPLEEEYRLFLEAPIQNVTLLEQWKREIPKVWAEINPPGLASTQAPIHVQLLSTALPVRVRQYPITLEAKRSLRETIRKFRAAGILRPVHSPWNTPLLPVRKSGTSEYRMVQDLREVNKRVETIHPTVPNPYTLLSLLPPDRIWYSVLDLKDAFFCIPLAPESQLIFAFEWADAEEGESGQLTWTRLPQGFKNSPTLFNEALNRDLQGFRLDHPSVSLLQYVDDLLIAADTQAACLSATRDLLMTLAELGYRVSGKKAQLCQEEVTYLGFKIHKGSRSLSNSRTQAILQIPVPKTKRQVREFLGKIGYCRLFIPGFAELAQPLYAATRPGNDPLVWGEKEEEAFQSLKLALTQPPALALPSLDKPFQLFVEETSGAAKGVLTQALGPWKRPVAYLSKRLDPVAAGWPRCLRAIAAAALLTREASKLTFGQDIEITSSHNLESLLRSPPDKWLTNARITQYQVLLLDPPRVRFKQTAALNPATLLPETDDTLPIHHCLDTLDSLTSTRPDLTDQPLAQAEATLFTDGSSYIRDGKRYAGAAVVTLDSVIWAEPLPIGTSAQKAELIALTKALEWSKDKSVNIYTDSRYAFATLHVHGMIYRERGWLTAGGKAIKNAPEILALLTAVWLPKRVAVMHCKGHQKDDAPTSTGNRRADEVAREVAIRPLSTQATISKRTADGSEFESPKKKAKVE

SEQ ID NO: 16005 - protein, 2403 aa, synthetic construct
MPAAKRVKLDGGDKKYSIGLDIGTNSVGWAVITDEYKVPSKKFKVLGNTDRHSIKKNLIGALLFDSGETAEATRLKRTARRRYTRRKNRICYLQEIFSNEMAKVDDSFFHRLEESFLVEEDKKHERHPIFGNIVDEVAYHEKYPTIYHLRKKLVDSTDKADLRLIYLALAHMIKFRGHFLIEGDLNPDNSDVDKLFIQLVQTYNQLFEENPINASGVDAKAILSARLSKSRRLENLIAQLPGEKKNGLFGNLIALSLGLTPNFKSNFDLAEDAKLQLSKDTYDDDLDNLLAQIGDQYADLFLAAKNLSDAILLSDILRVNTEITKAPLSASMIKRYDEHHQDLTLLKALVRQQLPEKYKEIFFDQSKNGYAGYIDGGASQEEFYKFIKPILEKMDGTEELLVKLNREDLLRKQRTFDNGSIPHQIHLGELHAILRRQEDFYPFLKDNREKIEKILTFRIPYYVGPLARGNSRFAWMTRKSEETITPWNFEEVVDKGASAQSFIERMTNFDKNLPNEKVLPKHSLLYEYFTVYNELTKVKYVTEGMRKPAFLSGEQKKAIVDLLFKTNRKVTVKQLKEDYFKKIECFDSVEISGVEDRFNASLGTYHDLLKIIKDKDFLDNEENEDILEDIVLTLTLFEDREMIEERLKTYAHLFDDKVMKQLKRRRYTGWGRLSRKLINGIRDKQSGKTILDFLKSDGFANRNFMQLIHDDSLTFKEDIQKAQVSGQGDSLHEHIANLAGSPAIKKGILQTVKVVDELVKVMGRHKPENIVIEMARENQTTQKGQKNSRERMKRIEEGIKELGSQILKEHPVENTQLQNEKLYLYYLQNGRDMYVDQELDINRLSDYDVDHIVPQSFLKDDSIDNKVLTRSDKARGKSDNVPSEEVVKKMKNYWRQLLNAKLITQRKFDNLTKAERGGLSELDKAGFIKRQLVETRQITKHVAQILDSRMNTKYDENDKLIREVKVITLKSKLVSDFRKDFQFYKVREINNYHHAHDAYLNAVVGTALIKKYPKLESEFVYGDYKVYDVRKMIAKSEQEIGKATAKYFFYSNIMNFFKTEITLANGEIRKRPLIETNGETGEIVWDKGRDFATVRKVLSMPQVNIVKKTEVQTGGFSKESILPKRNSDKLIARKKDWDPKKYGGFDSPTVAYSVLVVAKVEKGKSKKLKSVKELLGITIMERSSFEKNPIDFLEAKGYKEVKKDLIIKLPKYSLFELENGRKRMLASAGELQKGNELALPSKYVNFLYLASHYEKLKGSPEDNEQKQLFVEQHKHYLDEIIEQISEFSKRVILADANLDKVLSAYNKHRDKPIREQAENIIHLFTLTNLGAPAAFKYFDTTIDRKRYTSTKEVLDATLIHQSITGLYETRIDLSQLGGDAEAAAKEAAAKEAAAKEAAAKALEAEAAAKEAAAKEAAAKEAAAKAMASNFTQFVLVDNGGTGDVTVAPSNFANGIAEWISSNSRSQAYKVTCSVRQSSAQNRKYTIKVEVPKGAWRSYLNMELTIPIFATNSDCELIVKAMQGLLKDGNPIPSAIAANSGIYGGSGGSMASNFTQFVLVDNGGTGDVTVAPSNFANGIAEWISSNSRSQAYKVTCSVRQSSAQNRKYTIKVEVPKGAWRSYLNMELTIPIFATNSDCELIVKAMQGLLKDGNPIPSAIAANSGIYAEAAAKEAAAKEAAAKEAAAKALEAEAAAKEAAAKEAAAKEAAAKATAPLEEEYRLFLEAPIQNVTLLEQWKREIPKVWAEINPPGLASTQAPIHVQLLSTALPVRVRQYPITLEAKRSLRETIRKFRAAGILRPVHSPWNTPLLPVRKSGTSEYRMVQDLREVNKRVETIHPTVPNPYTLLSLLPPDRIWYSVLDLKDAFFCIPLAPESQLIFAFEWADAEEGESGQLTWTRLPQGFKNSPTLFNEALNRDLQGFRLDHPSVSLLQYVDDLLIAADTQAACLSATRDLLMTLAELGYRVSGKKAQLCQEEVTYLGFKIHKGSRSLSNSRTQAILQIPVPKTKRQVREFLGKIGYCRLFIPGFAELAQPLYAATRPGNDPLVWGEKEEEAFQSLKLALTQPPALALPSLDKPFQLFVEETSGAAKGVLTQALGPWKRPVAYLSKRLDPVAAGWPRCLRAIAAAALLTREASKLTFGQDIEITSSHNLESLLRSPPDKWLTNARITQYQVLLLDPPRVRFKQTAALNPATLLPETDDTLPIHHCLDTLDSLTSTRPDLTDQPLAQAEATLFTDGSSYIRDGKRYAGAAVVTLDSVIWAEPLPIGTSAQKAELIALTKALEWSKDKSVNIYTDSRYAFATLHVHGMIYRERGWLTAGGKAIKNAPEILALLTAVWLPKRVAVMHCKGHQKDDAPTSTGNRRADEVAREVAIRPLSTQATISKRTADGSEFESPKKKAKVE

SEQ ID NO: 16006 - protein, 2390 aa, synthetic construct
MPAAKRVKLDGGDKKYSIGLDIGTNSVGWAVITDEYKVPSKKFKVLGNTDRHSIKKNLIGALLFDSGETAEATRLKRTARRRYTRRKNRICYLQEIFSNEMAKVDDSFFHRLEESFLVEEDKKHERHPIFGNIVDEVAYHEKYPTIYHLRKKLVDSTDKADLRLIYLALAHMIKFRGHFLIEGDLNPDNSDVDKLFIQLVQTYNQLFEENPINASGVDAKAILSARLSKSRRLENLIAQLPGEKKNGLFGNLIALSLGLTPNFKSNFDLAEDAKLQLSKDTYDDDLDNLLAQIGDQYADLFLAAKNLSDAILLSDILRVNTEITKAPLSASMIKRYDEHHQDLTLLKALVRQQLPEKYKEIFFDQSKNGYAGYIDGGASQEEFYKFIKPILEKMDGTEELLVKLNREDLLRKQRTFDNGSIPHQIHLGELHAILRRQEDFYPFLKDNREKIEKILTFRIPYYVGPLARGNSRFAWMTRKSEETITPWNFEEVVDKGASAQSFIERMTNFDKNLPNEKVLPKHSLLYEYFTVYNELTKVKYVTEGMRKPAFLSGEQKKAIVDLLFKTNRKVTVKQLKEDYFKKIECFDSVEISGVEDRFNASLGTYHDLLKIIKDKDFLDNEENEDILEDIVLTLTLFEDREMIEERLKTYAHLFDDKVMKQLKRRRYTGWGRLSRKLINGIRDKQSGKTILDFLKSDGFANRNFMQLIHDDSLTFKEDIQKAQVSGQGDSLHEHIANLAGSPAIKKGILQTVKVVDELVKVMGRHKPENIVIEMARENQTTQKGQKNSRERMKRIEEGIKELGSQILKEHPVENTQLQNEKLYLYYLQNGRDMYVDQELDINRLSDYDVDHIVPQSFLKDDSIDNKVLTRSDKARGKSDNVPSEEVVKKMKNYWRQLLNAKLITQRKFDNLTKAERGGLSELDKAGFIKRQLVETRQITKHVAQILDSRMNTKYDENDKLIREVKVITLKSKLVSDFRKDFQFYKVREINNYHHAHDAYLNAVVGTALIKKYPKLESEFVYGDYKVYDVRKMIAKSEQEIGKATAKYFFYSNIMNFFKTEITLANGEIRKRPLIETNGETGEIVWDKGRDFATVRKVLSMPQVNIVKKTEVQTGGFSKESILPKRNSDKLIARKKDWDPKKYGGFDSPTVAYSVLVVAKVEKGKSKKLKSVKELLGITIMERSSFEKNPIDFLEAKGYKEVKKDLIIKLPKYSLFELENGRKRMLASAGELQKGNELALPSKYVNFLYLASHYEKLKGSPEDNEQKQLFVEQHKHYLDEIIEQISEFSKRVILADANLDKVLSAYNKHRDKPIREQAENIIHLFTLTNLGAPAAFKYFDTTIDRKRYTSTKEVLDATLIHQSITGLYETRIDLSQLGGDAEAAAKEAAAKEAAAKEAAAKALEAEAAAKEAAAKEAAAKEAAAKAMASNFTQFVLVDNGGTGDVTVAPSNFANGIAEWISSNSRSQAYKVTCSVRQSSAQNRKYTIKVEVPKGAWRSYLNMELTIPIFATNSDCELIVKAMQGLLKDGNPIPSAIAANSGIYGGSGGSMASNFTQFVLVDNGGTGDVTVAPSNFANGIAEWISSNSRSQAYKVTCSVRQSSAQNRKYTIKVEVPKGAWRSYLNMELTIPIFATNSDCELIVKAMQGLLKDGNPIPSAIAANSGIYSGGSSGGSSGSETPGTSESATPESSGGSSGGSSTAPLEEEYRLFLEAPIQNVTLLEQWKREIPKVWAEINPPGLASTQAPIHVQLLSTALPVRVRQYPITLEAKRSLRETIRKFRAAGILRPVHSPWNTPLLPVRKSGTSEYRMVQDLREVNKRVETIHPTVPNPYTLLSLLPPDRIWYSVLDLKDAFFCIPLAPESQLIFAFEWADAEEGESGQLTWTRLPQGFKNSPTLFNEALNRDLQGFRLDHPSVSLLQYVDDLLIAADTQAACLSATRDLLMTLAELGYRVSGKKAQLCQEEVTYLGFKIHKGSRSLSNSRTQAILQIPVPKTKRQVREFLGKIGYCRLFIPGFAELAQPLYAATRPGNDPLVWGEKEEEAFQSLKLALTQPPALALPSLDKPFQLFVEETSGAAKGVLTQALGPWKRPVAYLSKRLDPVAAGWPRCLRAIAAAALLTREASKLTFGQDIEITSSHNLESLLRSPPDKWLTNARITQYQVLLLDPPRVRFKQTAALNPATLLPETDDTLPIHHCLDTLDSLTSTRPDLTDQPLAQAEATLFTDGSSYIRDGKRYAGAAVVTLDSVIWAEPLPIGTSAQKAELIALTKALEWSKDKSVNIYTDSRYAFATLHVHGMIYRERGWLTAGGKAIKNAPEILALLTAVWLPKRVAVMHCKGHQKDDAPTSTGNRRADEVAREVAIRPLSTQATISKRTADGSEFESPKKKAKVE

SEQ ID NO: 16007 - protein, 2375 aa, synthetic construct
MPAAKRVKLDGGDKKYSIGLDIGTNSVGWAVITDEYKVPSKKFKVLGNTDRHSIKKNLIGALLFDSGETAEATRLKRTARRRYTRRKNRICYLQEIFSNEMAKVDDSFFHRLEESFLVEEDKKHERHPIFGNIVDEVAYHEKYPTIYHLRKKLVDSTDKADLRLIYLALAHMIKFRGHFLIEGDLNPDNSDVDKLFIQLVQTYNQLFEENPINASGVDAKAILSARLSKSRRLENLIAQLPGEKKNGLFGNLIALSLGLTPNFKSNFDLAEDAKLQLSKDTYDDDLDNLLAQIGDQYADLFLAAKNLSDAILLSDILRVNTEITKAPLSASMIKRYDEHHQDLTLLKALVRQQLPEKYKEIFFDQSKNGYAGYIDGGASQEEFYKFIKPILEKMDGTEELLVKLNREDLLRKQRTFDNGSIPHQIHLGELHAILRRQEDFYPFLKDNREKIEKILTFRIPYYVGPLARGNSRFAWMTRKSEETITPWNFEEVVDKGASAQSFIERMTNFDKNLPNEKVLPKHSLLYEYFTVYNELTKVKYVTEGMRKPAFLSGEQKKAIVDLLFKTNRKVTVKQLKEDYFKKIECFDSVEISGVEDRFNASLGTYHDLLKIIKDKDFLDNEENEDILEDIVLTLTLFEDREMIEERLKTYAHLFDDKVMKQLKRRRYTGWGRLSRKLINGIRDKQSGKTILDFLKSDGFANRNFMQLIHDDSLTFKEDIQKAQVSGQGDSLHEHIANLAGSPAIKKGILQTVKVVDELVKVMGRHKPENIVIEMARENQTTQKGQKNSRERMKRIEEGIKELGSQILKEHPVENTQLQNEKLYLYYLQNGRDMYVDQELDINRLSDYDVDHIVPQSFLKDDSIDNKVLTRSDKARGKSDNVPSEEVVKKMKNYWRQLLNAKLITQRKFDNLTKAERGGLSELDKAGFIKRQLVETRQITKHVAQILDSRMNTKYDENDKLIREVKVITLKSKLVSDFRKDFQFYKVREINNYHHAHDAYLNAVVGTALIKKYPKLESEFVYGDYKVYDVRKMIAKSEQEIGKATAKYFFYSNIMNFFKTEITLANGEIRKRPLIETNGETGEIVWDKGRDFATVRKVLSMPQVNIVKKTEVQTGGFSKESILPKRNSDKLIARKKDWDPKKYGGFDSPTVAYSVLVVAKVEKGKSKKLKSVKELLGITIMERSSFEKNPIDFLEAKGYKEVKKDLIIKLPKYSLFELENGRKRMLASAGELQKGNELALPSKYVNFLYLASHYEKLKGSPEDNEQKQLFVEQHKHYLDEIIEQISEFSKRVILADANLDKVLSAYNKHRDKPIREQAENIIHLFTLTNLGAPAAFKYFDTTIDRKRYTSTKEVLDATLIHQSITGLYETRIDLSQLGGDAEAAAKEAAAKEAAAKEAAAKALEAEAAAKEAAAKEAAAKEAAAKAMASNFTQFVLVDNGGTGDVTVAPSNFANGIAEWISSNSRSQAYKVTCSVRQSSAQNRKYTIKVEVPKGAWRSYLNMELTIPIFATNSDCELIVKAMQGLLKDGNPIPSAIAANSGIYGGSGGSMASNFTQFVLVDNGGTGDVTVAPSNFANGIAEWISSNSRSQAYKVTCSVRQSSAQNRKYTIKVEVPKGAWRSYLNMELTIPIFATNSDCELIVKAMQGLLKDGNPIPSAIAANSGIYGSSGSSGSSGSSGSSGSSTAPLEEEYRLFLEAPIQNVTLLEQWKREIPKVWAEINPPGLASTQAPIHVQLLSTALPVRVRQYPITLEAKRSLRETIRKFRAAGILRPVHSPWNTPLLPVRKSGTSEYRMVQDLREVNKRVETIHPTVPNPYTLLSLLPPDRIWYSVLDLKDAFFCIPLAPESQLIFAFEWADAEEGESGQLTWTRLPQGFKNSPTLFNEALNRDLQGFRLDHPSVSLLQYVDDLLIAADTQAACLSATRDLLMTLAELGYRVSGKKAQLCQEEVTYLGFKIHKGSRSLSNSRTQAILQIPVPKTKRQVREFLGKIGYCRLFIPGFAELAQPLYAATRPGNDPLVWGEKEEEAFQSLKLALTQPPALALPSLDKPFQLFVEETSGAAKGVLTQALGPWKRPVAYLSKRLDPVAAGWPRCLRAIAAAALLTREASKLTFGQDIEITSSHNLESLLRSPPDKWLTNARITQYQVLLLDPPRVRFKQTAALNPATLLPETDDTLPIHHCLDTLDSLTSTRPDLTDQPLAQAEATLFTDGSSYIRDGKRYAGAAVVTLDSVIWAEPLPIGTSAQKAELIALTKALEWSKDKSVNIYTDSRYAFATLHVHGMIYRERGWLTAGGKAIKNAPEILALLTAVWLPKRVAVMHCKGHQKDDAPTSTGNRRADEVAREVAIRPLSTQATISKRTADGSEFESPKKKAKVE

SEQ ID NO: 16008 - protein, 2368 aa, synthetic construct
MPAAKRVKLDGGDKKYSIGLDIGTNSVGWAVITDEYKVPSKKFKVLGNTDRHSIKKNLIGALLFDSGETAEATRLKRTARRRYTRRKNRICYLQEIFSNEMAKVDDSFFHRLEESFLVEEDKKHERHPIFGNIVDEVAYHEKYPTIYHLRKKLVDSTDKADLRLIYLALAHMIKFRGHFLIEGDLNPDNSDVDKLFIQLVQTYNQLFEENPINASGVDAKAILSARLSKSRRLENLIAQLPGEKKNGLFGNLIALSLGLTPNFKSNFDLAEDAKLQLSKDTYDDDLDNLLAQIGDQYADLFLAAKNLSDAILLSDILRVNTEITKAPLSASMIKRYDEHHQDLTLLKALVRQQLPEKYKEIFFDQSKNGYAGYIDGGASQEEFYKFIKPILEKMDGTEELLVKLNREDLLRKQRTFDNGSIPHQIHLGELHAILRRQEDFYPFLKDNREKIEKILTFRIPYYVGPLARGNSRFAWMTRKSEETITPWNFEEVVDKGASAQSFIERMTNFDKNLPNEKVLPKHSLLYEYFTVYNELTKVKYVTEGMRKPAFLSGEQKKAIVDLLFKTNRKVTVKQLKEDYFKKIECFDSVEISGVEDRFNASLGTYHDLLKIIKDKDFLDNEENEDILEDIVLTLTLFEDREMIEERLKTYAHLFDDKVMKQLKRRRYTGWGRLSRKLINGIRDKQSGKTILDFLKSDGFANRNFMQLIHDDSLTFKEDIQKAQVSGQGDSLHEHIANLAGSPAIKKGILQTVKVVDELVKVMGRHKPENIVIEMARENQTTQKGQKNSRERMKRIEEGIKELGSQILKEHPVENTQLQNEKLYLYYLQNGRDMYVDQELDINRLSDYDVDHIVPQSFLKDDSIDNKVLTRSDKARGKSDNVPSEEVVKKMKNYWRQLLNAKLITQRKFDNLTKAERGGLSELDKAGFIKRQLVETRQITKHVAQILDSRMNTKYDENDKLIREVKVITLKSKLVSDFRKDFQFYKVREINNYHHAHDAYLNAVVGTALIKKYPKLESEFVYGDYKVYDVRKMIAKSEQEIGKATAKYFFYSNIMNFFKTEITLANGEIRKRPLIETNGETGEIVWDKGRDFATVRKVLSMPQVNIVKKTEVQTGGFSKESILPKRNSDKLIARKKDWDPKKYGGFDSPTVAYSVLVVAKVEKGKSKKLKSVKELLGITIMERSSFEKNPIDFLEAKGYKEVKKDLIIKLPKYSLFELENGRKRMLASAGELQKGNELALPSKYVNFLYLASHYEKLKGSPEDNEQKQLFVEQHKHYLDEIIEQISEFSKRVILADANLDKVLSAYNKHRDKPIREQAENIIHLFTLTNLGAPAAFKYFDTTIDRKRYTSTKEVLDATLIHQSITGLYETRIDLSQLGGDAEAAAKEAAAKEAAAKEAAAKALEAEAAAKEAAAKEAAAKEAAAKAMASNFTQFVLVDNGGTGDVTVAPSNFANGIAEWISSNSRSQAYKVTCSVRQSSAQNRKYTIKVEVPKGAWRSYLNMELTIPIFATNSDCELIVKAMQGLLKDGNPIPSAIAANSGIYGGSGGSMASNFTQFVLVDNGGTGDVTVAPSNFANGIAEWISSNSRSQAYKVTCSVRQSSAQNRKYTIKVEVPKGAWRSYLNMELTIPIFATNSDCELIVKAMQGLLKDGNPIPSAIAANSGIYGSSGGGEAAAKTAPLEEEYRLFLEAPIQNVTLLEQWKREIPKVWAEINPPGLASTQAPIHVQLLSTALPVRVRQYPITLEAKRSLRETIRKFRAAGILRPVHSPWNTPLLPVRKSGTSEYRMVQDLREVNKRVETIHPTVPNPYTLLSLLPPDRIWYSVLDLKDAFFCIPLAPESQLIFAFEWADAEEGESGQLTWTRLPQGFKNSPTLFNEALNRDLQGFRLDHPSVSLLQYVDDLLIAADTQAACLSATRDLLMTLAELGYRVSGKKAQLCQEEVTYLGFKIHKGSRSLSNSRTQAILQIPVPKTKRQVREFLGKIGYCRLFIPGFAELAQPLYAATRPGNDPLVWGEKEEEAFQSLKLALTQPPALALPSLDKPFQLFVEETSGAAKGVLTQALGPWKRPVAYLSKRLDPVAAGWPRCLRAIAAAALLTREASKLTFGQDIEITSSHNLESLLRSPPDKWLTNARITQYQVLLLDPPRVRFKQTAALNPATLLPETDDTLPIHHCLDTLDSLTSTRPDLTDQPLAQAEATLFTDGSSYIRDGKRYAGAAVVTLDSVIWAEPLPIGTSAQKAELIALTKALEWSKDKSVNIYTDSRYAFATLHVHGMIYRERGWLTAGGKAIKNAPEILALLTAVWLPKRVAVMHCKGHQKDDAPTSTGNRRADEVAREVAIRPLSTQATISKRTADGSEFESPKKKAKVE

SEQ ID NO: 16009 - protein, 2659 aa, synthetic construct
MPAAKRVKLDGGDKKYSIGLDIGTNSVGWAVITDEYKVPSKKFKVLGNTDRHSIKKNLIGALLFDSGETAEATRLKRTARRRYTRRKNRICYLQEIFSNEMAKVDDSFFHRLEESFLVEEDKKHERHPIFGNIVDEVAYHEKYPTIYHLRKKLVDSTDKADLRLIYLALAHMIKFRGHFLIEGDLNPDNSDVDKLFIQLVQTYNQLFEENPINASGVDAKAILSARLSKSRRLENLIAQLPGEKKNGLFGNLIALSLGLTPNFKSNFDLAEDAKLQLSKDTYDDDLDNLLAQIGDQYADLFLAAKNLSDAILLSDILRVNTEITKAPLSASMIKRYDEHHQDLTLLKALVRQQLPEKYKEIFFDQSKNGYAGYIDGGASQEEFYKFIKPILEKMDGTEELLVKLNREDLLRKQRTFDNGSIPHQIHLGELHAILRRQEDFYPFLKDNREKIEKILTFRIPYYVGPLARGNSRFAWMTRKSEETITPWNFEEVVDKGASAQSFIERMTNFDKNLPNEKVLPKHSLLYEYFTVYNELTKVKYVTEGMRKPAFLSGEQKKAIVDLLFKTNRKVTVKQLKEDYFKKIECFDSVEISGVEDRFNASLGTYHDLLKIIKDKDFLDNEENEDILEDIVLTLTLFEDREMIEERLKTYAHLFDDKVMKQLKRRRYTGWGRLSRKLINGIRDKQSGKTILDFLKSDGFANRNFMQLIHDDSLTFKEDIQKAQVSGQGDSLHEHIANLAGSPAIKKGILQTVKVVDELVKVMGRHKPENIVIEMARENQTTQKGQKNSRERMKRIEEGIKELGSQILKEHPVENTQLQNEKLYLYYLQNGRDMYVDQELDINRLSDYDVDHIVPQSFLKDDSIDNKVLTRSDKARGKSDNVPSEEVVKKMKNYWRQLLNAKLITQRKFDNLTKAERGGLSELDKAGFIKRQLVETRQITKHVAQILDSRMNTKYDENDKLIREVKVITLKSKLVSDFRKDFQFYKVREINNYHHAHDAYLNAVVGTALIKKYPKLESEFVYGDYKVYDVRKMIAKSEQEIGKATAKYFFYSNIMNFFKTEITLANGEIRKRPLIETNGETGEIVWDKGRDFATVRKVLSMPQVNIVKKTEVQTGGFSKESILPKRNSDKLIARKKDWDPKKYGGFDSPTVAYSVLVVAKVEKGKSKKLKSVKELLGITIMERSSFEKNPIDFLEAKGYKEVKKDLIIKLPKYSLFELENGRKRMLASAGELQKGNELALPSKYVNFLYLASHYEKLKGSPEDNEQKQLFVEQHKHYLDEIIEQISEFSKRVILADANLDKVLSAYNKHRDKPIREQAENIIHLFTLTNLGAPAAFKYFDTTIDRKRYTSTKEVLDATLIHQSITGLYETRIDLSQLGGDAEAAAKEAAAKEAAAKEAAAKALEAEAAAKEAAAKEAAAKEAAAKAMASNFTQFVLVDNGGTGDVTVAPSNFANGIAEWISSNSRSQAYKVTCSVRQSSAQNRKYTIKVEVPKGAWRSYLNMELTIPIFATNSDCELIVKAMQGLLKDGNPIPSAIAANSGIYGGSGGSMASNFTQFVLVDNGGTGDVTVAPSNFANGIAEWISSNSRSQAYKVTCSVRQSSAQNRKYTIKVEVPKGAWRSYLNMELTIPIFATNSDCELIVKAMQGLLKDGNPIPSAIAANSGIYGGGSGGGSGGGSGGGSMASNFTQFVLVDNGGTGDVTVAPSNFANGIAEWISSNSRSQAYKVTCSVRQSSAQNRKYTIKVEVPKGAWRSYLNMELTIPIFATNSDCELIVKAMQGLLKDGNPIPSAIAANSGIYGGSGGSMASNFTQFVLVDNGGTGDVTVAPSNFANGIAEWISSNSRSQAYKVTCSVRQSSAQNRKYTIKVEVPKGAWRSYLNMELTIPIFATNSDCELIVKAMQGLLKDGNPIPSAIAANSGIYAEAAAKEAAAKEAAAKEAAAKALEAEAAAKEAAAKEAAAKEAAAKATAPLEEEYRLFLEAPIQNVTLLEQWKREIPKVWAEINPPGLASTQAPIHVQLLSTALPVRVRQYPITLEAKRSLRETIRKFRAAGILRPVHSPWNTPLLPVRKSGTSEYRMVQDLREVNKRVETIHPTVPNPYTLLSLLPPDRIWYSVLDLKDAFFCIPLAPESQLIFAFEWADAEEGESGQLTWTRLPQGFKNSPTLFNEALNRDLQGFRLDHPSVSLLQYVDDLLIAADTQAACLSATRDLLMTLAELGYRVSGKKAQLCQEEVTYLGFKIHKGSRSLSNSRTQAILQIPVPKTKRQVREFLGKIGYCRLFIPGFAELAQPLYAATRPGNDPLVWGEKEEEAFQSLKLALTQPPALALPSLDKPFQLFVEETSGAAKGVLTQALGPWKRPVAYLSKRLDPVAAGWPRCLRAIAAAALLTREASKLTFGQDIEITSSHNLESLLRSPPDKWLTNARITQYQVLLLDPPRVRFKQTAALNPATLLPETDDTLPIHHCLDTLDSLTSTRPDLTDQPLAQAEATLFTDGSSYIRDGKRYAGAAVVTLDSVIWAEPLPIGTSAQKAELIALTKALEWSKDKSVNIYTDSRYAFATLHVHGMIYRERGWLTAGGKAIKNAPEILALLTAVWLPKRVAVMHCKGHQKDDAPTSTGNRRADEVAREVAIRPLSTQATISKRTADGSEFESPKKKAKVE

SEQ ID NO: 16010 - protein, 2646 aa, synthetic construct
MPAAKRVKLDGGDKKYSIGLDIGTNSVGWAVITDEYKVPSKKFKVLGNTDRHSIKKNLIGALLFDSGETAEATRLKRTARRRYTRRKNRICYLQEIFSNEMAKVDDSFFHRLEESFLVEEDKKHERHPIFGNIVDEVAYHEKYPTIYHLRKKLVDSTDKADLRLIYLALAHMIKFRGHFLIEGDLNPDNSDVDKLFIQLVQTYNQLFEENPINASGVDAKAILSARLSKSRRLENLIAQLPGEKKNGLFGNLIALSLGLTPNFKSNFDLAEDAKLQLSKDTYDDDLDNLLAQIGDQYADLFLAAKNLSDAILLSDILRVNTEITKAPLSASMIKRYDEHHQDLTLLKALVRQQLPEKYKEIFFDQSKNGYAGYIDGGASQEEFYKFIKPILEKMDGTEELLVKLNREDLLRKQRTFDNGSIPHQIHLGELHAILRRQEDFYPFLKDNREKIEKILTFRIPYYVGPLARGNSRFAWMTRKSEETITPWNFEEVVDKGASAQSFIERMTNFDKNLPNEKVLPKHSLLYEYFTVYNELTKVKYVTEGMRKPAFLSGEQKKAIVDLLFKTNRKVTVKQLKEDYFKKIECFDSVEISGVEDRFNASLGTYHDLLKIIKDKDFLDNEENEDILEDIVLTLTLFEDREMIEERLKTYAHLFDDKVMKQLKRRRYTGWGRLSRKLINGIRDKQSGKTILDFLKSDGFANRNFMQLIHDDSLTFKEDIQKAQVSGQGDSLHEHIANLAGSPAIKKGILQTVKVVDELVKVMGRHKPENIVIEMARENQTTQKGQKNSRERMKRIEEGIKELGSQILKEHPVENTQLQNEKLYLYYLQNGRDMYVDQELDINRLSDYDVDHIVPQSFLKDDSIDNKVLTRSDKARGKSDNVPSEEVVKKMKNYWRQLLNAKLITQRKFDNLTKAERGGLSELDKAGFIKRQLVETRQITKHVAQILDSRMNTKYDENDKLIREVKVITLKSKLVSDFRKDFQFYKVREINNYHHAHDAYLNAVVGTALIKKYPKLESEFVYGDYKVYDVRKMIAKSEQEIGKATAKYFFYSNIMNFFKTEITLANGEIRKRPLIETNGETGEIVWDKGRDFATVRKVLSMPQVNIVKKTEVQTGGFSKESILPKRNSDKLIARKKDWDPKKYGGFDSPTVAYSVLVVAKVEKGKSKKLKSVKELLGITIMERSSFEKNPIDFLEAKGYKEVKKDLIIKLPKYSLFELENGRKRMLASAGELQKGNELALPSKYVNFLYLASHYEKLKGSPEDNEQKQLFVEQHKHYLDEIIEQISEFSKRVILADANLDKVLSAYNKHRDKPIREQAENIIHLFTLTNLGAPAAFKYFDTTIDRKRYTSTKEVLDATLIHQSITGLYETRIDLSQLGGDAEAAAKEAAAKEAAAKEAAAKALEAEAAAKEAAAKEAAAKEAAAKAMASNFTQFVLVDNGGTGDVTVAPSNFANGIAEWISSNSRSQAYKVTCSVRQSSAQNRKYTIKVEVPKGAWRSYLNMELTIPIFATNSDCELIVKAMQGLLKDGNPIPSAIAANSGIYGGSGGSMASNFTQFVLVDNGGTGDVTVAPSNFANGIAEWISSNSRSQAYKVTCSVRQSSAQNRKYTIKVEVPKGAWRSYLNMELTIPIFATNSDCELIVKAMQGLLKDGNPIPSAIAANSGIYGGGSGGGSGGGSGGGSMASNFTQFVLVDNGGTGDVTVAPSNFANGIAEWISSNSRSQAYKVTCSVRQSSAQNRKYTIKVEVPKGAWRSYLNMELTIPIFATNSDCELIVKAMQGLLKDGNPIPSAIAANSGIYGGSGGSMASNFTQFVLVDNGGTGDVTVAPSNFANGIAEWISSNSRSQAYKVTCSVRQSSAQNRKYTIKVEVPKGAWRSYLNMELTIPIFATNSDCELIVKAMQGLLKDGNPIPSAIAANSGIYSGGSSGGSSGSETPGTSESATPESSGGSSGGSSTAPLEEEYRLFLEAPIQNVTLLEQWKREIPKVWAEINPPGLASTQAPIHVQLLSTALPVRVRQYPITLEAKRSLRETIRKFRAAGILRPVHSPWNTPLLPVRKSGTSEYRMVQDLREVNKRVETIHPTVPNPYTLLSLLPPDRIWYSVLDLKDAFFCIPLAPESQLIFAFEWADAEEGESGQLTWTRLPQGFKNSPTLFNEALNRDLQGFRLDHPSVSLLQYVDDLLIAADTQAACLSATRDLLMTLAELGYRVSGKKAQLCQEEVTYLGFKIHKGSRSLSNSRTQAILQIPVPKTKRQVREFLGKIGYCRLFIPGFAELAQPLYAATRPGNDPLVWGEKEEEAFQSLKLALTQPPALALPSLDKPFQLFVEETSGAAKGVLTQALGPWKRPVAYLSKRLDPVAAGWPRCLRAIAAAALLTREASKLTFGQDIEITSSHNLESLLRSPPDKWLTNARITQYQVLLLDPPRVRFKQTAALNPATLLPETDDTLPIHHCLDTLDSLTSTRPDLTDQPLAQAEATLFTDGSSYIRDGKRYAGAAVVTLDSVIWAEPLPIGTSAQKAELIALTKALEWSKDKSVNIYTDSRYAFATLHVHGMIYRERGWLTAGGKAIKNAPEILALLTAVWLPKRVAVMHCKGHQKDDAPTSTGNRRADEVAREVAIRPLSTQATISKRTADGSEFESPKKKAKVE

SEQ ID NO: 16011 - protein, 2631 aa, synthetic construct
MPAAKRVKLDGGDKKYSIGLDIGTNSVGWAVITDEYKVPSKKFKVLGNTDRHSIKKNLIGALLFDSGETAEATRLKRTARRRYTRRKNRICYLQEIFSNEMAKVDDSFFHRLEESFLVEEDKKHERHPIFGNIVDEVAYHEKYPTIYHLRKKLVDSTDKADLRLIYLALAHMIKFRGHFLIEGDLNPDNSDVDKLFIQLVQTYNQLFEENPINASGVDAKAILSARLSKSRRLENLIAQLPGEKKNGLFGNLIALSLGLTPNFKSNFDLAEDAKLQLSKDTYDDDLDNLLAQIGDQYADLFLAAKNLSDAILLSDILRVNTEITKAPLSASMIKRYDEHHQDLTLLKALVRQQLPEKYKEIFFDQSKNGYAGYIDGGASQEEFYKFIKPILEKMDGTEELLVKLNREDLLRKQRTFDNGSIPHQIHLGELHAILRRQEDFYPFLKDNREKIEKILTFRIPYYVGPLARGNSRFAWMTRKSEETITPWNFEEVVDKGASAQSFIERMTNFDKNLPNEKVLPKHSLLYEYFTVYNELTKVKYVTEGMRKPAFLSGEQKKAIVDLLFKTNRKVTVKQLKEDYFKKIECFDSVEISGVEDRFNASLGTYHDLLKIIKDKDFLDNEENEDILEDIVLTLTLFEDREMIEERLKTYAHLFDDKVMKQLKRRRYTGWGRLSRKLINGIRDKQSGKTILDFLKSDGFANRNFMQLIHDDSLTFKEDIQKAQVSGQGDSLHEHIANLAGSPAIKKGILQTVKVVDELVKVMGRHKPENIVIEMARENQTTQKGQKNSRERMKRIEEGIKELGSQILKEHPVENTQLQNEKLYLYYLQNGRDMYVDQELDINRLSDYDVDHIVPQSFLKDDSIDNKVLTRSDKARGKSDNVPSEEVVKKMKNYWRQLLNAKLITQRKFDNLTKAERGGLSELDKAGFIKRQLVETRQITKHVAQILDSRMNTKYDENDKLIREVKVITLKSKLVSDFRKDFQFYKVREINNYHHAHDAYLNAVVGTALIKKYPKLESEFVYGDYKVYDVRKMIAKSEQEIGKATAKYFFYSNIMNFFKTEITLANGEIRKRPLIETNGETGEIVWDKGRDFATVRKVLSMPQVNIVKKTEVQTGGFSKESILPKRNSDKLIARKKDWDPKKYGGFDSPTVAYSVLVVAKVEKGKSKKLKSVKELLGITIMERSSFEKNPIDFLEAKGYKEVKKDLIIKLPKYSLFELENGRKRMLASAGELQKGNELALPSKYVNFLYLASHYEKLKGSPEDNEQKQLFVEQHKHYLDEIIEQISEFSKRVILADANLDKVLSAYNKHRDKPIREQAENIIHLFTLTNLGAPAAFKYFDTTIDRKRYTSTKEVLDATLIHQSITGLYETRIDLSQLGGDAEAAAKEAAAKEAAAKEAAAKALEAEAAAKEAAAKEAAAKEAAAKAMASNFTQFVLVDNGGTGDVTVAPSNFANGIAEWISSNSRSQAYKVTCSVRQSSAQNRKYTIKVEVPKGAWRSYLNMELTIPIFATNSDCELIVKAMQGLLKDGNPIPSAIAANSGIYGGSGGSMASNFTQFVLVDNGGTGDVTVAPSNFANGIAEWISSNSRSQAYKVTCSVRQSSAQNRKYTIKVEVPKGAWRSYLNMELTIPIFATNSDCELIVKAMQGLLKDGNPIPSAIAANSGIYGGGSGGGSGGGSGGGSMASNFTQFVLVDNGGTGDVTVAPSNFANGIAEWISSNSRSQAYKVTCSVRQSSAQNRKYTIKVEVPKGAWRSYLNMELTIPIFATNSDCELIVKAMQGLLKDGNPIPSAIAANSGIYGGSGGSMASNFTQFVLVDNGGTGDVTVAPSNFANGIAEWISSNSRSQAYKVTCSVRQSSAQNRKYTIKVEVPKGAWRSYLNMELTIPIFATNSDCELIVKAMQGLLKDGNPIPSAIAANSGIYGSSGSSGSSGSSGSSGSSTAPLEEEYRLFLEAPIQNVTLLEQWKREIPKVWAEINPPGLASTQAPIHVQLLSTALPVRVRQYPITLEAKRSLRETIRKFRAAGILRPVHSPWNTPLLPVRKSGTSEYRMVQDLREVNKRVETIHPTVPNPYTLLSLLPPDRIWYSVLDLKDAFFCIPLAPESQLIFAFEWADAEEGESGQLTWTRLPQGFKNSPTLFNEALNRDLQGFRLDHPSVSLLQYVDDLLIAADTQAACLSATRDLLMTLAELGYRVSGKKAQLCQEEVTYLGFKIHKGSRSLSNSRTQAILQIPVPKTKRQVREFLGKIGYCRLFIPGFAELAQPLYAATRPGNDPLVWGEKEEEAFQSLKLALTQPPALALPSLDKPFQLFVEETSGAAKGVLTQALGPWKRPVAYLSKRLDPVAAGWPRCLRAIAAAALLTREASKLTFGQDIEITSSHNLESLLRSPPDKWLTNARITQYQVLLLDPPRVRFKQTAALNPATLLPETDDTLPIHHCLDTLDSLTSTRPDLTDQPLAQAEATLFTDGSSYIRDGKRYAGAAVVTLDSVIWAEPLPIGTSAQKAELIALTKALEWSKDKSVNIYTDSRYAFATLHVHGMIYRERGWLTAGGKAIKNAPEILALLTAVWLPKRVAVMHCKGHQKDDAPTSTGNRRADEVAREVAIRPLSTQATISKRTADGSEFESPKKKAKVE

SEQ ID NO: 16012 - protein, 2624 aa, synthetic construct
MPAAKRVKLDGGDKKYSIGLDIGTNSVGWAVITDEYKVPSKKFKVLGNTDRHSIKKNLIGALLFDSGETAEATRLKRTARRRYTRRKNRICYLQEIFSNEMAKVDDSFFHRLEESFLVEEDKKHERHPIFGNIVDEVAYHEKYPTIYHLRKKLVDSTDKADLRLIYLALAHMIKFRGHFLIEGDLNPDNSDVDKLFIQLVQTYNQLFEENPINASGVDAKAILSARLSKSRRLENLIAQLPGEKKNGLFGNLIALSLGLTPNFKSNFDLAEDAKLQLSKDTYDDDLDNLLAQIGDQYADLFLAAKNLSDAILLSDILRVNTEITKAPLSASMIKRYDEHHQDLTLLKALVRQQLPEKYKEIFFDQSKNGYAGYIDGGASQEEFYKFIKPILEKMDGTEELLVKLNREDLLRKQRTFDNGSIPHQIHLGELHAILRRQEDFYPFLKDNREKIEKILTFRIPYYVGPLARGNSRFAWMTRKSEETITPWNFEEVVDKGASAQSFIERMTNFDKNLPNEKVLPKHSLLYEYFTVYNELTKVKYVTEGMRKPAFLSGEQKKAIVDLLFKTNRKVTVKQLKEDYFKKIECFDSVEISGVEDRFNASLGTYHDLLKIIKDKDFLDNEENEDILEDIVLTLTLFEDREMIEERLKTYAHLFDDKVMKQLKRRRYTGWGRLSRKLINGIRDKQSGKTILDFLKSDGFANRNFMQLIHDDSLTFKEDIQKAQVSGQGDSLHEHIANLAGSPAIKKGILQTVKVVDELVKVMGRHKPENIVIEMARENQTTQKGQKNSRERMKRIEEGIKELGSQILKEHPVENTQLQNEKLYLYYLQNGRDMYVDQELDINRLSDYDVDHIVPQSFLKDDSIDNKVLTRSDKARGKSDNVPSEEVVKKMKNYWRQLLNAKLITQRKFDNLTKAERGGLSELDKAGFIKRQLVETRQITKHVAQILDSRMNTKYDENDKLIREVKVITLKSKLVSDFRKDFQFYKVREINNYHHAHDAYLNAVVGTALIKKYPKLESEFVYGDYKVYDVRKMIAKSEQEIGKATAKYFFYSNIMNFFKTEITLANGEIRKRPLIETNGETGEIVWDKGRDFATVRKVLSMPQVNIVKKTEVQTGGFSKESILPKRNSDKLIARKKDWDPKKYGGFDSPTVAYSVLVVAKVEKGKSKKLKSVKELLGITIMERSSFEKNPIDFLEAKGYKEVKKDLIIKLPKYSLFELENGRKRMLASAGELQKGNELALPSKYVNFLYLASHYEKLKGSPEDNEQKQLFVEQHKHYLDEIIEQISEFSKRVILADANLDKVLSAYNKHRDKPIREQAENIIHLFTLTNLGAPAAFKYFDTTIDRKRYTSTKEVLDATLIHQSITGLYETRIDLSQLGGDAEAAAKEAAAKEAAAKEAAAKALEAEAAAKEAAAKEAAAKEAAAKAMASNFTQFVLVDNGGTGDVTVAPSNFANGIAEWISSNSRSQAYKVTCSVRQSSAQNRKYTIKVEVPKGAWRSYLNMELTIPIFATNSDCELIVKAMQGLLKDGNPIPSAIAANSGIYGGSGGSMASNFTQFVLVDNGGTGDVTVAPSNFANGIAEWISSNSRSQAYKVTCSVRQSSAQNRKYTIKVEVPKGAWRSYLNMELTIPIFATNSDCELIVKAMQGLLKDGNPIPSAIAANSGIYGGGSGGGSGGGSGGGSMASNFTQFVLVDNGGTGDVTVAPSNFANGIAEWISSNSRSQAYKVTCSVRQSSAQNRKYTIKVEVPKGAWRSYLNMELTIPIFATNSDCELIVKAMQGLLKDGNPIPSAIAANSGIYGGSGGSMASNFTQFVLVDNGGTGDVTVAPSNFANGIAEWISSNSRSQAYKVTCSVRQSSAQNRKYTIKVEVPKGAWRSYLNMELTIPIFATNSDCELIVKAMQGLLKDGNPIPSAIAANSGIYGSSGGGEAAAKTAPLEEEYRLFLEAPIQNVTLLEQWKREIPKVWAEINPPGLASTQAPIHVQLLSTALPVRVRQYPITLEAKRSLRETIRKFRAAGILRPVHSPWNTPLLPVRKSGTSEYRMVQDLREVNKRVETIHPTVPNPYTLLSLLPPDRIWYSVLDLKDAFFCIPLAPESQLIFAFEWADAEEGESGQLTWTRLPQGFKNSPTLFNEALNRDLQGFRLDHPSVSLLQYVDDLLIAADTQAACLSATRDLLMTLAELGYRVSGKKAQLCQEEVTYLGFKIHKGSRSLSNSRTQAILQIPVPKTKRQVREFLGKIGYCRLFIPGFAELAQPLYAATRPGNDPLVWGEKEEEAFQSLKLALTQPPALALPSLDKPFQLFVEETSGAAKGVLTQALGPWKRPVAYLSKRLDPVAAGWPRCLRAIAAAALLTREASKLTFGQDIEITSSHNLESLLRSPPDKWLTNARITQYQVLLLDPPRVRFKQTAALNPATLLPETDDTLPIHHCLDTLDSLTSTRPDLTDQPLAQAEATLFTDGSSYIRDGKRYAGAAVVTLDSVIWAEPLPIGTSAQKAELIALTKALEWSKDKSVNIYTDSRYAFATLHVHGMIYRERGWLTAGGKAIKNAPEILALLTAVWLPKRVAVMHCKGHQKDDAPTSTGNRRADEVAREVAIRPLSTQATISKRTADGSEFESPKKKAKVE

SEQ ID NO: 16013 - protein, 2267 aa, synthetic construct
MPAAKRVKLDGGDKKYSIGLDIGTNSVGWAVITDEYKVPSKKFKVLGNTDRHSIKKNLIGALLFDSGETAEATRLKRTARRRYTRRKNRICYLQEIFSNEMAKVDDSFFHRLEESFLVEEDKKHERHPIFGNIVDEVAYHEKYPTIYHLRKKLVDSTDKADLRLIYLALAHMIKFRGHFLIEGDLNPDNSDVDKLFIQLVQTYNQLFEENPINASGVDAKAILSARLSKSRRLENLIAQLPGEKKNGLFGNLIALSLGLTPNFKSNFDLAEDAKLQLSKDTYDDDLDNLLAQIGDQYADLFLAAKNLSDAILLSDILRVNTEITKAPLSASMIKRYDEHHQDLTLLKALVRQQLPEKYKEIFFDQSKNGYAGYIDGGASQEEFYKFIKPILEKMDGTEELLVKLNREDLLRKQRTFDNGSIPHQIHLGELHAILRRQEDFYPFLKDNREKIEKILTFRIPYYVGPLARGNSRFAWMTRKSEETITPWNFEEVVDKGASAQSFIERMTNFDKNLPNEKVLPKHSLLYEYFTVYNELTKVKYVTEGMRKPAFLSGEQKKAIVDLLFKTNRKVTVKQLKEDYFKKIECFDSVEISGVEDRFNASLGTYHDLLKIIKDKDFLDNEENEDILEDIVLTLTLFEDREMIEERLKTYAHLFDDKVMKQLKRRRYTGWGRLSRKLINGIRDKQSGKTILDFLKSDGFANRNFMQLIHDDSLTFKEDIQKAQVSGQGDSLHEHIANLAGSPAIKKGILQTVKVVDELVKVMGRHKPENIVIEMARENQTTQKGQKNSRERMKRIEEGIKELGSQILKEHPVENTQLQNEKLYLYYLQNGRDMYVDQELDINRLSDYDVDHIVPQSFLKDDSIDNKVLTRSDKARGKSDNVPSEEVVKKMKNYWRQLLNAKLITQRKFDNLTKAERGGLSELDKAGFIKRQLVETRQITKHVAQILDSRMNTKYDENDKLIREVKVITLKSKLVSDFRKDFQFYKVREINNYHHAHDAYLNAVVGTALIKKYPKLESEFVYGDYKVYDVRKMIAKSEQEIGKATAKYFFYSNIMNFFKTEITLANGEIRKRPLIETNGETGEIVWDKGRDFATVRKVLSMPQVNIVKKTEVQTGGFSKESILPKRNSDKLIARKKDWDPKKYGGFDSPTVAYSVLVVAKVEKGKSKKLKSVKELLGITIMERSSFEKNPIDFLEAKGYKEVKKDLIIKLPKYSLFELENGRKRMLASAGELQKGNELALPSKYVNFLYLASHYEKLKGSPEDNEQKQLFVEQHKHYLDEIIEQISEFSKRVILADANLDKVLSAYNKHRDKPIREQAENIIHLFTLTNLGAPAAFKYFDTTIDRKRYTSTKEVLDATLIHQSITGLYETRIDLSQLGGDSGGSSGGSSGSETPGTSESATPESSGGSSGGSSMASNFTQFVLVDNGGTGDVTVAPSNFANGIAEWISSNSRSQAYKVTCSVRQSSAQNRKYTIKVEVPKGAWRSYLNMELTIPIFATNSDCELIVKAMQGLLKDGNPIPSAIAANSGIYAEAAAKEAAAKEAAAKEAAAKALEAEAAAKEAAAKEAAAKEAAAKATAPLEEEYRLFLEAPIQNVTLLEQWKREIPKVWAEINPPGLASTQAPIHVQLLSTALPVRVRQYPITLEAKRSLRETIRKFRAAGILRPVHSPWNTPLLPVRKSGTSEYRMVQDLREVNKRVETIHPTVPNPYTLLSLLPPDRIWYSVLDLKDAFFCIPLAPESQLIFAFEWADAEEGESGQLTWTRLPQGFKNSPTLFNEALNRDLQGFRLDHPSVSLLQYVDDLLIAADTQAACLSATRDLLMTLAELGYRVSGKKAQLCQEEVTYLGFKIHKGSRSLSNSRTQAILQIPVPKTKRQVREFLGKIGYCRLFIPGFAELAQPLYAATRPGNDPLVWGEKEEEAFQSLKLALTQPPALALPSLDKPFQLFVEETSGAAKGVLTQALGPWKRPVAYLSKRLDPVAAGWPRCLRAIAAAALLTREASKLTFGQDIEITSSHNLESLLRSPPDKWLTNARITQYQVLLLDPPRVRFKQTAALNPATLLPETDDTLPIHHCLDTLDSLTSTRPDLTDQPLAQAEATLFTDGSSYIRDGKRYAGAAVVTLDSVIWAEPLPIGTSAQKAELIALTKALEWSKDKSVNIYTDSRYAFATLHVHGMIYRERGWLTAGGKAIKNAPEILALLTAVWLPKRVAVMHCKGHQKDDAPTSTGNRRADEVAREVAIRPLSTQATISKRTADGSEFESPKKKAKVE

SEQ ID NO: 16014 - protein, 2254 aa, synthetic construct
MPAAKRVKLDGGDKKYSIGLDIGTNSVGWAVITDEYKVPSKKFKVLGNTDRHSIKKNLIGALLFDSGETAEATRLKRTARRRYTRRKNRICYLQEIFSNEMAKVDDSFFHRLEESFLVEEDKKHERHPIFGNIVDEVAYHEKYPTIYHLRKKLVDSTDKADLRLIYLALAHMIKFRGHFLIEGDLNPDNSDVDKLFIQLVQTYNQLFEENPINASGVDAKAILSARLSKSRRLENLIAQLPGEKKNGLFGNLIALSLGLTPNFKSNFDLAEDAKLQLSKDTYDDDLDNLLAQIGDQYADLFLAAKNLSDAILLSDILRVNTEITKAPLSASMIKRYDEHHQDLTLLKALVRQQLPEKYKEIFFDQSKNGYAGYIDGGASQEEFYKFIKPILEKMDGTEELLVKLNREDLLRKQRTFDNGSIPHQIHLGELHAILRRQEDFYPFLKDNREKIEKILTFRIPYYVGPLARGNSRFAWMTRKSEETITPWNFEEVVDKGASAQSFIERMTNFDKNLPNEKVLPKHSLLYEYFTVYNELTKVKYVTEGMRKPAFLSGEQKKAIVDLLFKTNRKVTVKQLKEDYFKKIECFDSVEISGVEDRFNASLGTYHDLLKIIKDKDFLDNEENEDILEDIVLTLTLFEDREMIEERLKTYAHLFDDKVMKQLKRRRYTGWGRLSRKLINGIRDKQSGKTILDFLKSDGFANRNFMQLIHDDSLTFKEDIQKAQVSGQGDSLHEHIANLAGSPAIKKGILQTVKVVDELVKVMGRHKPENIVIEMARENQTTQKGQKNSRERMKRIEEGIKELGSQILKEHPVENTQLQNEKLYLYYLQNGRDMYVDQELDINRLSDYDVDHIVPQSFLKDDSIDNKVLTRSDKARGKSDNVPSEEVVKKMKNYWRQLLNAKLITQRKFDNLTKAERGGLSELDKAGFIKRQLVETRQITKHVAQILDSRMNTKYDENDKLIREVKVITLKSKLVSDFRKDFQFYKVREINNYHHAHDAYLNAVVGTALIKKYPKLESEFVYGDYKVYDVRKMIAKSEQEIGKATAKYFFYSNIMNFFKTEITLANGEIRKRPLIETNGETGEIVWDKGRDFATVRKVLSMPQVNIVKKTEVQTGGFSKESILPKRNSDKLIARKKDWDPKKYGGFDSPTVAYSVLVVAKVEKGKSKKLKSVKELLGITIMERSSFEKNPIDFLEAKGYKEVKKDLIIKLPKYSLFELENGRKRMLASAGELQKGNELALPSKYVNFLYLASHYEKLKGSPEDNEQKQLFVEQHKHYLDEIIEQISEFSKRVILADANLDKVLSAYNKHRDKPIREQAENIIHLFTLTNLGAPAAFKYFDTTIDRKRYTSTKEVLDATLIHQSITGLYETRIDLSQLGGDSGGSSGGSSGSETPGTSESATPESSGGSSGGSSMASNFTQFVLVDNGGTGDVTVAPSNFANGIAEWISSNSRSQAYKVTCSVRQSSAQNRKYTIKVEVPKGAWRSYLNMELTIPIFATNSDCELIVKAMQGLLKDGNPIPSAIAANSGIYSGGSSGGSSGSETPGTSESATPESSGGSSGGSSTAPLEEEYRLFLEAPIQNVTLLEQWKREIPKVWAEINPPGLASTQAPIHVQLLSTALPVRVRQYPITLEAKRSLRETIRKFRAAGILRPVHSPWNTPLLPVRKSGTSEYRMVQDLREVNKRVETIHPTVPNPYTLLSLLPPDRIWYSVLDLKDAFFCIPLAPESQLIFAFEWADAEEGESGQLTWTRLPQGFKNSPTLFNEALNRDLQGFRLDHPSVSLLQYVDDLLIAADTQAACLSATRDLLMTLAELGYRVSGKKAQLCQEEVTYLGFKIHKGSRSLSNSRTQAILQIPVPKTKRQVREFLGKIGYCRLFIPGFAELAQPLYAATRPGNDPLVWGEKEEEAFQSLKLALTQPPALALPSLDKPFQLFVEETSGAAKGVLTQALGPWKRPVAYLSKRLDPVAAGWPRCLRAIAAAALLTREASKLTFGQDIEITSSHNLESLLRSPPDKWLTNARITQYQVLLLDPPRVRFKQTAALNPATLLPETDDTLPIHHCLDTLDSLTSTRPDLTDQPLAQAEATLFTDGSSYIRDGKRYAGAAVVTLDSVIWAEPLPIGTSAQKAELIALTKALEWSKDKSVNIYTDSRYAFATLHVHGMIYRERGWLTAGGKAIKNAPEILALLTAVWLPKRVAVMHCKGHQKDDAPTSTGNRRADEVAREVAIRPLSTQATISKRTADGSEFESPKKKAKVE

SEQ ID NO: 16015 - protein, 2239 aa, synthetic construct
MPAAKRVKLDGGDKKYSIGLDIGTNSVGWAVITDEYKVPSKKFKVLGNTDRHSIKKNLIGALLFDSGETAEATRLKRTARRRYTRRKNRICYLQEIFSNEMAKVDDSFFHRLEESFLVEEDKKHERHPIFGNIVDEVAYHEKYPTIYHLRKKLVDSTDKADLRLIYLALAHMIKFRGHFLIEGDLNPDNSDVDKLFIQLVQTYNQLFEENPINASGVDAKAILSARLSKSRRLENLIAQLPGEKKNGLFGNLIALSLGLTPNFKSNFDLAEDAKLQLSKDTYDDDLDNLLAQIGDQYADLFLAAKNLSDAILLSDILRVNTEITKAPLSASMIKRYDEHHQDLTLLKALVRQQLPEKYKEIFFDQSKNGYAGYIDGGASQEEFYKFIKPILEKMDGTEELLVKLNREDLLRKQRTFDNGSIPHQIHLGELHAILRRQEDFYPFLKDNREKIEKILTFRIPYYVGPLARGNSRFAWMTRKSEETITPWNFEEVVDKGASAQSFIERMTNFDKNLPNEKVLPKHSLLYEYFTVYNELTKVKYVTEGMRKPAFLSGEQKKAIVDLLFKTNRKVTVKQLKEDYFKKIECFDSVEISGVEDRFNASLGTYHDLLKIIKDKDFLDNEENEDILEDIVLTLTLFEDREMIEERLKTYAHLFDDKVMKQLKRRRYTGWGRLSRKLINGIRDKQSGKTILDFLKSDGFANRNFMQLIHDDSLTFKEDIQKAQVSGQGDSLHEHIANLAGSPAIKKGILQTVKVVDELVKVMGRHKPENIVIEMARENQTTQKGQKNSRERMKRIEEGIKELGSQILKEHPVENTQLQNEKLYLYYLQNGRDMYVDQELDINRLSDYDVDHIVPQSFLKDDSIDNKVLTRSDKARGKSDNVPSEEVVKKMKNYWRQLLNAKLITQRKFDNLTKAERGGLSELDKAGFIKRQLVETRQITKHVAQILDSRMNTKYDENDKLIREVKVITLKSKLVSDFRKDFQFYKVREINNYHHAHDAYLNAVVGTALIKKYPKLESEFVYGDYKVYDVRKMIAKSEQEIGKATAKYFFYSNIMNFFKTEITLANGEIRKRPLIETNGETGEIVWDKGRDFATVRKVLSMPQVNIVKKTEVQTGGFSKESILPKRNSDKLIARKKDWDPKKYGGFDSPTVAYSVLVVAKVEKGKSKKLKSVKELLGITIMERSSFEKNPIDFLEAKGYKEVKKDLIIKLPKYSLFELENGRKRMLASAGELQKGNELALPSKYVNFLYLASHYEKLKGSPEDNEQKQLFVEQHKHYLDEIIEQISEFSKRVILADANLDKVLSAYNKHRDKPIREQAENIIHLFTLTNLGAPAAFKYFDTTIDRKRYTSTKEVLDATLIHQSITGLYETRIDLSQLGGDSGGSSGGSSGSETPGTSESATPESSGGSSGGSSMASNFTQFVLVDNGGTGDVTVAPSNFANGIAEWISSNSRSQAYKVTCSVRQSSAQNRKYTIKVEVPKGAWRSYLNMELTIPIFATNSDCELIVKAMQGLLKDGNPIPSAIAANSGIYGSSGSSGSSGSSGSSGSSTAPLEEEYRLFLEAPIQNVTLLEQWKREIPKVWAEINPPGLASTQAPIHVQLLSTALPVRVRQYPITLEAKRSLRETIRKFRAAGILRPVHSPWNTPLLPVRKSGTSEYRMVQDLREVNKRVETIHPTVPNPYTLLSLLPPDRIWYSVLDLKDAFFCIPLAPESQLIFAFEWADAEEGESGQLTWTRLPQGFKNSPTLFNEALNRDLQGFRLDHPSVSLLQYVDDLLIAADTQAACLSATRDLLMTLAELGYRVSGKKAQLCQEEVTYLGFKIHKGSRSLSNSRTQAILQIPVPKTKRQVREFLGKIGYCRLFIPGFAELAQPLYAATRPGNDPLVWGEKEEEAFQSLKLALTQPPALALPSLDKPFQLFVEETSGAAKGVLTQALGPWKRPVAYLSKRLDPVAAGWPRCLRAIAAAALLTREASKLTFGQDIEITSSHNLESLLRSPPDKWLTNARITQYQVLLLDPPRVRFKQTAALNPATLLPETDDTLPIHHCLDTLDSLTSTRPDLTDQPLAQAEATLFTDGSSYIRDGKRYAGAAVVTLDSVIWAEPLPIGTSAQKAELIALTKALEWSKDKSVNIYTDSRYAFATLHVHGMIYRERGWLTAGGKAIKNAPEILALLTAVWLPKRVAVMHCKGHQKDDAPTSTGNRRADEVAREVAIRPLSTQATISKRTADGSEFESPKKKAKVE

SEQ ID NO: 16016 - protein, 2232 aa, synthetic construct
MPAAKRVKLDGGDKKYSIGLDIGTNSVGWAVITDEYKVPSKKFKVLGNTDRHSIKKNLIGALLFDSGETAEATRLKRTARRRYTRRKNRICYLQEIFSNEMAKVDDSFFHRLEESFLVEEDKKHERHPIFGNIVDEVAYHEKYPTIYHLRKKLVDSTDKADLRLIYLALAHMIKFRGHFLIEGDLNPDNSDVDKLFIQLVQTYNQLFEENPINASGVDAKAILSARLSKSRRLENLIAQLPGEKKNGLFGNLIALSLGLTPNFKSNFDLAEDAKLQLSKDTYDDDLDNLLAQIGDQYADLFLAAKNLSDAILLSDILRVNTEITKAPLSASMIKRYDEHHQDLTLLKALVRQQLPEKYKEIFFDQSKNGYAGYIDGGASQEEFYKFIKPILEKMDGTEELLVKLNREDLLRKQRTFDNGSIPHQIHLGELHAILRRQEDFYPFLKDNREKIEKILTFRIPYYVGPLARGNSRFAWMTRKSEETITPWNFEEVVDKGASAQSFIERMTNFDKNLPNEKVLPKHSLLYEYFTVYNELTKVKYVTEGMRKPAFLSGEQKKAIVDLLFKTNRKVTVKQLKEDYFKKIECFDSVEISGVEDRFNASLGTYHDLLKIIKDKDFLDNEENEDILEDIVLTLTLFEDREMIEERLKTYAHLFDDKVMKQLKRRRYTGWGRLSRKLINGIRDKQSGKTILDFLKSDGFANRNFMQLIHDDSLTFKEDIQKAQVSGQGDSLHEHIANLAGSPAIKKGILQTVKVVDELVKVMGRHKPENIVIEMARENQTTQKGQKNSRERMKRIEEGIKELGSQILKEHPVENTQLQNEKLYLYYLQNGRDMYVDQELDINRLSDYDVDHIVPQSFLKDDSIDNKVLTRSDKARGKSDNVPSEEVVKKMKNYWRQLLNAKLITQRKFDNLTKAERGGLSELDKAGFIKRQLVETRQITKHVAQILDSRMNTKYDENDKLIREVKVITLKSKLVSDFRKDFQFYKVREINNYHHAHDAYLNAVVGTALIKKYPKLESEFVYGDYKVYDVRKMIAKSEQEIGKATAKYFFYSNIMNFFKTEITLANGEIRKRPLIETNGETGEIVWDKGRDFATVRKVLSMPQVNIVKKTEVQTGGFSKESILPKRNSDKLIARKKDWDPKKYGGFDSPTVAYSVLVVAKVEKGKSKKLKSVKELLGITIMERSSFEKNPIDFLEAKGYKEVKKDLIIKLPKYSLFELENGRKRMLASAGELQKGNELALPSKYVNFLYLASHYEKLKGSPEDNEQKQLFVEQHKHYLDEIIEQISEFSKRVILADANLDKVLSAYNKHRDKPIREQAENIIHLFTLTNLGAPAAFKYFDTTIDRKRYTSTKEVLDATLIHQSITGLYETRIDLSQLGGDSGGSSGGSSGSETPGTSESATPESSGGSSGGSSMASNFTQFVLVDNGGTGDVTVAPSNFANGIAEWISSNSRSQAYKVTCSVRQSSAQNRKYTIKVEVPKGAWRSYLNMELTIPIFATNSDCELIVKAMQGLLKDGNPIPSAIAANSGIYGSSGGGEAAAKTAPLEEEYRLFLEAPIQNVTLLEQWKREIPKVWAEINPPGLASTQAPIHVQLLSTALPVRVRQYPITLEAKRSLRETIRKFRAAGILRPVHSPWNTPLLPVRKSGTSEYRMVQDLREVNKRVETIHPTVPNPYTLLSLLPPDRIWYSVLDLKDAFFCIPLAPESQLIFAFEWADAEEGESGQLTWTRLPQGFKNSPTLFNEALNRDLQGFRLDHPSVSLLQYVDDLLIAADTQAACLSATRDLLMTLAELGYRVSGKKAQLCQEEVTYLGFKIHKGSRSLSNSRTQAILQIPVPKTKRQVREFLGKIGYCRLFIPGFAELAQPLYAATRPGNDPLVWGEKEEEAFQSLKLALTQPPALALPSLDKPFQLFVEETSGAAKGVLTQALGPWKRPVAYLSKRLDPVAAGWPRCLRAIAAAALLTREASKLTFGQDIEITSSHNLESLLRSPPDKWLTNARITQYQVLLLDPPRVRFKQTAALNPATLLPETDDTLPIHHCLDTLDSLTSTRPDLTDQPLAQAEATLFTDGSSYIRDGKRYAGAAVVTLDSVIWAEPLPIGTSAQKAELIALTKALEWSKDKSVNIYTDSRYAFATLHVHGMIYRERGWLTAGGKAIKNAPEILALLTAVWLPKRVAVMHCKGHQKDDAPTSTGNRRADEVAREVAIRPLSTQATISKRTADGSEFESPKKKAKVE

SEQ ID NO: 16017 - protein, 2390 aa, synthetic construct
MPAAKRVKLDGGDKKYSIGLDIGTNSVGWAVITDEYKVPSKKFKVLGNTDRHSIKKNLIGALLFDSGETAEATRLKRTARRRYTRRKNRICYLQEIFSNEMAKVDDSFFHRLEESFLVEEDKKHERHPIFGNIVDEVAYHEKYPTIYHLRKKLVDSTDKADLRLIYLALAHMIKFRGHFLIEGDLNPDNSDVDKLFIQLVQTYNQLFEENPINASGVDAKAILSARLSKSRRLENLIAQLPGEKKNGLFGNLIALSLGLTPNFKSNFDLAEDAKLQLSKDTYDDDLDNLLAQIGDQYADLFLAAKNLSDAILLSDILRVNTEITKAPLSASMIKRYDEHHQDLTLLKALVRQQLPEKYKEIFFDQSKNGYAGYIDGGASQEEFYKFIKPILEKMDGTEELLVKLNREDLLRKQRTFDNGSIPHQIHLGELHAILRRQEDFYPFLKDNREKIEKILTFRIPYYVGPLARGNSRFAWMTRKSEETITPWNFEEVVDKGASAQSFIERMTNFDKNLPNEKVLPKHSLLYEYFTVYNELTKVKYVTEGMRKPAFLSGEQKKAIVDLLFKTNRKVTVKQLKEDYFKKIECFDSVEISGVEDRFNASLGTYHDLLKIIKDKDFLDNEENEDILEDIVLTLTLFEDREMIEERLKTYAHLFDDKVMKQLKRRRYTGWGRLSRKLINGIRDKQSGKTILDFLKSDGFANRNFMQLIHDDSLTFKEDIQKAQVSGQGDSLHEHIANLAGSPAIKKGILQTVKVVDELVKVMGRHKPENIVIEMARENQTTQKGQKNSRERMKRIEEGIKELGSQILKEHPVENTQLQNEKLYLYYLQNGRDMYVDQELDINRLSDYDVDHIVPQSFLKDDSIDNKVLTRSDKARGKSDNVPSEEVVKKMKNYWRQLLNAKLITQRKFDNLTKAERGGLSELDKAGFIKRQLVETRQITKHVAQILDSRMNTKYDENDKLIREVKVITLKSKLVSDFRKDFQFYKVREINNYHHAHDAYLNAVVGTALIKKYPKLESEFVYGDYKVYDVRKMIAKSEQEIGKATAKYFFYSNIMNFFKTEITLANGEIRKRPLIETNGETGEIVWDKGRDFATVRKVLSMPQVNIVKKTEVQTGGFSKESILPKRNSDKLIARKKDWDPKKYGGFDSPTVAYSVLVVAKVEKGKSKKLKSVKELLGITIMERSSFEKNPIDFLEAKGYKEVKKDLIIKLPKYSLFELENGRKRMLASAGELQKGNELALPSKYVNFLYLASHYEKLKGSPEDNEQKQLFVEQHKHYLDEIIEQISEFSKRVILADANLDKVLSAYNKHRDKPIREQAENIIHLFTLTNLGAPAAFKYFDTTIDRKRYTSTKEVLDATLIHQSITGLYETRIDLSQLGGDSGGSSGGSSGSETPGTSESATPESSGGSSGGSSMASNFTQFVLVDNGGTGDVTVAPSNFANGIAEWISSNSRSQAYKVTCSVRQSSAQNRKYTIKVEVPKGAWRSYLNMELTIPIFATNSDCELIVKAMQGLLKDGNPIPSAIAANSGIYGGSGGSMASNFTQFVLVDNGGTGDVTVAPSNFANGIAEWISSNSRSQAYKVTCSVRQSSAQNRKYTIKVEVPKGAWRSYLNMELTIPIFATNSDCELIVKAMQGLLKDGNPIPSAIAANSGIYAEAAAKEAAAKEAAAKEAAAKALEAEAAAKEAAAKEAAAKEAAAKATAPLEEEYRLFLEAPIQNVTLLEQWKREIPKVWAEINPPGLASTQAPIHVQLLSTALPVRVRQYPITLEAKRSLRETIRKFRAAGILRPVHSPWNTPLLPVRKSGTSEYRMVQDLREVNKRVETIHPTVPNPYTLLSLLPPDRIWYSVLDLKDAFFCIPLAPESQLIFAFEWADAEEGESGQLTWTRLPQGFKNSPTLFNEALNRDLQGFRLDHPSVSLLQYVDDLLIAADTQAACLSATRDLLMTLAELGYRVSGKKAQLCQEEVTYLGFKIHKGSRSLSNSRTQAILQIPVPKTKRQVREFLGKIGYCRLFIPGFAELAQPLYAATRPGNDPLVWGEKEEEAFQSLKLALTQPPALALPSLDKPFQLFVEETSGAAKGVLTQALGPWKRPVAYLSKRLDPVAAGWPRCLRAIAAAALLTREASKLTFGQDIEITSSHNLESLLRSPPDKWLTNARITQYQVLLLDPPRVRFKQTAALNPATLLPETDDTLPIHHCLDTLDSLTSTRPDLTDQPLAQAEATLFTDGSSYIRDGKRYAGAAVVTLDSVIWAEPLPIGTSAQKAELIALTKALEWSKDKSVNIYTDSRYAFATLHVHGMIYRERGWLTAGGKAIKNAPEILALLTAVWLPKRVAVMHCKGHQKDDAPTSTGNRRADEVAREVAIRPLSTQATISKRTADGSEFESPKKKAKVE

SEQ ID NO: 16018 - protein, 2377 aa, synthetic construct
MPAAKRVKLDGGDKKYSIGLDIGTNSVGWAVITDEYKVPSKKFKVLGNTDRHSIKKNLIGALLFDSGETAEATRLKRTARRRYTRRKNRICYLQEIFSNEMAKVDDSFFHRLEESFLVEEDKKHERHPIFGNIVDEVAYHEKYPTIYHLRKKLVDSTDKADLRLIYLALAHMIKFRGHFLIEGDLNPDNSDVDKLFIQLVQTYNQLFEENPINASGVDAKAILSARLSKSRRLENLIAQLPGEKKNGLFGNLIALSLGLTPNFKSNFDLAEDAKLQLSKDTYDDDLDNLLAQIGDQYADLFLAAKNLSDAILLSDILRVNTEITKAPLSASMIKRYDEHHQDLTLLKALVRQQLPEKYKEIFFDQSKNGYAGYIDGGASQEEFYKFIKPILEKMDGTEELLVKLNREDLLRKQRTFDNGSIPHQIHLGELHAILRRQEDFYPFLKDNREKIEKILTFRIPYYVGPLARGNSRFAWMTRKSEETITPWNFEEVVDKGASAQSFIERMTNFDKNLPNEKVLPKHSLLYEYFTVYNELTKVKYVTEGMRKPAFLSGEQKKAIVDLLFKTNRKVTVKQLKEDYFKKIECFDSVEISGVEDRFNASLGTYHDLLKIIKDKDFLDNEENEDILEDIVLTLTLFEDREMIEERLKTYAHLFDDKVMKQLKRRRYTGWGRLSRKLINGIRDKQSGKTILDFLKSDGFANRNFMQLIHDDSLTFKEDIQKAQVSGQGDSLHEHIANLAGSPAIKKGILQTVKVVDELVKVMGRHKPENIVIEMARENQTTQKGQKNSRERMKRIEEGIKELGSQILKEHPVENTQLQNEKLYLYYLQNGRDMYVDQELDINRLSDYDVDHIVPQSFLKDDSIDNKVLTRSDKARGKSDNVPSEEVVKKMKNYWRQLLNAKLITQRKFDNLTKAERGGLSELDKAGFIKRQLVETRQITKHVAQILDSRMNTKYDENDKLIREVKVITLKSKLVSDFRKDFQFYKVREINNYHHAHDAYLNAVVGTALIKKYPKLESEFVYGDYKVYDVRKMIAKSEQEIGKATAKYFFYSNIMNFFKTEITLANGEIRKRPLIETNGETGEIVWDKGRDFATVRKVLSMPQVNIVKKTEVQTGGFSKESILPKRNSDKLIARKKDWDPKKYGGFDSPTVAYSVLVVAKVEKGKSKKLKSVKELLGITIMERSSFEKNPIDFLEAKGYKEVKKDLIIKLPKYSLFELENGRKRMLASAGELQKGNELALPSKYVNFLYLASHYEKLKGSPEDNEQKQLFVEQHKHYLDEIIEQISEFSKRVILADANLDKVLSAYNKHRDKPIREQAENIIHLFTLTNLGAPAAFKYFDTTIDRKRYTSTKEVLDATLIHQSITGLYETRIDLSQLGGDSGGSSGGSSGSETPGTSESATPESSGGSSGGSSMASNFTQFVLVDNGGTGDVTVAPSNFANGIAEWISSNSRSQAYKVTCSVRQSSAQNRKYTIKVEVPKGAWRSYLNMELTIPIFATNSDCELIVKAMQGLLKDGNPIPSAIAANSGIYGGSGGSMASNFTQFVLVDNGGTGDVTVAPSNFANGIAEWISSNSRSQAYKVTCSVRQSSAQNRKYTIKVEVPKGAWRSYLNMELTIPIFATNSDCELIVKAMQGLLKDGNPIPSAIAANSGIYSGGSSGGSSGSETPGTSESATPESSGGSSGGSSTAPLEEEYRLFLEAPIQNVTLLEQWKREIPKVWAEINPPGLASTQAPIHVQLLSTALPVRVRQYPITLEAKRSLRETIRKFRAAGILRPVHSPWNTPLLPVRKSGTSEYRMVQDLREVNKRVETIHPTVPNPYTLLSLLPPDRIWYSVLDLKDAFFCIPLAPESQLIFAFEWADAEEGESGQLTWTRLPQGFKNSPTLFNEALNRDLQGFRLDHPSVSLLQYVDDLLIAADTQAACLSATRDLLMTLAELGYRVSGKKAQLCQEEVTYLGFKIHKGSRSLSNSRTQAILQIPVPKTKRQVREFLGKIGYCRLFIPGFAELAQPLYAATRPGNDPLVWGEKEEEAFQSLKLALTQPPALALPSLDKPFQLFVEETSGAAKGVLTQALGPWKRPVAYLSKRLDPVAAGWPRCLRAIAAAALLTREASKLTFGQDIEITSSHNLESLLRSPPDKWLTNARITQYQVLLLDPPRVRFKQTAALNPATLLPETDDTLPIHHCLDTLDSLTSTRPDLTDQPLAQAEATLFTDGSSYIRDGKRYAGAAVVTLDSVIWAEPLPIGTSAQKAELIALTKALEWSKDKSVNIYTDSRYAFATLHVHGMIYRERGWLTAGGKAIKNAPEILALLTAVWLPKRVAVMHCKGHQKDDAPTSTGNRRADEVAREVAIRPLSTQATISKRTADGSEFESPKKKAKVE

SEQ ID NO: 16019 - protein, 2362 aa, synthetic construct
MPAAKRVKLDGGDKKYSIGLDIGTNSVGWAVITDEYKVPSKKFKVLGNTDRHSIKKNLIGALLFDSGETAEATRLKRTARRRYTRRKNRICYLQEIFSNEMAKVDDSFFHRLEESFLVEEDKKHERHPIFGNIVDEVAYHEKYPTIYHLRKKLVDSTDKADLRLIYLALAHMIKFRGHFLIEGDLNPDNSDVDKLFIQLVQTYNQLFEENPINASGVDAKAILSARLSKSRRLENLIAQLPGEKKNGLFGNLIALSLGLTPNFKSNFDLAEDAKLQLSKDTYDDDLDNLLAQIGDQYADLFLAAKNLSDAILLSDILRVNTEITKAPLSASMIKRYDEHHQDLTLLKALVRQQLPEKYKEIFFDQSKNGYAGYIDGGASQEEFYKFIKPILEKMDGTEELLVKLNREDLLRKQRTFDNGSIPHQIHLGELHAILRRQEDFYPFLKDNREKIEKILTFRIPYYVGPLARGNSRFAWMTRKSEETITPWNFEEVVDKGASAQSFIERMTNFDKNLPNEKVLPKHSLLYEYFTVYNELTKVKYVTEGMRKPAFLSGEQKKAIVDLLFKTNRKVTVKQLKEDYFKKIECFDSVEISGVEDRFNASLGTYHDLLKIIKDKDFLDNEENEDILEDIVLTLTLFEDREMIEERLKTYAHLFDDKVMKQLKRRRYTGWGRLSRKLINGIRDKQSGKTILDFLKSDGFANRNFMQLIHDDSLTFKEDIQKAQVSGQGDSLHEHIANLAGSPAIKKGILQTVKVVDELVKVMGRHKPENIVIEMARENQTTQKGQKNSRERMKRIEEGIKELGSQILKEHPVENTQLQNEKLYLYYLQNGRDMYVDQELDINRLSDYDVDHIVPQSFLKDDSIDNKVLTRSDKARGKSDNVPSEEVVKKMKNYWRQLLNAKLITQRKFDNLTKAERGGLSELDKAGFIKRQLVETRQITKHVAQILDSRMNTKYDENDKLIREVKVITLKSKLVSDFRKDFQFYKVREINNYHHAHDAYLNAVVGTALIKKYPKLESEFVYGDYKVYDVRKMIAKSEQEIGKATAKYFFYSNIMNFFKTEITLANGEIRKRPLIETNGETGEIVWDKGRDFATVRKVLSMPQVNIVKKTEVQTGGFSKESILPKRNSDKLIARKKDWDPKKYGGFDSPTVAYSVLVVAKVEKGKSKKLKSVKELLGITIMERSSFEKNPIDFLEAKGYKEVKKDLIIKLPKYSLFELENGRKRMLASAGELQKGNELALPSKYVNFLYLASHYEKLKGSPEDNEQKQLFVEQHKHYLDEIIEQISEFSKRVILADANLDKVLSAYNKHRDKPIREQAENIIHLFTLTNLGAPAAFKYFDTTIDRKRYTSTKEVLDATLIHQSITGLYETRIDLSQLGGDSGGSSGGSSGSETPGTSESATPESSGGSSGGSSMASNFTQFVLVDNGGTGDVTVAPSNFANGIAEWISSNSRSQAYKVTCSVRQSSAQNRKYTIKVEVPKGAWRSYLNMELTIPIFATNSDCELIVKAMQGLLKDGNPIPSAIAANSGIYGGSGGSMASNFTQFVLVDNGGTGDVTVAPSNFANGIAEWISSNSRSQAYKVTCSVRQSSAQNRKYTIKVEVPKGAWRSYLNMELTIPIFATNSDCELIVKAMQGLLKDGNPIPSAIAANSGIYGSSGSSGSSGSSGSSGSSTAPLEEEYRLFLEAPIQNVTLLEQWKREIPKVWAEINPPGLASTQAPIHVQLLSTALPVRVRQYPITLEAKRSLRETIRKFRAAGILRPVHSPWNTPLLPVRKSGTSEYRMVQDLREVNKRVETIHPTVPNPYTLLSLLPPDRIWYSVLDLKDAFFCIPLAPESQLIFAFEWADAEEGESGQLTWTRLPQGFKNSPTLFNEALNRDLQGFRLDHPSVSLLQYVDDLLIAADTQAACLSATRDLLMTLAELGYRVSGKKAQLCQEEVTYLGFKIHKGSRSLSNSRTQAILQIPVPKTKRQVREFLGKIGYCRLFIPGFAELAQPLYAATRPGNDPLVWGEKEEEAFQSLKLALTQPPALALPSLDKPFQLFVEETSGAAKGVLTQALGPWKRPVAYLSKRLDPVAAGWPRCLRAIAAAALLTREASKLTFGQDIEITSSHNLESLLRSPPDKWLTNARITQYQVLLLDPPRVRFKQTAALNPATLLPETDDTLPIHHCLDTLDSLTSTRPDLTDQPLAQAEATLFTDGSSYIRDGKRYAGAAVVTLDSVIWAEPLPIGTSAQKAELIALTKALEWSKDKSVNIYTDSRYAFATLHVHGMIYRERGWLTAGGKAIKNAPEILALLTAVWLPKRVAVMHCKGHQKDDAPTSTGNRRADEVAREVAIRPLSTQATISKRTADGSEFESPKKKAKVE

SEQ ID NO: 16020 - protein, 2355 aa, synthetic construct
MPAAKRVKLDGGDKKYSIGLDIGTNSVGWAVITDEYKVPSKKFKVLGNTDRHSIKKNLIGALLFDSGETAEATRLKRTARRRYTRRKNRICYLQEIFSNEMAKVDDSFFHRLEESFLVEEDKKHERHPIFGNIVDEVAYHEKYPTIYHLRKKLVDSTDKADLRLIYLALAHMIKFRGHFLIEGDLNPDNSDVDKLFIQLVQTYNQLFEENPINASGVDAKAILSARLSKSRRLENLIAQLPGEKKNGLFGNLIALSLGLTPNFKSNFDLAEDAKLQLSKDTYDDDLDNLLAQIGDQYADLFLAAKNLSDAILLSDILRVNTEITKAPLSASMIKRYDEHHQDLTLLKALVRQQLPEKYKEIFFDQSKNGYAGYIDGGASQEEFYKFIKPILEKMDGTEELLVKLNREDLLRKQRTFDNGSIPHQIHLGELHAILRRQEDFYPFLKDNREKIEKILTFRIPYYVGPLARGNSRFAWMTRKSEETITPWNFEEVVDKGASAQSFIERMTNFDKNLPNEKVLPKHSLLYEYFTVYNELTKVKYVTEGMRKPAFLSGEQKKAIVDLLFKTNRKVTVKQLKEDYFKKIECFDSVEISGVEDRFNASLGTYHDLLKIIKDKDFLDNEENEDILEDIVLTLTLFEDREMIEERLKTYAHLFDDKVMKQLKRRRYTGWGRLSRKLINGIRDKQSGKTILDFLKSDGFANRNFMQLIHDDSLTFKEDIQKAQVSGQGDSLHEHIANLAGSPAIKKGILQTVKVVDELVKVMGRHKPENIVIEMARENQTTQKGQKNSRERMKRIEEGIKELGSQILKEHPVENTQLQNEKLYLYYLQNGRDMYVDQELDINRLSDYDVDHIVPQSFLKDDSIDNKVLTRSDKARGKSDNVPSEEVVKKMKNYWRQLLNAKLITQRKFDNLTKAERGGLSELDKAGFIKRQLVETRQITKHVAQILDSRMNTKYDENDKLIREVKVITLKSKLVSDFRKDFQFYKVREINNYHHAHDAYLNAVVGTALIKKYPKLESEFVYGDYKVYDVRKMIAKSEQEIGKATAKYFFYSNIMNFFKTEITLANGEIRKRPLIETNGETGEIVWDKGRDFATVRKVLSMPQVNIVKKTEVQTGGFSKESILPKRNSDKLIARKKDWDPKKYGGFDSPTVAYSVLVVAKVEKGKSKKLKSVKELLGITIMERSSFEKNPIDFLEAKGYKEVKKDLIIKLPKYSLFELENGRKRMLASAGELQKGNELALPSKYVNFLYLASHYEKLKGSPEDNEQKQLFVEQHKHYLDEIIEQISEFSKRVILADANLDKVLSAYNKHRDKPIREQAENIIHLFTLTNLGAPAAFKYFDTTIDRKRYTSTKEVLDATLIHQSITGLYETRIDLSQLGGDSGGSSGGSSGSETPGTSESATPESSGGSSGGSSMASNFTQFVLVDNGGTGDVTVAPSNFANGIAEWISSNSRSQAYKVTCSVRQSSAQNRKYTIKVEVPKGAWRSYLNMELTIPIFATNSDCELIVKAMQGLLKDGNPIPSAIAANSGIYGGSGGSMASNFTQFVLVDNGGTGDVTVAPSNFANGIAEWISSNSRSQAYKVTCSVRQSSAQNRKYTIKVEVPKGAWRSYLNMELTIPIFATNSDCELIVKAMQGLLKDGNPIPSAIAANSGIYGSSGGGEAAAKTAPLEEEYRLFLEAPIQNVTLLEQWKREIPKVWAEINPPGLASTQAPIHVQLLSTALPVRVRQYPITLEAKRSLRETIRKFRAAGILRPVHSPWNTPLLPVRKSGTSEYRMVQDLREVNKRVETIHPTVPNPYTLLSLLPPDRIWYSVLDLKDAFFCIPLAPESQLIFAFEWADAEEGESGQLTWTRLPQGFKNSPTLFNEALNRDLQGFRLDHPSVSLLQYVDDLLIAADTQAACLSATRDLLMTLAELGYRVSGKKAQLCQEEVTYLGFKIHKGSRSLSNSRTQAILQIPVPKTKRQVREFLGKIGYCRLFIPGFAELAQPLYAATRPGNDPLVWGEKEEEAFQSLKLALTQPPALALPSLDKPFQLFVEETSGAAKGVLTQALGPWKRPVAYLSKRLDPVAAGWPRCLRAIAAAALLTREASKLTFGQDIEITSSHNLESLLRSPPDKWLTNARITQYQVLLLDPPRVRFKQTAALNPATLLPETDDTLPIHHCLDTLDSLTSTRPDLTDQPLAQAEATLFTDGSSYIRDGKRYAGAAVVTLDSVIWAEPLPIGTSAQKAELIALTKALEWSKDKSVNIYTDSRYAFATLHVHGMIYRERGWLTAGGKAIKNAPEILALLTAVWLPKRVAVMHCKGHQKDDAPTSTGNRRADEVAREVAIRPLSTQATISKRTADGSEFESPKKKAKVE

SEQ ID NO: 16021 - protein, 2646 aa, synthetic construct
MPAAKRVKLDGGDKKYSIGLDIGTNSVGWAVITDEYKVPSKKFKVLGNTDRHSIKKNLIGALLFDSGETAEATRLKRTARRRYTRRKNRICYLQEIFSNEMAKVDDSFFHRLEESFLVEEDKKHERHPIFGNIVDEVAYHEKYPTIYHLRKKLVDSTDKADLRLIYLALAHMIKFRGHFLIEGDLNPDNSDVDKLFIQLVQTYNQLFEENPINASGVDAKAILSARLSKSRRLENLIAQLPGEKKNGLFGNLIALSLGLTPNFKSNFDLAEDAKLQLSKDTYDDDLDNLLAQIGDQYADLFLAAKNLSDAILLSDILRVNTEITKAPLSASMIKRYDEHHQDLTLLKALVRQQLPEKYKEIFFDQSKNGYAGYIDGGASQEEFYKFIKPILEKMDGTEELLVKLNREDLLRKQRTFDNGSIPHQIHLGELHAILRRQEDFYPFLKDNREKIEKILTFRIPYYVGPLARGNSRFAWMTRKSEETITPWNFEEVVDKGASAQSFIERMTNFDKNLPNEKVLPKHSLLYEYFTVYNELTKVKYVTEGMRKPAFLSGEQKKAIVDLLFKTNRKVTVKQLKEDYFKKIECFDSVEISGVEDRFNASLGTYHDLLKIIKDKDFLDNEENEDILEDIVLTLTLFEDREMIEERLKTYAHLFDDKVMKQLKRRRYTGWGRLSRKLINGIRDKQSGKTILDFLKSDGFANRNFMQLIHDDSLTFKEDIQKAQVSGQGDSLHEHIANLAGSPAIKKGILQTVKVVDELVKVMGRHKPENIVIEMARENQTTQKGQKNSRERMKRIEEGIKELGSQILKEHPVENTQLQNEKLYLYYLQNGRDMYVDQELDINRLSDYDVDHIVPQSFLKDDSIDNKVLTRSDKARGKSDNVPSEEVVKKMKNYWRQLLNAKLITQRKFDNLTKAERGGLSELDKAGFIKRQLVETRQITKHVAQILDSRMNTKYDENDKLIREVKVITLKSKLVSDFRKDFQFYKVREINNYHHAHDAYLNAVVGTALIKKYPKLESEFVYGDYKVYDVRKMIAKSEQEIGKATAKYFFYSNIMNFFKTEITLANGEIRKRPLIETNGETGEIVWDKGRDFATVRKVLSMPQVNIVKKTEVQTGGFSKESILPKRNSDKLIARKKDWDPKKYGGFDSPTVAYSVLVVAKVEKGKSKKLKSVKELLGITIMERSSFEKNPIDFLEAKGYKEVKKDLIIKLPKYSLFELENGRKRMLASAGELQKGNELALPSKYVNFLYLASHYEKLKGSPEDNEQKQLFVEQHKHYLDEIIEQISEFSKRVILADANLDKVLSAYNKHRDKPIREQAENIIHLFTLTNLGAPAAFKYFDTTIDRKRYTSTKEVLDATLIHQSITGLYETRIDLSQLGGDSGGSSGGSSGSETPGTSESATPESSGGSSGGSSMASNFTQFVLVDNGGTGDVTVAPSNFANGIAEWISSNSRSQAYKVTCSVRQSSAQNRKYTIKVEVPKGAWRSYLNMELTIPIFATNSDCELIVKAMQGLLKDGNPIPSAIAANSGIYGGSGGSMASNFTQFVLVDNGGTGDVTVAPSNFANGIAEWISSNSRSQAYKVTCSVRQSSAQNRKYTIKVEVPKGAWRSYLNMELTIPIFATNSDCELIVKAMQGLLKDGNPIPSAIAANSGIYGGGSGGGSGGGSGGGSMASNFTQFVLVDNGGTGDVTVAPSNFANGIAEWISSNSRSQAYKVTCSVRQSSAQNRKYTIKVEVPKGAWRSYLNMELTIPIFATNSDCELIVKAMQGLLKDGNPIPSAIAANSGIYGGSGGSMASNFTQFVLVDNGGTGDVTVAPSNFANGIAEWISSNSRSQAYKVTCSVRQSSAQNRKYTIKVEVPKGAWRSYLNMELTIPIFATNSDCELIVKAMQGLLKDGNPIPSAIAANSGIYAEAAAKEAAAKEAAAKEAAAKALEAEAAAKEAAAKEAAAKEAAAKATAPLEEEYRLFLEAPIQNVTLLEQWKREIPKVWAEINPPGLASTQAPIHVQLLSTALPVRVRQYPITLEAKRSLRETIRKFRAAGILRPVHSPWNTPLLPVRKSGTSEYRMVQDLREVNKRVETIHPTVPNPYTLLSLLPPDRIWYSVLDLKDAFFCIPLAPESQLIFAFEWADAEEGESGQLTWTRLPQGFKNSPTLFNEALNRDLQGFRLDHPSVSLLQYVDDLLIAADTQAACLSATRDLLMTLAELGYRVSGKKAQLCQEEVTYLGFKIHKGSRSLSNSRTQAILQIPVPKTKRQVREFLGKIGYCRLFIPGFAELAQPLYAATRPGNDPLVWGEKEEEAFQSLKLALTQPPALALPSLDKPFQLFVEETSGAAKGVLTQALGPWKRPVAYLSKRLDPVAAGWPRCLRAIAAAALLTREASKLTFGQDIEITSSHNLESLLRSPPDKWLTNARITQYQVLLLDPPRVRFKQTAALNPATLLPETDDTLPIHHCLDTLDSLTSTRPDLTDQPLAQAEATLFTDGSSYIRDGKRYAGAAVVTLDSVIWAEPLPIGTSAQKAELIALTKALEWSKDKSVNIYTDSRYAFATLHVHGMIYRERGWLTAGGKAIKNAPEILALLTAVWLPKRVAVMHCKGHQKDDAPTSTGNRRADEVAREVAIRPLSTQATISKRTADGSEFESPKKKAKVE

SEQ ID NO: 16022 - protein, 2633 aa, synthetic construct
MPAAKRVKLDGGDKKYSIGLDIGTNSVGWAVITDEYKVPSKKFKVLGNTDRHSIKKNLIGALLFDSGETAEATRLKRTARRRYTRRKNRICYLQEIFSNEMAKVDDSFFHRLEESFLVEEDKKHERHPIFGNIVDEVAYHEKYPTIYHLRKKLVDSTDKADLRLIYLALAHMIKFRGHFLIEGDLNPDNSDVDKLFIQLVQTYNQLFEENPINASGVDAKAILSARLSKSRRLENLIAQLPGEKKNGLFGNLIALSLGLTPNFKSNFDLAEDAKLQLSKDTYDDDLDNLLAQIGDQYADLFLAAKNLSDAILLSDILRVNTEITKAPLSASMIKRYDEHHQDLTLLKALVRQQLPEKYKEIFFDQSKNGYAGYIDGGASQEEFYKFIKPILEKMDGTEELLVKLNREDLLRKQRTFDNGSIPHQIHLGELHAILRRQEDFYPFLKDNREKIEKILTFRIPYYVGPLARGNSRFAWMTRKSEETITPWNFEEVVDKGASAQSFIERMTNFDKNLPNEKVLPKHSLLYEYFTVYNELTKVKYVTEGMRKPAFLSGEQKKAIVDLLFKTNRKVTVKQLKEDYFKKIECFDSVEISGVEDRFNASLGTYHDLLKIIKDKDFLDNEENEDILEDIVLTLTLFEDREMIEERLKTYAHLFDDKVMKQLKRRRYTGWGRLSRKLINGIRDKQSGKTILDFLKSDGFANRNFMQLIHDDSLTFKEDIQKAQVSGQGDSLHEHIANLAGSPAIKKGILQTVKVVDELVKVMGRHKPENIVIEMARENQTTQKGQKNSRERMKRIEEGIKELGSQILKEHPVENTQLQNEKLYLYYLQNGRDMYVDQELDINRLSDYDVDHIVPQSFLKDDSIDNKVLTRSDKARGKSDNVPSEEVVKKMKNYWRQLLNAKLITQRKFDNLTKAERGGLSELDKAGFIKRQLVETRQITKHVAQILDSRMNTKYDENDKLIREVKVITLKSKLVSDFRKDFQFYKVREINNYHHAHDAYLNAVVGTALIKKYPKLESEFVYGDYKVYDVRKMIAKSEQEIGKATAKYFFYSNIMNFFKTEITLANGEIRKRPLIETNGETGEIVWDKGRDFATVRKVLSMPQVNIVKKTEVQTGGFSKESILPKRNSDKLIARKKDWDPKKYGGFDSPTVAYSVLVVAKVEKGKSKKLKSVKELLGITIMERSSFEKNPIDFLEAKGYKEVKKDLIIKLPKYSLFELENGRKRMLASAGELQKGNELALPSKYVNFLYLASHYEKLKGSPEDNEQKQLFVEQHKHYLDEIIEQISEFSKRVILADANLDKVLSAYNKHRDKPIREQAENIIHLFTLTNLGAPAAFKYFDTTIDRKRYTSTKEVLDATLIHQSITGLYETRIDLSQLGGDSGGSSGGSSGSETPGTSESATPESSGGSSGGSSMASNFTQFVLVDNGGTGDVTVAPSNFANGIAEWISSNSRSQAYKVTCSVRQSSAQNRKYTIKVEVPKGAWRSYLNMELTIPIFATNSDCELIVKAMQGLLKDGNPIPSAIAANSGIYGGSGGSMASNFTQFVLVDNGGTGDVTVAPSNFANGIAEWISSNSRSQAYKVTCSVRQSSAQNRKYTIKVEVPKGAWRSYLNMELTIPIFATNSDCELIVKAMQGLLKDGNPIPSAIAANSGIYGGGSGGGSGGGSGGGSMASNFTQFVLVDNGGTGDVTVAPSNFANGIAEWISSNSRSQAYKVTCSVRQSSAQNRKYTIKVEVPKGAWRSYLNMELTIPIFATNSDCELIVKAMQGLLKDGNPIPSAIAANSGIYGGSGGSMASNFTQFVLVDNGGTGDVTVAPSNFANGIAEWISSNSRSQAYKVTCSVRQSSAQNRKYTIKVEVPKGAWRSYLNMELTIPIFATNSDCELIVKAMQGLLKDGNPIPSAIAANSGIYSGGSSGGSSGSETPGTSESATPESSGGSSGGSSTAPLEEEYRLFLEAPIQNVTLLEQWKREIPKVWAEINPPGLASTQAPIHVQLLSTALPVRVRQYPITLEAKRSLRETIRKFRAAGILRPVHSPWNTPLLPVRKSGTSEYRMVQDLREVNKRVETIHPTVPNPYTLLSLLPPDRIWYSVLDLKDAFFCIPLAPESQLIFAFEWADAEEGESGQLTWTRLPQGFKNSPTLFNEALNRDLQGFRLDHPSVSLLQYVDDLLIAADTQAACLSATRDLLMTLAELGYRVSGKKAQLCQEEVTYLGFKIHKGSRSLSNSRTQAILQIPVPKTKRQVREFLGKIGYCRLFIPGFAELAQPLYAATRPGNDPLVWGEKEEEAFQSLKLALTQPPALALPSLDKPFQLFVEETSGAAKGVLTQALGPWKRPVAYLSKRLDPVAAGWPRCLRAIAAAALLTREASKLTFGQDIEITSSHNLESLLRSPPDKWLTNARITQYQVLLLDPPRVRFKQTAALNPATLLPETDDTLPIHHCLDTLDSLTSTRPDLTDQPLAQAEATLFTDGSSYIRDGKRYAGAAVVTLDSVIWAEPLPIGTSAQKAELIALTKALEWSKDKSVNIYTDSRYAFATLHVHGMIYRERGWLTAGGKAIKNAPEILALLTAVWLPKRVAVMHCKGHQKDDAPTSTGNRRADEVAREVAIRPLSTQATISKRTADGSEFESPKKKAKVE

SEQ ID NO: 16023 - protein, 2618 aa, synthetic construct
MPAAKRVKLDGGDKKYSIGLDIGTNSVGWAVITDEYKVPSKKFKVLGNTDRHSIKKNLIGALLFDSGETAEATRLKRTARRRYTRRKNRICYLQEIFSNEMAKVDDSFFHRLEESFLVEEDKKHERHPIFGNIVDEVAYHEKYPTIYHLRKKLVDSTDKADLRLIYLALAHMIKFRGHFLIEGDLNPDNSDVDKLFIQLVQTYNQLFEENPINASGVDAKAILSARLSKSRRLENLIAQLPGEKKNGLFGNLIALSLGLTPNFKSNFDLAEDAKLQLSKDTYDDDLDNLLAQIGDQYADLFLAAKNLSDAILLSDILRVNTEITKAPLSASMIKRYDEHHQDLTLLKALVRQQLPEKYKEIFFDQSKNGYAGYIDGGASQEEFYKFIKPILEKMDGTEELLVKLNREDLLRKQRTFDNGSIPHQIHLGELHAILRRQEDFYPFLKDNREKIEKILTFRIPYYVGPLARGNSRFAWMTRKSEETITPWNFEEVVDKGASAQSFIERMTNFDKNLPNEKVLPKHSLLYEYFTVYNELTKVKYVTEGMRKPAFLSGEQKKAIVDLLFKTNRKVTVKQLKEDYFKKIECFDSVEISGVEDRFNASLGTYHDLLKIIKDKDFLDNEENEDILEDIVLTLTLFEDREMIEERLKTYAHLFDDKVMKQLKRRRYTGWGRLSRKLINGIRDKQSGKTILDFLKSDGFANRNFMQLIHDDSLTFKEDIQKAQVSGQGDSLHEHIANLAGSPAIKKGILQTVKVVDELVKVMGRHKPENIVIEMARENQTTQKGQKNSRERMKRIEEGIKELGSQILKEHPVENTQLQNEKLYLYYLQNGRDMYVDQELDINRLSDYDVDHIVPQSFLKDDSIDNKVLTRSDKARGKSDNVPSEEVVKKMKNYWRQLLNAKLITQRKFDNLTKAERGGLSELDKAGFIKRQLVETRQITKHVAQILDSRMNTKYDENDKLIREVKVITLKSKLVSDFRKDFQFYKVREINNYHHAHDAYLNAVVGTALIKKYPKLESEFVYGDYKVYDVRKMIAKSEQEIGKATAKYFFYSNIMNFFKTEITLANGEIRKRPLIETNGETGEIVWDKGRDFATVRKVLSMPQVNIVKKTEVQTGGFSKESILPKRNSDKLIARKKDWDPKKYGGFDSPTVAYSVLVVAKVEKGKSKKLKSVKELLGITIMERSSFEKNPIDFLEAKGYKEVKKDLIIKLPKYSLFELENGRKRMLASAGELQKGNELALPSKYVNFLYLASHYEKLKGSPEDNEQKQLFVEQHKHYLDEIIEQISEFSKRVILADANLDKVLSAYNKHRDKPIREQAENIIHLFTLTNLGAPAAFKYFDTTIDRKRYTSTKEVLDATLIHQSITGLYETRIDLSQLGGDSGGSSGGSSGSETPGTSESATPESSGGSSGGSSMASNFTQFVLVDNGGTGDVTVAPSNFANGIAEWISSNSRSQAYKVTCSVRQSSAQNRKYTIKVEVPKGAWRSYLNMELTIPIFATNSDCELIVKAMQGLLKDGNPIPSAIAANSGIYGGSGGSMASNFTQFVLVDNGGTGDVTVAPSNFANGIAEWISSNSRSQAYKVTCSVRQSSAQNRKYTIKVEVPKGAWRSYLNMELTIPIFATNSDCELIVKAMQGLLKDGNPIPSAIAANSGIYGGGSGGGSGGGSGGGSMASNFTQFVLVDNGGTGDVTVAPSNFANGIAEWISSNSRSQAYKVTCSVRQSSAQNRKYTIKVEVPKGAWRSYLNMELTIPIFATNSDCELIVKAMQGLLKDGNPIPSAIAANSGIYGGSGGSMASNFTQFVLVDNGGTGDVTVAPSNFANGIAEWISSNSRSQAYKVTCSVRQSSAQNRKYTIKVEVPKGAWRSYLNMELTIPIFATNSDCELIVKAMQGLLKDGNPIPSAIAANSGIYGSSGSSGSSGSSGSSGSSTAPLEEEYRLFLEAPIQNVTLLEQWKREIPKVWAEINPPGLASTQAPIHVQLLSTALPVRVRQYPITLEAKRSLRETIRKFRAAGILRPVHSPWNTPLLPVRKSGTSEYRMVQDLREVNKRVETIHPTVPNPYTLLSLLPPDRIWYSVLDLKDAFFCIPLAPESQLIFAFEWADAEEGESGQLTWTRLPQGFKNSPTLFNEALNRDLQGFRLDHPSVSLLQYVDDLLIAADTQAACLSATRDLLMTLAELGYRVSGKKAQLCQEEVTYLGFKIHKGSRSLSNSRTQAILQIPVPKTKRQVREFLGKIGYCRLFIPGFAELAQPLYAATRPGNDPLVWGEKEEEAFQSLKLALTQPPALALPSLDKPFQLFVEETSGAAKGVLTQALGPWKRPVAYLSKRLDPVAAGWPRCLRAIAAAALLTREASKLTFGQDIEITSSHNLESLLRSPPDKWLTNARITQYQVLLLDPPRVRFKQTAALNPATLLPETDDTLPIHHCLDTLDSLTSTRPDLTDQPLAQAEATLFTDGSSYIRDGKRYAGAAVVTLDSVIWAEPLPIGTSAQKAELIALTKALEWSKDKSVNIYTDSRYAFATLHVHGMIYRERGWLTAGGKAIKNAPEILALLTAVWLPKRVAVMHCKGHQKDDAPTSTGNRRADEVAREVAIRPLSTQATISKRTADGSEFESPKKKAKVE

SEQ ID NO: 16024 - protein, 2611 aa, synthetic construct
MPAAKRVKLDGGDKKYSIGLDIGTNSVGWAVITDEYKVPSKKFKVLGNTDRHSIKKNLIGALLFDSGETAEATRLKRTARRRYTRRKNRICYLQEIFSNEMAKVDDSFFHRLEESFLVEEDKKHERHPIFGNIVDEVAYHEKYPTIYHLRKKLVDSTDKADLRLIYLALAHMIKFRGHFLIEGDLNPDNSDVDKLFIQLVQTYNQLFEENPINASGVDAKAILSARLSKSRRLENLIAQLPGEKKNGLFGNLIALSLGLTPNFKSNFDLAEDAKLQLSKDTYDDDLDNLLAQIGDQYADLFLAAKNLSDAILLSDILRVNTEITKAPLSASMIKRYDEHHQDLTLLKALVRQQLPEKYKEIFFDQSKNGYAGYIDGGASQEEFYKFIKPILEKMDGTEELLVKLNREDLLRKQRTFDNGSIPHQIHLGELHAILRRQEDFYPFLKDNREKIEKILTFRIPYYVGPLARGNSRFAWMTRKSEETITPWNFEEVVDKGASAQSFIERMTNFDKNLPNEKVLPKHSLLYEYFTVYNELTKVKYVTEGMRKPAFLSGEQKKAIVDLLFKTNRKVTVKQLKEDYFKKIECFDSVEISGVEDRFNASLGTYHDLLKIIKDKDFLDNEENEDILEDIVLTLTLFEDREMIEERLKTYAHLFDDKVMKQLKRRRYTGWGRLSRKLINGIRDKQSGKTILDFLKSDGFANRNFMQLIHDDSLTFKEDIQKAQVSGQGDSLHEHIANLAGSPAIKKGILQTVKVVDELVKVMGRHKPENIVIEMARENQTTQKGQKNSRERMKRIEEGIKELGSQILKEHPVENTQLQNEKLYLYYLQNGRDMYVDQELDINRLSDYDVDHIVPQSFLKDDSIDNKVLTRSDKARGKSDNVPSEEVVKKMKNYWRQLLNAKLITQRKFDNLTKAERGGLSELDKAGFIKRQLVETRQITKHVAQILDSRMNTKYDENDKLIREVKVITLKSKLVSDFRKDFQFYKVREINNYHHAHDAYLNAVVGTALIKKYPKLESEFVYGDYKVYDVRKMIAKSEQEIGKATAKYFFYSNIMNFFKTEITLANGEIRKRPLIETNGETGEIVWDKGRDFATVRKVLSMPQVNIVKKTEVQTGGFSKESILPKRNSDKLIARKKDWDPKKYGGFDSPTVAYSVLVVAKVEKGKSKKLKSVKELLGITIMERSSFEKNPIDFLEAKGYKEVKKDLIIKLPKYSLFELENGRKRMLASAGELQKGNELALPSKYVNFLYLASHYEKLKGSPEDNEQKQLFVEQHKHYLDEIIEQISEFSKRVILADANLDKVLSAYNKHRDKPIREQAENIIHLFTLTNLGAPAAFKYFDTTIDRKRYTSTKEVLDATLIHQSITGLYETRIDLSQLGGDSGGSSGGSSGSETPGTSESATPESSGGSSGGSSMASNFTQFVLVDNGGTGDVTVAPSNFANGIAEWISSNSRSQAYKVTCSVRQSSAQNRKYTIKVEVPKGAWRSYLNMELTIPIFATNSDCELIVKAMQGLLKDGNPIPSAIAANSGIYGGSGGSMASNFTQFVLVDNGGTGDVTVAPSNFANGIAEWISSNSRSQAYKVTCSVRQSSAQNRKYTIKVEVPKGAWRSYLNMELTIPIFATNSDCELIVKAMQGLLKDGNPIPSAIAANSGIYGGGSGGGSGGGSGGGSMASNFTQFVLVDNGGTGDVTVAPSNFANGIAEWISSNSRSQAYKVTCSVRQSSAQNRKYTIKVEVPKGAWRSYLNMELTIPIFATNSDCELIVKAMQGLLKDGNPIPSAIAANSGIYGGSGGSMASNFTQFVLVDNGGTGDVTVAPSNFANGIAEWISSNSRSQAYKVTCSVRQSSAQNRKYTIKVEVPKGAWRSYLNMELTIPIFATNSDCELIVKAMQGLLKDGNPIPSAIAANSGIYGSSGGGEAAAKTAPLEEEYRLFLEAPIQNVTLLEQWKREIPKVWAEINPPGLASTQAPIHVQLLSTALPVRVRQYPITLEAKRSLRETIRKFRAAGILRPVHSPWNTPLLPVRKSGTSEYRMVQDLREVNKRVETIHPTVPNPYTLLSLLPPDRIWYSVLDLKDAFFCIPLAPESQLIFAFEWADAEEGESGQLTWTRLPQGFKNSPTLFNEALNRDLQGFRLDHPSVSLLQYVDDLLIAADTQAACLSATRDLLMTLAELGYRVSGKKAQLCQEEVTYLGFKIHKGSRSLSNSRTQAILQIPVPKTKRQVREFLGKIGYCRLFIPGFAELAQPLYAATRPGNDPLVWGEKEEEAFQSLKLALTQPPALALPSLDKPFQLFVEETSGAAKGVLTQALGPWKRPVAYLSKRLDPVAAGWPRCLRAIAAAALLTREASKLTFGQDIEITSSHNLESLLRSPPDKWLTNARITQYQVLLLDPPRVRFKQTAALNPATLLPETDDTLPIHHCLDTLDSLTSTRPDLTDQPLAQAEATLFTDGSSYIRDGKRYAGAAVVTLDSVIWAEPLPIGTSAQKAELIALTKALEWSKDKSVNIYTDSRYAFATLHVHGMIYRERGWLTAGGKAIKNAPEILALLTAVWLPKRVAVMHCKGHQKDDAPTSTGNRRADEVAREVAIRPLSTQATISKRTADGSEFESPKKKAKVE

SEQ ID NO: 16025 - protein, 2252 aa, synthetic construct
MPAAKRVKLDGGDKKYSIGLDIGTNSVGWAVITDEYKVPSKKFKVLGNTDRHSIKKNLIGALLFDSGETAEATRLKRTARRRYTRRKNRICYLQEIFSNEMAKVDDSFFHRLEESFLVEEDKKHERHPIFGNIVDEVAYHEKYPTIYHLRKKLVDSTDKADLRLIYLALAHMIKFRGHFLIEGDLNPDNSDVDKLFIQLVQTYNQLFEENPINASGVDAKAILSARLSKSRRLENLIAQLPGEKKNGLFGNLIALSLGLTPNFKSNFDLAEDAKLQLSKDTYDDDLDNLLAQIGDQYADLFLAAKNLSDAILLSDILRVNTEITKAPLSASMIKRYDEHHQDLTLLKALVRQQLPEKYKEIFFDQSKNGYAGYIDGGASQEEFYKFIKPILEKMDGTEELLVKLNREDLLRKQRTFDNGSIPHQIHLGELHAILRRQEDFYPFLKDNREKIEKILTFRIPYYVGPLARGNSRFAWMTRKSEETITPWNFEEVVDKGASAQSFIERMTNFDKNLPNEKVLPKHSLLYEYFTVYNELTKVKYVTEGMRKPAFLSGEQKKAIVDLLFKTNRKVTVKQLKEDYFKKIECFDSVEISGVEDRFNASLGTYHDLLKIIKDKDFLDNEENEDILEDIVLTLTLFEDREMIEERLKTYAHLFDDKVMKQLKRRRYTGWGRLSRKLINGIRDKQSGKTILDFLKSDGFANRNFMQLIHDDSLTFKEDIQKAQVSGQGDSLHEHIANLAGSPAIKKGILQTVKVVDELVKVMGRHKPENIVIEMARENQTTQKGQKNSRERMKRIEEGIKELGSQILKEHPVENTQLQNEKLYLYYLQNGRDMYVDQELDINRLSDYDVDHIVPQSFLKDDSIDNKVLTRSDKARGKSDNVPSEEVVKKMKNYWRQLLNAKLITQRKFDNLTKAERGGLSELDKAGFIKRQLVETRQITKHVAQILDSRMNTKYDENDKLIREVKVITLKSKLVSDFRKDFQFYKVREINNYHHAHDAYLNAVVGTALIKKYPKLESEFVYGDYKVYDVRKMIAKSEQEIGKATAKYFFYSNIMNFFKTEITLANGEIRKRPLIETNGETGEIVWDKGRDFATVRKVLSMPQVNIVKKTEVQTGGFSKESILPKRNSDKLIARKKDWDPKKYGGFDSPTVAYSVLVVAKVEKGKSKKLKSVKELLGITIMERSSFEKNPIDFLEAKGYKEVKKDLIIKLPKYSLFELENGRKRMLASAGELQKGNELALPSKYVNFLYLASHYEKLKGSPEDNEQKQLFVEQHKHYLDEIIEQISEFSKRVILADANLDKVLSAYNKHRDKPIREQAENIIHLFTLTNLGAPAAFKYFDTTIDRKRYTSTKEVLDATLIHQSITGLYETRIDLSQLGGDGSSGSSGSSGSSGSSGSSMASNFTQFVLVDNGGTGDVTVAPSNFANGIAEWISSNSRSQAYKVTCSVRQSSAQNRKYTIKVEVPKGAWRSYLNMELTIPIFATNSDCELIVKAMQGLLKDGNPIPSAIAANSGIYAEAAAKEAAAKEAAAKEAAAKALEAEAAAKEAAAKEAAAKEAAAKATAPLEEEYRLFLEAPIQNVTLLEQWKREIPKVWAEINPPGLASTQAPIHVQLLSTALPVRVRQYPITLEAKRSLRETIRKFRAAGILRPVHSPWNTPLLPVRKSGTSEYRMVQDLREVNKRVETIHPTVPNPYTLLSLLPPDRIWYSVLDLKDAFFCIPLAPESQLIFAFEWADAEEGESGQLTWTRLPQGFKNSPTLFNEALNRDLQGFRLDHPSVSLLQYVDDLLIAADTQAACLSATRDLLMTLAELGYRVSGKKAQLCQEEVTYLGFKIHKGSRSLSNSRTQAILQIPVPKTKRQVREFLGKIGYCRLFIPGFAELAQPLYAATRPGNDPLVWGEKEEEAFQSLKLALTQPPALALPSLDKPFQLFVEETSGAAKGVLTQALGPWKRPVAYLSKRLDPVAAGWPRCLRAIAAAALLTREASKLTFGQDIEITSSHNLESLLRSPPDKWLTNARITQYQVLLLDPPRVRFKQTAALNPATLLPETDDTLPIHHCLDTLDSLTSTRPDLTDQPLAQAEATLFTDGSSYIRDGKRYAGAAVVTLDSVIWAEPLPIGTSAQKAELIALTKALEWSKDKSVNIYTDSRYAFATLHVHGMIYRERGWLTAGGKAIKNAPEILALLTAVWLPKRVAVMHCKGHQKDDAPTSTGNRRADEVAREVAIRPLSTQATISKRTADGSEFESPKKKAKVE

SEQ ID NO: 16026 - protein, 2239 aa, synthetic construct
MPAAKRVKLDGGDKKYSIGLDIGTNSVGWAVITDEYKVPSKKFKVLGNTDRHSIKKNLIGALLFDSGETAEATRLKRTARRRYTRRKNRICYLQEIFSNEMAKVDDSFFHRLEESFLVEEDKKHERHPIFGNIVDEVAYHEKYPTIYHLRKKLVDSTDKADLRLIYLALAHMIKFRGHFLIEGDLNPDNSDVDKLFIQLVQTYNQLFEENPINASGVDAKAILSARLSKSRRLENLIAQLPGEKKNGLFGNLIALSLGLTPNFKSNFDLAEDAKLQLSKDTYDDDLDNLLAQIGDQYADLFLAAKNLSDAILLSDILRVNTEITKAPLSASMIKRYDEHHQDLTLLKALVRQQLPEKYKEIFFDQSKNGYAGYIDGGASQEEFYKFIKPILEKMDGTEELLVKLNREDLLRKQRTFDNGSIPHQIHLGELHAILRRQEDFYPFLKDNREKIEKILTFRIPYYVGPLARGNSRFAWMTRKSEETITPWNFEEVVDKGASAQSFIERMTNFDKNLPNEKVLPKHSLLYEYFTVYNELTKVKYVTEGMRKPAFLSGEQKKAIVDLLFKTNRKVTVKQLKEDYFKKIECFDSVEISGVEDRFNASLGTYHDLLKIIKDKDFLDNEENEDILEDIVLTLTLFEDREMIEERLKTYAHLFDDKVMKQLKRRRYTGWGRLSRKLINGIRDKQSGKTILDFLKSDGFANRNFMQLIHDDSLTFKEDIQKAQVSGQGDSLHEHIANLAGSPAIKKGILQTVKVVDELVKVMGRHKPENIVIEMARENQTTQKGQKNSRERMKRIEEGIKELGSQILKEHPVENTQLQNEKLYLYYLQNGRDMYVDQELDINRLSDYDVDHIVPQSFLKDDSIDNKVLTRSDKARGKSDNVPSEEVVKKMKNYWRQLLNAKLITQRKFDNLTKAERGGLSELDKAGFIKRQLVETRQITKHVAQILDSRMNTKYDENDKLIREVKVITLKSKLVSDFRKDFQFYKVREINNYHHAHDAYLNAVVGTALIKKYPKLESEFVYGDYKVYDVRKMIAKSEQEIGKATAKYFFYSNIMNFFKTEITLANGEIRKRPLIETNGETGEIVWDKGRDFATVRKVLSMPQVNIVKKTEVQTGGFSKESILPKRNSDKLIARKKDWDPKKYGGFDSPTVAYSVLVVAKVEKGKSKKLKSVKELLGITIMERSSFEKNPIDFLEAKGYKEVKKDLIIKLPKYSLFELENGRKRMLASAGELQKGNELALPSKYVNFLYLASHYEKLKGSPEDNEQKQLFVEQHKHYLDEIIEQISEFSKRVILADANLDKVLSAYNKHRDKPIREQAENIIHLFTLTNLGAPAAFKYFDTTIDRKRYTSTKEVLDATLIHQSITGLYETRIDLSQLGGDGSSGSSGSSGSSGSSGSSMASNFTQFVLVDNGGTGDVTVAPSNFANGIAEWISSNSRSQAYKVTCSVRQSSAQNRKYTIKVEVPKGAWRSYLNMELTIPIFATNSDCELIVKAMQGLLKDGNPIPSAIAANSGIYSGGSSGGSSGSETPGTSESATPESSGGSSGGSSTAPLEEEYRLFLEAPIQNVTLLEQWKREIPKVWAEINPPGLASTQAPIHVQLLSTALPVRVRQYPITLEAKRSLRETIRKFRAAGILRPVHSPWNTPLLPVRKSGTSEYRMVQDLREVNKRVETIHPTVPNPYTLLSLLPPDRIWYSVLDLKDAFFCIPLAPESQLIFAFEWADAEEGESGQLTWTRLPQGFKNSPTLFNEALNRDLQGFRLDHPSVSLLQYVDDLLIAADTQAACLSATRDLLMTLAELGYRVSGKKAQLCQEEVTYLGFKIHKGSRSLSNSRTQAILQIPVPKTKRQVREFLGKIGYCRLFIPGFAELAQPLYAATRPGNDPLVWGEKEEEAFQSLKLALTQPPALALPSLDKPFQLFVEETSGAAKGVLTQALGPWKRPVAYLSKRLDPVAAGWPRCLRAIAAAALLTREASKLTFGQDIEITSSHNLESLLRSPPDKWLTNARITQYQVLLLDPPRVRFKQTAALNPATLLPETDDTLPIHHCLDTLDSLTSTRPDLTDQPLAQAEATLFTDGSSYIRDGKRYAGAAVVTLDSVIWAEPLPIGTSAQKAELIALTKALEWSKDKSVNIYTDSRYAFATLHVHGMIYRERGWLTAGGKAIKNAPEILALLTAVWLPKRVAVMHCKGHQKDDAPTSTGNRRADEVAREVAIRPLSTQATISKRTADGSEFESPKKKAKVE

SEQ ID NO: 16027 - protein, 2224 aa, synthetic construct
MPAAKRVKLDGGDKKYSIGLDIGTNSVGWAVITDEYKVPSKKFKVLGNTDRHSIKKNLIGALLFDSGETAEATRLKRTARRRYTRRKNRICYLQEIFSNEMAKVDDSFFHRLEESFLVEEDKKHERHPIFGNIVDEVAYHEKYPTIYHLRKKLVDSTDKADLRLIYLALAHMIKFRGHFLIEGDLNPDNSDVDKLFIQLVQTYNQLFEENPINASGVDAKAILSARLSKSRRLENLIAQLPGEKKNGLFGNLIALSLGLTPNFKSNFDLAEDAKLQLSKDTYDDDLDNLLAQIGDQYADLFLAAKNLSDAILLSDILRVNTEITKAPLSASMIKRYDEHHQDLTLLKALVRQQLPEKYKEIFFDQSKNGYAGYIDGGASQEEFYKFIKPILEKMDGTEELLVKLNREDLLRKQRTFDNGSIPHQIHLGELHAILRRQEDFYPFLKDNREKIEKILTFRIPYYVGPLARGNSRFAWMTRKSEETITPWNFEEVVDKGASAQSFIERMTNFDKNLPNEKVLPKHSLLYEYFTVYNELTKVKYVTEGMRKPAFLSGEQKKAIVDLLFKTNRKVTVKQLKEDYFKKIECFDSVEISGVEDRFNASLGTYHDLLKIIKDKDFLDNEENEDILEDIVLTLTLFEDREMIEERLKTYAHLFDDKVMKQLKRRRYTGWGRLSRKLINGIRDKQSGKTILDFLKSDGFANRNFMQLIHDDSLTFKEDIQKAQVSGQGDSLHEHIANLAGSPAIKKGILQTVKVVDELVKVMGRHKPENIVIEMARENQTTQKGQKNSRERMKRIEEGIKELGSQILKEHPVENTQLQNEKLYLYYLQNGRDMYVDQELDINRLSDYDVDHIVPQSFLKDDSIDNKVLTRSDKARGKSDNVPSEEVVKKMKNYWRQLLNAKLITQRKFDNLTKAERGGLSELDKAGFIKRQLVETRQITKHVAQILDSRMNTKYDENDKLIREVKVITLKSKLVSDFRKDFQFYKVREINNYHHAHDAYLNAVVGTALIKKYPKLESEFVYGDYKVYDVRKMIAKSEQEIGKATAKYFFYSNIMNFFKTEITLANGEIRKRPLIETNGETGEIVWDKGRDFATVRKVLSMPQVNIVKKTEVQTGGFSKESILPKRNSDKLIARKKDWDPKKYGGFDSPTVAYSVLVVAKVEKGKSKKLKSVKELLGITIMERSSFEKNPIDFLEAKGYKEVKKDLIIKLPKYSLFELENGRKRMLASAGELQKGNELALPSKYVNFLYLASHYEKLKGSPEDNEQKQLFVEQHKHYLDEIIEQISEFSKRVILADANLDKVLSAYNKHRDKPIREQAENIIHLFTLTNLGAPAAFKYFDTTIDRKRYTSTKEVLDATLIHQSITGLYETRIDLSQLGGDGSSGSSGSSGSSGSSGSSMASNFTQFVLVDNGGTGDVTVAPSNFANGIAEWISSNSRSQAYKVTCSVRQSSAQNRKYTIKVEVPKGAWRSYLNMELTIPIFATNSDCELIVKAMQGLLKDGNPIPSAIAANSGIYGSSGSSGSSGSSGSSGSSTAPLEEEYRLFLEAPIQNVTLLEQWKREIPKVWAEINPPGLASTQAPIHVQLLSTALPVRVRQYPITLEAKRSLRETIRKFRAAGILRPVHSPWNTPLLPVRKSGTSEYRMVQDLREVNKRVETIHPTVPNPYTLLSLLPPDRIWYSVLDLKDAFFCIPLAPESQLIFAFEWADAEEGESGQLTWTRLPQGFKNSPTLFNEALNRDLQGFRLDHPSVSLLQYVDDLLIAADTQAACLSATRDLLMTLAELGYRVSGKKAQLCQEEVTYLGFKIHKGSRSLSNSRTQAILQIPVPKTKRQVREFLGKIGYCRLFIPGFAELAQPLYAATRPGNDPLVWGEKEEEAFQSLKLALTQPPALALPSLDKPFQLFVEETSGAAKGVLTQALGPWKRPVAYLSKRLDPVAAGWPRCLRAIAAAALLTREASKLTFGQDIEITSSHNLESLLRSPPDKWLTNARITQYQVLLLDPPRVRFKQTAALNPATLLPETDDTLPIHHCLDTLDSLTSTRPDLTDQPLAQAEATLFTDGSSYIRDGKRYAGAAVVTLDSVIWAEPLPIGTSAQKAELIALTKALEWSKDKSVNIYTDSRYAFATLHVHGMIYRERGWLTAGGKAIKNAPEILALLTAVWLPKRVAVMHCKGHQKDDAPTSTGNRRADEVAREVAIRPLSTQATISKRTADGSEFESPKKKAKVE

SEQ ID NO: 16028 - protein, 2217 aa, synthetic construct
MPAAKRVKLDGGDKKYSIGLDIGTNSVGWAVITDEYKVPSKKFKVLGNTDRHSIKKNLIGALLFDSGETAEATRLKRTARRRYTRRKNRICYLQEIFSNEMAKVDDSFFHRLEESFLVEEDKKHERHPIFGNIVDEVAYHEKYPTIYHLRKKLVDSTDKADLRLIYLALAHMIKFRGHFLIEGDLNPDNSDVDKLFIQLVQTYNQLFEENPINASGVDAKAILSARLSKSRRLENLIAQLPGEKKNGLFGNLIALSLGLTPNFKSNFDLAEDAKLQLSKDTYDDDLDNLLAQIGDQYADLFLAAKNLSDAILLSDILRVNTEITKAPLSASMIKRYDEHHQDLTLLKALVRQQLPEKYKEIFFDQSKNGYAGYIDGGASQEEFYKFIKPILEKMDGTEELLVKLNREDLLRKQRTFDNGSIPHQIHLGELHAILRRQEDFYPFLKDNREKIEKILTFRIPYYVGPLARGNSRFAWMTRKSEETITPWNFEEVVDKGASAQSFIERMTNFDKNLPNEKVLPKHSLLYEYFTVYNELTKVKYVTEGMRKPAFLSGEQKKAIVDLLFKTNRKVTVKQLKEDYFKKIECFDSVEISGVEDRFNASLGTYHDLLKIIKDKDFLDNEENEDILEDIVLTLTLFEDREMIEERLKTYAHLFDDKVMKQLKRRRYTGWGRLSRKLINGIRDKQSGKTILDFLKSDGFANRNFMQLIHDDSLTFKEDIQKAQVSGQGDSLHEHIANLAGSPAIKKGILQTVKVVDELVKVMGRHKPENIVIEMARENQTTQKGQKNSRERMKRIEEGIKELGSQILKEHPVENTQLQNEKLYLYYLQNGRDMYVDQELDINRLSDYDVDHIVPQSFLKDDSIDNKVLTRSDKARGKSDNVPSEEVVKKMKNYWRQLLNAKLITQRKFDNLTKAERGGLSELDKAGFIKRQLVETRQITKHVAQILDSRMNTKYDENDKLIREVKVITLKSKLVSDFRKDFQFYKVREINNYHHAHDAYLNAVVGTALIKKYPKLESEFVYGDYKVYDVRKMIAKSEQEIGKATAKYFFYSNIMNFFKTEITLANGEIRKRPLIETNGETGEIVWDKGRDFATVRKVLSMPQVNIVKKTEVQTGGFSKESILPKRNSDKLIARKKDWDPKKYGGFDSPTVAYSVLVVAKVEKGKSKKLKSVKELLGITIMERSSFEKNPIDFLEAKGYKEVKKDLIIKLPKYSLFELENGRKRMLASAGELQKGNELALPSKYVNFLYLASHYEKLKGSPEDNEQKQLFVEQHKHYLDEIIEQISEFSKRVILADANLDKVLSAYNKHRDKPIREQAENIIHLFTLTNLGAPAAFKYFDTTIDRKRYTSTKEVLDATLIHQSITGLYETRIDLSQLGGDGSSGSSGSSGSSGSSGSSMASNFTQFVLVDNGGTGDVTVAPSNFANGIAEWISSNSRSQAYKVTCSVRQSSAQNRKYTIKVEVPKGAWRSYLNMELTIPIFATNSDCELIVKAMQGLLKDGNPIPSAIAANSGIYGSSGGGEAAAKTAPLEEEYRLFLEAPIQNVTLLEQWKREIPKVWAEINPPGLASTQAPIHVQLLSTALPVRVRQYPITLEAKRSLRETIRKFRAAGILRPVHSPWNTPLLPVRKSGTSEYRMVQDLREVNKRVETIHPTVPNPYTLLSLLPPDRIWYSVLDLKDAFFCIPLAPESQLIFAFEWADAEEGESGQLTWTRLPQGFKNSPTLFNEALNRDLQGFRLDHPSVSLLQYVDDLLIAADTQAACLSATRDLLMTLAELGYRVSGKKAQLCQEEVTYLGFKIHKGSRSLSNSRTQAILQIPVPKTKRQVREFLGKIGYCRLFIPGFAELAQPLYAATRPGNDPLVWGEKEEEAFQSLKLALTQPPALALPSLDKPFQLFVEETSGAAKGVLTQALGPWKRPVAYLSKRLDPVAAGWPRCLRAIAAAALLTREASKLTFGQDIEITSSHNLESLLRSPPDKWLTNARITQYQVLLLDPPRVRFKQTAALNPATLLPETDDTLPIHHCLDTLDSLTSTRPDLTDQPLAQAEATLFTDGSSYIRDGKRYAGAAVVTLDSVIWAEPLPIGTSAQKAELIALTKALEWSKDKSVNIYTDSRYAFATLHVHGMIYRERGWLTAGGKAIKNAPEILALLTAVWLPKRVAVMHCKGHQKDDAPTSTGNRRADEVAREVAIRPLSTQATISKRTADGSEFESPKKKAKVE

SEQ ID NO: 16029 - protein, 2375 aa, synthetic construct
MPAAKRVKLDGGDKKYSIGLDIGTNSVGWAVITDEYKVPSKKFKVLGNTDRHSIKKNLIGALLFDSGETAEATRLKRTARRRYTRRKNRICYLQEIFSNEMAKVDDSFFHRLEESFLVEEDKKHERHPIFGNIVDEVAYHEKYPTIYHLRKKLVDSTDKADLRLIYLALAHMIKFRGHFLIEGDLNPDNSDVDKLFIQLVQTYNQLFEENPINASGVDAKAILSARLSKSRRLENLIAQLPGEKKNGLFGNLIALSLGLTPNFKSNFDLAEDAKLQLSKDTYDDDLDNLLAQIGDQYADLFLAAKNLSDAILLSDILRVNTEITKAPLSASMIKRYDEHHQDLTLLKALVRQQLPEKYKEIFFDQSKNGYAGYIDGGASQEEFYKFIKPILEKMDGTEELLVKLNREDLLRKQRTFDNGSIPHQIHLGELHAILRRQEDFYPFLKDNREKIEKILTFRIPYYVGPLARGNSRFAWMTRKSEETITPWNFEEVVDKGASAQSFIERMTNFDKNLPNEKVLPKHSLLYEYFTVYNELTKVKYVTEGMRKPAFLSGEQKKAIVDLLFKTNRKVTVKQLKEDYFKKIECFDSVEISGVEDRFNASLGTYHDLLKIIKDKDFLDNEENEDILEDIVLTLTLFEDREMIEERLKTYAHLFDDKVMKQLKRRRYTGWGRLSRKLINGIRDKQSGKTILDFLKSDGFANRNFMQLIHDDSLTFKEDIQKAQVSGQGDSLHEHIANLAGSPAIKKGILQTVKVVDELVKVMGRHKPENIVIEMARENQTTQKGQKNSRERMKRIEEGIKELGSQILKEHPVENTQLQNEKLYLYYLQNGRDMYVDQELDINRLSDYDVDHIVPQSFLKDDSIDNKVLTRSDKARGKSDNVPSEEVVKKMKNYWRQLLNAKLITQRKFDNLTKAERGGLSELDKAGFIKRQLVETRQITKHVAQILDSRMNTKYDENDKLIREVKVITLKSKLVSDFRKDFQFYKVREINNYHHAHDAYLNAVVGTALIKKYPKLESEFVYGDYKVYDVRKMIAKSEQEIGKATAKYFFYSNIMNFFKTEITLANGEIRKRPLIETNGETGEIVWDKGRDFATVRKVLSMPQVNIVKKTEVQTGGFSKESILPKRNSDKLIARKKDWDPKKYGGFDSPTVAYSVLVVAKVEKGKSKKLKSVKELLGITIMERSSFEKNPIDFLEAKGYKEVKKDLIIKLPKYSLFELENGRKRMLASAGELQKGNELALPSKYVNFLYLASHYEKLKGSPEDNEQKQLFVEQHKHYLDEIIEQISEFSKRVILADANLDKVLSAYNKHRDKPIREQAENIIHLFTLTNLGAPAAFKYFDTTIDRKRYTSTKEVLDATLIHQSITGLYETRIDLSQLGGDGSSGSSGSSGSSGSSGSSMASNFTQFVLVDNGGTGDVTVAPSNFANGIAEWISSNSRSQAYKVTCSVRQSSAQNRKYTIKVEVPKGAWRSYLNMELTIPIFATNSDCELIVKAMQGLLKDGNPIPSAIAANSGIYGGSGGSMASNFTQFVLVDNGGTGDVTVAPSNFANGIAEWISSNSRSQAYKVTCSVRQSSAQNRKYTIKVEVPKGAWRSYLNMELTIPIFATNSDCELIVKAMQGLLKDGNPIPSAIAANSGIYAEAAAKEAAAKEAAAKEAAAKALEAEAAAKEAAAKEAAAKEAAAKATAPLEEEYRLFLEAPIQNVTLLEQWKREIPKVWAEINPPGLASTQAPIHVQLLSTALPVRVRQYPITLEAKRSLRETIRKFRAAGILRPVHSPWNTPLLPVRKSGTSEYRMVQDLREVNKRVETIHPTVPNPYTLLSLLPPDRIWYSVLDLKDAFFCIPLAPESQLIFAFEWADAEEGESGQLTWTRLPQGFKNSPTLFNEALNRDLQGFRLDHPSVSLLQYVDDLLIAADTQAACLSATRDLLMTLAELGYRVSGKKAQLCQEEVTYLGFKIHKGSRSLSNSRTQAILQIPVPKTKRQVREFLGKIGYCRLFIPGFAELAQPLYAATRPGNDPLVWGEKEEEAFQSLKLALTQPPALALPSLDKPFQLFVEETSGAAKGVLTQALGPWKRPVAYLSKRLDPVAAGWPRCLRAIAAAALLTREASKLTFGQDIEITSSHNLESLLRSPPDKWLTNARITQYQVLLLDPPRVRFKQTAALNPATLLPETDDTLPIHHCLDTLDSLTSTRPDLTDQPLAQAEATLFTDGSSYIRDGKRYAGAAVVTLDSVIWAEPLPIGTSAQKAELIALTKALEWSKDKSVNIYTDSRYAFATLHVHGMIYRERGWLTAGGKAIKNAPEILALLTAVWLPKRVAVMHCKGHQKDDAPTSTGNRRADEVAREVAIRPLSTQATISKRTADGSEFESPKKKAKVE

SEQ ID NO: 16030 - protein, 2362 aa, synthetic construct
MPAAKRVKLDGGDKKYSIGLDIGTNSVGWAVITDEYKVPSKKFKVLGNTDRHSIKKNLIGALLFDSGETAEATRLKRTARRRYTRRKNRICYLQEIFSNEMAKVDDSFFHRLEESFLVEEDKKHERHPIFGNIVDEVAYHEKYPTIYHLRKKLVDSTDKADLRLIYLALAHMIKFRGHFLIEGDLNPDNSDVDKLFIQLVQTYNQLFEENPINASGVDAKAILSARLSKSRRLENLIAQLPGEKKNGLFGNLIALSLGLTPNFKSNFDLAEDAKLQLSKDTYDDDLDNLLAQIGDQYADLFLAAKNLSDAILLSDILRVNTEITKAPLSASMIKRYDEHHQDLTLLKALVRQQLPEKYKEIFFDQSKNGYAGYIDGGASQEEFYKFIKPILEKMDGTEELLVKLNREDLLRKQRTFDNGSIPHQIHLGELHAILRRQEDFYPFLKDNREKIEKILTFRIPYYVGPLARGNSRFAWMTRKSEETITPWNFEEVVDKGASAQSFIERMTNFDKNLPNEKVLPKHSLLYEYFTVYNELTKVKYVTEGMRKPAFLSGEQKKAIVDLLFKTNRKVTVKQLKEDYFKKIECFDSVEISGVEDRFNASLGTYHDLLKIIKDKDFLDNEENEDILEDIVLTLTLFEDREMIEERLKTYAHLFDDKVMKQLKRRRYTGWGRLSRKLINGIRDKQSGKTILDFLKSDGFANRNFMQLIHDDSLTFKEDIQKAQVSGQGDSLHEHIANLAGSPAIKKGILQTVKVVDELVKVMGRHKPENIVIEMARENQTTQKGQKNSRERMKRIEEGIKELGSQILKEHPVENTQLQNEKLYLYYLQNGRDMYVDQELDINRLSDYDVDHIVPQSFLKDDSIDNKVLTRSDKARGKSDNVPSEEVVKKMKNYWRQLLNAKLITQRKFDNLTKAERGGLSELDKAGFIKRQLVETRQITKHVAQILDSRMNTKYDENDKLIREVKVITLKSKLVSDFRKDFQFYKVREINNYHHAHDAYLNAVVGTALIKKYPKLESEFVYGDYKVYDVRKMIAKSEQEIGKATAKYFFYSNIMNFFKTEITLANGEIRKRPLIETNGETGEIVWDKGRDFATVRKVLSMPQVNIVKKTEVQTGGFSKESILPKRNSDKLIARKKDWDPKKYGGFDSPTVAYSVLVVAKVEKGKSKKLKSVKELLGITIMERSSFEKNPIDFLEAKGYKEVKKDLIIKLPKYSLFELENGRKRMLASAGELQKGNELALPSKYVNFLYLASHYEKLKGSPEDNEQKQLFVEQHKHYLDEIIEQISEFSKRVILADANLDKVLSAYNKHRDKPIREQAENIIHLFTLTNLGAPAAFKYFDTTIDRKRYTSTKEVLDATLIHQSITGLYETRIDLSQLGGDGSSGSSGSSGSSGSSGSSMASNFTQFVLVDNGGTGDVTVAPSNFANGIAEWISSNSRSQAYKVTCSVRQSSAQNRKYTIKVEVPKGAWRSYLNMELTIPIFATNSDCELIVKAMQGLLKDGNPIPSAIAANSGIYGGSGGSMASNFTQFVLVDNGGTGDVTVAPSNFANGIAEWISSNSRSQAYKVTCSVRQSSAQNRKYTIKVEVPKGAWRSYLNMELTIPIFATNSDCELIVKAMQGLLKDGNPIPSAIAANSGIYSGGSSGGSSGSETPGTSESATPESSGGSSGGSSTAPLEEEYRLFLEAPIQNVTLLEQWKREIPKVWAEINPPGLASTQAPIHVQLLSTALPVRVRQYPITLEAKRSLRETIRKFRAAGILRPVHSPWNTPLLPVRKSGTSEYRMVQDLREVNKRVETIHPTVPNPYTLLSLLPPDRIWYSVLDLKDAFFCIPLAPESQLIFAFEWADAEEGESGQLTWTRLPQGFKNSPTLFNEALNRDLQGFRLDHPSVSLLQYVDDLLIAADTQAACLSATRDLLMTLAELGYRVSGKKAQLCQEEVTYLGFKIHKGSRSLSNSRTQAILQIPVPKTKRQVREFLGKIGYCRLFIPGFAELAQPLYAATRPGNDPLVWGEKEEEAFQSLKLALTQPPALALPSLDKPFQLFVEETSGAAKGVLTQALGPWKRPVAYLSKRLDPVAAGWPRCLRAIAAAALLTREASKLTFGQDIEITSSHNLESLLRSPPDKWLTNARITQYQVLLLDPPRVRFKQTAALNPATLLPETDDTLPIHHCLDTLDSLTSTRPDLTDQPLAQAEATLFTDGSSYIRDGKRYAGAAVVTLDSVIWAEPLPIGTSAQKAELIALTKALEWSKDKSVNIYTDSRYAFATLHVHGMIYRERGWLTAGGKAIKNAPEILALLTAVWLPKRVAVMHCKGHQKDDAPTSTGNRRADEVAREVAIRPLSTQATISKRTADGSEFESPKKKAKVE

SEQ ID NO: 16031 - protein, 2347 aa, synthetic construct
MPAAKRVKLDGGDKKYSIGLDIGTNSVGWAVITDEYKVPSKKFKVLGNTDRHSIKKNLIGALLFDSGETAEATRLKRTARRRYTRRKNRICYLQEIFSNEMAKVDDSFFHRLEESFLVEEDKKHERHPIFGNIVDEVAYHEKYPTIYHLRKKLVDSTDKADLRLIYLALAHMIKFRGHFLIEGDLNPDNSDVDKLFIQLVQTYNQLFEENPINASGVDAKAILSARLSKSRRLENLIAQLPGEKKNGLFGNLIALSLGLTPNFKSNFDLAEDAKLQLSKDTYDDDLDNLLAQIGDQYADLFLAAKNLSDAILLSDILRVNTEITKAPLSASMIKRYDEHHQDLTLLKALVRQQLPEKYKEIFFDQSKNGYAGYIDGGASQEEFYKFIKPILEKMDGTEELLVKLNREDLLRKQRTFDNGSIPHQIHLGELHAILRRQEDFYPFLKDNREKIEKILTFRIPYYVGPLARGNSRFAWMTRKSEETITPWNFEEVVDKGASAQSFIERMTNFDKNLPNEKVLPKHSLLYEYFTVYNELTKVKYVTEGMRKPAFLSGEQKKAIVDLLFKTNRKVTVKQLKEDYFKKIECFDSVEISGVEDRFNASLGTYHDLLKIIKDKDFLDNEENEDILEDIVLTLTLFEDREMIEERLKTYAHLFDDKVMKQLKRRRYTGWGRLSRKLINGIRDKQSGKTILDFLKSDGFANRNFMQLIHDDSLTFKEDIQKAQVSGQGDSLHEHIANLAGSPAIKKGILQTVKVVDELVKVMGRHKPENIVIEMARENQTTQKGQKNSRERMKRIEEGIKELGSQILKEHPVENTQLQNEKLYLYYLQNGRDMYVDQELDINRLSDYDVDHIVPQSFLKDDSIDNKVLTRSDKARGKSDNVPSEEVVKKMKNYWRQLLNAKLITQRKFDNLTKAERGGLSELDKAGFIKRQLVETRQITKHVAQILDSRMNTKYDENDKLIREVKVITLKSKLVSDFRKDFQFYKVREINNYHHAHDAYLNAVVGTALIKKYPKLESEFVYGDYKVYDVRKMIAKSEQEIGKATAKYFFYSNIMNFFKTEITLANGEIRKRPLIETNGETGEIVWDKGRDFATVRKVLSMPQVNIVKKTEVQTGGFSKESILPKRNSDKLIARKKDWDPKKYGGFDSPTVAYSVLVVAKVEKGKSKKLKSVKELLGITIMERSSFEKNPIDFLEAKGYKEVKKDLIIKLPKYSLFELENGRKRMLASAGELQKGNELALPSKYVNFLYLASHYEKLKGSPEDNEQKQLFVEQHKHYLDEIIEQISEFSKRVILADANLDKVLSAYNKHRDKPIREQAENIIHLFTLTNLGAPAAFKYFDTTIDRKRYTSTKEVLDATLIHQSITGLYETRIDLSQLGGDGSSGSSGSSGSSGSSGSSMASNFTQFVLVDNGGTGDVTVAPSNFANGIAEWISSNSRSQAYKVTCSVRQSSAQNRKYTIKVEVPKGAWRSYLNMELTIPIFATNSDCELIVKAMQGLLKDGNPIPSAIAANSGIYGGSGGSMASNFTQFVLVDNGGTGDVTVAPSNFANGIAEWISSNSRSQAYKVTCSVRQSSAQNRKYTIKVEVPKGAWRSYLNMELTIPIFATNSDCELIVKAMQGLLKDGNPIPSAIAANSGIYGSSGSSGSSGSSGSSGSSTAPLEEEYRLFLEAPIQNVTLLEQWKREIPKVWAEINPPGLASTQAPIHVQLLSTALPVRVRQYPITLEAKRSLRETIRKFRAAGILRPVHSPWNTPLLPVRKSGTSEYRMVQDLREVNKRVETIHPTVPNPYTLLSLLPPDRIWYSVLDLKDAFFCIPLAPESQLIFAFEWADAEEGESGQLTWTRLPQGFKNSPTLFNEALNRDLQGFRLDHPSVSLLQYVDDLLIAADTQAACLSATRDLLMTLAELGYRVSGKKAQLCQEEVTYLGFKIHKGSRSLSNSRTQAILQIPVPKTKRQVREFLGKIGYCRLFIPGFAELAQPLYAATRPGNDPLVWGEKEEEAFQSLKLALTQPPALALPSLDKPFQLFVEETSGAAKGVLTQALGPWKRPVAYLSKRLDPVAAGWPRCLRAIAAAALLTREASKLTFGQDIEITSSHNLESLLRSPPDKWLTNARITQYQVLLLDPPRVRFKQTAALNPATLLPETDDTLPIHHCLDTLDSLTSTRPDLTDQPLAQAEATLFTDGSSYIRDGKRYAGAAVVTLDSVIWAEPLPIGTSAQKAELIALTKALEWSKDKSVNIYTDSRYAFATLHVHGMIYRERGWLTAGGKAIKNAPEILALLTAVWLPKRVAVMHCKGHQKDDAPTSTGNRRADEVAREVAIRPLSTQATISKRTADGSEFESPKKKAKVE

SEQ ID NO: 16032 - protein, 2340 aa, synthetic construct
MPAAKRVKLDGGDKKYSIGLDIGTNSVGWAVITDEYKVPSKKFKVLGNTDRHSIKKNLIGALLFDSGETAEATRLKRTARRRYTRRKNRICYLQEIFSNEMAKVDDSFFHRLEESFLVEEDKKHERHPIFGNIVDEVAYHEKYPTIYHLRKKLVDSTDKADLRLIYLALAHMIKFRGHFLIEGDLNPDNSDVDKLFIQLVQTYNQLFEENPINASGVDAKAILSARLSKSRRLENLIAQLPGEKKNGLFGNLIALSLGLTPNFKSNFDLAEDAKLQLSKDTYDDDLDNLLAQIGDQYADLFLAAKNLSDAILLSDILRVNTEITKAPLSASMIKRYDEHHQDLTLLKALVRQQLPEKYKEIFFDQSKNGYAGYIDGGASQEEFYKFIKPILEKMDGTEELLVKLNREDLLRKQRTFDNGSIPHQIHLGELHAILRRQEDFYPFLKDNREKIEKILTFRIPYYVGPLARGNSRFAWMTRKSEETITPWNFEEVVDKGASAQSFIERMTNFDKNLPNEKVLPKHSLLYEYFTVYNELTKVKYVTEGMRKPAFLSGEQKKAIVDLLFKTNRKVTVKQLKEDYFKKIECFDSVEISGVEDRFNASLGTYHDLLKIIKDKDFLDNEENEDILEDIVLTLTLFEDREMIEERLKTYAHLFDDKVMKQLKRRRYTGWGRLSRKLINGIRDKQSGKTILDFLKSDGFANRNFMQLIHDDSLTFKEDIQKAQVSGQGDSLHEHIANLAGSPAIKKGILQTVKVVDELVKVMGRHKPENIVIEMARENQTTQKGQKNSRERMKRIEEGIKELGSQILKEHPVENTQLQNEKLYLYYLQNGRDMYVDQELDINRLSDYDVDHIVPQSFLKDDSIDNKVLTRSDKARGKSDNVPSEEVVKKMKNYWRQLLNAKLITQRKFDNLTKAERGGLSELDKAGFIKRQLVETRQITKHVAQILDSRMNTKYDENDKLIREVKVITLKSKLVSDFRKDFQFYKVREINNYHHAHDAYLNAVVGTALIKKYPKLESEFVYGDYKVYDVRKMIAKSEQEIGKATAKYFFYSNIMNFFKTEITLANGEIRKRPLIETNGETGEIVWDKGRDFATVRKVLSMPQVNIVKKTEVQTGGFSKESILPKRNSDKLIARKKDWDPKKYGGFDSPTVAYSVLVVAKVEKGKSKKLKSVKELLGITIMERSSFEKNPIDFLEAKGYKEVKKDLIIKLPKYSLFELENGRKRMLASAGELQKGNELALPSKYVNFLYLASHYEKLKGSPEDNEQKQLFVEQHKHYLDEIIEQISEFSKRVILADANLDKVLSAYNKHRDKPIREQAENIIHLFTLTNLGAPAAFKYFDTTIDRKRYTSTKEVLDATLIHQSITGLYETRIDLSQLGGDGSSGSSGSSGSSGSSGSSMASNFTQFVLVDNGGTGDVTVAPSNFANGIAEWISSNSRSQAYKVTCSVRQSSAQNRKYTIKVEVPKGAWRSYLNMELTIPIFATNSDCELIVKAMQGLLKDGNPIPSAIAANSGIYGGSGGSMASNFTQFVLVDNGGTGDVTVAPSNFANGIAEWISSNSRSQAYKVTCSVRQSSAQNRKYTIKVEVPKGAWRSYLNMELTIPIFATNSDCELIVKAMQGLLKDGNPIPSAIAANSGIYGSSGGGEAAAKTAPLEEEYRLFLEAPIQNVTLLEQWKREIPKVWAEINPPGLASTQAPIHVQLLSTALPVRVRQYPITLEAKRSLRETIRKFRAAGILRPVHSPWNTPLLPVRKSGTSEYRMVQDLREVNKRVETIHPTVPNPYTLLSLLPPDRIWYSVLDLKDAFFCIPLAPESQLIFAFEWADAEEGESGQLTWTRLPQGFKNSPTLFNEALNRDLQGFRLDHPSVSLLQYVDDLLIAADTQAACLSATRDLLMTLAELGYRVSGKKAQLCQEEVTYLGFKIHKGSRSLSNSRTQAILQIPVPKTKRQVREFLGKIGYCRLFIPGFAELAQPLYAATRPGNDPLVWGEKEEEAFQSLKLALTQPPALALPSLDKPFQLFVEETSGAAKGVLTQALGPWKRPVAYLSKRLDPVAAGWPRCLRAIAAAALLTREASKLTFGQDIEITSSHNLESLLRSPPDKWLTNARITQYQVLLLDPPRVRFKQTAALNPATLLPETDDTLPIHHCLDTLDSLTSTRPDLTDQPLAQAEATLFTDGSSYIRDGKRYAGAAVVTLDSVIWAEPLPIGTSAQKAELIALTKALEWSKDKSVNIYTDSRYAFATLHVHGMIYRERGWLTAGGKAIKNAPEILALLTAVWLPKRVAVMHCKGHQKDDAPTSTGNRRADEVAREVAIRPLSTQATISKRTADGSEFESPKKKAKVE

SEQ ID NO: 16033 - protein, 2631 aa, synthetic construct
MPAAKRVKLDGGDKKYSIGLDIGTNSVGWAVITDEYKVPSKKFKVLGNTDRHSIKKNLIGALLFDSGETAEATRLKRTARRRYTRRKNRICYLQEIFSNEMAKVDDSFFHRLEESFLVEEDKKHERHPIFGNIVDEVAYHEKYPTIYHLRKKLVDSTDKADLRLIYLALAHMIKFRGHFLIEGDLNPDNSDVDKLFIQLVQTYNQLFEENPINASGVDAKAILSARLSKSRRLENLIAQLPGEKKNGLFGNLIALSLGLTPNFKSNFDLAEDAKLQLSKDTYDDDLDNLLAQIGDQYADLFLAAKNLSDAILLSDILRVNTEITKAPLSASMIKRYDEHHQDLTLLKALVRQQLPEKYKEIFFDQSKNGYAGYIDGGASQEEFYKFIKPILEKMDGTEELLVKLNREDLLRKQRTFDNGSIPHQIHLGELHAILRRQEDFYPFLKDNREKIEKILTFRIPYYVGPLARGNSRFAWMTRKSEETITPWNFEEVVDKGASAQSFIERMTNFDKNLPNEKVLPKHSLLYEYFTVYNELTKVKYVTEGMRKPAFLSGEQKKAIVDLLFKTNRKVTVKQLKEDYFKKIECFDSVEISGVEDRFNASLGTYHDLLKIIKDKDFLDNEENEDILEDIVLTLTLFEDREMIEERLKTYAHLFDDKVMKQLKRRRYTGWGRLSRKLINGIRDKQSGKTILDFLKSDGFANRNFMQLIHDDSLTFKEDIQKAQVSGQGDSLHEHIANLAGSPAIKKGILQTVKVVDELVKVMGRHKPENIVIEMARENQTTQKGQKNSRERMKRIEEGIKELGSQILKEHPVENTQLQNEKLYLYYLQNGRDMYVDQELDINRLSDYDVDHIVPQSFLKDDSIDNKVLTRSDKARGKSDNVPSEEVVKKMKNYWRQLLNAKLITQRKFDNLTKAERGGLSELDKAGFIKRQLVETRQITKHVAQILDSRMNTKYDENDKLIREVKVITLKSKLVSDFRKDFQFYKVREINNYHHAHDAYLNAVVGTALIKKYPKLESEFVYGDYKVYDVRKMIAKSEQEIGKATAKYFFYSNIMNFFKTEITLANGEIRKRPLIETNGETGEIVWDKGRDFATVRKVLSMPQVNIVKKTEVQTGGFSKESILPKRNSDKLIARKKDWDPKKYGGFDSPTVAYSVLVVAKVEKGKSKKLKSVKELLGITIMERSSFEKNPIDFLEAKGYKEVKKDLIIKLPKYSLFELENGRKRMLASAGELQKGNELALPSKYVNFLYLASHYEKLKGSPEDNEQKQLFVEQHKHYLDEIIEQISEFSKRVILADANLDKVLSAYNKHRDKPIREQAENIIHLFTLTNLGAPAAFKYFDTTIDRKRYTSTKEVLDATLIHQSITGLYETRIDLSQLGGDGSSGSSGSSGSSGSSGSSMASNFTQFVLVDNGGTGDVTVAPSNFANGIAEWISSNSRSQAYKVTCSVRQSSAQNRKYTIKVEVPKGAWRSYLNMELTIPIFATNSDCELIVKAMQGLLKDGNPIPSAIAANSGIYGGSGGSMASNFTQFVLVDNGGTGDVTVAPSNFANGIAEWISSNSRSQAYKVTCSVRQSSAQNRKYTIKVEVPKGAWRSYLNMELTIPIFATNSDCELIVKAMQGLLKDGNPIPSAIAANSGIYGGGSGGGSGGGSGGGSMASNFTQFVLVDNGGTGDVTVAPSNFANGIAEWISSNSRSQAYKVTCSVRQSSAQNRKYTIKVEVPKGAWRSYLNMELTIPIFATNSDCELIVKAMQGLLKDGNPIPSAIAANSGIYGGSGGSMASNFTQFVLVDNGGTGDVTVAPSNFANGIAEWISSNSRSQAYKVTCSVRQSSAQNRKYTIKVEVPKGAWRSYLNMELTIPIFATNSDCELIVKAMQGLLKDGNPIPSAIAANSGIYAEAAAKEAAAKEAAAKEAAAKALEAEAAAKEAAAKEAAAKEAAAKATAPLEEEYRLFLEAPIQNVTLLEQWKREIPKVWAEINPPGLASTQAPIHVQLLSTALPVRVRQYPITLEAKRSLRETIRKFRAAGILRPVHSPWNTPLLPVRKSGTSEYRMVQDLREVNKRVETIHPTVPNPYTLLSLLPPDRIWYSVLDLKDAFFCIPLAPESQLIFAFEWADAEEGESGQLTWTRLPQGFKNSPTLFNEALNRDLQGFRLDHPSVSLLQYVDDLLIAADTQAACLSATRDLLMTLAELGYRVSGKKAQLCQEEVTYLGFKIHKGSRSLSNSRTQAILQIPVPKTKRQVREFLGKIGYCRLFIPGFAELAQPLYAATRPGNDPLVWGEKEEEAFQSLKLALTQPPALALPSLDKPFQLFVEETSGAAKGVLTQALGPWKRPVAYLSKRLDPVAAGWPRCLRAIAAAALLTREASKLTFGQDIEITSSHNLESLLRSPPDKWLTNARITQYQVLLLDPPRVRFKQTAALNPATLLPETDDTLPIHHCLDTLDSLTSTRPDLTDQPLAQAEATLFTDGSSYIRDGKRYAGAAVVTLDSVIWAEPLPIGTSAQKAELIALTKALEWSKDKSVNIYTDSRYAFATLHVHGMIYRERGWLTAGGKAIKNAPEILALLTAVWLPKRVAVMHCKGHQKDDAPTSTGNRRADEVAREVAIRPLSTQATISKRTADGSEFESPKKKAKVE

SEQ ID NO: 16034 - protein, 2618 aa, synthetic construct
MPAAKRVKLDGGDKKYSIGLDIGTNSVGWAVITDEYKVPSKKFKVLGNTDRHSIKKNLIGALLFDSGETAEATRLKRTARRRYTRRKNRICYLQEIFSNEMAKVDDSFFHRLEESFLVEEDKKHERHPIFGNIVDEVAYHEKYPTIYHLRKKLVDSTDKADLRLIYLALAHMIKFRGHFLIEGDLNPDNSDVDKLFIQLVQTYNQLFEENPINASGVDAKAILSARLSKSRRLENLIAQLPGEKKNGLFGNLIALSLGLTPNFKSNFDLAEDAKLQLSKDTYDDDLDNLLAQIGDQYADLFLAAKNLSDAILLSDILRVNTEITKAPLSASMIKRYDEHHQDLTLLKALVRQQLPEKYKEIFFDQSKNGYAGYIDGGASQEEFYKFIKPILEKMDGTEELLVKLNREDLLRKQRTFDNGSIPHQIHLGELHAILRRQEDFYPFLKDNREKIEKILTFRIPYYVGPLARGNSRFAWMTRKSEETITPWNFEEVVDKGASAQSFIERMTNFDKNLPNEKVLPKHSLLYEYFTVYNELTKVKYVTEGMRKPAFLSGEQKKAIVDLLFKTNRKVTVKQLKEDYFKKIECFDSVEISGVEDRFNASLGTYHDLLKIIKDKDFLDNEENEDILEDIVLTLTLFEDREMIEERLKTYAHLFDDKVMKQLKRRRYTGWGRLSRKLINGIRDKQSGKTILDFLKSDGFANRNFMQLIHDDSLTFKEDIQKAQVSGQGDSLHEHIANLAGSPAIKKGILQTVKVVDELVKVMGRHKPENIVIEMARENQTTQKGQKNSRERMKRIEEGIKELGSQILKEHPVENTQLQNEKLYLYYLQNGRDMYVDQELDINRLSDYDVDHIVPQSFLKDDSIDNKVLTRSDKARGKSDNVPSEEVVKKMKNYWRQLLNAKLITQRKFDNLTKAERGGLSELDKAGFIKRQLVETRQITKHVAQILDSRMNTKYDENDKLIREVKVITLKSKLVSDFRKDFQFYKVREINNYHHAHDAYLNAVVGTALIKKYPKLESEFVYGDYKVYDVRKMIAKSEQEIGKATAKYFFYSNIMNFFKTEITLANGEIRKRPLIETNGETGEIVWDKGRDFATVRKVLSMPQVNIVKKTEVQTGGFSKESILPKRNSDKLIARKKDWDPKKYGGFDSPTVAYSVLVVAKVEKGKSKKLKSVKELLGITIMERSSFEKNPIDFLEAKGYKEVKKDLIIKLPKYSLFELENGRKRMLASAGELQKGNELALPSKYVNFLYLASHYEKLKGSPEDNEQKQLFVEQHKHYLDEIIEQISEFSKRVILADANLDKVLSAYNKHRDKPIREQAENIIHLFTLTNLGAPAAFKYFDTTIDRKRYTSTKEVLDATLIHQSITGLYETRIDLSQLGGDGSSGSSGSSGSSGSSGSSMASNFTQFVLVDNGGTGDVTVAPSNFANGIAEWISSNSRSQAYKVTCSVRQSSAQNRKYTIKVEVPKGAWRSYLNMELTIPIFATNSDCELIVKAMQGLLKDGNPIPSAIAANSGIYGGSGGSMASNFTQFVLVDNGGTGDVTVAPSNFANGIAEWISSNSRSQAYKVTCSVRQSSAQNRKYTIKVEVPKGAWRSYLNMELTIPIFATNSDCELIVKAMQGLLKDGNPIPSAIAANSGIYGGGSGGGSGGGSGGGSMASNFTQFVLVDNGGTGDVTVAPSNFANGIAEWISSNSRSQAYKVTCSVRQSSAQNRKYTIKVEVPKGAWRSYLNMELTIPIFATNSDCELIVKAMQGLLKDGNPIPSAIAANSGIYGGSGGSMASNFTQFVLVDNGGTGDVTVAPSNFANGIAEWISSNSRSQAYKVTCSVRQSSAQNRKYTIKVEVPKGAWRSYLNMELTIPIFATNSDCELIVKAMQGLLKDGNPIPSAIAANSGIYSGGSSGGSSGSETPGTSESATPESSGGSSGGSSTAPLEEEYRLFLEAPIQNVTLLEQWKREIPKVWAEINPPGLASTQAPIHVQLLSTALPVRVRQYPITLEAKRSLRETIRKFRAAGILRPVHSPWNTPLLPVRKSGTSEYRMVQDLREVNKRVETIHPTVPNPYTLLSLLPPDRIWYSVLDLKDAFFCIPLAPESQLIFAFEWADAEEGESGQLTWTRLPQGFKNSPTLFNEALNRDLQGFRLDHPSVSLLQYVDDLLIAADTQAACLSATRDLLMTLAELGYRVSGKKAQLCQEEVTYLGFKIHKGSRSLSNSRTQAILQIPVPKTKRQVREFLGKIGYCRLFIPGFAELAQPLYAATRPGNDPLVWGEKEEEAFQSLKLALTQPPALALPSLDKPFQLFVEETSGAAKGVLTQALGPWKRPVAYLSKRLDPVAAGWPRCLRAIAAAALLTREASKLTFGQDIEITSSHNLESLLRSPPDKWLTNARITQYQVLLLDPPRVRFKQTAALNPATLLPETDDTLPIHHCLDTLDSLTSTRPDLTDQPLAQAEATLFTDGSSYIRDGKRYAGAAVVTLDSVIWAEPLPIGTSAQKAELIALTKALEWSKDKSVNIYTDSRYAFATLHVHGMIYRERGWLTAGGKAIKNAPEILALLTAVWLPKRVAVMHCKGHQKDDAPTSTGNRRADEVAREVAIRPLSTQATISKRTADGSEFESPKKKAKVE

SEQ ID NO: 16035 - protein, 2603 aa, synthetic construct
MPAAKRVKLDGGDKKYSIGLDIGTNSVGWAVITDEYKVPSKKFKVLGNTDRHSIKKNLIGALLFDSGETAEATRLKRTARRRYTRRKNRICYLQEIFSNEMAKVDDSFFHRLEESFLVEEDKKHERHPIFGNIVDEVAYHEKYPTIYHLRKKLVDSTDKADLRLIYLALAHMIKFRGHFLIEGDLNPDNSDVDKLFIQLVQTYNQLFEENPINASGVDAKAILSARLSKSRRLENLIAQLPGEKKNGLFGNLIALSLGLTPNFKSNFDLAEDAKLQLSKDTYDDDLDNLLAQIGDQYADLFLAAKNLSDAILLSDILRVNTEITKAPLSASMIKRYDEHHQDLTLLKALVRQQLPEKYKEIFFDQSKNGYAGYIDGGASQEEFYKFIKPILEKMDGTEELLVKLNREDLLRKQRTFDNGSIPHQIHLGELHAILRRQEDFYPFLKDNREKIEKILTFRIPYYVGPLARGNSRFAWMTRKSEETITPWNFEEVVDKGASAQSFIERMTNFDKNLPNEKVLPKHSLLYEYFTVYNELTKVKYVTEGMRKPAFLSGEQKKAIVDLLFKTNRKVTVKQLKEDYFKKIECFDSVEISGVEDRFNASLGTYHDLLKIIKDKDFLDNEENEDILEDIVLTLTLFEDREMIEERLKTYAHLFDDKVMKQLKRRRYTGWGRLSRKLINGIRDKQSGKTILDFLKSDGFANRNFMQLIHDDSLTFKEDIQKAQVSGQGDSLHEHIANLAGSPAIKKGILQTVKVVDELVKVMGRHKPENIVIEMARENQTTQKGQKNSRERMKRIEEGIKELGSQILKEHPVENTQLQNEKLYLYYLQNGRDMYVDQELDINRLSDYDVDHIVPQSFLKDDSIDNKVLTRSDKARGKSDNVPSEEVVKKMKNYWRQLLNAKLITQRKFDNLTKAERGGLSELDKAGFIKRQLVETRQITKHVAQILDSRMNTKYDENDKLIREVKVITLKSKLVSDFRKDFQFYKVREINNYHHAHDAYLNAVVGTALIKKYPKLESEFVYGDYKVYDVRKMIAKSEQEIGKATAKYFFYSNIMNFFKTEITLANGEIRKRPLIETNGETGEIVWDKGRDFATVRKVLSMPQVNIVKKTEVQTGGFSKESILPKRNSDKLIARKKDWDPKKYGGFDSPTVAYSVLVVAKVEKGKSKKLKSVKELLGITIMERSSFEKNPIDFLEAKGYKEVKKDLIIKLPKYSLFELENGRKRMLASAGELQKGNELALPSKYVNFLYLASHYEKLKGSPEDNEQKQLFVEQHKHYLDEIIEQISEFSKRVILADANLDKVLSAYNKHRDKPIREQAENIIHLFTLTNLGAPAAFKYFDTTIDRKRYTSTKEVLDATLIHQSITGLYETRIDLSQLGGDGSSGSSGSSGSSGSSGSSMASNFTQFVLVDNGGTGDVTVAPSNFANGIAEWISSNSRSQAYKVTCSVRQSSAQNRKYTIKVEVPKGAWRSYLNMELTIPIFATNSDCELIVKAMQGLLKDGNPIPSAIAANSGIYGGSGGSMASNFTQFVLVDNGGTGDVTVAPSNFANGIAEWISSNSRSQAYKVTCSVRQSSAQNRKYTIKVEVPKGAWRSYLNMELTIPIFATNSDCELIVKAMQGLLKDGNPIPSAIAANSGIYGGGSGGGSGGGSGGGSMASNFTQFVLVDNGGTGDVTVAPSNFANGIAEWISSNSRSQAYKVTCSVRQSSAQNRKYTIKVEVPKGAWRSYLNMELTIPIFATNSDCELIVKAMQGLLKDGNPIPSAIAANSGIYGGSGGSMASNFTQFVLVDNGGTGDVTVAPSNFANGIAEWISSNSRSQAYKVTCSVRQSSAQNRKYTIKVEVPKGAWRSYLNMELTIPIFATNSDCELIVKAMQGLLKDGNPIPSAIAANSGIYGSSGSSGSSGSSGSSGSSTAPLEEEYRLFLEAPIQNVTLLEQWKREIPKVWAEINPPGLASTQAPIHVQLLSTALPVRVRQYPITLEAKRSLRETIRKFRAAGILRPVHSPWNTPLLPVRKSGTSEYRMVQDLREVNKRVETIHPTVPNPYTLLSLLPPDRIWYSVLDLKDAFFCIPLAPESQLIFAFEWADAEEGESGQLTWTRLPQGFKNSPTLFNEALNRDLQGFRLDHPSVSLLQYVDDLLIAADTQAACLSATRDLLMTLAELGYRVSGKKAQLCQEEVTYLGFKIHKGSRSLSNSRTQAILQIPVPKTKRQVREFLGKIGYCRLFIPGFAELAQPLYAATRPGNDPLVWGEKEEEAFQSLKLALTQPPALALPSLDKPFQLFVEETSGAAKGVLTQALGPWKRPVAYLSKRLDPVAAGWPRCLRAIAAAALLTREASKLTFGQDIEITSSHNLESLLRSPPDKWLTNARITQYQVLLLDPPRVRFKQTAALNPATLLPETDDTLPIHHCLDTLDSLTSTRPDLTDQPLAQAEATLFTDGSSYIRDGKRYAGAAVVTLDSVIWAEPLPIGTSAQKAELIALTKALEWSKDKSVNIYTDSRYAFATLHVHGMIYRERGWLTAGGKAIKNAPEILALLTAVWLPKRVAVMHCKGHQKDDAPTSTGNRRADEVAREVAIRPLSTQATISKRTADGSEFESPKKKAKVE

SEQ ID NO: 16036 - protein, 2596 aa, synthetic construct
MPAAKRVKLDGGDKKYSIGLDIGTNSVGWAVITDEYKVPSKKFKVLGNTDRHSIKKNLIGALLFDSGETAEATRLKRTARRRYTRRKNRICYLQEIFSNEMAKVDDSFFHRLEESFLVEEDKKHERHPIFGNIVDEVAYHEKYPTIYHLRKKLVDSTDKADLRLIYLALAHMIKFRGHFLIEGDLNPDNSDVDKLFIQLVQTYNQLFEENPINASGVDAKAILSARLSKSRRLENLIAQLPGEKKNGLFGNLIALSLGLTPNFKSNFDLAEDAKLQLSKDTYDDDLDNLLAQIGDQYADLFLAAKNLSDAILLSDILRVNTEITKAPLSASMIKRYDEHHQDLTLLKALVRQQLPEKYKEIFFDQSKNGYAGYIDGGASQEEFYKFIKPILEKMDGTEELLVKLNREDLLRKQRTFDNGSIPHQIHLGELHAILRRQEDFYPFLKDNREKIEKILTFRIPYYVGPLARGNSRFAWMTRKSEETITPWNFEEVVDKGASAQSFIERMTNFDKNLPNEKVLPKHSLLYEYFTVYNELTKVKYVTEGMRKPAFLSGEQKKAIVDLLFKTNRKVTVKQLKEDYFKKIECFDSVEISGVEDRFNASLGTYHDLLKIIKDKDFLDNEENEDILEDIVLTLTLFEDREMIEERLKTYAHLFDDKVMKQLKRRRYTGWGRLSRKLINGIRDKQSGKTILDFLKSDGFANRNFMQLIHDDSLTFKEDIQKAQVSGQGDSLHEHIANLAGSPAIKKGILQTVKVVDELVKVMGRHKPENIVIEMARENQTTQKGQKNSRERMKRIEEGIKELGSQILKEHPVENTQLQNEKLYLYYLQNGRDMYVDQELDINRLSDYDVDHIVPQSFLKDDSIDNKVLTRSDKARGKSDNVPSEEVVKKMKNYWRQLLNAKLITQRKFDNLTKAERGGLSELDKAGFIKRQLVETRQITKHVAQILDSRMNTKYDENDKLIREVKVITLKSKLVSDFRKDFQFYKVREINNYHHAHDAYLNAVVGTALIKKYPKLESEFVYGDYKVYDVRKMIAKSEQEIGKATAKYFFYSNIMNFFKTEITLANGEIRKRPLIETNGETGEIVWDKGRDFATVRKVLSMPQVNIVKKTEVQTGGFSKESILPKRNSDKLIARKKDWDPKKYGGFDSPTVAYSVLVVAKVEKGKSKKLKSVKELLGITIMERSSFEKNPIDFLEAKGYKEVKKDLIIKLPKYSLFELENGRKRMLASAGELQKGNELALPSKYVNFLYLASHYEKLKGSPEDNEQKQLFVEQHKHYLDEIIEQISEFSKRVILADANLDKVLSAYNKHRDKPIREQAENIIHLFTLTNLGAPAAFKYFDTTIDRKRYTSTKEVLDATLIHQSITGLYETRIDLSQLGGDGSSGSSGSSGSSGSSGSSMASNFTQFVLVDNGGTGDVTVAPSNFANGIAEWISSNSRSQAYKVTCSVRQSSAQNRKYTIKVEVPKGAWRSYLNMELTIPIFATNSDCELIVKAMQGLLKDGNPIPSAIAANSGIYGGSGGSMASNFTQFVLVDNGGTGDVTVAPSNFANGIAEWISSNSRSQAYKVTCSVRQSSAQNRKYTIKVEVPKGAWRSYLNMELTIPIFATNSDCELIVKAMQGLLKDGNPIPSAIAANSGIYGGGSGGGSGGGSGGGSMASNFTQFVLVDNGGTGDVTVAPSNFANGIAEWISSNSRSQAYKVTCSVRQSSAQNRKYTIKVEVPKGAWRSYLNMELTIPIFATNSDCELIVKAMQGLLKDGNPIPSAIAANSGIYGGSGGSMASNFTQFVLVDNGGTGDVTVAPSNFANGIAEWISSNSRSQAYKVTCSVRQSSAQNRKYTIKVEVPKGAWRSYLNMELTIPIFATNSDCELIVKAMQGLLKDGNPIPSAIAANSGIYGSSGGGEAAAKTAPLEEEYRLFLEAPIQNVTLLEQWKREIPKVWAEINPPGLASTQAPIHVQLLSTALPVRVRQYPITLEAKRSLRETIRKFRAAGILRPVHSPWNTPLLPVRKSGTSEYRMVQDLREVNKRVETIHPTVPNPYTLLSLLPPDRIWYSVLDLKDAFFCIPLAPESQLIFAFEWADAEEGESGQLTWTRLPQGFKNSPTLFNEALNRDLQGFRLDHPSVSLLQYVDDLLIAADTQAACLSATRDLLMTLAELGYRVSGKKAQLCQEEVTYLGFKIHKGSRSLSNSRTQAILQIPVPKTKRQVREFLGKIGYCRLFIPGFAELAQPLYAATRPGNDPLVWGEKEEEAFQSLKLALTQPPALALPSLDKPFQLFVEETSGAAKGVLTQALGPWKRPVAYLSKRLDPVAAGWPRCLRAIAAAALLTREASKLTFGQDIEITSSHNLESLLRSPPDKWLTNARITQYQVLLLDPPRVRFKQTAALNPATLLPETDDTLPIHHCLDTLDSLTSTRPDLTDQPLAQAEATLFTDGSSYIRDGKRYAGAAVVTLDSVIWAEPLPIGTSAQKAELIALTKALEWSKDKSVNIYTDSRYAFATLHVHGMIYRERGWLTAGGKAIKNAPEILALLTAVWLPKRVAVMHCKGHQKDDAPTSTGNRRADEVAREVAIRPLSTQATISKRTADGSEFESPKKKAKVE

SEQ ID NO: 16037 - protein, 2245 aa, synthetic construct
MPAAKRVKLDGGDKKYSIGLDIGTNSVGWAVITDEYKVPSKKFKVLGNTDRHSIKKNLIGALLFDSGETAEATRLKRTARRRYTRRKNRICYLQEIFSNEMAKVDDSFFHRLEESFLVEEDKKHERHPIFGNIVDEVAYHEKYPTIYHLRKKLVDSTDKADLRLIYLALAHMIKFRGHFLIEGDLNPDNSDVDKLFIQLVQTYNQLFEENPINASGVDAKAILSARLSKSRRLENLIAQLPGEKKNGLFGNLIALSLGLTPNFKSNFDLAEDAKLQLSKDTYDDDLDNLLAQIGDQYADLFLAAKNLSDAILLSDILRVNTEITKAPLSASMIKRYDEHHQDLTLLKALVRQQLPEKYKEIFFDQSKNGYAGYIDGGASQEEFYKFIKPILEKMDGTEELLVKLNREDLLRKQRTFDNGSIPHQIHLGELHAILRRQEDFYPFLKDNREKIEKILTFRIPYYVGPLARGNSRFAWMTRKSEETITPWNFEEVVDKGASAQSFIERMTNFDKNLPNEKVLPKHSLLYEYFTVYNELTKVKYVTEGMRKPAFLSGEQKKAIVDLLFKTNRKVTVKQLKEDYFKKIECFDSVEISGVEDRFNASLGTYHDLLKIIKDKDFLDNEENEDILEDIVLTLTLFEDREMIEERLKTYAHLFDDKVMKQLKRRRYTGWGRLSRKLINGIRDKQSGKTILDFLKSDGFANRNFMQLIHDDSLTFKEDIQKAQVSGQGDSLHEHIANLAGSPAIKKGILQTVKVVDELVKVMGRHKPENIVIEMARENQTTQKGQKNSRERMKRIEEGIKELGSQILKEHPVENTQLQNEKLYLYYLQNGRDMYVDQELDINRLSDYDVDHIVPQSFLKDDSIDNKVLTRSDKARGKSDNVPSEEVVKKMKNYWRQLLNAKLITQRKFDNLTKAERGGLSELDKAGFIKRQLVETRQITKHVAQILDSRMNTKYDENDKLIREVKVITLKSKLVSDFRKDFQFYKVREINNYHHAHDAYLNAVVGTALIKKYPKLESEFVYGDYKVYDVRKMIAKSEQEIGKATAKYFFYSNIMNFFKTEITLANGEIRKRPLIETNGETGEIVWDKGRDFATVRKVLSMPQVNIVKKTEVQTGGFSKESILPKRNSDKLIARKKDWDPKKYGGFDSPTVAYSVLVVAKVEKGKSKKLKSVKELLGITIMERSSFEKNPIDFLEAKGYKEVKKDLIIKLPKYSLFELENGRKRMLASAGELQKGNELALPSKYVNFLYLASHYEKLKGSPEDNEQKQLFVEQHKHYLDEIIEQISEFSKRVILADANLDKVLSAYNKHRDKPIREQAENIIHLFTLTNLGAPAAFKYFDTTIDRKRYTSTKEVLDATLIHQSITGLYETRIDLSQLGGDGSSGGGEAAAKMASNFTQFVLVDNGGTGDVTVAPSNFANGIAEWISSNSRSQAYKVTCSVRQSSAQNRKYTIKVEVPKGAWRSYLNMELTIPIFATNSDCELIVKAMQGLLKDGNPIPSAIAANSGIYAEAAAKEAAAKEAAAKEAAAKALEAEAAAKEAAAKEAAAKEAAAKATAPLEEEYRLFLEAPIQNVTLLEQWKREIPKVWAEINPPGLASTQAPIHVQLLSTALPVRVRQYPITLEAKRSLRETIRKFRAAGILRPVHSPWNTPLLPVRKSGTSEYRMVQDLREVNKRVETIHPTVPNPYTLLSLLPPDRIWYSVLDLKDAFFCIPLAPESQLIFAFEWADAEEGESGQLTWTRLPQGFKNSPTLFNEALNRDLQGFRLDHPSVSLLQYVDDLLIAADTQAACLSATRDLLMTLAELGYRVSGKKAQLCQEEVTYLGFKIHKGSRSLSNSRTQAILQIPVPKTKRQVREFLGKIGYCRLFIPGFAELAQPLYAATRPGNDPLVWGEKEEEAFQSLKLALTQPPALALPSLDKPFQLFVEETSGAAKGVLTQALGPWKRPVAYLSKRLDPVAAGWPRCLRAIAAAALLTREASKLTFGQDIEITSSHNLESLLRSPPDKWLTNARITQYQVLLLDPPRVRFKQTAALNPATLLPETDDTLPIHHCLDTLDSLTSTRPDLTDQPLAQAEATLFTDGSSYIRDGKRYAGAAVVTLDSVIWAEPLPIGTSAQKAELIALTKALEWSKDKSVNIYTDSRYAFATLHVHGMIYRERGWLTAGGKAIKNAPEILALLTAVWLPKRVAVMHCKGHQKDDAPTSTGNRRADEVAREVAIRPLSTQATISKRTADGSEFESPKKKAKVE

SEQ ID NO: 16038 - protein, 2232 aa, synthetic construct
MPAAKRVKLDGGDKKYSIGLDIGTNSVGWAVITDEYKVPSKKFKVLGNTDRHSIKKNLIGALLFDSGETAEATRLKRTARRRYTRRKNRICYLQEIFSNEMAKVDDSFFHRLEESFLVEEDKKHERHPIFGNIVDEVAYHEKYPTIYHLRKKLVDSTDKADLRLIYLALAHMIKFRGHFLIEGDLNPDNSDVDKLFIQLVQTYNQLFEENPINASGVDAKAILSARLSKSRRLENLIAQLPGEKKNGLFGNLIALSLGLTPNFKSNFDLAEDAKLQLSKDTYDDDLDNLLAQIGDQYADLFLAAKNLSDAILLSDILRVNTEITKAPLSASMIKRYDEHHQDLTLLKALVRQQLPEKYKEIFFDQSKNGYAGYIDGGASQEEFYKFIKPILEKMDGTEELLVKLNREDLLRKQRTFDNGSIPHQIHLGELHAILRRQEDFYPFLKDNREKIEKILTFRIPYYVGPLARGNSRFAWMTRKSEETITPWNFEEVVDKGASAQSFIERMTNFDKNLPNEKVLPKHSLLYEYFTVYNELTKVKYVTEGMRKPAFLSGEQKKAIVDLLFKTNRKVTVKQLKEDYFKKIECFDSVEISGVEDRFNASLGTYHDLLKIIKDKDFLDNEENEDILEDIVLTLTLFEDREMIEERLKTYAHLFDDKVMKQLKRRRYTGWGRLSRKLINGIRDKQSGKTILDFLKSDGFANRNFMQLIHDDSLTFKEDIQKAQVSGQGDSLHEHIANLAGSPAIKKGILQTVKVVDELVKVMGRHKPENIVIEMARENQTTQKGQKNSRERMKRIEEGIKELGSQILKEHPVENTQLQNEKLYLYYLQNGRDMYVDQELDINRLSDYDVDHIVPQSFLKDDSIDNKVLTRSDKARGKSDNVPSEEVVKKMKNYWRQLLNAKLITQRKFDNLTKAERGGLSELDKAGFIKRQLVETRQITKHVAQILDSRMNTKYDENDKLIREVKVITLKSKLVSDFRKDFQFYKVREINNYHHAHDAYLNAVVGTALIKKYPKLESEFVYGDYKVYDVRKMIAKSEQEIGKATAKYFFYSNIMNFFKTEITLANGEIRKRPLIETNGETGEIVWDKGRDFATVRKVLSMPQVNIVKKTEVQTGGFSKESILPKRNSDKLIARKKDWDPKKYGGFDSPTVAYSVLVVAKVEKGKSKKLKSVKELLGITIMERSSFEKNPIDFLEAKGYKEVKKDLIIKLPKYSLFELENGRKRMLASAGELQKGNELALPSKYVNFLYLASHYEKLKGSPEDNEQKQLFVEQHKHYLDEIIEQISEFSKRVILADANLDKVLSAYNKHRDKPIREQAENIIHLFTLTNLGAPAAFKYFDTTIDRKRYTSTKEVLDATLIHQSITGLYETRIDLSQLGGDGSSGGGEAAAKMASNFTQFVLVDNGGTGDVTVAPSNFANGIAEWISSNSRSQAYKVTCSVRQSSAQNRKYTIKVEVPKGAWRSYLNMELTIPIFATNSDCELIVKAMQGLLKDGNPIPSAIAANSGIYSGGSSGGSSGSETPGTSESATPESSGGSSGGSSTAPLEEEYRLFLEAPIQNVTLLEQWKREIPKVWAEINPPGLASTQAPIHVQLLSTALPVRVRQYPITLEAKRSLRETIRKFRAAGILRPVHSPWNTPLLPVRKSGTSEYRMVQDLREVNKRVETIHPTVPNPYTLLSLLPPDRIWYSVLDLKDAFFCIPLAPESQLIFAFEWADAEEGESGQLTWTRLPQGFKNSPTLFNEALNRDLQGFRLDHPSVSLLQYVDDLLIAADTQAACLSATRDLLMTLAELGYRVSGKKAQLCQEEVTYLGFKIHKGSRSLSNSRTQAILQIPVPKTKRQVREFLGKIGYCRLFIPGFAELAQPLYAATRPGNDPLVWGEKEEEAFQSLKLALTQPPALALPSLDKPFQLFVEETSGAAKGVLTQALGPWKRPVAYLSKRLDPVAAGWPRCLRAIAAAALLTREASKLTFGQDIEITSSHNLESLLRSPPDKWLTNARITQYQVLLLDPPRVRFKQTAALNPATLLPETDDTLPIHHCLDTLDSLTSTRPDLTDQPLAQAEATLFTDGSSYIRDGKRYAGAAVVTLDSVIWAEPLPIGTSAQKAELIALTKALEWSKDKSVNIYTDSRYAFATLHVHGMIYRERGWLTAGGKAIKNAPEILALLTAVWLPKRVAVMHCKGHQKDDAPTSTGNRRADEVAREVAIRPLSTQATISKRTADGSEFESPKKKAKVE

SEQ ID NO: 16039 - protein, 2217 aa, synthetic construct
MPAAKRVKLDGGDKKYSIGLDIGTNSVGWAVITDEYKVPSKKFKVLGNTDRHSIKKNLIGALLFDSGETAEATRLKRTARRRYTRRKNRICYLQEIFSNEMAKVDDSFFHRLEESFLVEEDKKHERHPIFGNIVDEVAYHEKYPTIYHLRKKLVDSTDKADLRLIYLALAHMIKFRGHFLIEGDLNPDNSDVDKLFIQLVQTYNQLFEENPINASGVDAKAILSARLSKSRRLENLIAQLPGEKKNGLFGNLIALSLGLTPNFKSNFDLAEDAKLQLSKDTYDDDLDNLLAQIGDQYADLFLAAKNLSDAILLSDILRVNTEITKAPLSASMIKRYDEHHQDLTLLKALVRQQLPEKYKEIFFDQSKNGYAGYIDGGASQEEFYKFIKPILEKMDGTEELLVKLNREDLLRKQRTFDNGSIPHQIHLGELHAILRRQEDFYPFLKDNREKIEKILTFRIPYYVGPLARGNSRFAWMTRKSEETITPWNFEEVVDKGASAQSFIERMTNFDKNLPNEKVLPKHSLLYEYFTVYNELTKVKYVTEGMRKPAFLSGEQKKAIVDLLFKTNRKVTVKQLKEDYFKKIECFDSVEISGVEDRFNASLGTYHDLLKIIKDKDFLDNEENEDILEDIVLTLTLFEDREMIEERLKTYAHLFDDKVMKQLKRRRYTGWGRLSRKLINGIRDKQSGKTILDFLKSDGFANRNFMQLIHDDSLTFKEDIQKAQVSGQGDSLHEHIANLAGSPAIKKGILQTVKVVDELVKVMGRHKPENIVIEMARENQTTQKGQKNSRERMKRIEEGIKELGSQILKEHPVENTQLQNEKLYLYYLQNGRDMYVDQELDINRLSDYDVDHIVPQSFLKDDSIDNKVLTRSDKARGKSDNVPSEEVVKKMKNYWRQLLNAKLITQRKFDNLTKAERGGLSELDKAGFIKRQLVETRQITKHVAQILDSRMNTKYDENDKLIREVKVITLKSKLVSDFRKDFQFYKVREINNYHHAHDAYLNAVVGTALIKKYPKLESEFVYGDYKVYDVRKMIAKSEQEIGKATAKYFFYSNIMNFFKTEITLANGEIRKRPLIETNGETGEIVWDKGRDFATVRKVLSMPQVNIVKKTEVQTGGFSKESILPKRNSDKLIARKKDWDPKKYGGFDSPTVAYSVLVVAKVEKGKSKKLKSVKELLGITIMERSSFEKNPIDFLEAKGYKEVKKDLIIKLPKYSLFELENGRKRMLASAGELQKGNELALPSKYVNFLYLASHYEKLKGSPEDNEQKQLFVEQHKHYLDEIIEQISEFSKRVILADANLDKVLSAYNKHRDKPIREQAENIIHLFTLTNLGAPAAFKYFDTTIDRKRYTSTKEVLDATLIHQSITGLYETRIDLSQLGGDGSSGGGEAAAKMASNFTQFVLVDNGGTGDVTVAPSNFANGIAEWISSNSRSQAYKVTCSVRQSSAQNRKYTIKVEVPKGAWRSYLNMELTIPIFATNSDCELIVKAMQGLLKDGNPIPSAIAANSGIYGSSGSSGSSGSSGSSGSSTAPLEEEYRLFLEAPIQNVTLLEQWKREIPKVWAEINPPGLASTQAPIHVQLLSTALPVRVRQYPITLEAKRSLRETIRKFRAAGILRPVHSPWNTPLLPVRKSGTSEYRMVQDLREVNKRVETIHPTVPNPYTLLSLLPPDRIWYSVLDLKDAFFCIPLAPESQLIFAFEWADAEEGESGQLTWTRLPQGFKNSPTLFNEALNRDLQGFRLDHPSVSLLQYVDDLLIAADTQAACLSATRDLLMTLAELGYRVSGKKAQLCQEEVTYLGFKIHKGSRSLSNSRTQAILQIPVPKTKRQVREFLGKIGYCRLFIPGFAELAQPLYAATRPGNDPLVWGEKEEEAFQSLKLALTQPPALALPSLDKPFQLFVEETSGAAKGVLTQALGPWKRPVAYLSKRLDPVAAGWPRCLRAIAAAALLTREASKLTFGQDIEITSSHNLESLLRSPPDKWLTNARITQYQVLLLDPPRVRFKQTAALNPATLLPETDDTLPIHHCLDTLDSLTSTRPDLTDQPLAQAEATLFTDGSSYIRDGKRYAGAAVVTLDSVIWAEPLPIGTSAQKAELIALTKALEWSKDKSVNIYTDSRYAFATLHVHGMIYRERGWLTAGGKAIKNAPEILALLTAVWLPKRVAVMHCKGHQKDDAPTSTGNRRADEVAREVAIRPLSTQATISKRTADGSEFESPKKKAKVE

SEQ ID NO: 16040 - protein, 2210 aa, synthetic construct
MPAAKRVKLDGGDKKYSIGLDIGTNSVGWAVITDEYKVPSKKFKVLGNTDRHSIKKNLIGALLFDSGETAEATRLKRTARRRYTRRKNRICYLQEIFSNEMAKVDDSFFHRLEESFLVEEDKKHERHPIFGNIVDEVAYHEKYPTIYHLRKKLVDSTDKADLRLIYLALAHMIKFRGHFLIEGDLNPDNSDVDKLFIQLVQTYNQLFEENPINASGVDAKAILSARLSKSRRLENLIAQLPGEKKNGLFGNLIALSLGLTPNFKSNFDLAEDAKLQLSKDTYDDDLDNLLAQIGDQYADLFLAAKNLSDAILLSDILRVNTEITKAPLSASMIKRYDEHHQDLTLLKALVRQQLPEKYKEIFFDQSKNGYAGYIDGGASQEEFYKFIKPILEKMDGTEELLVKLNREDLLRKQRTFDNGSIPHQIHLGELHAILRRQEDFYPFLKDNREKIEKILTFRIPYYVGPLARGNSRFAWMTRKSEETITPWNFEEVVDKGASAQSFIERMTNFDKNLPNEKVLPKHSLLYEYFTVYNELTKVKYVTEGMRKPAFLSGEQKKAIVDLLFKTNRKVTVKQLKEDYFKKIECFDSVEISGVEDRFNASLGTYHDLLKIIKDKDFLDNEENEDILEDIVLTLTLFEDREMIEERLKTYAHLFDDKVMKQLKRRRYTGWGRLSRKLINGIRDKQSGKTILDFLKSDGFANRNFMQLIHDDSLTFKEDIQKAQVSGQGDSLHEHIANLAGSPAIKKGILQTVKVVDELVKVMGRHKPENIVIEMARENQTTQKGQKNSRERMKRIEEGIKELGSQILKEHPVENTQLQNEKLYLYYLQNGRDMYVDQELDINRLSDYDVDHIVPQSFLKDDSIDNKVLTRSDKARGKSDNVPSEEVVKKMKNYWRQLLNAKLITQRKFDNLTKAERGGLSELDKAGFIKRQLVETRQITKHVAQILDSRMNTKYDENDKLIREVKVITLKSKLVSDFRKDFQFYKVREINNYHHAHDAYLNAVVGTALIKKYPKLESEFVYGDYKVYDVRKMIAKSEQEIGKATAKYFFYSNIMNFFKTEITLANGEIRKRPLIETNGETGEIVWDKGRDFATVRKVLSMPQVNIVKKTEVQTGGFSKESILPKRNSDKLIARKKDWDPKKYGGFDSPTVAYSVLVVAKVEKGKSKKLKSVKELLGITIMERSSFEKNPIDFLEAKGYKEVKKDLIIKLPKYSLFELENGRKRMLASAGELQKGNELALPSKYVNFLYLASHYEKLKGSPEDNEQKQLFVEQHKHYLDEIIEQISEFSKRVILADANLDKVLSAYNKHRDKPIREQAENIIHLFTLTNLGAPAAFKYFDTTIDRKRYTSTKEVLDATLIHQSITGLYETRIDLSQLGGDGSSGGGEAAAKMASNFTQFVLVDNGGTGDVTVAPSNFANGIAEWISSNSRSQAYKVTCSVRQSSAQNRKYTIKVEVPKGAWRSYLNMELTIPIFATNSDCELIVKAMQGLLKDGNPIPSAIAANSGIYGSSGGGEAAAKTAPLEEEYRLFLEAPIQNVTLLEQWKREIPKVWAEINPPGLASTQAPIHVQLLSTALPVRVRQYPITLEAKRSLRETIRKFRAAGILRPVHSPWNTPLLPVRKSGTSEYRMVQDLREVNKRVETIHPTVPNPYTLLSLLPPDRIWYSVLDLKDAFFCIPLAPESQLIFAFEWADAEEGESGQLTWTRLPQGFKNSPTLFNEALNRDLQGFRLDHPSVSLLQYVDDLLIAADTQAACLSATRDLLMTLAELGYRVSGKKAQLCQEEVTYLGFKIHKGSRSLSNSRTQAILQIPVPKTKRQVREFLGKIGYCRLFIPGFAELAQPLYAATRPGNDPLVWGEKEEEAFQSLKLALTQPPALALPSLDKPFQLFVEETSGAAKGVLTQALGPWKRPVAYLSKRLDPVAAGWPRCLRAIAAAALLTREASKLTFGQDIEITSSHNLESLLRSPPDKWLTNARITQYQVLLLDPPRVRFKQTAALNPATLLPETDDTLPIHHCLDTLDSLTSTRPDLTDQPLAQAEATLFTDGSSYIRDGKRYAGAAVVTLDSVIWAEPLPIGTSAQKAELIALTKALEWSKDKSVNIYTDSRYAFATLHVHGMIYRERGWLTAGGKAIKNAPEILALLTAVWLPKRVAVMHCKGHQKDDAPTSTGNRRADEVAREVAIRPLSTQATISKRTADGSEFESPKKKAKVE

SEQ ID NO: 16041 - protein, 2368 aa, synthetic construct
MPAAKRVKLDGGDKKYSIGLDIGTNSVGWAVITDEYKVPSKKFKVLGNTDRHSIKKNLIGALLFDSGETAEATRLKRTARRRYTRRKNRICYLQEIFSNEMAKVDDSFFHRLEESFLVEEDKKHERHPIFGNIVDEVAYHEKYPTIYHLRKKLVDSTDKADLRLIYLALAHMIKFRGHFLIEGDLNPDNSDVDKLFIQLVQTYNQLFEENPINASGVDAKAILSARLSKSRRLENLIAQLPGEKKNGLFGNLIALSLGLTPNFKSNFDLAEDAKLQLSKDTYDDDLDNLLAQIGDQYADLFLAAKNLSDAILLSDILRVNTEITKAPLSASMIKRYDEHHQDLTLLKALVRQQLPEKYKEIFFDQSKNGYAGYIDGGASQEEFYKFIKPILEKMDGTEELLVKLNREDLLRKQRTFDNGSIPHQIHLGELHAILRRQEDFYPFLKDNREKIEKILTFRIPYYVGPLARGNSRFAWMTRKSEETITPWNFEEVVDKGASAQSFIERMTNFDKNLPNEKVLPKHSLLYEYFTVYNELTKVKYVTEGMRKPAFLSGEQKKAIVDLLFKTNRKVTVKQLKEDYFKKIECFDSVEISGVEDRFNASLGTYHDLLKIIKDKDFLDNEENEDILEDIVLTLTLFEDREMIEERLKTYAHLFDDKVMKQLKRRRYTGWGRLSRKLINGIRDKQSGKTILDFLKSDGFANRNFMQLIHDDSLTFKEDIQKAQVSGQGDSLHEHIANLAGSPAIKKGILQTVKVVDELVKVMGRHKPENIVIEMARENQTTQKGQKNSRERMKRIEEGIKELGSQILKEHPVENTQLQNEKLYLYYLQNGRDMYVDQELDINRLSDYDVDHIVPQSFLKDDSIDNKVLTRSDKARGKSDNVPSEEVVKKMKNYWRQLLNAKLITQRKFDNLTKAERGGLSELDKAGFIKRQLVETRQITKHVAQILDSRMNTKYDENDKLIREVKVITLKSKLVSDFRKDFQFYKVREINNYHHAHDAYLNAVVGTALIKKYPKLESEFVYGDYKVYDVRKMIAKSEQEIGKATAKYFFYSNIMNFFKTEITLANGEIRKRPLIETNGETGEIVWDKGRDFATVRKVLSMPQVNIVKKTEVQTGGFSKESILPKRNSDKLIARKKDWDPKKYGGFDSPTVAYSVLVVAKVEKGKSKKLKSVKELLGITIMERSSFEKNPIDFLEAKGYKEVKKDLIIKLPKYSLFELENGRKRMLASAGELQKGNELALPSKYVNFLYLASHYEKLKGSPEDNEQKQLFVEQHKHYLDEIIEQISEFSKRVILADANLDKVLSAYNKHRDKPIREQAENIIHLFTLTNLGAPAAFKYFDTTIDRKRYTSTKEVLDATLIHQSITGLYETRIDLSQLGGDGSSGGGEAAAKMASNFTQFVLVDNGGTGDVTVAPSNFANGIAEWISSNSRSQAYKVTCSVRQSSAQNRKYTIKVEVPKGAWRSYLNMELTIPIFATNSDCELIVKAMQGLLKDGNPIPSAIAANSGIYGGSGGSMASNFTQFVLVDNGGTGDVTVAPSNFANGIAEWISSNSRSQAYKVTCSVRQSSAQNRKYTIKVEVPKGAWRSYLNMELTIPIFATNSDCELIVKAMQGLLKDGNPIPSAIAANSGIYAEAAAKEAAAKEAAAKEAAAKALEAEAAAKEAAAKEAAAKEAAAKATAPLEEEYRLFLEAPIQNVTLLEQWKREIPKVWAEINPPGLASTQAPIHVQLLSTALPVRVRQYPITLEAKRSLRETIRKFRAAGILRPVHSPWNTPLLPVRKSGTSEYRMVQDLREVNKRVETIHPTVPNPYTLLSLLPPDRIWYSVLDLKDAFFCIPLAPESQLIFAFEWADAEEGESGQLTWTRLPQGFKNSPTLFNEALNRDLQGFRLDHPSVSLLQYVDDLLIAADTQAACLSATRDLLMTLAELGYRVSGKKAQLCQEEVTYLGFKIHKGSRSLSNSRTQAILQIPVPKTKRQVREFLGKIGYCRLFIPGFAELAQPLYAATRPGNDPLVWGEKEEEAFQSLKLALTQPPALALPSLDKPFQLFVEETSGAAKGVLTQALGPWKRPVAYLSKRLDPVAAGWPRCLRAIAAAALLTREASKLTFGQDIEITSSHNLESLLRSPPDKWLTNARITQYQVLLLDPPRVRFKQTAALNPATLLPETDDTLPIHHCLDTLDSLTSTRPDLTDQPLAQAEATLFTDGSSYIRDGKRYAGAAVVTLDSVIWAEPLPIGTSAQKAELIALTKALEWSKDKSVNIYTDSRYAFATLHVHGMIYRERGWLTAGGKAIKNAPEILALLTAVWLPKRVAVMHCKGHQKDDAPTSTGNRRADEVAREVAIRPLSTQATISKRTADGSEFESPKKKAKVE

SEQ ID NO: 16042 - protein, 2355 aa, synthetic construct
MPAAKRVKLDGGDKKYSIGLDIGTNSVGWAVITDEYKVPSKKFKVLGNTDRHSIKKNLIGALLFDSGETAEATRLKRTARRRYTRRKNRICYLQEIFSNEMAKVDDSFFHRLEESFLVEEDKKHERHPIFGNIVDEVAYHEKYPTIYHLRKKLVDSTDKADLRLIYLALAHMIKFRGHFLIEGDLNPDNSDVDKLFIQLVQTYNQLFEENPINASGVDAKAILSARLSKSRRLENLIAQLPGEKKNGLFGNLIALSLGLTPNFKSNFDLAEDAKLQLSKDTYDDDLDNLLAQIGDQYADLFLAAKNLSDAILLSDILRVNTEITKAPLSASMIKRYDEHHQDLTLLKALVRQQLPEKYKEIFFDQSKNGYAGYIDGGASQEEFYKFIKPILEKMDGTEELLVKLNREDLLRKQRTFDNGSIPHQIHLGELHAILRRQEDFYPFLKDNREKIEKILTFRIPYYVGPLARGNSRFAWMTRKSEETITPWNFEEVVDKGASAQSFIERMTNFDKNLPNEKVLPKHSLLYEYFTVYNELTKVKYVTEGMRKPAFLSGEQKKAIVDLLFKTNRKVTVKQLKEDYFKKIECFDSVEISGVEDRFNASLGTYHDLLKIIKDKDFLDNEENEDILEDIVLTLTLFEDREMIEERLKTYAHLFDDKVMKQLKRRRYTGWGRLSRKLINGIRDKQSGKTILDFLKSDGFANRNFMQLIHDDSLTFKEDIQKAQVSGQGDSLHEHIANLAGSPAIKKGILQTVKVVDELVKVMGRHKPENIVIEMARENQTTQKGQKNSRERMKRIEEGIKELGSQILKEHPVENTQLQNEKLYLYYLQNGRDMYVDQELDINRLSDYDVDHIVPQSFLKDDSIDNKVLTRSDKARGKSDNVPSEEVVKKMKNYWRQLLNAKLITQRKFDNLTKAERGGLSELDKAGFIKRQLVETRQITKHVAQILDSRMNTKYDENDKLIREVKVITLKSKLVSDFRKDFQFYKVREINNYHHAHDAYLNAVVGTALIKKYPKLESEFVYGDYKVYDVRKMIAKSEQEIGKATAKYFFYSNIMNFFKTEITLANGEIRKRPLIETNGETGEIVWDKGRDFATVRKVLSMPQVNIVKKTEVQTGGFSKESILPKRNSDKLIARKKDWDPKKYGGFDSPTVAYSVLVVAKVEKGKSKKLKSVKELLGITIMERSSFEKNPIDFLEAKGYKEVKKDLIIKLPKYSLFELENGRKRMLASAGELQKGNELALPSKYVNFLYLASHYEKLKGSPEDNEQKQLFVEQHKHYLDEIIEQISEFSKRVILADANLDKVLSAYNKHRDKPIREQAENIIHLFTLTNLGAPAAFKYFDTTIDRKRYTSTKEVLDATLIHQSITGLYETRIDLSQLGGDGSSGGGEAAAKMASNFTQFVLVDNGGTGDVTVAPSNFANGIAEWISSNSRSQAYKVTCSVRQSSAQNRKYTIKVEVPKGAWRSYLNMELTIPIFATNSDCELIVKAMQGLLKDGNPIPSAIAANSGIYGGSGGSMASNFTQFVLVDNGGTGDVTVAPSNFANGIAEWISSNSRSQAYKVTCSVRQSSAQNRKYTIKVEVPKGAWRSYLNMELTIPIFATNSDCELIVKAMQGLLKDGNPIPSAIAANSGIYSGGSSGGSSGSETPGTSESATPESSGGSSGGSSTAPLEEEYRLFLEAPIQNVTLLEQWKREIPKVWAEINPPGLASTQAPIHVQLLSTALPVRVRQYPITLEAKRSLRETIRKFRAAGILRPVHSPWNTPLLPVRKSGTSEYRMVQDLREVNKRVETIHPTVPNPYTLLSLLPPDRIWYSVLDLKDAFFCIPLAPESQLIFAFEWADAEEGESGQLTWTRLPQGFKNSPTLFNEALNRDLQGFRLDHPSVSLLQYVDDLLIAADTQAACLSATRDLLMTLAELGYRVSGKKAQLCQEEVTYLGFKIHKGSRSLSNSRTQAILQIPVPKTKRQVREFLGKIGYCRLFIPGFAELAQPLYAATRPGNDPLVWGEKEEEAFQSLKLALTQPPALALPSLDKPFQLFVEETSGAAKGVLTQALGPWKRPVAYLSKRLDPVAAGWPRCLRAIAAAALLTREASKLTFGQDIEITSSHNLESLLRSPPDKWLTNARITQYQVLLLDPPRVRFKQTAALNPATLLPETDDTLPIHHCLDTLDSLTSTRPDLTDQPLAQAEATLFTDGSSYIRDGKRYAGAAVVTLDSVIWAEPLPIGTSAQKAELIALTKALEWSKDKSVNIYTDSRYAFATLHVHGMIYRERGWLTAGGKAIKNAPEILALLTAVWLPKRVAVMHCKGHQKDDAPTSTGNRRADEVAREVAIRPLSTQATISKRTADGSEFESPKKKAKVE

SEQ ID NO: 16043 - protein, 2340 aa, synthetic construct
MPAAKRVKLDGGDKKYSIGLDIGTNSVGWAVITDEYKVPSKKFKVLGNTDRHSIKKNLIGALLFDSGETAEATRLKRTARRRYTRRKNRICYLQEIFSNEMAKVDDSFFHRLEESFLVEEDKKHERHPIFGNIVDEVAYHEKYPTIYHLRKKLVDSTDKADLRLIYLALAHMIKFRGHFLIEGDLNPDNSDVDKLFIQLVQTYNQLFEENPINASGVDAKAILSARLSKSRRLENLIAQLPGEKKNGLFGNLIALSLGLTPNFKSNFDLAEDAKLQLSKDTYDDDLDNLLAQIGDQYADLFLAAKNLSDAILLSDILRVNTEITKAPLSASMIKRYDEHHQDLTLLKALVRQQLPEKYKEIFFDQSKNGYAGYIDGGASQEEFYKFIKPILEKMDGTEELLVKLNREDLLRKQRTFDNGSIPHQIHLGELHAILRRQEDFYPFLKDNREKIEKILTFRIPYYVGPLARGNSRFAWMTRKSEETITPWNFEEVVDKGASAQSFIERMTNFDKNLPNEKVLPKHSLLYEYFTVYNELTKVKYVTEGMRKPAFLSGEQKKAIVDLLFKTNRKVTVKQLKEDYFKKIECFDSVEISGVEDRFNASLGTYHDLLKIIKDKDFLDNEENEDILEDIVLTLTLFEDREMIEERLKTYAHLFDDKVMKQLKRRRYTGWGRLSRKLINGIRDKQSGKTILDFLKSDGFANRNFMQLIHDDSLTFKEDIQKAQVSGQGDSLHEHIANLAGSPAIKKGILQTVKVVDELVKVMGRHKPENIVIEMARENQTTQKGQKNSRERMKRIEEGIKELGSQILKEHPVENTQLQNEKLYLYYLQNGRDMYVDQELDINRLSDYDVDHIVPQSFLKDDSIDNKVLTRSDKARGKSDNVPSEEVVKKMKNYWRQLLNAKLITQRKFDNLTKAERGGLSELDKAGFIKRQLVETRQITKHVAQILDSRMNTKYDENDKLIREVKVITLKSKLVSDFRKDFQFYKVREINNYHHAHDAYLNAVVGTALIKKYPKLESEFVYGDYKVYDVRKMIAKSEQEIGKATAKYFFYSNIMNFFKTEITLANGEIRKRPLIETNGETGEIVWDKGRDFATVRKVLSMPQVNIVKKTEVQTGGFSKESILPKRNSDKLIARKKDWDPKKYGGFDSPTVAYSVLVVAKVEKGKSKKLKSVKELLGITIMERSSFEKNPIDFLEAKGYKEVKKDLIIKLPKYSLFELENGRKRMLASAGELQKGNELALPSKYVNFLYLASHYEKLKGSPEDNEQKQLFVEQHKHYLDEIIEQISEFSKRVILADANLDKVLSAYNKHRDKPIREQAENIIHLFTLTNLGAPAAFKYFDTTIDRKRYTSTKEVLDATLIHQSITGLYETRIDLSQLGGDGSSGGGEAAAKMASNFTQFVLVDNGGTGDVTVAPSNFANGIAEWISSNSRSQAYKVTCSVRQSSAQNRKYTIKVEVPKGAWRSYLNMELTIPIFATNSDCELIVKAMQGLLKDGNPIPSAIAANSGIYGGSGGSMASNFTQFVLVDNGGTGDVTVAPSNFANGIAEWISSNSRSQAYKVTCSVRQSSAQNRKYTIKVEVPKGAWRSYLNMELTIPIFATNSDCELIVKAMQGLLKDGNPIPSAIAANSGIYGSSGSSGSSGSSGSSGSSTAPLEEEYRLFLEAPIQNVTLLEQWKREIPKVWAEINPPGLASTQAPIHVQLLSTALPVRVRQYPITLEAKRSLRETIRKFRAAGILRPVHSPWNTPLLPVRKSGTSEYRMVQDLREVNKRVETIHPTVPNPYTLLSLLPPDRIWYSVLDLKDAFFCIPLAPESQLIFAFEWADAEEGESGQLTWTRLPQGFKNSPTLFNEALNRDLQGFRLDHPSVSLLQYVDDLLIAADTQAACLSATRDLLMTLAELGYRVSGKKAQLCQEEVTYLGFKIHKGSRSLSNSRTQAILQIPVPKTKRQVREFLGKIGYCRLFIPGFAELAQPLYAATRPGNDPLVWGEKEEEAFQSLKLALTQPPALALPSLDKPFQLFVEETSGAAKGVLTQALGPWKRPVAYLSKRLDPVAAGWPRCLRAIAAAALLTREASKLTFGQDIEITSSHNLESLLRSPPDKWLTNARITQYQVLLLDPPRVRFKQTAALNPATLLPETDDTLPIHHCLDTLDSLTSTRPDLTDQPLAQAEATLFTDGSSYIRDGKRYAGAAVVTLDSVIWAEPLPIGTSAQKAELIALTKALEWSKDKSVNIYTDSRYAFATLHVHGMIYRERGWLTAGGKAIKNAPEILALLTAVWLPKRVAVMHCKGHQKDDAPTSTGNRRADEVAREVAIRPLSTQATISKRTADGSEFESPKKKAKVE

SEQ ID NO: 16044 - protein, 2333 aa, synthetic construct
MPAAKRVKLDGGDKKYSIGLDIGTNSVGWAVITDEYKVPSKKFKVLGNTDRHSIKKNLIGALLFDSGETAEATRLKRTARRRYTRRKNRICYLQEIFSNEMAKVDDSFFHRLEESFLVEEDKKHERHPIFGNIVDEVAYHEKYPTIYHLRKKLVDSTDKADLRLIYLALAHMIKFRGHFLIEGDLNPDNSDVDKLFIQLVQTYNQLFEENPINASGVDAKAILSARLSKSRRLENLIAQLPGEKKNGLFGNLIALSLGLTPNFKSNFDLAEDAKLQLSKDTYDDDLDNLLAQIGDQYADLFLAAKNLSDAILLSDILRVNTEITKAPLSASMIKRYDEHHQDLTLLKALVRQQLPEKYKEIFFDQSKNGYAGYIDGGASQEEFYKFIKPILEKMDGTEELLVKLNREDLLRKQRTFDNGSIPHQIHLGELHAILRRQEDFYPFLKDNREKIEKILTFRIPYYVGPLARGNSRFAWMTRKSEETITPWNFEEVVDKGASAQSFIERMTNFDKNLPNEKVLPKHSLLYEYFTVYNELTKVKYVTEGMRKPAFLSGEQKKAIVDLLFKTNRKVTVKQLKEDYFKKIECFDSVEISGVEDRFNASLGTYHDLLKIIKDKDFLDNEENEDILEDIVLTLTLFEDREMIEERLKTYAHLFDDKVMKQLKRRRYTGWGRLSRKLINGIRDKQSGKTILDFLKSDGFANRNFMQLIHDDSLTFKEDIQKAQVSGQGDSLHEHIANLAGSPAIKKGILQTVKVVDELVKVMGRHKPENIVIEMARENQTTQKGQKNSRERMKRIEEGIKELGSQILKEHPVENTQLQNEKLYLYYLQNGRDMYVDQELDINRLSDYDVDHIVPQSFLKDDSIDNKVLTRSDKARGKSDNVPSEEVVKKMKNYWRQLLNAKLITQRKFDNLTKAERGGLSELDKAGFIKRQLVETRQITKHVAQILDSRMNTKYDENDKLIREVKVITLKSKLVSDFRKDFQFYKVREINNYHHAHDAYLNAVVGTALIKKYPKLESEFVYGDYKVYDVRKMIAKSEQEIGKATAKYFFYSNIMNFFKTEITLANGEIRKRPLIETNGETGEIVWDKGRDFATVRKVLSMPQVNIVKKTEVQTGGFSKESILPKRNSDKLIARKKDWDPKKYGGFDSPTVAYSVLVVAKVEKGKSKKLKSVKELLGITIMERSSFEKNPIDFLEAKGYKEVKKDLIIKLPKYSLFELENGRKRMLASAGELQKGNELALPSKYVNFLYLASHYEKLKGSPEDNEQKQLFVEQHKHYLDEIIEQISEFSKRVILADANLDKVLSAYNKHRDKPIREQAENIIHLFTLTNLGAPAAFKYFDTTIDRKRYTSTKEVLDATLIHQSITGLYETRIDLSQLGGDGSSGGGEAAAKMASNFTQFVLVDNGGTGDVTVAPSNFANGIAEWISSNSRSQAYKVTCSVRQSSAQNRKYTIKVEVPKGAWRSYLNMELTIPIFATNSDCELIVKAMQGLLKDGNPIPSAIAANSGIYGGSGGSMASNFTQFVLVDNGGTGDVTVAPSNFANGIAEWISSNSRSQAYKVTCSVRQSSAQNRKYTIKVEVPKGAWRSYLNMELTIPIFATNSDCELIVKAMQGLLKDGNPIPSAIAANSGIYGSSGGGEAAAKTAPLEEEYRLFLEAPIQNVTLLEQWKREIPKVWAEINPPGLASTQAPIHVQLLSTALPVRVRQYPITLEAKRSLRETIRKFRAAGILRPVHSPWNTPLLPVRKSGTSEYRMVQDLREVNKRVETIHPTVPNPYTLLSLLPPDRIWYSVLDLKDAFFCIPLAPESQLIFAFEWADAEEGESGQLTWTRLPQGFKNSPTLFNEALNRDLQGFRLDHPSVSLLQYVDDLLIAADTQAACLSATRDLLMTLAELGYRVSGKKAQLCQEEVTYLGFKIHKGSRSLSNSRTQAILQIPVPKTKRQVREFLGKIGYCRLFIPGFAELAQPLYAATRPGNDPLVWGEKEEEAFQSLKLALTQPPALALPSLDKPFQLFVEETSGAAKGVLTQALGPWKRPVAYLSKRLDPVAAGWPRCLRAIAAAALLTREASKLTFGQDIEITSSHNLESLLRSPPDKWLTNARITQYQVLLLDPPRVRFKQTAALNPATLLPETDDTLPIHHCLDTLDSLTSTRPDLTDQPLAQAEATLFTDGSSYIRDGKRYAGAAVVTLDSVIWAEPLPIGTSAQKAELIALTKALEWSKDKSVNIYTDSRYAFATLHVHGMIYRERGWLTAGGKAIKNAPEILALLTAVWLPKRVAVMHCKGHQKDDAPTSTGNRRADEVAREVAIRPLSTQATISKRTADGSEFESPKKKAKVE

SEQ ID NO: 16045 - protein, 2624 aa, synthetic construct
MPAAKRVKLDGGDKKYSIGLDIGTNSVGWAVITDEYKVPSKKFKVLGNTDRHSIKKNLIGALLFDSGETAEATRLKRTARRRYTRRKNRICYLQEIFSNEMAKVDDSFFHRLEESFLVEEDKKHERHPIFGNIVDEVAYHEKYPTIYHLRKKLVDSTDKADLRLIYLALAHMIKFRGHFLIEGDLNPDNSDVDKLFIQLVQTYNQLFEENPINASGVDAKAILSARLSKSRRLENLIAQLPGEKKNGLFGNLIALSLGLTPNFKSNFDLAEDAKLQLSKDTYDDDLDNLLAQIGDQYADLFLAAKNLSDAILLSDILRVNTEITKAPLSASMIKRYDEHHQDLTLLKALVRQQLPEKYKEIFFDQSKNGYAGYIDGGASQEEFYKFIKPILEKMDGTEELLVKLNREDLLRKQRTFDNGSIPHQIHLGELHAILRRQEDFYPFLKDNREKIEKILTFRIPYYVGPLARGNSRFAWMTRKSEETITPWNFEEVVDKGASAQSFIERMTNFDKNLPNEKVLPKHSLLYEYFTVYNELTKVKYVTEGMRKPAFLSGEQKKAIVDLLFKTNRKVTVKQLKEDYFKKIECFDSVEISGVEDRFNASLGTYHDLLKIIKDKDFLDNEENEDILEDIVLTLTLFEDREMIEERLKTYAHLFDDKVMKQLKRRRYTGWGRLSRKLINGIRDKQSGKTILDFLKSDGFANRNFMQLIHDDSLTFKEDIQKAQVSGQGDSLHEHIANLAGSPAIKKGILQTVKVVDELVKVMGRHKPENIVIEMARENQTTQKGQKNSRERMKRIEEGIKELGSQILKEHPVENTQLQNEKLYLYYLQNGRDMYVDQELDINRLSDYDVDHIVPQSFLKDDSIDNKVLTRSDKARGKSDNVPSEEVVKKMKNYWRQLLNAKLITQRKFDNLTKAERGGLSELDKAGFIKRQLVETRQITKHVAQILDSRMNTKYDENDKLIREVKVITLKSKLVSDFRKDFQFYKVREINNYHHAHDAYLNAVVGTALIKKYPKLESEFVYGDYKVYDVRKMIAKSEQEIGKATAKYFFYSNIMNFFKTEITLANGEIRKRPLIETNGETGEIVWDKGRDFATVRKVLSMPQVNIVKKTEVQTGGFSKESILPKRNSDKLIARKKDWDPKKYGGFDSPTVAYSVLVVAKVEKGKSKKLKSVKELLGITIMERSSFEKNPIDFLEAKGYKEVKKDLIIKLPKYSLFELENGRKRMLASAGELQKGNELALPSKYVNFLYLASHYEKLKGSPEDNEQKQLFVEQHKHYLDEIIEQISEFSKRVILADANLDKVLSAYNKHRDKPIREQAENIIHLFTLTNLGAPAAFKYFDTTIDRKRYTSTKEVLDATLIHQSITGLYETRIDLSQLGGDGSSGGGEAAAKMASNFTQFVLVDNGGTGDVTVAPSNFANGIAEWISSNSRSQAYKVTCSVRQSSAQNRKYTIKVEVPKGAWRSYLNMELTIPIFATNSDCELIVKAMQGLLKDGNPIPSAIAANSGIYGGSGGSMASNFTQFVLVDNGGTGDVTVAPSNFANGIAEWISSNSRSQAYKVTCSVRQSSAQNRKYTIKVEVPKGAWRSYLNMELTIPIFATNSDCELIVKAMQGLLKDGNPIPSAIAANSGIYGGGSGGGSGGGSGGGSMASNFTQFVLVDNGGTGDVTVAPSNFANGIAEWISSNSRSQAYKVTCSVRQSSAQNRKYTIKVEVPKGAWRSYLNMELTIPIFATNSDCELIVKAMQGLLKDGNPIPSAIAANSGIYGGSGGSMASNFTQFVLVDNGGTGDVTVAPSNFANGIAEWISSNSRSQAYKVTCSVRQSSAQNRKYTIKVEVPKGAWRSYLNMELTIPIFATNSDCELIVKAMQGLLKDGNPIPSAIAANSGIYAEAAAKEAAAKEAAAKEAAAKALEAEAAAKEAAAKEAAAKEAAAKATAPLEEEYRLFLEAPIQNVTLLEQWKREIPKVWAEINPPGLASTQAPIHVQLLSTALPVRVRQYPITLEAKRSLRETIRKFRAAGILRPVHSPWNTPLLPVRKSGTSEYRMVQDLREVNKRVETIHPTVPNPYTLLSLLPPDRIWYSVLDLKDAFFCIPLAPESQLIFAFEWADAEEGESGQLTWTRLPQGFKNSPTLFNEALNRDLQGFRLDHPSVSLLQYVDDLLIAADTQAACLSATRDLLMTLAELGYRVSGKKAQLCQEEVTYLGFKIHKGSRSLSNSRTQAILQIPVPKTKRQVREFLGKIGYCRLFIPGFAELAQPLYAATRPGNDPLVWGEKEEEAFQSLKLALTQPPALALPSLDKPFQLFVEETSGAAKGVLTQALGPWKRPVAYLSKRLDPVAAGWPRCLRAIAAAALLTREASKLTFGQDIEITSSHNLESLLRSPPDKWLTNARITQYQVLLLDPPRVRFKQTAALNPATLLPETDDTLPIHHCLDTLDSLTSTRPDLTDQPLAQAEATLFTDGSSYIRDGKRYAGAAVVTLDSVIWAEPLPIGTSAQKAELIALTKALEWSKDKSVNIYTDSRYAFATLHVHGMIYRERGWLTAGGKAIKNAPEILALLTAVWLPKRVAVMHCKGHQKDDAPTSTGNRRADEVAREVAIRPLSTQATISKRTADGSEFESPKKKAKVE

SEQ ID NO: 16046 - protein, 2611 aa, synthetic construct
MPAAKRVKLDGGDKKYSIGLDIGTNSVGWAVITDEYKVPSKKFKVLGNTDRHSIKKNLIGALLFDSGETAEATRLKRTARRRYTRRKNRICYLQEIFSNEMAKVDDSFFHRLEESFLVEEDKKHERHPIFGNIVDEVAYHEKYPTIYHLRKKLVDSTDKADLRLIYLALAHMIKFRGHFLIEGDLNPDNSDVDKLFIQLVQTYNQLFEENPINASGVDAKAILSARLSKSRRLENLIAQLPGEKKNGLFGNLIALSLGLTPNFKSNFDLAEDAKLQLSKDTYDDDLDNLLAQIGDQYADLFLAAKNLSDAILLSDILRVNTEITKAPLSASMIKRYDEHHQDLTLLKALVRQQLPEKYKEIFFDQSKNGYAGYIDGGASQEEFYKFIKPILEKMDGTEELLVKLNREDLLRKQRTFDNGSIPHQIHLGELHAILRRQEDFYPFLKDNREKIEKILTFRIPYYVGPLARGNSRFAWMTRKSEETITPWNFEEVVDKGASAQSFIERMTNFDKNLPNEKVLPKHSLLYEYFTVYNELTKVKYVTEGMRKPAFLSGEQKKAIVDLLFKTNRKVTVKQLKEDYFKKIECFDSVEISGVEDRFNASLGTYHDLLKIIKDKDFLDNEENEDILEDIVLTLTLFEDREMIEERLKTYAHLFDDKVMKQLKRRRYTGWGRLSRKLINGIRDKQSGKTILDFLKSDGFANRNFMQLIHDDSLTFKEDIQKAQVSGQGDSLHEHIANLAGSPAIKKGILQTVKVVDELVKVMGRHKPENIVIEMARENQTTQKGQKNSRERMKRIEEGIKELGSQILKEHPVENTQLQNEKLYLYYLQNGRDMYVDQELDINRLSDYDVDHIVPQSFLKDDSIDNKVLTRSDKARGKSDNVPSEEVVKKMKNYWRQLLNAKLITQRKFDNLTKAERGGLSELDKAGFIKRQLVETRQITKHVAQILDSRMNTKYDENDKLIREVKVITLKSKLVSDFRKDFQFYKVREINNYHHAHDAYLNAVVGTALIKKYPKLESEFVYGDYKVYDVRKMIAKSEQEIGKATAKYFFYSNIMNFFKTEITLANGEIRKRPLIETNGETGEIVWDKGRDFATVRKVLSMPQVNIVKKTEVQTGGFSKESILPKRNSDKLIARKKDWDPKKYGGFDSPTVAYSVLVVAKVEKGKSKKLKSVKELLGITIMERSSFEKNPIDFLEAKGYKEVKKDLIIKLPKYSLFELENGRKRMLASAGELQKGNELALPSKYVNFLYLASHYEKLKGSPEDNEQKQLFVEQHKHYLDEIIEQISEFSKRVILADANLDKVLSAYNKHRDKPIREQAENIIHLFTLTNLGAPAAFKYFDTTIDRKRYTSTKEVLDATLIHQSITGLYETRIDLSQLGGDGSSGGGEAAAKMASNFTQFVLVDNGGTGDVTVAPSNFANGIAEWISSNSRSQAYKVTCSVRQSSAQNRKYTIKVEVPKGAWRSYLNMELTIPIFATNSDCELIVKAMQGLLKDGNPIPSAIAANSGIYGGSGGSMASNFTQFVLVDNGGTGDVTVAPSNFANGIAEWISSNSRSQAYKVTCSVRQSSAQNRKYTIKVEVPKGAWRSYLNMELTIPIFATNSDCELIVKAMQGLLKDGNPIPSAIAANSGIYGGGSGGGSGGGSGGGSMASNFTQFVLVDNGGTGDVTVAPSNFANGIAEWISSNSRSQAYKVTCSVRQSSAQNRKYTIKVEVPKGAWRSYLNMELTIPIFATNSDCELIVKAMQGLLKDGNPIPSAIAANSGIYGGSGGSMASNFTQFVLVDNGGTGDVTVAPSNFANGIAEWISSNSRSQAYKVTCSVRQSSAQNRKYTIKVEVPKGAWRSYLNMELTIPIFATNSDCELIVKAMQGLLKDGNPIPSAIAANSGIYSGGSSGGSSGSETPGTSESATPESSGGSSGGSSTAPLEEEYRLFLEAPIQNVTLLEQWKREIPKVWAEINPPGLASTQAPIHVQLLSTALPVRVRQYPITLEAKRSLRETIRKFRAAGILRPVHSPWNTPLLPVRKSGTSEYRMVQDLREVNKRVETIHPTVPNPYTLLSLLPPDRIWYSVLDLKDAFFCIPLAPESQLIFAFEWADAEEGESGQLTWTRLPQGFKNSPTLFNEALNRDLQGFRLDHPSVSLLQYVDDLLIAADTQAACLSATRDLLMTLAELGYRVSGKKAQLCQEEVTYLGFKIHKGSRSLSNSRTQAILQIPVPKTKRQVREFLGKIGYCRLFIPGFAELAQPLYAATRPGNDPLVWGEKEEEAFQSLKLALTQPPALALPSLDKPFQLFVEETSGAAKGVLTQALGPWKRPVAYLSKRLDPVAAGWPRCLRAIAAAALLTREASKLTFGQDIEITSSHNLESLLRSPPDKWLTNARITQYQVLLLDPPRVRFKQTAALNPATLLPETDDTLPIHHCLDTLDSLTSTRPDLTDQPLAQAEATLFTDGSSYIRDGKRYAGAAVVTLDSVIWAEPLPIGTSAQKAELIALTKALEWSKDKSVNIYTDSRYAFATLHVHGMIYRERGWLTAGGKAIKNAPEILALLTAVWLPKRVAVMHCKGHQKDDAPTSTGNRRADEVAREVAIRPLSTQATISKRTADGSEFESPKKKAKVE

SEQ ID NO: 16047 - protein, 2596 aa, synthetic construct
MPAAKRVKLDGGDKKYSIGLDIGTNSVGWAVITDEYKVPSKKFKVLGNTDRHSIKKNLIGALLFDSGETAEATRLKRTARRRYTRRKNRICYLQEIFSNEMAKVDDSFFHRLEESFLVEEDKKHERHPIFGNIVDEVAYHEKYPTIYHLRKKLVDSTDKADLRLIYLALAHMIKFRGHFLIEGDLNPDNSDVDKLFIQLVQTYNQLFEENPINASGVDAKAILSARLSKSRRLENLIAQLPGEKKNGLFGNLIALSLGLTPNFKSNFDLAEDAKLQLSKDTYDDDLDNLLAQIGDQYADLFLAAKNLSDAILLSDILRVNTEITKAPLSASMIKRYDEHHQDLTLLKALVRQQLPEKYKEIFFDQSKNGYAGYIDGGASQEEFYKFIKPILEKMDGTEELLVKLNREDLLRKQRTFDNGSIPHQIHLGELHAILRRQEDFYPFLKDNREKIEKILTFRIPYYVGPLARGNSRFAWMTRKSEETITPWNFEEVVDKGASAQSFIERMTNFDKNLPNEKVLPKHSLLYEYFTVYNELTKVKYVTEGMRKPAFLSGEQKKAIVDLLFKTNRKVTVKQLKEDYFKKIECFDSVEISGVEDRFNASLGTYHDLLKIIKDKDFLDNEENEDILEDIVLTLTLFEDREMIEERLKTYAHLFDDKVMKQLKRRRYTGWGRLSRKLINGIRDKQSGKTILDFLKSDGFANRNFMQLIHDDSLTFKEDIQKAQVSGQGDSLHEHIANLAGSPAIKKGILQTVKVVDELVKVMGRHKPENIVIEMARENQTTQKGQKNSRERMKRIEEGIKELGSQILKEHPVENTQLQNEKLYLYYLQNGRDMYVDQELDINRLSDYDVDHIVPQSFLKDDSIDNKVLTRSDKARGKSDNVPSEEVVKKMKNYWRQLLNAKLITQRKFDNLTKAERGGLSELDKAGFIKRQLVETRQITKHVAQILDSRMNTKYDENDKLIREVKVITLKSKLVSDFRKDFQFYKVREINNYHHAHDAYLNAVVGTALIKKYPKLESEFVYGDYKVYDVRKMIAKSEQEIGKATAKYFFYSNIMNFFKTEITLANGEIRKRPLIETNGETGEIVWDKGRDFATVRKVLSMPQVNIVKKTEVQTGGFSKESILPKRNSDKLIARKKDWDPKKYGGFDSPTVAYSVLVVAKVEKGKSKKLKSVKELLGITIMERSSFEKNPIDFLEAKGYKEVKKDLIIKLPKYSLFELENGRKRMLASAGELQKGNELALPSKYVNFLYLASHYEKLKGSPEDNEQKQLFVEQHKHYLDEIIEQISEFSKRVILADANLDKVLSAYNKHRDKPIREQAENIIHLFTLTNLGAPAAFKYFDTTIDRKRYTSTKEVLDATLIHQSITGLYETRIDLSQLGGDGSSGGGEAAAKMASNFTQFVLVDNGGTGDVTVAPSNFANGIAEWISSNSRSQAYKVTCSVRQSSAQNRKYTIKVEVPKGAWRSYLNMELTIPIFATNSDCELIVKAMQGLLKDGNPIPSAIAANSGIYGGSGGSMASNFTQFVLVDNGGTGDVTVAPSNFANGIAEWISSNSRSQAYKVTCSVRQSSAQNRKYTIKVEVPKGAWRSYLNMELTIPIFATNSDCELIVKAMQGLLKDGNPIPSAIAANSGIYGGGSGGGSGGGSGGGSMASNFTQFVLVDNGGTGDVTVAPSNFANGIAEWISSNSRSQAYKVTCSVRQSSAQNRKYTIKVEVPKGAWRSYLNMELTIPIFATNSDCELIVKAMQGLLKDGNPIPSAIAANSGIYGGSGGSMASNFTQFVLVDNGGTGDVTVAPSNFANGIAEWISSNSRSQAYKVTCSVRQSSAQNRKYTIKVEVPKGAWRSYLNMELTIPIFATNSDCELIVKAMQGLLKDGNPIPSAIAANSGIYGSSGSSGSSGSSGSSGSSTAPLEEEYRLFLEAPIQNVTLLEQWKREIPKVWAEINPPGLASTQAPIHVQLLSTALPVRVRQYPITLEAKRSLRETIRKFRAAGILRPVHSPWNTPLLPVRKSGTSEYRMVQDLREVNKRVETIHPTVPNPYTLLSLLPPDRIWYSVLDLKDAFFCIPLAPESQLIFAFEWADAEEGESGQLTWTRLPQGFKNSPTLFNEALNRDLQGFRLDHPSVSLLQYVDDLLIAADTQAACLSATRDLLMTLAELGYRVSGKKAQLCQEEVTYLGFKIHKGSRSLSNSRTQAILQIPVPKTKRQVREFLGKIGYCRLFIPGFAELAQPLYAATRPGNDPLVWGEKEEEAFQSLKLALTQPPALALPSLDKPFQLFVEETSGAAKGVLTQALGPWKRPVAYLSKRLDPVAAGWPRCLRAIAAAALLTREASKLTFGQDIEITSSHNLESLLRSPPDKWLTNARITQYQVLLLDPPRVRFKQTAALNPATLLPETDDTLPIHHCLDTLDSLTSTRPDLTDQPLAQAEATLFTDGSSYIRDGKRYAGAAVVTLDSVIWAEPLPIGTSAQKAELIALTKALEWSKDKSVNIYTDSRYAFATLHVHGMIYRERGWLTAGGKAIKNAPEILALLTAVWLPKRVAVMHCKGHQKDDAPTSTGNRRADEVAREVAIRPLSTQATISKRTADGSEFESPKKKAKVE

SEQ ID NO: 16048 - protein, 2589 aa, synthetic construct
MPAAKRVKLDGGDKKYSIGLDIGTNSVGWAVITDEYKVPSKKFKVLGNTDRHSIKKNLIGALLFDSGETAEATRLKRTARRRYTRRKNRICYLQEIFSNEMAKVDDSFFHRLEESFLVEEDKKHERHPIFGNIVDEVAYHEKYPTIYHLRKKLVDSTDKADLRLIYLALAHMIKFRGHFLIEGDLNPDNSDVDKLFIQLVQTYNQLFEENPINASGVDAKAILSARLSKSRRLENLIAQLPGEKKNGLFGNLIALSLGLTPNFKSNFDLAEDAKLQLSKDTYDDDLDNLLAQIGDQYADLFLAAKNLSDAILLSDILRVNTEITKAPLSASMIKRYDEHHQDLTLLKALVRQQLPEKYKEIFFDQSKNGYAGYIDGGASQEEFYKFIKPILEKMDGTEELLVKLNREDLLRKQRTFDNGSIPHQIHLGELHAILRRQEDFYPFLKDNREKIEKILTFRIPYYVGPLARGNSRFAWMTRKSEETITPWNFEEVVDKGASAQSFIERMTNFDKNLPNEKVLPKHSLLYEYFTVYNELTKVKYVTEGMRKPAFLSGEQKKAIVDLLFKTNRKVTVKQLKEDYFKKIECFDSVEISGVEDRFNASLGTYHDLLKIIKDKDFLDNEENEDILEDIVLTLTLFEDREMIEERLKTYAHLFDDKVMKQLKRRRYTGWGRLSRKLINGIRDKQSGKTILDFLKSDGFANRNFMQLIHDDSLTFKEDIQKAQVSGQGDSLHEHIANLAGSPAIKKGILQTVKVVDELVKVMGRHKPENIVIEMARENQTTQKGQKNSRERMKRIEEGIKELGSQILKEHPVENTQLQNEKLYLYYLQNGRDMYVDQELDINRLSDYDVDHIVPQSFLKDDSIDNKVLTRSDKARGKSDNVPSEEVVKKMKNYWRQLLNAKLITQRKFDNLTKAERGGLSELDKAGFIKRQLVETRQITKHVAQILDSRMNTKYDENDKLIREVKVITLKSKLVSDFRKDFQFYKVREINNYHHAHDAYLNAVVGTALIKKYPKLESEFVYGDYKVYDVRKMIAKSEQEIGKATAKYFFYSNIMNFFKTEITLANGEIRKRPLIETNGETGEIVWDKGRDFATVRKVLSMPQVNIVKKTEVQTGGFSKESILPKRNSDKLIARKKDWDPKKYGGFDSPTVAYSVLVVAKVEKGKSKKLKSVKELLGITIMERSSFEKNPIDFLEAKGYKEVKKDLIIKLPKYSLFELENGRKRMLASAGELQKGNELALPSKYVNFLYLASHYEKLKGSPEDNEQKQLFVEQHKHYLDEIIEQISEFSKRVILADANLDKVLSAYNKHRDKPIREQAENIIHLFTLTNLGAPAAFKYFDTTIDRKRYTSTKEVLDATLIHQSITGLYETRIDLSQLGGDGSSGGGEAAAKMASNFTQFVLVDNGGTGDVTVAPSNFANGIAEWISSNSRSQAYKVTCSVRQSSAQNRKYTIKVEVPKGAWRSYLNMELTIPIFATNSDCELIVKAMQGLLKDGNPIPSAIAANSGIYGGSGGSMASNFTQFVLVDNGGTGDVTVAPSNFANGIAEWISSNSRSQAYKVTCSVRQSSAQNRKYTIKVEVPKGAWRSYLNMELTIPIFATNSDCELIVKAMQGLLKDGNPIPSAIAANSGIYGGGSGGGSGGGSGGGSMASNFTQFVLVDNGGTGDVTVAPSNFANGIAEWISSNSRSQAYKVTCSVRQSSAQNRKYTIKVEVPKGAWRSYLNMELTIPIFATNSDCELIVKAMQGLLKDGNPIPSAIAANSGIYGGSGGSMASNFTQFVLVDNGGTGDVTVAPSNFANGIAEWISSNSRSQAYKVTCSVRQSSAQNRKYTIKVEVPKGAWRSYLNMELTIPIFATNSDCELIVKAMQGLLKDGNPIPSAIAANSGIYGSSGGGEAAAKTAPLEEEYRLFLEAPIQNVTLLEQWKREIPKVWAEINPPGLASTQAPIHVQLLSTALPVRVRQYPITLEAKRSLRETIRKFRAAGILRPVHSPWNTPLLPVRKSGTSEYRMVQDLREVNKRVETIHPTVPNPYTLLSLLPPDRIWYSVLDLKDAFFCIPLAPESQLIFAFEWADAEEGESGQLTWTRLPQGFKNSPTLFNEALNRDLQGFRLDHPSVSLLQYVDDLLIAADTQAACLSATRDLLMTLAELGYRVSGKKAQLCQEEVTYLGFKIHKGSRSLSNSRTQAILQIPVPKTKRQVREFLGKIGYCRLFIPGFAELAQPLYAATRPGNDPLVWGEKEEEAFQSLKLALTQPPALALPSLDKPFQLFVEETSGAAKGVLTQALGPWKRPVAYLSKRLDPVAAGWPRCLRAIAAAALLTREASKLTFGQDIEITSSHNLESLLRSPPDKWLTNARITQYQVLLLDPPRVRFKQTAALNPATLLPETDDTLPIHHCLDTLDSLTSTRPDLTDQPLAQAEATLFTDGSSYIRDGKRYAGAAVVTLDSVIWAEPLPIGTSAQKAELIALTKALEWSKDKSVNIYTDSRYAFATLHVHGMIYRERGWLTAGGKAIKNAPEILALLTAVWLPKRVAVMHCKGHQKDDAPTSTGNRRADEVAREVAIRPLSTQATISKRTADGSEFESPKKKAKVE

SEQ ID NO: 16049 - protein, 2278 aa, synthetic construct
MPAAKRVKLDGGDKKYSIGLDIGTNSVGWAVITDEYKVPSKKFKVLGNTDRHSIKKNLIGALLFDSGETAEATRLKRTARRRYTRRKNRICYLQEIFSNEMAKVDDSFFHRLEESFLVEEDKKHERHPIFGNIVDEVAYHEKYPTIYHLRKKLVDSTDKADLRLIYLALAHMIKFRGHFLIEGDLNPDNSDVDKLFIQLVQTYNQLFEENPINASGVDAKAILSARLSKSRRLENLIAQLPGEKKNGLFGNLIALSLGLTPNFKSNFDLAEDAKLQLSKDTYDDDLDNLLAQIGDQYADLFLAAKNLSDAILLSDILRVNTEITKAPLSASMIKRYDEHHQDLTLLKALVRQQLPEKYKEIFFDQSKNGYAGYIDGGASQEEFYKFIKPILEKMDGTEELLVKLNREDLLRKQRTFDNGSIPHQIHLGELHAILRRQEDFYPFLKDNREKIEKILTFRIPYYVGPLARGNSRFAWMTRKSEETITPWNFEEVVDKGASAQSFIERMTNFDKNLPNEKVLPKHSLLYEYFTVYNELTKVKYVTEGMRKPAFLSGEQKKAIVDLLFKTNRKVTVKQLKEDYFKKIECFDSVEISGVEDRFNASLGTYHDLLKIIKDKDFLDNEENEDILEDIVLTLTLFEDREMIEERLKTYAHLFDDKVMKQLKRRRYTGWGRLSRKLINGIRDKQSGKTILDFLKSDGFANRNFMQLIHDDSLTFKEDIQKAQVSGQGDSLHEHIANLAGSPAIKKGILQTVKVVDELVKVMGRHKPENIVIEMARENQTTQKGQKNSRERMKRIEEGIKELGSQILKEHPVENTQLQNEKLYLYYLQNGRDMYVDQELDINRLSDYDVDHIVPQSFLKDDSIDNKVLTRSDKARGKSDNVPSEEVVKKMKNYWRQLLNAKLITQRKFDNLTKAERGGLSELDKAGFIKRQLVETRQITKHVAQILDSRMNTKYDENDKLIREVKVITLKSKLVSDFRKDFQFYKVREINNYHHAHDAYLNAVVGTALIKKYPKLESEFVYGDYKVYDVRKMIAKSEQEIGKATAKYFFYSNIMNFFKTEITLANGEIRKRPLIETNGETGEIVWDKGRDFATVRKVLSMPQVNIVKKTEVQTGGFSKESILPKRNSDKLIARKKDWDPKKYGGFDSPTVAYSVLVVAKVEKGKSKKLKSVKELLGITIMERSSFEKNPIDFLEAKGYKEVKKDLIIKLPKYSLFELENGRKRMLASAGELQKGNELALPSKYVNFLYLASHYEKLKGSPEDNEQKQLFVEQHKHYLDEIIEQISEFSKRVILADANLDKVLSAYNKHRDKPIREQAENIIHLFTLTNLGAPAAFKYFDTTIDRKRYTSTKEVLDATLIHQSITGLYETRIDLSQLGGDAEAAAKEAAAKEAAAKEAAAKALEAEAAAKEAAAKEAAAKEAAAKAMASNFTQFVLVDNGGTGDVTVAPSNFANGIAEWISSNSRSQAYKVTCSVRQSSAQNRKYTIKVEVPKGAWRSYLNMELTIPIFATNSDCELIVKAMQGLLKDGNPIPSAIAANSGIYAEAAAKEAAAKEAAAKEAAAKALEAEAAAKEAAAKEAAAKEAAAKATLNIEDEHRLHETSKEPDVSLGSTWLSDFPQAWAETGGMGLAVRQAPLIIPLKATSTPVSIKQYPMSQEARLGIKPHIQRLLDQGILVPCQSPWNTPLLPVKKPGTNDYRPVQDLREVNKRVEDIHPTVPNPYNLLSGLPPSHQWYTVLDLKDAFFCLRLHPTSQPLFAFEWRDPEMGISGQLTWTRLPQGFKNSPTLFNEALHRDLADFRIQHPDLILLQYVDDLLLAATSELDCQQGTRALLQTLGNLGYRASAKKAQICQKQVKYLGYLLKEGQRWLTEARKETVMGQPTPKTPRQLREFLGKAGFCRLFIPGFAEMAAPLYPLTKPGTLFNWGPDQQKAYQEIKQALLTAPALGLPDLTKPFELFVDEKQGYAKGVLTQKLGPWRRPVAYLSKKLDPVAAGWPPCLRMVAAIAVLTKDAGKLTMGQPLVILAPHAVEALVKQPPDRWLSNARMTHYQALLLDTDRVQFGPVVALNPATLLPLPEEGLQHNCLDILAEAHGTRPDLTDQPLPDADHTWYTDGSSLLQEGQRKAGAAVTTETEVIWAKALPAGTSAQRAELIALTQALKMAEGKKLNVYTDSRYAFATAHIHGEIYRRRGWLTSEGKEIKNKDEILALLKALFLPKRLSIIHCPGHQKGHSAEARGNRMADQAARKAAITETPDTSTLLKRTADGSEFESPKKKAKVE

SEQ ID NO: 16050 - protein, 2265 aa, synthetic construct
MPAAKRVKLDGGDKKYSIGLDIGTNSVGWAVITDEYKVPSKKFKVLGNTDRHSIKKNLIGALLFDSGETAEATRLKRTARRRYTRRKNRICYLQEIFSNEMAKVDDSFFHRLEESFLVEEDKKHERHPIFGNIVDEVAYHEKYPTIYHLRKKLVDSTDKADLRLIYLALAHMIKFRGHFLIEGDLNPDNSDVDKLFIQLVQTYNQLFEENPINASGVDAKAILSARLSKSRRLENLIAQLPGEKKNGLFGNLIALSLGLTPNFKSNFDLAEDAKLQLSKDTYDDDLDNLLAQIGDQYADLFLAAKNLSDAILLSDILRVNTEITKAPLSASMIKRYDEHHQDLTLLKALVRQQLPEKYKEIFFDQSKNGYAGYIDGGASQEEFYKFIKPILEKMDGTEELLVKLNREDLLRKQRTFDNGSIPHQIHLGELHAILRRQEDFYPFLKDNREKIEKILTFRIPYYVGPLARGNSRFAWMTRKSEETITPWNFEEVVDKGASAQSFIERMTNFDKNLPNEKVLPKHSLLYEYFTVYNELTKVKYVTEGMRKPAFLSGEQKKAIVDLLFKTNRKVTVKQLKEDYFKKIECFDSVEISGVEDRFNASLGTYHDLLKIIKDKDFLDNEENEDILEDIVLTLTLFEDREMIEERLKTYAHLFDDKVMKQLKRRRYTGWGRLSRKLINGIRDKQSGKTILDFLKSDGFANRNFMQLIHDDSLTFKEDIQKAQVSGQGDSLHEHIANLAGSPAIKKGILQTVKVVDELVKVMGRHKPENIVIEMARENQTTQKGQKNSRERMKRIEEGIKELGSQILKEHPVENTQLQNEKLYLYYLQNGRDMYVDQELDINRLSDYDVDHIVPQSFLKDDSIDNKVLTRSDKARGKSDNVPSEEVVKKMKNYWRQLLNAKLITQRKFDNLTKAERGGLSELDKAGFIKRQLVETRQITKHVAQILDSRMNTKYDENDKLIREVKVITLKSKLVSDFRKDFQFYKVREINNYHHAHDAYLNAVVGTALIKKYPKLESEFVYGDYKVYDVRKMIAKSEQEIGKATAKYFFYSNIMNFFKTEITLANGEIRKRPLIETNGETGEIVWDKGRDFATVRKVLSMPQVNIVKKTEVQTGGFSKESILPKRNSDKLIARKKDWDPKKYGGFDSPTVAYSVLVVAKVEKGKSKKLKSVKELLGITIMERSSFEKNPIDFLEAKGYKEVKKDLIIKLPKYSLFELENGRKRMLASAGELQKGNELALPSKYVNFLYLASHYEKLKGSPEDNEQKQLFVEQHKHYLDEIIEQISEFSKRVILADANLDKVLSAYNKHRDKPIREQAENIIHLFTLTNLGAPAAFKYFDTTIDRKRYTSTKEVLDATLIHQSITGLYETRIDLSQLGGDAEAAAKEAAAKEAAAKEAAAKALEAEAAAKEAAAKEAAAKEAAAKAMASNFTQFVLVDNGGTGDVTVAPSNFANGIAEWISSNSRSQAYKVTCSVRQSSAQNRKYTIKVEVPKGAWRSYLNMELTIPIFATNSDCELIVKAMQGLLKDGNPIPSAIAANSGIYSGGSSGGSSGSETPGTSESATPESSGGSSGGSSTLNIEDEHRLHETSKEPDVSLGSTWLSDFPQAWAETGGMGLAVRQAPLIIPLKATSTPVSIKQYPMSQEARLGIKPHIQRLLDQGILVPCQSPWNTPLLPVKKPGTNDYRPVQDLREVNKRVEDIHPTVPNPYNLLSGLPPSHQWYTVLDLKDAFFCLRLHPTSQPLFAFEWRDPEMGISGQLTWTRLPQGFKNSPTLFNEALHRDLADFRIQHPDLILLQYVDDLLLAATSELDCQQGTRALLQTLGNLGYRASAKKAQICQKQVKYLGYLLKEGQRWLTEARKETVMGQPTPKTPRQLREFLGKAGFCRLFIPGFAEMAAPLYPLTKPGTLFNWGPDQQKAYQEIKQALLTAPALGLPDLTKPFELFVDEKQGYAKGVLTQKLGPWRRPVAYLSKKLDPVAAGWPPCLRMVAAIAVLTKDAGKLTMGQPLVILAPHAVEALVKQPPDRWLSNARMTHYQALLLDTDRVQFGPVVALNPATLLPLPEEGLQHNCLDILAEAHGTRPDLTDQPLPDADHTWYTDGSSLLQEGQRKAGAAVTTETEVIWAKALPAGTSAQRAELIALTQALKMAEGKKLNVYTDSRYAFATAHIHGEIYRRRGWLTSEGKEIKNKDEILALLKALFLPKRLSIIHCPGHQKGHSAEARGNRMADQAARKAAITETPDTSTLLKRTADGSEFESPKKKAKVE

SEQ ID NO: 16051 - protein, 2250 aa, synthetic construct
MPAAKRVKLDGGDKKYSIGLDIGTNSVGWAVITDEYKVPSKKFKVLGNTDRHSIKKNLIGALLFDSGETAEATRLKRTARRRYTRRKNRICYLQEIFSNEMAKVDDSFFHRLEESFLVEEDKKHERHPIFGNIVDEVAYHEKYPTIYHLRKKLVDSTDKADLRLIYLALAHMIKFRGHFLIEGDLNPDNSDVDKLFIQLVQTYNQLFEENPINASGVDAKAILSARLSKSRRLENLIAQLPGEKKNGLFGNLIALSLGLTPNFKSNFDLAEDAKLQLSKDTYDDDLDNLLAQIGDQYADLFLAAKNLSDAILLSDILRVNTEITKAPLSASMIKRYDEHHQDLTLLKALVRQQLPEKYKEIFFDQSKNGYAGYIDGGASQEEFYKFIKPILEKMDGTEELLVKLNREDLLRKQRTFDNGSIPHQIHLGELHAILRRQEDFYPFLKDNREKIEKILTFRIPYYVGPLARGNSRFAWMTRKSEETITPWNFEEVVDKGASAQSFIERMTNFDKNLPNEKVLPKHSLLYEYFTVYNELTKVKYVTEGMRKPAFLSGEQKKAIVDLLFKTNRKVTVKQLKEDYFKKIECFDSVEISGVEDRFNASLGTYHDLLKIIKDKDFLDNEENEDILEDIVLTLTLFEDREMIEERLKTYAHLFDDKVMKQLKRRRYTGWGRLSRKLINGIRDKQSGKTILDFLKSDGFANRNFMQLIHDDSLTFKEDIQKAQVSGQGDSLHEHIANLAGSPAIKKGILQTVKVVDELVKVMGRHKPENIVIEMARENQTTQKGQKNSRERMKRIEEGIKELGSQILKEHPVENTQLQNEKLYLYYLQNGRDMYVDQELDINRLSDYDVDHIVPQSFLKDDSIDNKVLTRSDKARGKSDNVPSEEVVKKMKNYWRQLLNAKLITQRKFDNLTKAERGGLSELDKAGFIKRQLVETRQITKHVAQILDSRMNTKYDENDKLIREVKVITLKSKLVSDFRKDFQFYKVREINNYHHAHDAYLNAVVGTALIKKYPKLESEFVYGDYKVYDVRKMIAKSEQEIGKATAKYFFYSNIMNFFKTEITLANGEIRKRPLIETNGETGEIVWDKGRDFATVRKVLSMPQVNIVKKTEVQTGGFSKESILPKRNSDKLIARKKDWDPKKYGGFDSPTVAYSVLVVAKVEKGKSKKLKSVKELLGITIMERSSFEKNPIDFLEAKGYKEVKKDLIIKLPKYSLFELENGRKRMLASAGELQKGNELALPSKYVNFLYLASHYEKLKGSPEDNEQKQLFVEQHKHYLDEIIEQISEFSKRVILADANLDKVLSAYNKHRDKPIREQAENIIHLFTLTNLGAPAAFKYFDTTIDRKRYTSTKEVLDATLIHQSITGLYETRIDLSQLGGDAEAAAKEAAAKEAAAKEAAAKALEAEAAAKEAAAKEAAAKEAAAKAMASNFTQFVLVDNGGTGDVTVAPSNFANGIAEWISSNSRSQAYKVTCSVRQSSAQNRKYTIKVEVPKGAWRSYLNMELTIPIFATNSDCELIVKAMQGLLKDGNPIPSAIAANSGIYGSSGSSGSSGSSGSSGSSTLNIEDEHRLHETSKEPDVSLGSTWLSDFPQAWAETGGMGLAVRQAPLIIPLKATSTPVSIKQYPMSQEARLGIKPHIQRLLDQGILVPCQSPWNTPLLPVKKPGTNDYRPVQDLREVNKRVEDIHPTVPNPYNLLSGLPPSHQWYTVLDLKDAFFCLRLHPTSQPLFAFEWRDPEMGISGQLTWTRLPQGFKNSPTLFNEALHRDLADFRIQHPDLILLQYVDDLLLAATSELDCQQGTRALLQTLGNLGYRASAKKAQICQKQVKYLGYLLKEGQRWLTEARKETVMGQPTPKTPRQLREFLGKAGFCRLFIPGFAEMAAPLYPLTKPGTLFNWGPDQQKAYQEIKQALLTAPALGLPDLTKPFELFVDEKQGYAKGVLTQKLGPWRRPVAYLSKKLDPVAAGWPPCLRMVAAIAVLTKDAGKLTMGQPLVILAPHAVEALVKQPPDRWLSNARMTHYQALLLDTDRVQFGPVVALNPATLLPLPEEGLQHNCLDILAEAHGTRPDLTDQPLPDADHTWYTDGSSLLQEGQRKAGAAVTTETEVIWAKALPAGTSAQRAELIALTQALKMAEGKKLNVYTDSRYAFATAHIHGEIYRRRGWLTSEGKEIKNKDEILALLKALFLPKRLSIIHCPGHQKGHSAEARGNRMADQAARKAAITETPDTSTLLKRTADGSEFESPKKKAKVE

SEQ ID NO: 16052 - protein, 2243 aa, synthetic construct
MPAAKRVKLDGGDKKYSIGLDIGTNSVGWAVITDEYKVPSKKFKVLGNTDRHSIKKNLIGALLFDSGETAEATRLKRTARRRYTRRKNRICYLQEIFSNEMAKVDDSFFHRLEESFLVEEDKKHERHPIFGNIVDEVAYHEKYPTIYHLRKKLVDSTDKADLRLIYLALAHMIKFRGHFLIEGDLNPDNSDVDKLFIQLVQTYNQLFEENPINASGVDAKAILSARLSKSRRLENLIAQLPGEKKNGLFGNLIALSLGLTPNFKSNFDLAEDAKLQLSKDTYDDDLDNLLAQIGDQYADLFLAAKNLSDAILLSDILRVNTEITKAPLSASMIKRYDEHHQDLTLLKALVRQQLPEKYKEIFFDQSKNGYAGYIDGGASQEEFYKFIKPILEKMDGTEELLVKLNREDLLRKQRTFDNGSIPHQIHLGELHAILRRQEDFYPFLKDNREKIEKILTFRIPYYVGPLARGNSRFAWMTRKSEETITPWNFEEVVDKGASAQSFIERMTNFDKNLPNEKVLPKHSLLYEYFTVYNELTKVKYVTEGMRKPAFLSGEQKKAIVDLLFKTNRKVTVKQLKEDYFKKIECFDSVEISGVEDRFNASLGTYHDLLKIIKDKDFLDNEENEDILEDIVLTLTLFEDREMIEERLKTYAHLFDDKVMKQLKRRRYTGWGRLSRKLINGIRDKQSGKTILDFLKSDGFANRNFMQLIHDDSLTFKEDIQKAQVSGQGDSLHEHIANLAGSPAIKKGILQTVKVVDELVKVMGRHKPENIVIEMARENQTTQKGQKNSRERMKRIEEGIKELGSQILKEHPVENTQLQNEKLYLYYLQNGRDMYVDQELDINRLSDYDVDHIVPQSFLKDDSIDNKVLTRSDKARGKSDNVPSEEVVKKMKNYWRQLLNAKLITQRKFDNLTKAERGGLSELDKAGFIKRQLVETRQITKHVAQILDSRMNTKYDENDKLIREVKVITLKSKLVSDFRKDFQFYKVREINNYHHAHDAYLNAVVGTALIKKYPKLESEFVYGDYKVYDVRKMIAKSEQEIGKATAKYFFYSNIMNFFKTEITLANGEIRKRPLIETNGETGEIVWDKGRDFATVRKVLSMPQVNIVKKTEVQTGGFSKESILPKRNSDKLIARKKDWDPKKYGGFDSPTVAYSVLVVAKVEKGKSKKLKSVKELLGITIMERSSFEKNPIDFLEAKGYKEVKKDLIIKLPKYSLFELENGRKRMLASAGELQKGNELALPSKYVNFLYLASHYEKLKGSPEDNEQKQLFVEQHKHYLDEIIEQISEFSKRVILADANLDKVLSAYNKHRDKPIREQAENIIHLFTLTNLGAPAAFKYFDTTIDRKRYTSTKEVLDATLIHQSITGLYETRIDLSQLGGDAEAAAKEAAAKEAAAKEAAAKALEAEAAAKEAAAKEAAAKEAAAKAMASNFTQFVLVDNGGTGDVTVAPSNFANGIAEWISSNSRSQAYKVTCSVRQSSAQNRKYTIKVEVPKGAWRSYLNMELTIPIFATNSDCELIVKAMQGLLKDGNPIPSAIAANSGIYGSSGGGEAAAKTLNIEDEHRLHETSKEPDVSLGSTWLSDFPQAWAETGGMGLAVRQAPLIIPLKATSTPVSIKQYPMSQEARLGIKPHIQRLLDQGILVPCQSPWNTPLLPVKKPGTNDYRPVQDLREVNKRVEDIHPTVPNPYNLLSGLPPSHQWYTVLDLKDAFFCLRLHPTSQPLFAFEWRDPEMGISGQLTWTRLPQGFKNSPTLFNEALHRDLADFRIQHPDLILLQYVDDLLLAATSELDCQQGTRALLQTLGNLGYRASAKKAQICQKQVKYLGYLLKEGQRWLTEARKETVMGQPTPKTPRQLREFLGKAGFCRLFIPGFAEMAAPLYPLTKPGTLFNWGPDQQKAYQEIKQALLTAPALGLPDLTKPFELFVDEKQGYAKGVLTQKLGPWRRPVAYLSKKLDPVAAGWPPCLRMVAAIAVLTKDAGKLTMGQPLVILAPHAVEALVKQPPDRWLSNARMTHYQALLLDTDRVQFGPVVALNPATLLPLPEEGLQHNCLDILAEAHGTRPDLTDQPLPDADHTWYTDGSSLLQEGQRKAGAAVTTETEVIWAKALPAGTSAQRAELIALTQALKMAEGKKLNVYTDSRYAFATAHIHGEIYRRRGWLTSEGKEIKNKDEILALLKALFLPKRLSIIHCPGHQKGHSAEARGNRMADQAARKAAITETPDTSTLLKRTADGSEFESPKKKAKVE

SEQ ID NO: 16053 - protein, 2401 aa, synthetic construct
MPAAKRVKLDGGDKKYSIGLDIGTNSVGWAVITDEYKVPSKKFKVLGNTDRHSIKKNLIGALLFDSGETAEATRLKRTARRRYTRRKNRICYLQEIFSNEMAKVDDSFFHRLEESFLVEEDKKHERHPIFGNIVDEVAYHEKYPTIYHLRKKLVDSTDKADLRLIYLALAHMIKFRGHFLIEGDLNPDNSDVDKLFIQLVQTYNQLFEENPINASGVDAKAILSARLSKSRRLENLIAQLPGEKKNGLFGNLIALSLGLTPNFKSNFDLAEDAKLQLSKDTYDDDLDNLLAQIGDQYADLFLAAKNLSDAILLSDILRVNTEITKAPLSASMIKRYDEHHQDLTLLKALVRQQLPEKYKEIFFDQSKNGYAGYIDGGASQEEFYKFIKPILEKMDGTEELLVKLNREDLLRKQRTFDNGSIPHQIHLGELHAILRRQEDFYPFLKDNREKIEKILTFRIPYYVGPLARGNSRFAWMTRKSEETITPWNFEEVVDKGASAQSFIERMTNFDKNLPNEKVLPKHSLLYEYFTVYNELTKVKYVTEGMRKPAFLSGEQKKAIVDLLFKTNRKVTVKQLKEDYFKKIECFDSVEISGVEDRFNASLGTYHDLLKIIKDKDFLDNEENEDILEDIVLTLTLFEDREMIEERLKTYAHLFDDKVMKQLKRRRYTGWGRLSRKLINGIRDKQSGKTILDFLKSDGFANRNFMQLIHDDSLTFKEDIQKAQVSGQGDSLHEHIANLAGSPAIKKGILQTVKVVDELVKVMGRHKPENIVIEMARENQTTQKGQKNSRERMKRIEEGIKELGSQILKEHPVENTQLQNEKLYLYYLQNGRDMYVDQELDINRLSDYDVDHIVPQSFLKDDSIDNKVLTRSDKARGKSDNVPSEEVVKKMKNYWRQLLNAKLITQRKFDNLTKAERGGLSELDKAGFIKRQLVETRQITKHVAQILDSRMNTKYDENDKLIREVKVITLKSKLVSDFRKDFQFYKVREINNYHHAHDAYLNAVVGTALIKKYPKLESEFVYGDYKVYDVRKMIAKSEQEIGKATAKYFFYSNIMNFFKTEITLANGEIRKRPLIETNGETGEIVWDKGRDFATVRKVLSMPQVNIVKKTEVQTGGFSKESILPKRNSDKLIARKKDWDPKKYGGFDSPTVAYSVLVVAKVEKGKSKKLKSVKELLGITIMERSSFEKNPIDFLEAKGYKEVKKDLIIKLPKYSLFELENGRKRMLASAGELQKGNELALPSKYVNFLYLASHYEKLKGSPEDNEQKQLFVEQHKHYLDEIIEQISEFSKRVILADANLDKVLSAYNKHRDKPIREQAENIIHLFTLTNLGAPAAFKYFDTTIDRKRYTSTKEVLDATLIHQSITGLYETRIDLSQLGGDAEAAAKEAAAKEAAAKEAAAKALEAEAAAKEAAAKEAAAKEAAAKAMASNFTQFVLVDNGGTGDVTVAPSNFANGIAEWISSNSRSQAYKVTCSVRQSSAQNRKYTIKVEVPKGAWRSYLNMELTIPIFATNSDCELIVKAMQGLLKDGNPIPSAIAANSGIYGGSGGSMASNFTQFVLVDNGGTGDVTVAPSNFANGIAEWISSNSRSQAYKVTCSVRQSSAQNRKYTIKVEVPKGAWRSYLNMELTIPIFATNSDCELIVKAMQGLLKDGNPIPSAIAANSGIYAEAAAKEAAAKEAAAKEAAAKALEAEAAAKEAAAKEAAAKEAAAKATLNIEDEHRLHETSKEPDVSLGSTWLSDFPQAWAETGGMGLAVRQAPLIIPLKATSTPVSIKQYPMSQEARLGIKPHIQRLLDQGILVPCQSPWNTPLLPVKKPGTNDYRPVQDLREVNKRVEDIHPTVPNPYNLLSGLPPSHQWYTVLDLKDAFFCLRLHPTSQPLFAFEWRDPEMGISGQLTWTRLPQGFKNSPTLFNEALHRDLADFRIQHPDLILLQYVDDLLLAATSELDCQQGTRALLQTLGNLGYRASAKKAQICQKQVKYLGYLLKEGQRWLTEARKETVMGQPTPKTPRQLREFLGKAGFCRLFIPGFAEMAAPLYPLTKPGTLFNWGPDQQKAYQEIKQALLTAPALGLPDLTKPFELFVDEKQGYAKGVLTQKLGPWRRPVAYLSKKLDPVAAGWPPCLRMVAAIAVLTKDAGKLTMGQPLVILAPHAVEALVKQPPDRWLSNARMTHYQALLLDTDRVQFGPVVALNPATLLPLPEEGLQHNCLDILAEAHGTRPDLTDQPLPDADHTWYTDGSSLLQEGQRKAGAAVTTETEVIWAKALPAGTSAQRAELIALTQALKMAEGKKLNVYTDSRYAFATAHIHGEIYRRRGWLTSEGKEIKNKDEILALLKALFLPKRLSIIHCPGHQKGHSAEARGNRMADQAARKAAITETPDTSTLLKRTADGSEFESPKKKAKVE

SEQ ID NO: 16054 - protein, 2388 aa, synthetic construct
MPAAKRVKLDGGDKKYSIGLDIGTNSVGWAVITDEYKVPSKKFKVLGNTDRHSIKKNLIGALLFDSGETAEATRLKRTARRRYTRRKNRICYLQEIFSNEMAKVDDSFFHRLEESFLVEEDKKHERHPIFGNIVDEVAYHEKYPTIYHLRKKLVDSTDKADLRLIYLALAHMIKFRGHFLIEGDLNPDNSDVDKLFIQLVQTYNQLFEENPINASGVDAKAILSARLSKSRRLENLIAQLPGEKKNGLFGNLIALSLGLTPNFKSNFDLAEDAKLQLSKDTYDDDLDNLLAQIGDQYADLFLAAKNLSDAILLSDILRVNTEITKAPLSASMIKRYDEHHQDLTLLKALVRQQLPEKYKEIFFDQSKNGYAGYIDGGASQEEFYKFIKPILEKMDGTEELLVKLNREDLLRKQRTFDNGSIPHQIHLGELHAILRRQEDFYPFLKDNREKIEKILTFRIPYYVGPLARGNSRFAWMTRKSEETITPWNFEEVVDKGASAQSFIERMTNFDKNLPNEKVLPKHSLLYEYFTVYNELTKVKYVTEGMRKPAFLSGEQKKAIVDLLFKTNRKVTVKQLKEDYFKKIECFDSVEISGVEDRFNASLGTYHDLLKIIKDKDFLDNEENEDILEDIVLTLTLFEDREMIEERLKTYAHLFDDKVMKQLKRRRYTGWGRLSRKLINGIRDKQSGKTILDFLKSDGFANRNFMQLIHDDSLTFKEDIQKAQVSGQGDSLHEHIANLAGSPAIKKGILQTVKVVDELVKVMGRHKPENIVIEMARENQTTQKGQKNSRERMKRIEEGIKELGSQILKEHPVENTQLQNEKLYLYYLQNGRDMYVDQELDINRLSDYDVDHIVPQSFLKDDSIDNKVLTRSDKARGKSDNVPSEEVVKKMKNYWRQLLNAKLITQRKFDNLTKAERGGLSELDKAGFIKRQLVETRQITKHVAQILDSRMNTKYDENDKLIREVKVITLKSKLVSDFRKDFQFYKVREINNYHHAHDAYLNAVVGTALIKKYPKLESEFVYGDYKVYDVRKMIAKSEQEIGKATAKYFFYSNIMNFFKTEITLANGEIRKRPLIETNGETGEIVWDKGRDFATVRKVLSMPQVNIVKKTEVQTGGFSKESILPKRNSDKLIARKKDWDPKKYGGFDSPTVAYSVLVVAKVEKGKSKKLKSVKELLGITIMERSSFEKNPIDFLEAKGYKEVKKDLIIKLPKYSLFELENGRKRMLASAGELQKGNELALPSKYVNFLYLASHYEKLKGSPEDNEQKQLFVEQHKHYLDEIIEQISEFSKRVILADANLDKVLSAYNKHRDKPIREQAENIIHLFTLTNLGAPAAFKYFDTTIDRKRYTSTKEVLDATLIHQSITGLYETRIDLSQLGGDAEAAAKEAAAKEAAAKEAAAKALEAEAAAKEAAAKEAAAKEAAAKAMASNFTQFVLVDNGGTGDVTVAPSNFANGIAEWISSNSRSQAYKVTCSVRQSSAQNRKYTIKVEVPKGAWRSYLNMELTIPIFATNSDCELIVKAMQGLLKDGNPIPSAIAANSGIYGGSGGSMASNFTQFVLVDNGGTGDVTVAPSNFANGIAEWISSNSRSQAYKVTCSVRQSSAQNRKYTIKVEVPKGAWRSYLNMELTIPIFATNSDCELIVKAMQGLLKDGNPIPSAIAANSGIYSGGSSGGSSGSETPGTSESATPESSGGSSGGSSTLNIEDEHRLHETSKEPDVSLGSTWLSDFPQAWAETGGMGLAVRQAPLIIPLKATSTPVSIKQYPMSQEARLGIKPHIQRLLDQGILVPCQSPWNTPLLPVKKPGTNDYRPVQDLREVNKRVEDIHPTVPNPYNLLSGLPPSHQWYTVLDLKDAFFCLRLHPTSQPLFAFEWRDPEMGISGQLTWTRLPQGFKNSPTLFNEALHRDLADFRIQHPDLILLQYVDDLLLAATSELDCQQGTRALLQTLGNLGYRASAKKAQICQKQVKYLGYLLKEGQRWLTEARKETVMGQPTPKTPRQLREFLGKAGFCRLFIPGFAEMAAPLYPLTKPGTLFNWGPDQQKAYQEIKQALLTAPALGLPDLTKPFELFVDEKQGYAKGVLTQKLGPWRRPVAYLSKKLDPVAAGWPPCLRMVAAIAVLTKDAGKLTMGQPLVILAPHAVEALVKQPPDRWLSNARMTHYQALLLDTDRVQFGPVVALNPATLLPLPEEGLQHNCLDILAEAHGTRPDLTDQPLPDADHTWYTDGSSLLQEGQRKAGAAVTTETEVIWAKALPAGTSAQRAELIALTQALKMAEGKKLNVYTDSRYAFATAHIHGEIYRRRGWLTSEGKEIKNKDEILALLKALFLPKRLSIIHCPGHQKGHSAEARGNRMADQAARKAAITETPDTSTLLKRTADGSEFESPKKKAKVE

SEQ ID NO: 16055 - protein, 2373 aa, synthetic construct
MPAAKRVKLDGGDKKYSIGLDIGTNSVGWAVITDEYKVPSKKFKVLGNTDRHSIKKNLIGALLFDSGETAEATRLKRTARRRYTRRKNRICYLQEIFSNEMAKVDDSFFHRLEESFLVEEDKKHERHPIFGNIVDEVAYHEKYPTIYHLRKKLVDSTDKADLRLIYLALAHMIKFRGHFLIEGDLNPDNSDVDKLFIQLVQTYNQLFEENPINASGVDAKAILSARLSKSRRLENLIAQLPGEKKNGLFGNLIALSLGLTPNFKSNFDLAEDAKLQLSKDTYDDDLDNLLAQIGDQYADLFLAAKNLSDAILLSDILRVNTEITKAPLSASMIKRYDEHHQDLTLLKALVRQQLPEKYKEIFFDQSKNGYAGYIDGGASQEEFYKFIKPILEKMDGTEELLVKLNREDLLRKQRTFDNGSIPHQIHLGELHAILRRQEDFYPFLKDNREKIEKILTFRIPYYVGPLARGNSRFAWMTRKSEETITPWNFEEVVDKGASAQSFIERMTNFDKNLPNEKVLPKHSLLYEYFTVYNELTKVKYVTEGMRKPAFLSGEQKKAIVDLLFKTNRKVTVKQLKEDYFKKIECFDSVEISGVEDRFNASLGTYHDLLKIIKDKDFLDNEENEDILEDIVLTLTLFEDREMIEERLKTYAHLFDDKVMKQLKRRRYTGWGRLSRKLINGIRDKQSGKTILDFLKSDGFANRNFMQLIHDDSLTFKEDIQKAQVSGQGDSLHEHIANLAGSPAIKKGILQTVKVVDELVKVMGRHKPENIVIEMARENQTTQKGQKNSRERMKRIEEGIKELGSQILKEHPVENTQLQNEKLYLYYLQNGRDMYVDQELDINRLSDYDVDHIVPQSFLKDDSIDNKVLTRSDKARGKSDNVPSEEVVKKMKNYWRQLLNAKLITQRKFDNLTKAERGGLSELDKAGFIKRQLVETRQITKHVAQILDSRMNTKYDENDKLIREVKVITLKSKLVSDFRKDFQFYKVREINNYHHAHDAYLNAVVGTALIKKYPKLESEFVYGDYKVYDVRKMIAKSEQEIGKATAKYFFYSNIMNFFKTEITLANGEIRKRPLIETNGETGEIVWDKGRDFATVRKVLSMPQVNIVKKTEVQTGGFSKESILPKRNSDKLIARKKDWDPKKYGGFDSPTVAYSVLVVAKVEKGKSKKLKSVKELLGITIMERSSFEKNPIDFLEAKGYKEVKKDLIIKLPKYSLFELENGRKRMLASAGELQKGNELALPSKYVNFLYLASHYEKLKGSPEDNEQKQLFVEQHKHYLDEIIEQISEFSKRVILADANLDKVLSAYNKHRDKPIREQAENIIHLFTLTNLGAPAAFKYFDTTIDRKRYTSTKEVLDATLIHQSITGLYETRIDLSQLGGDAEAAAKEAAAKEAAAKEAAAKALEAEAAAKEAAAKEAAAKEAAAKAMASNFTQFVLVDNGGTGDVTVAPSNFANGIAEWISSNSRSQAYKVTCSVRQSSAQNRKYTIKVEVPKGAWRSYLNMELTIPIFATNSDCELIVKAMQGLLKDGNPIPSAIAANSGIYGGSGGSMASNFTQFVLVDNGGTGDVTVAPSNFANGIAEWISSNSRSQAYKVTCSVRQSSAQNRKYTIKVEVPKGAWRSYLNMELTIPIFATNSDCELIVKAMQGLLKDGNPIPSAIAANSGIYGSSGSSGSSGSSGSSGSSTLNIEDEHRLHETSKEPDVSLGSTWLSDFPQAWAETGGMGLAVRQAPLIIPLKATSTPVSIKQYPMSQEARLGIKPHIQRLLDQGILVPCQSPWNTPLLPVKKPGTNDYRPVQDLREVNKRVEDIHPTVPNPYNLLSGLPPSHQWYTVLDLKDAFFCLRLHPTSQPLFAFEWRDPEMGISGQLTWTRLPQGFKNSPTLFNEALHRDLADFRIQHPDLILLQYVDDLLLAATSELDCQQGTRALLQTLGNLGYRASAKKAQICQKQVKYLGYLLKEGQRWLTEARKETVMGQPTPKTPRQLREFLGKAGFCRLFIPGFAEMAAPLYPLTKPGTLFNWGPDQQKAYQEIKQALLTAPALGLPDLTKPFELFVDEKQGYAKGVLTQKLGPWRRPVAYLSKKLDPVAAGWPPCLRMVAAIAVLTKDAGKLTMGQPLVILAPHAVEALVKQPPDRWLSNARMTHYQALLLDTDRVQFGPVVALNPATLLPLPEEGLQHNCLDILAEAHGTRPDLTDQPLPDADHTWYTDGSSLLQEGQRKAGAAVTTETEVIWAKALPAGTSAQRAELIALTQALKMAEGKKLNVYTDSRYAFATAHIHGEIYRRRGWLTSEGKEIKNKDEILALLKALFLPKRLSIIHCPGHQKGHSAEARGNRMADQAARKAAITETPDTSTLLKRTADGSEFESPKKKAKVE

SEQ ID NO: 16056 - protein, 2366 aa, synthetic construct
MPAAKRVKLDGGDKKYSIGLDIGTNSVGWAVITDEYKVPSKKFKVLGNTDRHSIKKNLIGALLFDSGETAEATRLKRTARRRYTRRKNRICYLQEIFSNEMAKVDDSFFHRLEESFLVEEDKKHERHPIFGNIVDEVAYHEKYPTIYHLRKKLVDSTDKADLRLIYLALAHMIKFRGHFLIEGDLNPDNSDVDKLFIQLVQTYNQLFEENPINASGVDAKAILSARLSKSRRLENLIAQLPGEKKNGLFGNLIALSLGLTPNFKSNFDLAEDAKLQLSKDTYDDDLDNLLAQIGDQYADLFLAAKNLSDAILLSDILRVNTEITKAPLSASMIKRYDEHHQDLTLLKALVRQQLPEKYKEIFFDQSKNGYAGYIDGGASQEEFYKFIKPILEKMDGTEELLVKLNREDLLRKQRTFDNGSIPHQIHLGELHAILRRQEDFYPFLKDNREKIEKILTFRIPYYVGPLARGNSRFAWMTRKSEETITPWNFEEVVDKGASAQSFIERMTNFDKNLPNEKVLPKHSLLYEYFTVYNELTKVKYVTEGMRKPAFLSGEQKKAIVDLLFKTNRKVTVKQLKEDYFKKIECFDSVEISGVEDRFNASLGTYHDLLKIIKDKDFLDNEENEDILEDIVLTLTLFEDREMIEERLKTYAHLFDDKVMKQLKRRRYTGWGRLSRKLINGIRDKQSGKTILDFLKSDGFANRNFMQLIHDDSLTFKEDIQKAQVSGQGDSLHEHIANLAGSPAIKKGILQTVKVVDELVKVMGRHKPENIVIEMARENQTTQKGQKNSRERMKRIEEGIKELGSQILKEHPVENTQLQNEKLYLYYLQNGRDMYVDQELDINRLSDYDVDHIVPQSFLKDDSIDNKVLTRSDKARGKSDNVPSEEVVKKMKNYWRQLLNAKLITQRKFDNLTKAERGGLSELDKAGFIKRQLVETRQITKHVAQILDSRMNTKYDENDKLIREVKVITLKSKLVSDFRKDFQFYKVREINNYHHAHDAYLNAVVGTALIKKYPKLESEFVYGDYKVYDVRKMIAKSEQEIGKATAKYFFYSNIMNFFKTEITLANGEIRKRPLIETNGETGEIVWDKGRDFATVRKVLSMPQVNIVKKTEVQTGGFSKESILPKRNSDKLIARKKDWDPKKYGGFDSPTVAYSVLVVAKVEKGKSKKLKSVKELLGITIMERSSFEKNPIDFLEAKGYKEVKKDLIIKLPKYSLFELENGRKRMLASAGELQKGNELALPSKYVNFLYLASHYEKLKGSPEDNEQKQLFVEQHKHYLDEIIEQISEFSKRVILADANLDKVLSAYNKHRDKPIREQAENIIHLFTLTNLGAPAAFKYFDTTIDRKRYTSTKEVLDATLIHQSITGLYETRIDLSQLGGDAEAAAKEAAAKEAAAKEAAAKALEAEAAAKEAAAKEAAAKEAAAKAMASNFTQFVLVDNGGTGDVTVAPSNFANGIAEWISSNSRSQAYKVTCSVRQSSAQNRKYTIKVEVPKGAWRSYLNMELTIPIFATNSDCELIVKAMQGLLKDGNPIPSAIAANSGIYGGSGGSMASNFTQFVLVDNGGTGDVTVAPSNFANGIAEWISSNSRSQAYKVTCSVRQSSAQNRKYTIKVEVPKGAWRSYLNMELTIPIFATNSDCELIVKAMQGLLKDGNPIPSAIAANSGIYGSSGGGEAAAKTLNIEDEHRLHETSKEPDVSLGSTWLSDFPQAWAETGGMGLAVRQAPLIIPLKATSTPVSIKQYPMSQEARLGIKPHIQRLLDQGILVPCQSPWNTPLLPVKKPGTNDYRPVQDLREVNKRVEDIHPTVPNPYNLLSGLPPSHQWYTVLDLKDAFFCLRLHPTSQPLFAFEWRDPEMGISGQLTWTRLPQGFKNSPTLFNEALHRDLADFRIQHPDLILLQYVDDLLLAATSELDCQQGTRALLQTLGNLGYRASAKKAQICQKQVKYLGYLLKEGQRWLTEARKETVMGQPTPKTPRQLREFLGKAGFCRLFIPGFAEMAAPLYPLTKPGTLFNWGPDQQKAYQEIKQALLTAPALGLPDLTKPFELFVDEKQGYAKGVLTQKLGPWRRPVAYLSKKLDPVAAGWPPCLRMVAAIAVLTKDAGKLTMGQPLVILAPHAVEALVKQPPDRWLSNARMTHYQALLLDTDRVQFGPVVALNPATLLPLPEEGLQHNCLDILAEAHGTRPDLTDQPLPDADHTWYTDGSSLLQEGQRKAGAAVTTETEVIWAKALPAGTSAQRAELIALTQALKMAEGKKLNVYTDSRYAFATAHIHGEIYRRRGWLTSEGKEIKNKDEILALLKALFLPKRLSIIHCPGHQKGHSAEARGNRMADQAARKAAITETPDTSTLLKRTADGSEFESPKKKAKVE

SEQ ID NO: 16057 - protein, 2657 aa, synthetic construct
MPAAKRVKLDGGDKKYSIGLDIGTNSVGWAVITDEYKVPSKKFKVLGNTDRHSIKKNLIGALLFDSGETAEATRLKRTARRRYTRRKNRICYLQEIFSNEMAKVDDSFFHRLEESFLVEEDKKHERHPIFGNIVDEVAYHEKYPTIYHLRKKLVDSTDKADLRLIYLALAHMIKFRGHFLIEGDLNPDNSDVDKLFIQLVQTYNQLFEENPINASGVDAKAILSARLSKSRRLENLIAQLPGEKKNGLFGNLIALSLGLTPNFKSNFDLAEDAKLQLSKDTYDDDLDNLLAQIGDQYADLFLAAKNLSDAILLSDILRVNTEITKAPLSASMIKRYDEHHQDLTLLKALVRQQLPEKYKEIFFDQSKNGYAGYIDGGASQEEFYKFIKPILEKMDGTEELLVKLNREDLLRKQRTFDNGSIPHQIHLGELHAILRRQEDFYPFLKDNREKIEKILTFRIPYYVGPLARGNSRFAWMTRKSEETITPWNFEEVVDKGASAQSFIERMTNFDKNLPNEKVLPKHSLLYEYFTVYNELTKVKYVTEGMRKPAFLSGEQKKAIVDLLFKTNRKVTVKQLKEDYFKKIECFDSVEISGVEDRFNASLGTYHDLLKIIKDKDFLDNEENEDILEDIVLTLTLFEDREMIEERLKTYAHLFDDKVMKQLKRRRYTGWGRLSRKLINGIRDKQSGKTILDFLKSDGFANRNFMQLIHDDSLTFKEDIQKAQVSGQGDSLHEHIANLAGSPAIKKGILQTVKVVDELVKVMGRHKPENIVIEMARENQTTQKGQKNSRERMKRIEEGIKELGSQILKEHPVENTQLQNEKLYLYYLQNGRDMYVDQELDINRLSDYDVDHIVPQSFLKDDSIDNKVLTRSDKARGKSDNVPSEEVVKKMKNYWRQLLNAKLITQRKFDNLTKAERGGLSELDKAGFIKRQLVETRQITKHVAQILDSRMNTKYDENDKLIREVKVITLKSKLVSDFRKDFQFYKVREINNYHHAHDAYLNAVVGTALIKKYPKLESEFVYGDYKVYDVRKMIAKSEQEIGKATAKYFFYSNIMNFFKTEITLANGEIRKRPLIETNGETGEIVWDKGRDFATVRKVLSMPQVNIVKKTEVQTGGFSKESILPKRNSDKLIARKKDWDPKKYGGFDSPTVAYSVLVVAKVEKGKSKKLKSVKELLGITIMERSSFEKNPIDFLEAKGYKEVKKDLIIKLPKYSLFELENGRKRMLASAGELQKGNELALPSKYVNFLYLASHYEKLKGSPEDNEQKQLFVEQHKHYLDEIIEQISEFSKRVILADANLDKVLSAYNKHRDKPIREQAENIIHLFTLTNLGAPAAFKYFDTTIDRKRYTSTKEVLDATLIHQSITGLYETRIDLSQLGGDAEAAAKEAAAKEAAAKEAAAKALEAEAAAKEAAAKEAAAKEAAAKAMASNFTQFVLVDNGGTGDVTVAPSNFANGIAEWISSNSRSQAYKVTCSVRQSSAQNRKYTIKVEVPKGAWRSYLNMELTIPIFATNSDCELIVKAMQGLLKDGNPIPSAIAANSGIYGGSGGSMASNFTQFVLVDNGGTGDVTVAPSNFANGIAEWISSNSRSQAYKVTCSVRQSSAQNRKYTIKVEVPKGAWRSYLNMELTIPIFATNSDCELIVKAMQGLLKDGNPIPSAIAANSGIYGGGSGGGSGGGSGGGSMASNFTQFVLVDNGGTGDVTVAPSNFANGIAEWISSNSRSQAYKVTCSVRQSSAQNRKYTIKVEVPKGAWRSYLNMELTIPIFATNSDCELIVKAMQGLLKDGNPIPSAIAANSGIYGGSGGSMASNFTQFVLVDNGGTGDVTVAPSNFANGIAEWISSNSRSQAYKVTCSVRQSSAQNRKYTIKVEVPKGAWRSYLNMELTIPIFATNSDCELIVKAMQGLLKDGNPIPSAIAANSGIYAEAAAKEAAAKEAAAKEAAAKALEAEAAAKEAAAKEAAAKEAAAKATLNIEDEHRLHETSKEPDVSLGSTWLSDFPQAWAETGGMGLAVRQAPLIIPLKATSTPVSIKQYPMSQEARLGIKPHIQRLLDQGILVPCQSPWNTPLLPVKKPGTNDYRPVQDLREVNKRVEDIHPTVPNPYNLLSGLPPSHQWYTVLDLKDAFFCLRLHPTSQPLFAFEWRDPEMGISGQLTWTRLPQGFKNSPTLFNEALHRDLADFRIQHPDLILLQYVDDLLLAATSELDCQQGTRALLQTLGNLGYRASAKKAQICQKQVKYLGYLLKEGQRWLTEARKETVMGQPTPKTPRQLREFLGKAGFCRLFIPGFAEMAAPLYPLTKPGTLFNWGPDQQKAYQEIKQALLTAPALGLPDLTKPFELFVDEKQGYAKGVLTQKLGPWRRPVAYLSKKLDPVAAGWPPCLRMVAAIAVLTKDAGKLTMGQPLVILAPHAVEALVKQPPDRWLSNARMTHYQALLLDTDRVQFGPVVALNPATLLPLPEEGLQHNCLDILAEAHGTRPDLTDQPLPDADHTWYTDGSSLLQEGQRKAGAAVTTETEVIWAKALPAGTSAQRAELIALTQALKMAEGKKLNVYTDSRYAFATAHIHGEIYRRRGWLTSEGKEIKNKDEILALLKALFLPKRLSIIHCPGHQKGHSAEARGNRMADQAARKAAITETPDTSTLLKRTADGSEFESPKKKAKVE

SEQ ID NO: 16058 - protein, 2644 aa, synthetic construct
MPAAKRVKLDGGDKKYSIGLDIGTNSVGWAVITDEYKVPSKKFKVLGNTDRHSIKKNLIGALLFDSGETAEATRLKRTARRRYTRRKNRICYLQEIFSNEMAKVDDSFFHRLEESFLVEEDKKHERHPIFGNIVDEVAYHEKYPTIYHLRKKLVDSTDKADLRLIYLALAHMIKFRGHFLIEGDLNPDNSDVDKLFIQLVQTYNQLFEENPINASGVDAKAILSARLSKSRRLENLIAQLPGEKKNGLFGNLIALSLGLTPNFKSNFDLAEDAKLQLSKDTYDDDLDNLLAQIGDQYADLFLAAKNLSDAILLSDILRVNTEITKAPLSASMIKRYDEHHQDLTLLKALVRQQLPEKYKEIFFDQSKNGYAGYIDGGASQEEFYKFIKPILEKMDGTEELLVKLNREDLLRKQRTFDNGSIPHQIHLGELHAILRRQEDFYPFLKDNREKIEKILTFRIPYYVGPLARGNSRFAWMTRKSEETITPWNFEEVVDKGASAQSFIERMTNFDKNLPNEKVLPKHSLLYEYFTVYNELTKVKYVTEGMRKPAFLSGEQKKAIVDLLFKTNRKVTVKQLKEDYFKKIECFDSVEISGVEDRFNASLGTYHDLLKIIKDKDFLDNEENEDILEDIVLTLTLFEDREMIEERLKTYAHLFDDKVMKQLKRRRYTGWGRLSRKLINGIRDKQSGKTILDFLKSDGFANRNFMQLIHDDSLTFKEDIQKAQVSGQGDSLHEHIANLAGSPAIKKGILQTVKVVDELVKVMGRHKPENIVIEMARENQTTQKGQKNSRERMKRIEEGIKELGSQILKEHPVENTQLQNEKLYLYYLQNGRDMYVDQELDINRLSDYDVDHIVPQSFLKDDSIDNKVLTRSDKARGKSDNVPSEEVVKKMKNYWRQLLNAKLITQRKFDNLTKAERGGLSELDKAGFIKRQLVETRQITKHVAQILDSRMNTKYDENDKLIREVKVITLKSKLVSDFRKDFQFYKVREINNYHHAHDAYLNAVVGTALIKKYPKLESEFVYGDYKVYDVRKMIAKSEQEIGKATAKYFFYSNIMNFFKTEITLANGEIRKRPLIETNGETGEIVWDKGRDFATVRKVLSMPQVNIVKKTEVQTGGFSKESILPKRNSDKLIARKKDWDPKKYGGFDSPTVAYSVLVVAKVEKGKSKKLKSVKELLGITIMERSSFEKNPIDFLEAKGYKEVKKDLIIKLPKYSLFELENGRKRMLASAGELQKGNELALPSKYVNFLYLASHYEKLKGSPEDNEQKQLFVEQHKHYLDEIIEQISEFSKRVILADANLDKVLSAYNKHRDKPIREQAENIIHLFTLTNLGAPAAFKYFDTTIDRKRYTSTKEVLDATLIHQSITGLYETRIDLSQLGGDAEAAAKEAAAKEAAAKEAAAKALEAEAAAKEAAAKEAAAKEAAAKAMASNFTQFVLVDNGGTGDVTVAPSNFANGIAEWISSNSRSQAYKVTCSVRQSSAQNRKYTIKVEVPKGAWRSYLNMELTIPIFATNSDCELIVKAMQGLLKDGNPIPSAIAANSGIYGGSGGSMASNFTQFVLVDNGGTGDVTVAPSNFANGIAEWISSNSRSQAYKVTCSVRQSSAQNRKYTIKVEVPKGAWRSYLNMELTIPIFATNSDCELIVKAMQGLLKDGNPIPSAIAANSGIYGGGSGGGSGGGSGGGSMASNFTQFVLVDNGGTGDVTVAPSNFANGIAEWISSNSRSQAYKVTCSVRQSSAQNRKYTIKVEVPKGAWRSYLNMELTIPIFATNSDCELIVKAMQGLLKDGNPIPSAIAANSGIYGGSGGSMASNFTQFVLVDNGGTGDVTVAPSNFANGIAEWISSNSRSQAYKVTCSVRQSSAQNRKYTIKVEVPKGAWRSYLNMELTIPIFATNSDCELIVKAMQGLLKDGNPIPSAIAANSGIYSGGSSGGSSGSETPGTSESATPESSGGSSGGSSTLNIEDEHRLHETSKEPDVSLGSTWLSDFPQAWAETGGMGLAVRQAPLIIPLKATSTPVSIKQYPMSQEARLGIKPHIQRLLDQGILVPCQSPWNTPLLPVKKPGTNDYRPVQDLREVNKRVEDIHPTVPNPYNLLSGLPPSHQWYTVLDLKDAFFCLRLHPTSQPLFAFEWRDPEMGISGQLTWTRLPQGFKNSPTLFNEALHRDLADFRIQHPDLILLQYVDDLLLAATSELDCQQGTRALLQTLGNLGYRASAKKAQICQKQVKYLGYLLKEGQRWLTEARKETVMGQPTPKTPRQLREFLGKAGFCRLFIPGFAEMAAPLYPLTKPGTLFNWGPDQQKAYQEIKQALLTAPALGLPDLTKPFELFVDEKQGYAKGVLTQKLGPWRRPVAYLSKKLDPVAAGWPPCLRMVAAIAVLTKDAGKLTMGQPLVILAPHAVEALVKQPPDRWLSNARMTHYQALLLDTDRVQFGPVVALNPATLLPLPEEGLQHNCLDILAEAHGTRPDLTDQPLPDADHTWYTDGSSLLQEGQRKAGAAVTTETEVIWAKALPAGTSAQRAELIALTQALKMAEGKKLNVYTDSRYAFATAHIHGEIYRRRGWLTSEGKEIKNKDEILALLKALFLPKRLSIIHCPGHQKGHSAEARGNRMADQAARKAAITETPDTSTLLKRTADGSEFESPKKKAKVE

SEQ ID NO: 16059 - protein, 2629 aa, synthetic construct
MPAAKRVKLDGGDKKYSIGLDIGTNSVGWAVITDEYKVPSKKFKVLGNTDRHSIKKNLIGALLFDSGETAEATRLKRTARRRYTRRKNRICYLQEIFSNEMAKVDDSFFHRLEESFLVEEDKKHERHPIFGNIVDEVAYHEKYPTIYHLRKKLVDSTDKADLRLIYLALAHMIKFRGHFLIEGDLNPDNSDVDKLFIQLVQTYNQLFEENPINASGVDAKAILSARLSKSRRLENLIAQLPGEKKNGLFGNLIALSLGLTPNFKSNFDLAEDAKLQLSKDTYDDDLDNLLAQIGDQYADLFLAAKNLSDAILLSDILRVNTEITKAPLSASMIKRYDEHHQDLTLLKALVRQQLPEKYKEIFFDQSKNGYAGYIDGGASQEEFYKFIKPILEKMDGTEELLVKLNREDLLRKQRTFDNGSIPHQIHLGELHAILRRQEDFYPFLKDNREKIEKILTFRIPYYVGPLARGNSRFAWMTRKSEETITPWNFEEVVDKGASAQSFIERMTNFDKNLPNEKVLPKHSLLYEYFTVYNELTKVKYVTEGMRKPAFLSGEQKKAIVDLLFKTNRKVTVKQLKEDYFKKIECFDSVEISGVEDRFNASLGTYHDLLKIIKDKDFLDNEENEDILEDIVLTLTLFEDREMIEERLKTYAHLFDDKVMKQLKRRRYTGWGRLSRKLINGIRDKQSGKTILDFLKSDGFANRNFMQLIHDDSLTFKEDIQKAQVSGQGDSLHEHIANLAGSPAIKKGILQTVKVVDELVKVMGRHKPENIVIEMARENQTTQKGQKNSRERMKRIEEGIKELGSQILKEHPVENTQLQNEKLYLYYLQNGRDMYVDQELDINRLSDYDVDHIVPQSFLKDDSIDNKVLTRSDKARGKSDNVPSEEVVKKMKNYWRQLLNAKLITQRKFDNLTKAERGGLSELDKAGFIKRQLVETRQITKHVAQILDSRMNTKYDENDKLIREVKVITLKSKLVSDFRKDFQFYKVREINNYHHAHDAYLNAVVGTALIKKYPKLESEFVYGDYKVYDVRKMIAKSEQEIGKATAKYFFYSNIMNFFKTEITLANGEIRKRPLIETNGETGEIVWDKGRDFATVRKVLSMPQVNIVKKTEVQTGGFSKESILPKRNSDKLIARKKDWDPKKYGGFDSPTVAYSVLVVAKVEKGKSKKLKSVKELLGITIMERSSFEKNPIDFLEAKGYKEVKKDLIIKLPKYSLFELENGRKRMLASAGELQKGNELALPSKYVNFLYLASHYEKLKGSPEDNEQKQLFVEQHKHYLDEIIEQISEFSKRVILADANLDKVLSAYNKHRDKPIREQAENIIHLFTLTNLGAPAAFKYFDTTIDRKRYTSTKEVLDATLIHQSITGLYETRIDLSQLGGDAEAAAKEAAAKEAAAKEAAAKALEAEAAAKEAAAKEAAAKEAAAKAMASNFTQFVLVDNGGTGDVTVAPSNFANGIAEWISSNSRSQAYKVTCSVRQSSAQNRKYTIKVEVPKGAWRSYLNMELTIPIFATNSDCELIVKAMQGLLKDGNPIPSAIAANSGIYGGSGGSMASNFTQFVLVDNGGTGDVTVAPSNFANGIAEWISSNSRSQAYKVTCSVRQSSAQNRKYTIKVEVPKGAWRSYLNMELTIPIFATNSDCELIVKAMQGLLKDGNPIPSAIAANSGIYGGGSGGGSGGGSGGGSMASNFTQFVLVDNGGTGDVTVAPSNFANGIAEWISSNSRSQAYKVTCSVRQSSAQNRKYTIKVEVPKGAWRSYLNMELTIPIFATNSDCELIVKAMQGLLKDGNPIPSAIAANSGIYGGSGGSMASNFTQFVLVDNGGTGDVTVAPSNFANGIAEWISSNSRSQAYKVTCSVRQSSAQNRKYTIKVEVPKGAWRSYLNMELTIPIFATNSDCELIVKAMQGLLKDGNPIPSAIAANSGIYGSSGSSGSSGSSGSSGSSTLNIEDEHRLHETSKEPDVSLGSTWLSDFPQAWAETGGMGLAVRQAPLIIPLKATSTPVSIKQYPMSQEARLGIKPHIQRLLDQGILVPCQSPWNTPLLPVKKPGTNDYRPVQDLREVNKRVEDIHPTVPNPYNLLSGLPPSHQWYTVLDLKDAFFCLRLHPTSQPLFAFEWRDPEMGISGQLTWTRLPQGFKNSPTLFNEALHRDLADFRIQHPDLILLQYVDDLLLAATSELDCQQGTRALLQTLGNLGYRASAKKAQICQKQVKYLGYLLKEGQRWLTEARKETVMGQPTPKTPRQLREFLGKAGFCRLFIPGFAEMAAPLYPLTKPGTLFNWGPDQQKAYQEIKQALLTAPALGLPDLTKPFELFVDEKQGYAKGVLTQKLGPWRRPVAYLSKKLDPVAAGWPPCLRMVAAIAVLTKDAGKLTMGQPLVILAPHAVEALVKQPPDRWLSNARMTHYQALLLDTDRVQFGPVVALNPATLLPLPEEGLQHNCLDILAEAHGTRPDLTDQPLPDADHTWYTDGSSLLQEGQRKAGAAVTTETEVIWAKALPAGTSAQRAELIALTQALKMAEGKKLNVYTDSRYAFATAHIHGEIYRRRGWLTSEGKEIKNKDEILALLKALFLPKRLSIIHCPGHQKGHSAEARGNRMADQAARKAAITETPDTSTLLKRTADGSEFESPKKKAKVE

SEQ ID NO: 16060 - protein, 2622 aa, synthetic construct
MPAAKRVKLDGGDKKYSIGLDIGTNSVGWAVITDEYKVPSKKFKVLGNTDRHSIKKNLIGALLFDSGETAEATRLKRTARRRYTRRKNRICYLQEIFSNEMAKVDDSFFHRLEESFLVEEDKKHERHPIFGNIVDEVAYHEKYPTIYHLRKKLVDSTDKADLRLIYLALAHMIKFRGHFLIEGDLNPDNSDVDKLFIQLVQTYNQLFEENPINASGVDAKAILSARLSKSRRLENLIAQLPGEKKNGLFGNLIALSLGLTPNFKSNFDLAEDAKLQLSKDTYDDDLDNLLAQIGDQYADLFLAAKNLSDAILLSDILRVNTEITKAPLSASMIKRYDEHHQDLTLLKALVRQQLPEKYKEIFFDQSKNGYAGYIDGGASQEEFYKFIKPILEKMDGTEELLVKLNREDLLRKQRTFDNGSIPHQIHLGELHAILRRQEDFYPFLKDNREKIEKILTFRIPYYVGPLARGNSRFAWMTRKSEETITPWNFEEVVDKGASAQSFIERMTNFDKNLPNEKVLPKHSLLYEYFTVYNELTKVKYVTEGMRKPAFLSGEQKKAIVDLLFKTNRKVTVKQLKEDYFKKIECFDSVEISGVEDRFNASLGTYHDLLKIIKDKDFLDNEENEDILEDIVLTLTLFEDREMIEERLKTYAHLFDDKVMKQLKRRRYTGWGRLSRKLINGIRDKQSGKTILDFLKSDGFANRNFMQLIHDDSLTFKEDIQKAQVSGQGDSLHEHIANLAGSPAIKKGILQTVKVVDELVKVMGRHKPENIVIEMARENQTTQKGQKNSRERMKRIEEGIKELGSQILKEHPVENTQLQNEKLYLYYLQNGRDMYVDQELDINRLSDYDVDHIVPQSFLKDDSIDNKVLTRSDKARGKSDNVPSEEVVKKMKNYWRQLLNAKLITQRKFDNLTKAERGGLSELDKAGFIKRQLVETRQITKHVAQILDSRMNTKYDENDKLIREVKVITLKSKLVSDFRKDFQFYKVREINNYHHAHDAYLNAVVGTALIKKYPKLESEFVYGDYKVYDVRKMIAKSEQEIGKATAKYFFYSNIMNFFKTEITLANGEIRKRPLIETNGETGEIVWDKGRDFATVRKVLSMPQVNIVKKTEVQTGGFSKESILPKRNSDKLIARKKDWDPKKYGGFDSPTVAYSVLVVAKVEKGKSKKLKSVKELLGITIMERSSFEKNPIDFLEAKGYKEVKKDLIIKLPKYSLFELENGRKRMLASAGELQKGNELALPSKYVNFLYLASHYEKLKGSPEDNEQKQLFVEQHKHYLDEIIEQISEFSKRVILADANLDKVLSAYNKHRDKPIREQAENIIHLFTLTNLGAPAAFKYFDTTIDRKRYTSTKEVLDATLIHQSITGLYETRIDLSQLGGDAEAAAKEAAAKEAAAKEAAAKALEAEAAAKEAAAKEAAAKEAAAKAMASNFTQFVLVDNGGTGDVTVAPSNFANGIAEWISSNSRSQAYKVTCSVRQSSAQNRKYTIKVEVPKGAWRSYLNMELTIPIFATNSDCELIVKAMQGLLKDGNPIPSAIAANSGIYGGSGGSMASNFTQFVLVDNGGTGDVTVAPSNFANGIAEWISSNSRSQAYKVTCSVRQSSAQNRKYTIKVEVPKGAWRSYLNMELTIPIFATNSDCELIVKAMQGLLKDGNPIPSAIAANSGIYGGGSGGGSGGGSGGGSMASNFTQFVLVDNGGTGDVTVAPSNFANGIAEWISSNSRSQAYKVTCSVRQSSAQNRKYTIKVEVPKGAWRSYLNMELTIPIFATNSDCELIVKAMQGLLKDGNPIPSAIAANSGIYGGSGGSMASNFTQFVLVDNGGTGDVTVAPSNFANGIAEWISSNSRSQAYKVTCSVRQSSAQNRKYTIKVEVPKGAWRSYLNMELTIPIFATNSDCELIVKAMQGLLKDGNPIPSAIAANSGIYGSSGGGEAAAKTLNIEDEHRLHETSKEPDVSLGSTWLSDFPQAWAETGGMGLAVRQAPLIIPLKATSTPVSIKQYPMSQEARLGIKPHIQRLLDQGILVPCQSPWNTPLLPVKKPGTNDYRPVQDLREVNKRVEDIHPTVPNPYNLLSGLPPSHQWYTVLDLKDAFFCLRLHPTSQPLFAFEWRDPEMGISGQLTWTRLPQGFKNSPTLFNEALHRDLADFRIQHPDLILLQYVDDLLLAATSELDCQQGTRALLQTLGNLGYRASAKKAQICQKQVKYLGYLLKEGQRWLTEARKETVMGQPTPKTPRQLREFLGKAGFCRLFIPGFAEMAAPLYPLTKPGTLFNWGPDQQKAYQEIKQALLTAPALGLPDLTKPFELFVDEKQGYAKGVLTQKLGPWRRPVAYLSKKLDPVAAGWPPCLRMVAAIAVLTKDAGKLTMGQPLVILAPHAVEALVKQPPDRWLSNARMTHYQALLLDTDRVQFGPVVALNPATLLPLPEEGLQHNCLDILAEAHGTRPDLTDQPLPDADHTWYTDGSSLLQEGQRKAGAAVTTETEVIWAKALPAGTSAQRAELIALTQALKMAEGKKLNVYTDSRYAFATAHIHGEIYRRRGWLTSEGKEIKNKDEILALLKALFLPKRLSIIHCPGHQKGHSAEARGNRMADQAARKAAITETPDTSTLLKRTADGSEFESPKKKAKVE

SEQ ID NO: 16061 - protein, 2265 aa, synthetic construct
MPAAKRVKLDGGDKKYSIGLDIGTNSVGWAVITDEYKVPSKKFKVLGNTDRHSIKKNLIGALLFDSGETAEATRLKRTARRRYTRRKNRICYLQEIFSNEMAKVDDSFFHRLEESFLVEEDKKHERHPIFGNIVDEVAYHEKYPTIYHLRKKLVDSTDKADLRLIYLALAHMIKFRGHFLIEGDLNPDNSDVDKLFIQLVQTYNQLFEENPINASGVDAKAILSARLSKSRRLENLIAQLPGEKKNGLFGNLIALSLGLTPNFKSNFDLAEDAKLQLSKDTYDDDLDNLLAQIGDQYADLFLAAKNLSDAILLSDILRVNTEITKAPLSASMIKRYDEHHQDLTLLKALVRQQLPEKYKEIFFDQSKNGYAGYIDGGASQEEFYKFIKPILEKMDGTEELLVKLNREDLLRKQRTFDNGSIPHQIHLGELHAILRRQEDFYPFLKDNREKIEKILTFRIPYYVGPLARGNSRFAWMTRKSEETITPWNFEEVVDKGASAQSFIERMTNFDKNLPNEKVLPKHSLLYEYFTVYNELTKVKYVTEGMRKPAFLSGEQKKAIVDLLFKTNRKVTVKQLKEDYFKKIECFDSVEISGVEDRFNASLGTYHDLLKIIKDKDFLDNEENEDILEDIVLTLTLFEDREMIEERLKTYAHLFDDKVMKQLKRRRYTGWGRLSRKLINGIRDKQSGKTILDFLKSDGFANRNFMQLIHDDSLTFKEDIQKAQVSGQGDSLHEHIANLAGSPAIKKGILQTVKVVDELVKVMGRHKPENIVIEMARENQTTQKGQKNSRERMKRIEEGIKELGSQILKEHPVENTQLQNEKLYLYYLQNGRDMYVDQELDINRLSDYDVDHIVPQSFLKDDSIDNKVLTRSDKARGKSDNVPSEEVVKKMKNYWRQLLNAKLITQRKFDNLTKAERGGLSELDKAGFIKRQLVETRQITKHVAQILDSRMNTKYDENDKLIREVKVITLKSKLVSDFRKDFQFYKVREINNYHHAHDAYLNAVVGTALIKKYPKLESEFVYGDYKVYDVRKMIAKSEQEIGKATAKYFFYSNIMNFFKTEITLANGEIRKRPLIETNGETGEIVWDKGRDFATVRKVLSMPQVNIVKKTEVQTGGFSKESILPKRNSDKLIARKKDWDPKKYGGFDSPTVAYSVLVVAKVEKGKSKKLKSVKELLGITIMERSSFEKNPIDFLEAKGYKEVKKDLIIKLPKYSLFELENGRKRMLASAGELQKGNELALPSKYVNFLYLASHYEKLKGSPEDNEQKQLFVEQHKHYLDEIIEQISEFSKRVILADANLDKVLSAYNKHRDKPIREQAENIIHLFTLTNLGAPAAFKYFDTTIDRKRYTSTKEVLDATLIHQSITGLYETRIDLSQLGGDSGGSSGGSSGSETPGTSESATPESSGGSSGGSSMASNFTQFVLVDNGGTGDVTVAPSNFANGIAEWISSNSRSQAYKVTCSVRQSSAQNRKYTIKVEVPKGAWRSYLNMELTIPIFATNSDCELIVKAMQGLLKDGNPIPSAIAANSGIYAEAAAKEAAAKEAAAKEAAAKALEAEAAAKEAAAKEAAAKEAAAKATLNIEDEHRLHETSKEPDVSLGSTWLSDFPQAWAETGGMGLAVRQAPLIIPLKATSTPVSIKQYPMSQEARLGIKPHIQRLLDQGILVPCQSPWNTPLLPVKKPGTNDYRPVQDLREVNKRVEDIHPTVPNPYNLLSGLPPSHQWYTVLDLKDAFFCLRLHPTSQPLFAFEWRDPEMGISGQLTWTRLPQGFKNSPTLFNEALHRDLADFRIQHPDLILLQYVDDLLLAATSELDCQQGTRALLQTLGNLGYRASAKKAQICQKQVKYLGYLLKEGQRWLTEARKETVMGQPTPKTPRQLREFLGKAGFCRLFIPGFAEMAAPLYPLTKPGTLFNWGPDQQKAYQEIKQALLTAPALGLPDLTKPFELFVDEKQGYAKGVLTQKLGPWRRPVAYLSKKLDPVAAGWPPCLRMVAAIAVLTKDAGKLTMGQPLVILAPHAVEALVKQPPDRWLSNARMTHYQALLLDTDRVQFGPVVALNPATLLPLPEEGLQHNCLDILAEAHGTRPDLTDQPLPDADHTWYTDGSSLLQEGQRKAGAAVTTETEVIWAKALPAGTSAQRAELIALTQALKMAEGKKLNVYTDSRYAFATAHIHGEIYRRRGWLTSEGKEIKNKDEILALLKALFLPKRLSIIHCPGHQKGHSAEARGNRMADQAARKAAITETPDTSTLLKRTADGSEFESPKKKAKVE

SEQ ID NO: 16062 - protein, 2252 aa, synthetic construct
MPAAKRVKLDGGDKKYSIGLDIGTNSVGWAVITDEYKVPSKKFKVLGNTDRHSIKKNLIGALLFDSGETAEATRLKRTARRRYTRRKNRICYLQEIFSNEMAKVDDSFFHRLEESFLVEEDKKHERHPIFGNIVDEVAYHEKYPTIYHLRKKLVDSTDKADLRLIYLALAHMIKFRGHFLIEGDLNPDNSDVDKLFIQLVQTYNQLFEENPINASGVDAKAILSARLSKSRRLENLIAQLPGEKKNGLFGNLIALSLGLTPNFKSNFDLAEDAKLQLSKDTYDDDLDNLLAQIGDQYADLFLAAKNLSDAILLSDILRVNTEITKAPLSASMIKRYDEHHQDLTLLKALVRQQLPEKYKEIFFDQSKNGYAGYIDGGASQEEFYKFIKPILEKMDGTEELLVKLNREDLLRKQRTFDNGSIPHQIHLGELHAILRRQEDFYPFLKDNREKIEKILTFRIPYYVGPLARGNSRFAWMTRKSEETITPWNFEEVVDKGASAQSFIERMTNFDKNLPNEKVLPKHSLLYEYFTVYNELTKVKYVTEGMRKPAFLSGEQKKAIVDLLFKTNRKVTVKQLKEDYFKKIECFDSVEISGVEDRFNASLGTYHDLLKIIKDKDFLDNEENEDILEDIVLTLTLFEDREMIEERLKTYAHLFDDKVMKQLKRRRYTGWGRLSRKLINGIRDKQSGKTILDFLKSDGFANRNFMQLIHDDSLTFKEDIQKAQVSGQGDSLHEHIANLAGSPAIKKGILQTVKVVDELVKVMGRHKPENIVIEMARENQTTQKGQKNSRERMKRIEEGIKELGSQILKEHPVENTQLQNEKLYLYYLQNGRDMYVDQELDINRLSDYDVDHIVPQSFLKDDSIDNKVLTRSDKARGKSDNVPSEEVVKKMKNYWRQLLNAKLITQRKFDNLTKAERGGLSELDKAGFIKRQLVETRQITKHVAQILDSRMNTKYDENDKLIREVKVITLKSKLVSDFRKDFQFYKVREINNYHHAHDAYLNAVVGTALIKKYPKLESEFVYGDYKVYDVRKMIAKSEQEIGKATAKYFFYSNIMNFFKTEITLANGEIRKRPLIETNGETGEIVWDKGRDFATVRKVLSMPQVNIVKKTEVQTGGFSKESILPKRNSDKLIARKKDWDPKKYGGFDSPTVAYSVLVVAKVEKGKSKKLKSVKELLGITIMERSSFEKNPIDFLEAKGYKEVKKDLIIKLPKYSLFELENGRKRMLASAGELQKGNELALPSKYVNFLYLASHYEKLKGSPEDNEQKQLFVEQHKHYLDEIIEQISEFSKRVILADANLDKVLSAYNKHRDKPIREQAENIIHLFTLTNLGAPAAFKYFDTTIDRKRYTSTKEVLDATLIHQSITGLYETRIDLSQLGGDSGGSSGGSSGSETPGTSESATPESSGGSSGGSSMASNFTQFVLVDNGGTGDVTVAPSNFANGIAEWISSNSRSQAYKVTCSVRQSSAQNRKYTIKVEVPKGAWRSYLNMELTIPIFATNSDCELIVKAMQGLLKDGNPIPSAIAANSGIYSGGSSGGSSGSETPGTSESATPESSGGSSGGSSTLNIEDEHRLHETSKEPDVSLGSTWLSDFPQAWAETGGMGLAVRQAPLIIPLKATSTPVSIKQYPMSQEARLGIKPHIQRLLDQGILVPCQSPWNTPLLPVKKPGTNDYRPVQDLREVNKRVEDIHPTVPNPYNLLSGLPPSHQWYTVLDLKDAFFCLRLHPTSQPLFAFEWRDPEMGISGQLTWTRLPQGFKNSPTLFNEALHRDLADFRIQHPDLILLQYVDDLLLAATSELDCQQGTRALLQTLGNLGYRASAKKAQICQKQVKYLGYLLKEGQRWLTEARKETVMGQPTPKTPRQLREFLGKAGFCRLFIPGFAEMAAPLYPLTKPGTLFNWGPDQQKAYQEIKQALLTAPALGLPDLTKPFELFVDEKQGYAKGVLTQKLGPWRRPVAYLSKKLDPVAAGWPPCLRMVAAIAVLTKDAGKLTMGQPLVILAPHAVEALVKQPPDRWLSNARMTHYQALLLDTDRVQFGPVVALNPATLLPLPEEGLQHNCLDILAEAHGTRPDLTDQPLPDADHTWYTDGSSLLQEGQRKAGAAVTTETEVIWAKALPAGTSAQRAELIALTQALKMAEGKKLNVYTDSRYAFATAHIHGEIYRRRGWLTSEGKEIKNKDEILALLKALFLPKRLSIIHCPGHQKGHSAEARGNRMADQAARKAAITETPDTSTLLKRTADGSEFESPKKKAKVE

SEQ ID NO: 16063 - protein, 2237 aa, synthetic construct
MPAAKRVKLDGGDKKYSIGLDIGTNSVGWAVITDEYKVPSKKFKVLGNTDRHSIKKNLIGALLFDSGETAEATRLKRTARRRYTRRKNRICYLQEIFSNEMAKVDDSFFHRLEESFLVEEDKKHERHPIFGNIVDEVAYHEKYPTIYHLRKKLVDSTDKADLRLIYLALAHMIKFRGHFLIEGDLNPDNSDVDKLFIQLVQTYNQLFEENPINASGVDAKAILSARLSKSRRLENLIAQLPGEKKNGLFGNLIALSLGLTPNFKSNFDLAEDAKLQLSKDTYDDDLDNLLAQIGDQYADLFLAAKNLSDAILLSDILRVNTEITKAPLSASMIKRYDEHHQDLTLLKALVRQQLPEKYKEIFFDQSKNGYAGYIDGGASQEEFYKFIKPILEKMDGTEELLVKLNREDLLRKQRTFDNGSIPHQIHLGELHAILRRQEDFYPFLKDNREKIEKILTFRIPYYVGPLARGNSRFAWMTRKSEETITPWNFEEVVDKGASAQSFIERMTNFDKNLPNEKVLPKHSLLYEYFTVYNELTKVKYVTEGMRKPAFLSGEQKKAIVDLLFKTNRKVTVKQLKEDYFKKIECFDSVEISGVEDRFNASLGTYHDLLKIIKDKDFLDNEENEDILEDIVLTLTLFEDREMIEERLKTYAHLFDDKVMKQLKRRRYTGWGRLSRKLINGIRDKQSGKTILDFLKSDGFANRNFMQLIHDDSLTFKEDIQKAQVSGQGDSLHEHIANLAGSPAIKKGILQTVKVVDELVKVMGRHKPENIVIEMARENQTTQKGQKNSRERMKRIEEGIKELGSQILKEHPVENTQLQNEKLYLYYLQNGRDMYVDQELDINRLSDYDVDHIVPQSFLKDDSIDNKVLTRSDKARGKSDNVPSEEVVKKMKNYWRQLLNAKLITQRKFDNLTKAERGGLSELDKAGFIKRQLVETRQITKHVAQILDSRMNTKYDENDKLIREVKVITLKSKLVSDFRKDFQFYKVREINNYHHAHDAYLNAVVGTALIKKYPKLESEFVYGDYKVYDVRKMIAKSEQEIGKATAKYFFYSNIMNFFKTEITLANGEIRKRPLIETNGETGEIVWDKGRDFATVRKVLSMPQVNIVKKTEVQTGGFSKESILPKRNSDKLIARKKDWDPKKYGGFDSPTVAYSVLVVAKVEKGKSKKLKSVKELLGITIMERSSFEKNPIDFLEAKGYKEVKKDLIIKLPKYSLFELENGRKRMLASAGELQKGNELALPSKYVNFLYLASHYEKLKGSPEDNEQKQLFVEQHKHYLDEIIEQISEFSKRVILADANLDKVLSAYNKHRDKPIREQAENIIHLFTLTNLGAPAAFKYFDTTIDRKRYTSTKEVLDATLIHQSITGLYETRIDLSQLGGDSGGSSGGSSGSETPGTSESATPESSGGSSGGSSMASNFTQFVLVDNGGTGDVTVAPSNFANGIAEWISSNSRSQAYKVTCSVRQSSAQNRKYTIKVEVPKGAWRSYLNMELTIPIFATNSDCELIVKAMQGLLKDGNPIPSAIAANSGIYGSSGSSGSSGSSGSSGSSTLNIEDEHRLHETSKEPDVSLGSTWLSDFPQAWAETGGMGLAVRQAPLIIPLKATSTPVSIKQYPMSQEARLGIKPHIQRLLDQGILVPCQSPWNTPLLPVKKPGTNDYRPVQDLREVNKRVEDIHPTVPNPYNLLSGLPPSHQWYTVLDLKDAFFCLRLHPTSQPLFAFEWRDPEMGISGQLTWTRLPQGFKNSPTLFNEALHRDLADFRIQHPDLILLQYVDDLLLAATSELDCQQGTRALLQTLGNLGYRASAKKAQICQKQVKYLGYLLKEGQRWLTEARKETVMGQPTPKTPRQLREFLGKAGFCRLFIPGFAEMAAPLYPLTKPGTLFNWGPDQQKAYQEIKQALLTAPALGLPDLTKPFELFVDEKQGYAKGVLTQKLGPWRRPVAYLSKKLDPVAAGWPPCLRMVAAIAVLTKDAGKLTMGQPLVILAPHAVEALVKQPPDRWLSNARMTHYQALLLDTDRVQFGPVVALNPATLLPLPEEGLQHNCLDILAEAHGTRPDLTDQPLPDADHTWYTDGSSLLQEGQRKAGAAVTTETEVIWAKALPAGTSAQRAELIALTQALKMAEGKKLNVYTDSRYAFATAHIHGEIYRRRGWLTSEGKEIKNKDEILALLKALFLPKRLSIIHCPGHQKGHSAEARGNRMADQAARKAAITETPDTSTLLKRTADGSEFESPKKKAKVE

SEQ ID NO: 16064 - protein, 2230 aa, synthetic construct
MPAAKRVKLDGGDKKYSIGLDIGTNSVGWAVITDEYKVPSKKFKVLGNTDRHSIKKNLIGALLFDSGETAEATRLKRTARRRYTRRKNRICYLQEIFSNEMAKVDDSFFHRLEESFLVEEDKKHERHPIFGNIVDEVAYHEKYPTIYHLRKKLVDSTDKADLRLIYLALAHMIKFRGHFLIEGDLNPDNSDVDKLFIQLVQTYNQLFEENPINASGVDAKAILSARLSKSRRLENLIAQLPGEKKNGLFGNLIALSLGLTPNFKSNFDLAEDAKLQLSKDTYDDDLDNLLAQIGDQYADLFLAAKNLSDAILLSDILRVNTEITKAPLSASMIKRYDEHHQDLTLLKALVRQQLPEKYKEIFFDQSKNGYAGYIDGGASQEEFYKFIKPILEKMDGTEELLVKLNREDLLRKQRTFDNGSIPHQIHLGELHAILRRQEDFYPFLKDNREKIEKILTFRIPYYVGPLARGNSRFAWMTRKSEETITPWNFEEVVDKGASAQSFIERMTNFDKNLPNEKVLPKHSLLYEYFTVYNELTKVKYVTEGMRKPAFLSGEQKKAIVDLLFKTNRKVTVKQLKEDYFKKIECFDSVEISGVEDRFNASLGTYHDLLKIIKDKDFLDNEENEDILEDIVLTLTLFEDREMIEERLKTYAHLFDDKVMKQLKRRRYTGWGRLSRKLINGIRDKQSGKTILDFLKSDGFANRNFMQLIHDDSLTFKEDIQKAQVSGQGDSLHEHIANLAGSPAIKKGILQTVKVVDELVKVMGRHKPENIVIEMARENQTTQKGQKNSRERMKRIEEGIKELGSQILKEHPVENTQLQNEKLYLYYLQNGRDMYVDQELDINRLSDYDVDHIVPQSFLKDDSIDNKVLTRSDKARGKSDNVPSEEVVKKMKNYWRQLLNAKLITQRKFDNLTKAERGGLSELDKAGFIKRQLVETRQITKHVAQILDSRMNTKYDENDKLIREVKVITLKSKLVSDFRKDFQFYKVREINNYHHAHDAYLNAVVGTALIKKYPKLESEFVYGDYKVYDVRKMIAKSEQEIGKATAKYFFYSNIMNFFKTEITLANGEIRKRPLIETNGETGEIVWDKGRDFATVRKVLSMPQVNIVKKTEVQTGGFSKESILPKRNSDKLIARKKDWDPKKYGGFDSPTVAYSVLVVAKVEKGKSKKLKSVKELLGITIMERSSFEKNPIDFLEAKGYKEVKKDLIIKLPKYSLFELENGRKRMLASAGELQKGNELALPSKYVNFLYLASHYEKLKGSPEDNEQKQLFVEQHKHYLDEIIEQISEFSKRVILADANLDKVLSAYNKHRDKPIREQAENIIHLFTLTNLGAPAAFKYFDTTIDRKRYTSTKEVLDATLIHQSITGLYETRIDLSQLGGDSGGSSGGSSGSETPGTSESATPESSGGSSGGSSMASNFTQFVLVDNGGTGDVTVAPSNFANGIAEWISSNSRSQAYKVTCSVRQSSAQNRKYTIKVEVPKGAWRSYLNMELTIPIFATNSDCELIVKAMQGLLKDGNPIPSAIAANSGIYGSSGGGEAAAKTLNIEDEHRLHETSKEPDVSLGSTWLSDFPQAWAETGGMGLAVRQAPLIIPLKATSTPVSIKQYPMSQEARLGIKPHIQRLLDQGILVPCQSPWNTPLLPVKKPGTNDYRPVQDLREVNKRVEDIHPTVPNPYNLLSGLPPSHQWYTVLDLKDAFFCLRLHPTSQPLFAFEWRDPEMGISGQLTWTRLPQGFKNSPTLFNEALHRDLADFRIQHPDLILLQYVDDLLLAATSELDCQQGTRALLQTLGNLGYRASAKKAQICQKQVKYLGYLLKEGQRWLTEARKETVMGQPTPKTPRQLREFLGKAGFCRLFIPGFAEMAAPLYPLTKPGTLFNWGPDQQKAYQEIKQALLTAPALGLPDLTKPFELFVDEKQGYAKGVLTQKLGPWRRPVAYLSKKLDPVAAGWPPCLRMVAAIAVLTKDAGKLTMGQPLVILAPHAVEALVKQPPDRWLSNARMTHYQALLLDTDRVQFGPVVALNPATLLPLPEEGLQHNCLDILAEAHGTRPDLTDQPLPDADHTWYTDGSSLLQEGQRKAGAAVTTETEVIWAKALPAGTSAQRAELIALTQALKMAEGKKLNVYTDSRYAFATAHIHGEIYRRRGWLTSEGKEIKNKDEILALLKALFLPKRLSIIHCPGHQKGHSAEARGNRMADQAARKAAITETPDTSTLLKRTADGSEFESPKKKAKVE

SEQ ID NO: 16065 - protein, 2388 aa, synthetic construct
MPAAKRVKLDGGDKKYSIGLDIGTNSVGWAVITDEYKVPSKKFKVLGNTDRHSIKKNLIGALLFDSGETAEATRLKRTARRRYTRRKNRICYLQEIFSNEMAKVDDSFFHRLEESFLVEEDKKHERHPIFGNIVDEVAYHEKYPTIYHLRKKLVDSTDKADLRLIYLALAHMIKFRGHFLIEGDLNPDNSDVDKLFIQLVQTYNQLFEENPINASGVDAKAILSARLSKSRRLENLIAQLPGEKKNGLFGNLIALSLGLTPNFKSNFDLAEDAKLQLSKDTYDDDLDNLLAQIGDQYADLFLAAKNLSDAILLSDILRVNTEITKAPLSASMIKRYDEHHQDLTLLKALVRQQLPEKYKEIFFDQSKNGYAGYIDGGASQEEFYKFIKPILEKMDGTEELLVKLNREDLLRKQRTFDNGSIPHQIHLGELHAILRRQEDFYPFLKDNREKIEKILTFRIPYYVGPLARGNSRFAWMTRKSEETITPWNFEEVVDKGASAQSFIERMTNFDKNLPNEKVLPKHSLLYEYFTVYNELTKVKYVTEGMRKPAFLSGEQKKAIVDLLFKTNRKVTVKQLKEDYFKKIECFDSVEISGVEDRFNASLGTYHDLLKIIKDKDFLDNEENEDILEDIVLTLTLFEDREMIEERLKTYAHLFDDKVMKQLKRRRYTGWGRLSRKLINGIRDKQSGKTILDFLKSDGFANRNFMQLIHDDSLTFKEDIQKAQVSGQGDSLHEHIANLAGSPAIKKGILQTVKVVDELVKVMGRHKPENIVIEMARENQTTQKGQKNSRERMKRIEEGIKELGSQILKEHPVENTQLQNEKLYLYYLQNGRDMYVDQELDINRLSDYDVDHIVPQSFLKDDSIDNKVLTRSDKARGKSDNVPSEEVVKKMKNYWRQLLNAKLITQRKFDNLTKAERGGLSELDKAGFIKRQLVETRQITKHVAQILDSRMNTKYDENDKLIREVKVITLKSKLVSDFRKDFQFYKVREINNYHHAHDAYLNAVVGTALIKKYPKLESEFVYGDYKVYDVRKMIAKSEQEIGKATAKYFFYSNIMNFFKTEITLANGEIRKRPLIETNGETGEIVWDKGRDFATVRKVLSMPQVNIVKKTEVQTGGFSKESILPKRNSDKLIARKKDWDPKKYGGFDSPTVAYSVLVVAKVEKGKSKKLKSVKELLGITIMERSSFEKNPIDFLEAKGYKEVKKDLIIKLPKYSLFELENGRKRMLASAGELQKGNELALPSKYVNFLYLASHYEKLKGSPEDNEQKQLFVEQHKHYLDEIIEQISEFSKRVILADANLDKVLSAYNKHRDKPIREQAENIIHLFTLTNLGAPAAFKYFDTTIDRKRYTSTKEVLDATLIHQSITGLYETRIDLSQLGGDSGGSSGGSSGSETPGTSESATPESSGGSSGGSSMASNFTQFVLVDNGGTGDVTVAPSNFANGIAEWISSNSRSQAYKVTCSVRQSSAQNRKYTIKVEVPKGAWRSYLNMELTIPIFATNSDCELIVKAMQGLLKDGNPIPSAIAANSGIYGGSGGSMASNFTQFVLVDNGGTGDVTVAPSNFANGIAEWISSNSRSQAYKVTCSVRQSSAQNRKYTIKVEVPKGAWRSYLNMELTIPIFATNSDCELIVKAMQGLLKDGNPIPSAIAANSGIYAEAAAKEAAAKEAAAKEAAAKALEAEAAAKEAAAKEAAAKEAAAKATLNIEDEHRLHETSKEPDVSLGSTWLSDFPQAWAETGGMGLAVRQAPLIIPLKATSTPVSIKQYPMSQEARLGIKPHIQRLLDQGILVPCQSPWNTPLLPVKKPGTNDYRPVQDLREVNKRVEDIHPTVPNPYNLLSGLPPSHQWYTVLDLKDAFFCLRLHPTSQPLFAFEWRDPEMGISGQLTWTRLPQGFKNSPTLFNEALHRDLADFRIQHPDLILLQYVDDLLLAATSELDCQQGTRALLQTLGNLGYRASAKKAQICQKQVKYLGYLLKEGQRWLTEARKETVMGQPTPKTPRQLREFLGKAGFCRLFIPGFAEMAAPLYPLTKPGTLFNWGPDQQKAYQEIKQALLTAPALGLPDLTKPFELFVDEKQGYAKGVLTQKLGPWRRPVAYLSKKLDPVAAGWPPCLRMVAAIAVLTKDAGKLTMGQPLVILAPHAVEALVKQPPDRWLSNARMTHYQALLLDTDRVQFGPVVALNPATLLPLPEEGLQHNCLDILAEAHGTRPDLTDQPLPDADHTWYTDGSSLLQEGQRKAGAAVTTETEVIWAKALPAGTSAQRAELIALTQALKMAEGKKLNVYTDSRYAFATAHIHGEIYRRRGWLTSEGKEIKNKDEILALLKALFLPKRLSIIHCPGHQKGHSAEARGNRMADQAARKAAITETPDTSTLLKRTADGSEFESPKKKAKVE

SEQ ID NO: 16066 - protein, 2375 aa, synthetic construct
MPAAKRVKLDGGDKKYSIGLDIGTNSVGWAVITDEYKVPSKKFKVLGNTDRHSIKKNLIGALLFDSGETAEATRLKRTARRRYTRRKNRICYLQEIFSNEMAKVDDSFFHRLEESFLVEEDKKHERHPIFGNIVDEVAYHEKYPTIYHLRKKLVDSTDKADLRLIYLALAHMIKFRGHFLIEGDLNPDNSDVDKLFIQLVQTYNQLFEENPINASGVDAKAILSARLSKSRRLENLIAQLPGEKKNGLFGNLIALSLGLTPNFKSNFDLAEDAKLQLSKDTYDDDLDNLLAQIGDQYADLFLAAKNLSDAILLSDILRVNTEITKAPLSASMIKRYDEHHQDLTLLKALVRQQLPEKYKEIFFDQSKNGYAGYIDGGASQEEFYKFIKPILEKMDGTEELLVKLNREDLLRKQRTFDNGSIPHQIHLGELHAILRRQEDFYPFLKDNREKIEKILTFRIPYYVGPLARGNSRFAWMTRKSEETITPWNFEEVVDKGASAQSFIERMTNFDKNLPNEKVLPKHSLLYEYFTVYNELTKVKYVTEGMRKPAFLSGEQKKAIVDLLFKTNRKVTVKQLKEDYFKKIECFDSVEISGVEDRFNASLGTYHDLLKIIKDKDFLDNEENEDILEDIVLTLTLFEDREMIEERLKTYAHLFDDKVMKQLKRRRYTGWGRLSRKLINGIRDKQSGKTILDFLKSDGFANRNFMQLIHDDSLTFKEDIQKAQVSGQGDSLHEHIANLAGSPAIKKGILQTVKVVDELVKVMGRHKPENIVIEMARENQTTQKGQKNSRERMKRIEEGIKELGSQILKEHPVENTQLQNEKLYLYYLQNGRDMYVDQELDINRLSDYDVDHIVPQSFLKDDSIDNKVLTRSDKARGKSDNVPSEEVVKKMKNYWRQLLNAKLITQRKFDNLTKAERGGLSELDKAGFIKRQLVETRQITKHVAQILDSRMNTKYDENDKLIREVKVITLKSKLVSDFRKDFQFYKVREINNYHHAHDAYLNAVVGTALIKKYPKLESEFVYGDYKVYDVRKMIAKSEQEIGKATAKYFFYSNIMNFFKTEITLANGEIRKRPLIETNGETGEIVWDKGRDFATVRKVLSMPQVNIVKKTEVQTGGFSKESILPKRNSDKLIARKKDWDPKKYGGFDSPTVAYSVLVVAKVEKGKSKKLKSVKELLGITIMERSSFEKNPIDFLEAKGYKEVKKDLIIKLPKYSLFELENGRKRMLASAGELQKGNELALPSKYVNFLYLASHYEKLKGSPEDNEQKQLFVEQHKHYLDEIIEQISEFSKRVILADANLDKVLSAYNKHRDKPIREQAENIIHLFTLTNLGAPAAFKYFDTTIDRKRYTSTKEVLDATLIHQSITGLYETRIDLSQLGGDSGGSSGGSSGSETPGTSESATPESSGGSSGGSSMASNFTQFVLVDNGGTGDVTVAPSNFANGIAEWISSNSRSQAYKVTCSVRQSSAQNRKYTIKVEVPKGAWRSYLNMELTIPIFATNSDCELIVKAMQGLLKDGNPIPSAIAANSGIYGGSGGSMASNFTQFVLVDNGGTGDVTVAPSNFANGIAEWISSNSRSQAYKVTCSVRQSSAQNRKYTIKVEVPKGAWRSYLNMELTIPIFATNSDCELIVKAMQGLLKDGNPIPSAIAANSGIYSGGSSGGSSGSETPGTSESATPESSGGSSGGSSTLNIEDEHRLHETSKEPDVSLGSTWLSDFPQAWAETGGMGLAVRQAPLIIPLKATSTPVSIKQYPMSQEARLGIKPHIQRLLDQGILVPCQSPWNTPLLPVKKPGTNDYRPVQDLREVNKRVEDIHPTVPNPYNLLSGLPPSHQWYTVLDLKDAFFCLRLHPTSQPLFAFEWRDPEMGISGQLTWTRLPQGFKNSPTLFNEALHRDLADFRIQHPDLILLQYVDDLLLAATSELDCQQGTRALLQTLGNLGYRASAKKAQICQKQVKYLGYLLKEGQRWLTEARKETVMGQPTPKTPRQLREFLGKAGFCRLFIPGFAEMAAPLYPLTKPGTLFNWGPDQQKAYQEIKQALLTAPALGLPDLTKPFELFVDEKQGYAKGVLTQKLGPWRRPVAYLSKKLDPVAAGWPPCLRMVAAIAVLTKDAGKLTMGQPLVILAPHAVEALVKQPPDRWLSNARMTHYQALLLDTDRVQFGPVVALNPATLLPLPEEGLQHNCLDILAEAHGTRPDLTDQPLPDADHTWYTDGSSLLQEGQRKAGAAVTTETEVIWAKALPAGTSAQRAELIALTQALKMAEGKKLNVYTDSRYAFATAHIHGEIYRRRGWLTSEGKEIKNKDEILALLKALFLPKRLSIIHCPGHQKGHSAEARGNRMADQAARKAAITETPDTSTLLKRTADGSEFESPKKKAKVE

SEQ ID NO: 16067 - protein, 2360 aa, synthetic construct
MPAAKRVKLDGGDKKYSIGLDIGTNSVGWAVITDEYKVPSKKFKVLGNTDRHSIKKNLIGALLFDSGETAEATRLKRTARRRYTRRKNRICYLQEIFSNEMAKVDDSFFHRLEESFLVEEDKKHERHPIFGNIVDEVAYHEKYPTIYHLRKKLVDSTDKADLRLIYLALAHMIKFRGHFLIEGDLNPDNSDVDKLFIQLVQTYNQLFEENPINASGVDAKAILSARLSKSRRLENLIAQLPGEKKNGLFGNLIALSLGLTPNFKSNFDLAEDAKLQLSKDTYDDDLDNLLAQIGDQYADLFLAAKNLSDAILLSDILRVNTEITKAPLSASMIKRYDEHHQDLTLLKALVRQQLPEKYKEIFFDQSKNGYAGYIDGGASQEEFYKFIKPILEKMDGTEELLVKLNREDLLRKQRTFDNGSIPHQIHLGELHAILRRQEDFYPFLKDNREKIEKILTFRIPYYVGPLARGNSRFAWMTRKSEETITPWNFEEVVDKGASAQSFIERMTNFDKNLPNEKVLPKHSLLYEYFTVYNELTKVKYVTEGMRKPAFLSGEQKKAIVDLLFKTNRKVTVKQLKEDYFKKIECFDSVEISGVEDRFNASLGTYHDLLKIIKDKDFLDNEENEDILEDIVLTLTLFEDREMIEERLKTYAHLFDDKVMKQLKRRRYTGWGRLSRKLINGIRDKQSGKTILDFLKSDGFANRNFMQLIHDDSLTFKEDIQKAQVSGQGDSLHEHIANLAGSPAIKKGILQTVKVVDELVKVMGRHKPENIVIEMARENQTTQKGQKNSRERMKRIEEGIKELGSQILKEHPVENTQLQNEKLYLYYLQNGRDMYVDQELDINRLSDYDVDHIVPQSFLKDDSIDNKVLTRSDKARGKSDNVPSEEVVKKMKNYWRQLLNAKLITQRKFDNLTKAERGGLSELDKAGFIKRQLVETRQITKHVAQILDSRMNTKYDENDKLIREVKVITLKSKLVSDFRKDFQFYKVREINNYHHAHDAYLNAVVGTALIKKYPKLESEFVYGDYKVYDVRKMIAKSEQEIGKATAKYFFYSNIMNFFKTEITLANGEIRKRPLIETNGETGEIVWDKGRDFATVRKVLSMPQVNIVKKTEVQTGGFSKESILPKRNSDKLIARKKDWDPKKYGGFDSPTVAYSVLVVAKVEKGKSKKLKSVKELLGITIMERSSFEKNPIDFLEAKGYKEVKKDLIIKLPKYSLFELENGRKRMLASAGELQKGNELALPSKYVNFLYLASHYEKLKGSPEDNEQKQLFVEQHKHYLDEIIEQISEFSKRVILADANLDKVLSAYNKHRDKPIREQAENIIHLFTLTNLGAPAAFKYFDTTIDRKRYTSTKEVLDATLIHQSITGLYETRIDLSQLGGDSGGSSGGSSGSETPGTSESATPESSGGSSGGSSMASNFTQFVLVDNGGTGDVTVAPSNFANGIAEWISSNSRSQAYKVTCSVRQSSAQNRKYTIKVEVPKGAWRSYLNMELTIPIFATNSDCELIVKAMQGLLKDGNPIPSAIAANSGIYGGSGGSMASNFTQFVLVDNGGTGDVTVAPSNFANGIAEWISSNSRSQAYKVTCSVRQSSAQNRKYTIKVEVPKGAWRSYLNMELTIPIFATNSDCELIVKAMQGLLKDGNPIPSAIAANSGIYGSSGSSGSSGSSGSSGSSTLNIEDEHRLHETSKEPDVSLGSTWLSDFPQAWAETGGMGLAVRQAPLIIPLKATSTPVSIKQYPMSQEARLGIKPHIQRLLDQGILVPCQSPWNTPLLPVKKPGTNDYRPVQDLREVNKRVEDIHPTVPNPYNLLSGLPPSHQWYTVLDLKDAFFCLRLHPTSQPLFAFEWRDPEMGISGQLTWTRLPQGFKNSPTLFNEALHRDLADFRIQHPDLILLQYVDDLLLAATSELDCQQGTRALLQTLGNLGYRASAKKAQICQKQVKYLGYLLKEGQRWLTEARKETVMGQPTPKTPRQLREFLGKAGFCRLFIPGFAEMAAPLYPLTKPGTLFNWGPDQQKAYQEIKQALLTAPALGLPDLTKPFELFVDEKQGYAKGVLTQKLGPWRRPVAYLSKKLDPVAAGWPPCLRMVAAIAVLTKDAGKLTMGQPLVILAPHAVEALVKQPPDRWLSNARMTHYQALLLDTDRVQFGPVVALNPATLLPLPEEGLQHNCLDILAEAHGTRPDLTDQPLPDADHTWYTDGSSLLQEGQRKAGAAVTTETEVIWAKALPAGTSAQRAELIALTQALKMAEGKKLNVYTDSRYAFATAHIHGEIYRRRGWLTSEGKEIKNKDEILALLKALFLPKRLSIIHCPGHQKGHSAEARGNRMADQAARKAAITETPDTSTLLKRTADGSEFESPKKKAKVE

SEQ ID NO: 16068 - protein, 2353 aa, synthetic construct
MPAAKRVKLDGGDKKYSIGLDIGTNSVGWAVITDEYKVPSKKFKVLGNTDRHSIKKNLIGALLFDSGETAEATRLKRTARRRYTRRKNRICYLQEIFSNEMAKVDDSFFHRLEESFLVEEDKKHERHPIFGNIVDEVAYHEKYPTIYHLRKKLVDSTDKADLRLIYLALAHMIKFRGHFLIEGDLNPDNSDVDKLFIQLVQTYNQLFEENPINASGVDAKAILSARLSKSRRLENLIAQLPGEKKNGLFGNLIALSLGLTPNFKSNFDLAEDAKLQLSKDTYDDDLDNLLAQIGDQYADLFLAAKNLSDAILLSDILRVNTEITKAPLSASMIKRYDEHHQDLTLLKALVRQQLPEKYKEIFFDQSKNGYAGYIDGGASQEEFYKFIKPILEKMDGTEELLVKLNREDLLRKQRTFDNGSIPHQIHLGELHAILRRQEDFYPFLKDNREKIEKILTFRIPYYVGPLARGNSRFAWMTRKSEETITPWNFEEVVDKGASAQSFIERMTNFDKNLPNEKVLPKHSLLYEYFTVYNELTKVKYVTEGMRKPAFLSGEQKKAIVDLLFKTNRKVTVKQLKEDYFKKIECFDSVEISGVEDRFNASLGTYHDLLKIIKDKDFLDNEENEDILEDIVLTLTLFEDREMIEERLKTYAHLFDDKVMKQLKRRRYTGWGRLSRKLINGIRDKQSGKTILDFLKSDGFANRNFMQLIHDDSLTFKEDIQKAQVSGQGDSLHEHIANLAGSPAIKKGILQTVKVVDELVKVMGRHKPENIVIEMARENQTTQKGQKNSRERMKRIEEGIKELGSQILKEHPVENTQLQNEKLYLYYLQNGRDMYVDQELDINRLSDYDVDHIVPQSFLKDDSIDNKVLTRSDKARGKSDNVPSEEVVKKMKNYWRQLLNAKLITQRKFDNLTKAERGGLSELDKAGFIKRQLVETRQITKHVAQILDSRMNTKYDENDKLIREVKVITLKSKLVSDFRKDFQFYKVREINNYHHAHDAYLNAVVGTALIKKYPKLESEFVYGDYKVYDVRKMIAKSEQEIGKATAKYFFYSNIMNFFKTEITLANGEIRKRPLIETNGETGEIVWDKGRDFATVRKVLSMPQVNIVKKTEVQTGGFSKESILPKRNSDKLIARKKDWDPKKYGGFDSPTVAYSVLVVAKVEKGKSKKLKSVKELLGITIMERSSFEKNPIDFLEAKGYKEVKKDLIIKLPKYSLFELENGRKRMLASAGELQKGNELALPSKYVNFLYLASHYEKLKGSPEDNEQKQLFVEQHKHYLDEIIEQISEFSKRVILADANLDKVLSAYNKHRDKPIREQAENIIHLFTLTNLGAPAAFKYFDTTIDRKRYTSTKEVLDATLIHQSITGLYETRIDLSQLGGDSGGSSGGSSGSETPGTSESATPESSGGSSGGSSMASNFTQFVLVDNGGTGDVTVAPSNFANGIAEWISSNSRSQAYKVTCSVRQSSAQNRKYTIKVEVPKGAWRSYLNMELTIPIFATNSDCELIVKAMQGLLKDGNPIPSAIAANSGIYGGSGGSMASNFTQFVLVDNGGTGDVTVAPSNFANGIAEWISSNSRSQAYKVTCSVRQSSAQNRKYTIKVEVPKGAWRSYLNMELTIPIFATNSDCELIVKAMQGLLKDGNPIPSAIAANSGIYGSSGGGEAAAKTLNIEDEHRLHETSKEPDVSLGSTWLSDFPQAWAETGGMGLAVRQAPLIIPLKATSTPVSIKQYPMSQEARLGIKPHIQRLLDQGILVPCQSPWNTPLLPVKKPGTNDYRPVQDLREVNKRVEDIHPTVPNPYNLLSGLPPSHQWYTVLDLKDAFFCLRLHPTSQPLFAFEWRDPEMGISGQLTWTRLPQGFKNSPTLFNEALHRDLADFRIQHPDLILLQYVDDLLLAATSELDCQQGTRALLQTLGNLGYRASAKKAQICQKQVKYLGYLLKEGQRWLTEARKETVMGQPTPKTPRQLREFLGKAGFCRLFIPGFAEMAAPLYPLTKPGTLFNWGPDQQKAYQEIKQALLTAPALGLPDLTKPFELFVDEKQGYAKGVLTQKLGPWRRPVAYLSKKLDPVAAGWPPCLRMVAAIAVLTKDAGKLTMGQPLVILAPHAVEALVKQPPDRWLSNARMTHYQALLLDTDRVQFGPVVALNPATLLPLPEEGLQHNCLDILAEAHGTRPDLTDQPLPDADHTWYTDGSSLLQEGQRKAGAAVTTETEVIWAKALPAGTSAQRAELIALTQALKMAEGKKLNVYTDSRYAFATAHIHGEIYRRRGWLTSEGKEIKNKDEILALLKALFLPKRLSIIHCPGHQKGHSAEARGNRMADQAARKAAITETPDTSTLLKRTADGSEFESPKKKAKVE

SEQ ID NO: 16069 - protein, 2644 aa, synthetic construct
MPAAKRVKLDGGDKKYSIGLDIGTNSVGWAVITDEYKVPSKKFKVLGNTDRHSIKKNLIGALLFDSGETAEATRLKRTARRRYTRRKNRICYLQEIFSNEMAKVDDSFFHRLEESFLVEEDKKHERHPIFGNIVDEVAYHEKYPTIYHLRKKLVDSTDKADLRLIYLALAHMIKFRGHFLIEGDLNPDNSDVDKLFIQLVQTYNQLFEENPINASGVDAKAILSARLSKSRRLENLIAQLPGEKKNGLFGNLIALSLGLTPNFKSNFDLAEDAKLQLSKDTYDDDLDNLLAQIGDQYADLFLAAKNLSDAILLSDILRVNTEITKAPLSASMIKRYDEHHQDLTLLKALVRQQLPEKYKEIFFDQSKNGYAGYIDGGASQEEFYKFIKPILEKMDGTEELLVKLNREDLLRKQRTFDNGSIPHQIHLGELHAILRRQEDFYPFLKDNREKIEKILTFRIPYYVGPLARGNSRFAWMTRKSEETITPWNFEEVVDKGASAQSFIERMTNFDKNLPNEKVLPKHSLLYEYFTVYNELTKVKYVTEGMRKPAFLSGEQKKAIVDLLFKTNRKVTVKQLKEDYFKKIECFDSVEISGVEDRFNASLGTYHDLLKIIKDKDFLDNEENEDILEDIVLTLTLFEDREMIEERLKTYAHLFDDKVMKQLKRRRYTGWGRLSRKLINGIRDKQSGKTILDFLKSDGFANRNFMQLIHDDSLTFKEDIQKAQVSGQGDSLHEHIANLAGSPAIKKGILQTVKVVDELVKVMGRHKPENIVIEMARENQTTQKGQKNSRERMKRIEEGIKELGSQILKEHPVENTQLQNEKLYLYYLQNGRDMYVDQELDINRLSDYDVDHIVPQSFLKDDSIDNKVLTRSDKARGKSDNVPSEEVVKKMKNYWRQLLNAKLITQRKFDNLTKAERGGLSELDKAGFIKRQLVETRQITKHVAQILDSRMNTKYDENDKLIREVKVITLKSKLVSDFRKDFQFYKVREINNYHHAHDAYLNAVVGTALIKKYPKLESEFVYGDYKVYDVRKMIAKSEQEIGKATAKYFFYSNIMNFFKTEITLANGEIRKRPLIETNGETGEIVWDKGRDFATVRKVLSMPQVNIVKKTEVQTGGFSKESILPKRNSDKLIARKKDWDPKKYGGFDSPTVAYSVLVVAKVEKGKSKKLKSVKELLGITIMERSSFEKNPIDFLEAKGYKEVKKDLIIKLPKYSLFELENGRKRMLASAGELQKGNELALPSKYVNFLYLASHYEKLKGSPEDNEQKQLFVEQHKHYLDEIIEQISEFSKRVILADANLDKVLSAYNKHRDKPIREQAENIIHLFTLTNLGAPAAFKYFDTTIDRKRYTSTKEVLDATLIHQSITGLYETRIDLSQLGGDSGGSSGGSSGSETPGTSESATPESSGGSSGGSSMASNFTQFVLVDNGGTGDVTVAPSNFANGIAEWISSNSRSQAYKVTCSVRQSSAQNRKYTIKVEVPKGAWRSYLNMELTIPIFATNSDCELIVKAMQGLLKDGNPIPSAIAANSGIYGGSGGSMASNFTQFVLVDNGGTGDVTVAPSNFANGIAEWISSNSRSQAYKVTCSVRQSSAQNRKYTIKVEVPKGAWRSYLNMELTIPIFATNSDCELIVKAMQGLLKDGNPIPSAIAANSGIYGGGSGGGSGGGSGGGSMASNFTQFVLVDNGGTGDVTVAPSNFANGIAEWISSNSRSQAYKVTCSVRQSSAQNRKYTIKVEVPKGAWRSYLNMELTIPIFATNSDCELIVKAMQGLLKDGNPIPSAIAANSGIYGGSGGSMASNFTQFVLVDNGGTGDVTVAPSNFANGIAEWISSNSRSQAYKVTCSVRQSSAQNRKYTIKVEVPKGAWRSYLNMELTIPIFATNSDCELIVKAMQGLLKDGNPIPSAIAANSGIYAEAAAKEAAAKEAAAKEAAAKALEAEAAAKEAAAKEAAAKEAAAKATLNIEDEHRLHETSKEPDVSLGSTWLSDFPQAWAETGGMGLAVRQAPLIIPLKATSTPVSIKQYPMSQEARLGIKPHIQRLLDQGILVPCQSPWNTPLLPVKKPGTNDYRPVQDLREVNKRVEDIHPTVPNPYNLLSGLPPSHQWYTVLDLKDAFFCLRLHPTSQPLFAFEWRDPEMGISGQLTWTRLPQGFKNSPTLFNEALHRDLADFRIQHPDLILLQYVDDLLLAATSELDCQQGTRALLQTLGNLGYRASAKKAQICQKQVKYLGYLLKEGQRWLTEARKETVMGQPTPKTPRQLREFLGKAGFCRLFIPGFAEMAAPLYPLTKPGTLFNWGPDQQKAYQEIKQALLTAPALGLPDLTKPFELFVDEKQGYAKGVLTQKLGPWRRPVAYLSKKLDPVAAGWPPCLRMVAAIAVLTKDAGKLTMGQPLVILAPHAVEALVKQPPDRWLSNARMTHYQALLLDTDRVQFGPVVALNPATLLPLPEEGLQHNCLDILAEAHGTRPDLTDQPLPDADHTWYTDGSSLLQEGQRKAGAAVTTETEVIWAKALPAGTSAQRAELIALTQALKMAEGKKLNVYTDSRYAFATAHIHGEIYRRRGWLTSEGKEIKNKDEILALLKALFLPKRLSIIHCPGHQKGHSAEARGNRMADQAARKAAITETPDTSTLLKRTADGSEFESPKKKAKVE

SEQ ID NO: 16070 - protein, 2631 aa, synthetic construct
MPAAKRVKLDGGDKKYSIGLDIGTNSVGWAVITDEYKVPSKKFKVLGNTDRHSIKKNLIGALLFDSGETAEATRLKRTARRRYTRRKNRICYLQEIFSNEMAKVDDSFFHRLEESFLVEEDKKHERHPIFGNIVDEVAYHEKYPTIYHLRKKLVDSTDKADLRLIYLALAHMIKFRGHFLIEGDLNPDNSDVDKLFIQLVQTYNQLFEENPINASGVDAKAILSARLSKSRRLENLIAQLPGEKKNGLFGNLIALSLGLTPNFKSNFDLAEDAKLQLSKDTYDDDLDNLLAQIGDQYADLFLAAKNLSDAILLSDILRVNTEITKAPLSASMIKRYDEHHQDLTLLKALVRQQLPEKYKEIFFDQSKNGYAGYIDGGASQEEFYKFIKPILEKMDGTEELLVKLNREDLLRKQRTFDNGSIPHQIHLGELHAILRRQEDFYPFLKDNREKIEKILTFRIPYYVGPLARGNSRFAWMTRKSEETITPWNFEEVVDKGASAQSFIERMTNFDKNLPNEKVLPKHSLLYEYFTVYNELTKVKYVTEGMRKPAFLSGEQKKAIVDLLFKTNRKVTVKQLKEDYFKKIECFDSVEISGVEDRFNASLGTYHDLLKIIKDKDFLDNEENEDILEDIVLTLTLFEDREMIEERLKTYAHLFDDKVMKQLKRRRYTGWGRLSRKLINGIRDKQSGKTILDFLKSDGFANRNFMQLIHDDSLTFKEDIQKAQVSGQGDSLHEHIANLAGSPAIKKGILQTVKVVDELVKVMGRHKPENIVIEMARENQTTQKGQKNSRERMKRIEEGIKELGSQILKEHPVENTQLQNEKLYLYYLQNGRDMYVDQELDINRLSDYDVDHIVPQSFLKDDSIDNKVLTRSDKARGKSDNVPSEEVVKKMKNYWRQLLNAKLITQRKFDNLTKAERGGLSELDKAGFIKRQLVETRQITKHVAQILDSRMNTKYDENDKLIREVKVITLKSKLVSDFRKDFQFYKVREINNYHHAHDAYLNAVVGTALIKKYPKLESEFVYGDYKVYDVRKMIAKSEQEIGKATAKYFFYSNIMNFFKTEITLANGEIRKRPLIETNGETGEIVWDKGRDFATVRKVLSMPQVNIVKKTEVQTGGFSKESILPKRNSDKLIARKKDWDPKKYGGFDSPTVAYSVLVVAKVEKGKSKKLKSVKELLGITIMERSSFEKNPIDFLEAKGYKEVKKDLIIKLPKYSLFELENGRKRMLASAGELQKGNELALPSKYVNFLYLASHYEKLKGSPEDNEQKQLFVEQHKHYLDEIIEQISEFSKRVILADANLDKVLSAYNKHRDKPIREQAENIIHLFTLTNLGAPAAFKYFDTTIDRKRYTSTKEVLDATLIHQSITGLYETRIDLSQLGGDSGGSSGGSSGSETPGTSESATPESSGGSSGGSSMASNFTQFVLVDNGGTGDVTVAPSNFANGIAEWISSNSRSQAYKVTCSVRQSSAQNRKYTIKVEVPKGAWRSYLNMELTIPIFATNSDCELIVKAMQGLLKDGNPIPSAIAANSGIYGGSGGSMASNFTQFVLVDNGGTGDVTVAPSNFANGIAEWISSNSRSQAYKVTCSVRQSSAQNRKYTIKVEVPKGAWRSYLNMELTIPIFATNSDCELIVKAMQGLLKDGNPIPSAIAANSGIYGGGSGGGSGGGSGGGSMASNFTQFVLVDNGGTGDVTVAPSNFANGIAEWISSNSRSQAYKVTCSVRQSSAQNRKYTIKVEVPKGAWRSYLNMELTIPIFATNSDCELIVKAMQGLLKDGNPIPSAIAANSGIYGGSGGSMASNFTQFVLVDNGGTGDVTVAPSNFANGIAEWISSNSRSQAYKVTCSVRQSSAQNRKYTIKVEVPKGAWRSYLNMELTIPIFATNSDCELIVKAMQGLLKDGNPIPSAIAANSGIYSGGSSGGSSGSETPGTSESATPESSGGSSGGSSTLNIEDEHRLHETSKEPDVSLGSTWLSDFPQAWAETGGMGLAVRQAPLIIPLKATSTPVSIKQYPMSQEARLGIKPHIQRLLDQGILVPCQSPWNTPLLPVKKPGTNDYRPVQDLREVNKRVEDIHPTVPNPYNLLSGLPPSHQWYTVLDLKDAFFCLRLHPTSQPLFAFEWRDPEMGISGQLTWTRLPQGFKNSPTLFNEALHRDLADFRIQHPDLILLQYVDDLLLAATSELDCQQGTRALLQTLGNLGYRASAKKAQICQKQVKYLGYLLKEGQRWLTEARKETVMGQPTPKTPRQLREFLGKAGFCRLFIPGFAEMAAPLYPLTKPGTLFNWGPDQQKAYQEIKQALLTAPALGLPDLTKPFELFVDEKQGYAKGVLTQKLGPWRRPVAYLSKKLDPVAAGWPPCLRMVAAIAVLTKDAGKLTMGQPLVILAPHAVEALVKQPPDRWLSNARMTHYQALLLDTDRVQFGPVVALNPATLLPLPEEGLQHNCLDILAEAHGTRPDLTDQPLPDADHTWYTDGSSLLQEGQRKAGAAVTTETEVIWAKALPAGTSAQRAELIALTQALKMAEGKKLNVYTDSRYAFATAHIHGEIYRRRGWLTSEGKEIKNKDEILALLKALFLPKRLSIIHCPGHQKGHSAEARGNRMADQAARKAAITETPDTSTLLKRTADGSEFESPKKKAKVE

SEQ ID NO: 16071 - protein, 2616 aa, synthetic construct
MPAAKRVKLDGGDKKYSIGLDIGTNSVGWAVITDEYKVPSKKFKVLGNTDRHSIKKNLIGALLFDSGETAEATRLKRTARRRYTRRKNRICYLQEIFSNEMAKVDDSFFHRLEESFLVEEDKKHERHPIFGNIVDEVAYHEKYPTIYHLRKKLVDSTDKADLRLIYLALAHMIKFRGHFLIEGDLNPDNSDVDKLFIQLVQTYNQLFEENPINASGVDAKAILSARLSKSRRLENLIAQLPGEKKNGLFGNLIALSLGLTPNFKSNFDLAEDAKLQLSKDTYDDDLDNLLAQIGDQYADLFLAAKNLSDAILLSDILRVNTEITKAPLSASMIKRYDEHHQDLTLLKALVRQQLPEKYKEIFFDQSKNGYAGYIDGGASQEEFYKFIKPILEKMDGTEELLVKLNREDLLRKQRTFDNGSIPHQIHLGELHAILRRQEDFYPFLKDNREKIEKILTFRIPYYVGPLARGNSRFAWMTRKSEETITPWNFEEVVDKGASAQSFIERMTNFDKNLPNEKVLPKHSLLYEYFTVYNELTKVKYVTEGMRKPAFLSGEQKKAIVDLLFKTNRKVTVKQLKEDYFKKIECFDSVEISGVEDRFNASLGTYHDLLKIIKDKDFLDNEENEDILEDIVLTLTLFEDREMIEERLKTYAHLFDDKVMKQLKRRRYTGWGRLSRKLINGIRDKQSGKTILDFLKSDGFANRNFMQLIHDDSLTFKEDIQKAQVSGQGDSLHEHIANLAGSPAIKKGILQTVKVVDELVKVMGRHKPENIVIEMARENQTTQKGQKNSRERMKRIEEGIKELGSQILKEHPVENTQLQNEKLYLYYLQNGRDMYVDQELDINRLSDYDVDHIVPQSFLKDDSIDNKVLTRSDKARGKSDNVPSEEVVKKMKNYWRQLLNAKLITQRKFDNLTKAERGGLSELDKAGFIKRQLVETRQITKHVAQILDSRMNTKYDENDKLIREVKVITLKSKLVSDFRKDFQFYKVREINNYHHAHDAYLNAVVGTALIKKYPKLESEFVYGDYKVYDVRKMIAKSEQEIGKATAKYFFYSNIMNFFKTEITLANGEIRKRPLIETNGETGEIVWDKGRDFATVRKVLSMPQVNIVKKTEVQTGGFSKESILPKRNSDKLIARKKDWDPKKYGGFDSPTVAYSVLVVAKVEKGKSKKLKSVKELLGITIMERSSFEKNPIDFLEAKGYKEVKKDLIIKLPKYSLFELENGRKRMLASAGELQKGNELALPSKYVNFLYLASHYEKLKGSPEDNEQKQLFVEQHKHYLDEIIEQISEFSKRVILADANLDKVLSAYNKHRDKPIREQAENIIHLFTLTNLGAPAAFKYFDTTIDRKRYTSTKEVLDATLIHQSITGLYETRIDLSQLGGDSGGSSGGSSGSETPGTSESATPESSGGSSGGSSMASNFTQFVLVDNGGTGDVTVAPSNFANGIAEWISSNSRSQAYKVTCSVRQSSAQNRKYTIKVEVPKGAWRSYLNMELTIPIFATNSDCELIVKAMQGLLKDGNPIPSAIAANSGIYGGSGGSMASNFTQFVLVDNGGTGDVTVAPSNFANGIAEWISSNSRSQAYKVTCSVRQSSAQNRKYTIKVEVPKGAWRSYLNMELTIPIFATNSDCELIVKAMQGLLKDGNPIPSAIAANSGIYGGGSGGGSGGGSGGGSMASNFTQFVLVDNGGTGDVTVAPSNFANGIAEWISSNSRSQAYKVTCSVRQSSAQNRKYTIKVEVPKGAWRSYLNMELTIPIFATNSDCELIVKAMQGLLKDGNPIPSAIAANSGIYGGSGGSMASNFTQFVLVDNGGTGDVTVAPSNFANGIAEWISSNSRSQAYKVTCSVRQSSAQNRKYTIKVEVPKGAWRSYLNMELTIPIFATNSDCELIVKAMQGLLKDGNPIPSAIAANSGIYGSSGSSGSSGSSGSSGSSTLNIEDEHRLHETSKEPDVSLGSTWLSDFPQAWAETGGMGLAVRQAPLIIPLKATSTPVSIKQYPMSQEARLGIKPHIQRLLDQGILVPCQSPWNTPLLPVKKPGTNDYRPVQDLREVNKRVEDIHPTVPNPYNLLSGLPPSHQWYTVLDLKDAFFCLRLHPTSQPLFAFEWRDPEMGISGQLTWTRLPQGFKNSPTLFNEALHRDLADFRIQHPDLILLQYVDDLLLAATSELDCQQGTRALLQTLGNLGYRASAKKAQICQKQVKYLGYLLKEGQRWLTEARKETVMGQPTPKTPRQLREFLGKAGFCRLFIPGFAEMAAPLYPLTKPGTLFNWGPDQQKAYQEIKQALLTAPALGLPDLTKPFELFVDEKQGYAKGVLTQKLGPWRRPVAYLSKKLDPVAAGWPPCLRMVAAIAVLTKDAGKLTMGQPLVILAPHAVEALVKQPPDRWLSNARMTHYQALLLDTDRVQFGPVVALNPATLLPLPEEGLQHNCLDILAEAHGTRPDLTDQPLPDADHTWYTDGSSLLQEGQRKAGAAVTTETEVIWAKALPAGTSAQRAELIALTQALKMAEGKKLNVYTDSRYAFATAHIHGEIYRRRGWLTSEGKEIKNKDEILALLKALFLPKRLSIIHCPGHQKGHSAEARGNRMADQAARKAAITETPDTSTLLKRTADGSEFESPKKKAKVE

SEQ ID NO: 16072 - protein, 2609 aa, synthetic construct
MPAAKRVKLDGGDKKYSIGLDIGTNSVGWAVITDEYKVPSKKFKVLGNTDRHSIKKNLIGALLFDSGETAEATRLKRTARRRYTRRKNRICYLQEIFSNEMAKVDDSFFHRLEESFLVEEDKKHERHPIFGNIVDEVAYHEKYPTIYHLRKKLVDSTDKADLRLIYLALAHMIKFRGHFLIEGDLNPDNSDVDKLFIQLVQTYNQLFEENPINASGVDAKAILSARLSKSRRLENLIAQLPGEKKNGLFGNLIALSLGLTPNFKSNFDLAEDAKLQLSKDTYDDDLDNLLAQIGDQYADLFLAAKNLSDAILLSDILRVNTEITKAPLSASMIKRYDEHHQDLTLLKALVRQQLPEKYKEIFFDQSKNGYAGYIDGGASQEEFYKFIKPILEKMDGTEELLVKLNREDLLRKQRTFDNGSIPHQIHLGELHAILRRQEDFYPFLKDNREKIEKILTFRIPYYVGPLARGNSRFAWMTRKSEETITPWNFEEVVDKGASAQSFIERMTNFDKNLPNEKVLPKHSLLYEYFTVYNELTKVKYVTEGMRKPAFLSGEQKKAIVDLLFKTNRKVTVKQLKEDYFKKIECFDSVEISGVEDRFNASLGTYHDLLKIIKDKDFLDNEENEDILEDIVLTLTLFEDREMIEERLKTYAHLFDDKVMKQLKRRRYTGWGRLSRKLINGIRDKQSGKTILDFLKSDGFANRNFMQLIHDDSLTFKEDIQKAQVSGQGDSLHEHIANLAGSPAIKKGILQTVKVVDELVKVMGRHKPENIVIEMARENQTTQKGQKNSRERMKRIEEGIKELGSQILKEHPVENTQLQNEKLYLYYLQNGRDMYVDQELDINRLSDYDVDHIVPQSFLKDDSIDNKVLTRSDKARGKSDNVPSEEVVKKMKNYWRQLLNAKLITQRKFDNLTKAERGGLSELDKAGFIKRQLVETRQITKHVAQILDSRMNTKYDENDKLIREVKVITLKSKLVSDFRKDFQFYKVREINNYHHAHDAYLNAVVGTALIKKYPKLESEFVYGDYKVYDVRKMIAKSEQEIGKATAKYFFYSNIMNFFKTEITLANGEIRKRPLIETNGETGEIVWDKGRDFATVRKVLSMPQVNIVKKTEVQTGGFSKESILPKRNSDKLIARKKDWDPKKYGGFDSPTVAYSVLVVAKVEKGKSKKLKSVKELLGITIMERSSFEKNPIDFLEAKGYKEVKKDLIIKLPKYSLFELENGRKRMLASAGELQKGNELALPSKYVNFLYLASHYEKLKGSPEDNEQKQLFVEQHKHYLDEIIEQISEFSKRVILADANLDKVLSAYNKHRDKPIREQAENIIHLFTLTNLGAPAAFKYFDTTIDRKRYTSTKEVLDATLIHQSITGLYETRIDLSQLGGDSGGSSGGSSGSETPGTSESATPESSGGSSGGSSMASNFTQFVLVDNGGTGDVTVAPSNFANGIAEWISSNSRSQAYKVTCSVRQSSAQNRKYTIKVEVPKGAWRSYLNMELTIPIFATNSDCELIVKAMQGLLKDGNPIPSAIAANSGIYGGSGGSMASNFTQFVLVDNGGTGDVTVAPSNFANGIAEWISSNSRSQAYKVTCSVRQSSAQNRKYTIKVEVPKGAWRSYLNMELTIPIFATNSDCELIVKAMQGLLKDGNPIPSAIAANSGIYGGGSGGGSGGGSGGGSMASNFTQFVLVDNGGTGDVTVAPSNFANGIAEWISSNSRSQAYKVTCSVRQSSAQNRKYTIKVEVPKGAWRSYLNMELTIPIFATNSDCELIVKAMQGLLKDGNPIPSAIAANSGIYGGSGGSMASNFTQFVLVDNGGTGDVTVAPSNFANGIAEWISSNSRSQAYKVTCSVRQSSAQNRKYTIKVEVPKGAWRSYLNMELTIPIFATNSDCELIVKAMQGLLKDGNPIPSAIAANSGIYGSSGGGEAAAKTLNIEDEHRLHETSKEPDVSLGSTWLSDFPQAWAETGGMGLAVRQAPLIIPLKATSTPVSIKQYPMSQEARLGIKPHIQRLLDQGILVPCQSPWNTPLLPVKKPGTNDYRPVQDLREVNKRVEDIHPTVPNPYNLLSGLPPSHQWYTVLDLKDAFFCLRLHPTSQPLFAFEWRDPEMGISGQLTWTRLPQGFKNSPTLFNEALHRDLADFRIQHPDLILLQYVDDLLLAATSELDCQQGTRALLQTLGNLGYRASAKKAQICQKQVKYLGYLLKEGQRWLTEARKETVMGQPTPKTPRQLREFLGKAGFCRLFIPGFAEMAAPLYPLTKPGTLFNWGPDQQKAYQEIKQALLTAPALGLPDLTKPFELFVDEKQGYAKGVLTQKLGPWRRPVAYLSKKLDPVAAGWPPCLRMVAAIAVLTKDAGKLTMGQPLVILAPHAVEALVKQPPDRWLSNARMTHYQALLLDTDRVQFGPVVALNPATLLPLPEEGLQHNCLDILAEAHGTRPDLTDQPLPDADHTWYTDGSSLLQEGQRKAGAAVTTETEVIWAKALPAGTSAQRAELIALTQALKMAEGKKLNVYTDSRYAFATAHIHGEIYRRRGWLTSEGKEIKNKDEILALLKALFLPKRLSIIHCPGHQKGHSAEARGNRMADQAARKAAITETPDTSTLLKRTADGSEFESPKKKAKVE

SEQ ID NO: 16073 - protein, 2250 aa, synthetic construct
MPAAKRVKLDGGDKKYSIGLDIGTNSVGWAVITDEYKVPSKKFKVLGNTDRHSIKKNLIGALLFDSGETAEATRLKRTARRRYTRRKNRICYLQEIFSNEMAKVDDSFFHRLEESFLVEEDKKHERHPIFGNIVDEVAYHEKYPTIYHLRKKLVDSTDKADLRLIYLALAHMIKFRGHFLIEGDLNPDNSDVDKLFIQLVQTYNQLFEENPINASGVDAKAILSARLSKSRRLENLIAQLPGEKKNGLFGNLIALSLGLTPNFKSNFDLAEDAKLQLSKDTYDDDLDNLLAQIGDQYADLFLAAKNLSDAILLSDILRVNTEITKAPLSASMIKRYDEHHQDLTLLKALVRQQLPEKYKEIFFDQSKNGYAGYIDGGASQEEFYKFIKPILEKMDGTEELLVKLNREDLLRKQRTFDNGSIPHQIHLGELHAILRRQEDFYPFLKDNREKIEKILTFRIPYYVGPLARGNSRFAWMTRKSEETITPWNFEEVVDKGASAQSFIERMTNFDKNLPNEKVLPKHSLLYEYFTVYNELTKVKYVTEGMRKPAFLSGEQKKAIVDLLFKTNRKVTVKQLKEDYFKKIECFDSVEISGVEDRFNASLGTYHDLLKIIKDKDFLDNEENEDILEDIVLTLTLFEDREMIEERLKTYAHLFDDKVMKQLKRRRYTGWGRLSRKLINGIRDKQSGKTILDFLKSDGFANRNFMQLIHDDSLTFKEDIQKAQVSGQGDSLHEHIANLAGSPAIKKGILQTVKVVDELVKVMGRHKPENIVIEMARENQTTQKGQKNSRERMKRIEEGIKELGSQILKEHPVENTQLQNEKLYLYYLQNGRDMYVDQELDINRLSDYDVDHIVPQSFLKDDSIDNKVLTRSDKARGKSDNVPSEEVVKKMKNYWRQLLNAKLITQRKFDNLTKAERGGLSELDKAGFIKRQLVETRQITKHVAQILDSRMNTKYDENDKLIREVKVITLKSKLVSDFRKDFQFYKVREINNYHHAHDAYLNAVVGTALIKKYPKLESEFVYGDYKVYDVRKMIAKSEQEIGKATAKYFFYSNIMNFFKTEITLANGEIRKRPLIETNGETGEIVWDKGRDFATVRKVLSMPQVNIVKKTEVQTGGFSKESILPKRNSDKLIARKKDWDPKKYGGFDSPTVAYSVLVVAKVEKGKSKKLKSVKELLGITIMERSSFEKNPIDFLEAKGYKEVKKDLIIKLPKYSLFELENGRKRMLASAGELQKGNELALPSKYVNFLYLASHYEKLKGSPEDNEQKQLFVEQHKHYLDEIIEQISEFSKRVILADANLDKVLSAYNKHRDKPIREQAENIIHLFTLTNLGAPAAFKYFDTTIDRKRYTSTKEVLDATLIHQSITGLYETRIDLSQLGGDGSSGSSGSSGSSGSSGSSMASNFTQFVLVDNGGTGDVTVAPSNFANGIAEWISSNSRSQAYKVTCSVRQSSAQNRKYTIKVEVPKGAWRSYLNMELTIPIFATNSDCELIVKAMQGLLKDGNPIPSAIAANSGIYAEAAAKEAAAKEAAAKEAAAKALEAEAAAKEAAAKEAAAKEAAAKATLNIEDEHRLHETSKEPDVSLGSTWLSDFPQAWAETGGMGLAVRQAPLIIPLKATSTPVSIKQYPMSQEARLGIKPHIQRLLDQGILVPCQSPWNTPLLPVKKPGTNDYRPVQDLREVNKRVEDIHPTVPNPYNLLSGLPPSHQWYTVLDLKDAFFCLRLHPTSQPLFAFEWRDPEMGISGQLTWTRLPQGFKNSPTLFNEALHRDLADFRIQHPDLILLQYVDDLLLAATSELDCQQGTRALLQTLGNLGYRASAKKAQICQKQVKYLGYLLKEGQRWLTEARKETVMGQPTPKTPRQLREFLGKAGFCRLFIPGFAEMAAPLYPLTKPGTLFNWGPDQQKAYQEIKQALLTAPALGLPDLTKPFELFVDEKQGYAKGVLTQKLGPWRRPVAYLSKKLDPVAAGWPPCLRMVAAIAVLTKDAGKLTMGQPLVILAPHAVEALVKQPPDRWLSNARMTHYQALLLDTDRVQFGPVVALNPATLLPLPEEGLQHNCLDILAEAHGTRPDLTDQPLPDADHTWYTDGSSLLQEGQRKAGAAVTTETEVIWAKALPAGTSAQRAELIALTQALKMAEGKKLNVYTDSRYAFATAHIHGEIYRRRGWLTSEGKEIKNKDEILALLKALFLPKRLSIIHCPGHQKGHSAEARGNRMADQAARKAAITETPDTSTLLKRTADGSEFESPKKKAKVE

SEQ ID NO: 16074 - protein, 2237 aa, synthetic construct
MPAAKRVKLDGGDKKYSIGLDIGTNSVGWAVITDEYKVPSKKFKVLGNTDRHSIKKNLIGALLFDSGETAEATRLKRTARRRYTRRKNRICYLQEIFSNEMAKVDDSFFHRLEESFLVEEDKKHERHPIFGNIVDEVAYHEKYPTIYHLRKKLVDSTDKADLRLIYLALAHMIKFRGHFLIEGDLNPDNSDVDKLFIQLVQTYNQLFEENPINASGVDAKAILSARLSKSRRLENLIAQLPGEKKNGLFGNLIALSLGLTPNFKSNFDLAEDAKLQLSKDTYDDDLDNLLAQIGDQYADLFLAAKNLSDAILLSDILRVNTEITKAPLSASMIKRYDEHHQDLTLLKALVRQQLPEKYKEIFFDQSKNGYAGYIDGGASQEEFYKFIKPILEKMDGTEELLVKLNREDLLRKQRTFDNGSIPHQIHLGELHAILRRQEDFYPFLKDNREKIEKILTFRIPYYVGPLARGNSRFAWMTRKSEETITPWNFEEVVDKGASAQSFIERMTNFDKNLPNEKVLPKHSLLYEYFTVYNELTKVKYVTEGMRKPAFLSGEQKKAIVDLLFKTNRKVTVKQLKEDYFKKIECFDSVEISGVEDRFNASLGTYHDLLKIIKDKDFLDNEENEDILEDIVLTLTLFEDREMIEERLKTYAHLFDDKVMKQLKRRRYTGWGRLSRKLINGIRDKQSGKTILDFLKSDGFANRNFMQLIHDDSLTFKEDIQKAQVSGQGDSLHEHIANLAGSPAIKKGILQTVKVVDELVKVMGRHKPENIVIEMARENQTTQKGQKNSRERMKRIEEGIKELGSQILKEHPVENTQLQNEKLYLYYLQNGRDMYVDQELDINRLSDYDVDHIVPQSFLKDDSIDNKVLTRSDKARGKSDNVPSEEVVKKMKNYWRQLLNAKLITQRKFDNLTKAERGGLSELDKAGFIKRQLVETRQITKHVAQILDSRMNTKYDENDKLIREVKVITLKSKLVSDFRKDFQFYKVREINNYHHAHDAYLNAVVGTALIKKYPKLESEFVYGDYKVYDVRKMIAKSEQEIGKATAKYFFYSNIMNFFKTEITLANGEIRKRPLIETNGETGEIVWDKGRDFATVRKVLSMPQVNIVKKTEVQTGGFSKESILPKRNSDKLIARKKDWDPKKYGGFDSPTVAYSVLVVAKVEKGKSKKLKSVKELLGITIMERSSFEKNPIDFLEAKGYKEVKKDLIIKLPKYSLFELENGRKRMLASAGELQKGNELALPSKYVNFLYLASHYEKLKGSPEDNEQKQLFVEQHKHYLDEIIEQISEFSKRVILADANLDKVLSAYNKHRDKPIREQAENIIHLFTLTNLGAPAAFKYFDTTIDRKRYTSTKEVLDATLIHQSITGLYETRIDLSQLGGDGSSGSSGSSGSSGSSGSSMASNFTQFVLVDNGGTGDVTVAPSNFANGIAEWISSNSRSQAYKVTCSVRQSSAQNRKYTIKVEVPKGAWRSYLNMELTIPIFATNSDCELIVKAMQGLLKDGNPIPSAIAANSGIYSGGSSGGSSGSETPGTSESATPESSGGSSGGSSTLNIEDEHRLHETSKEPDVSLGSTWLSDFPQAWAETGGMGLAVRQAPLIIPLKATSTPVSIKQYPMSQEARLGIKPHIQRLLDQGILVPCQSPWNTPLLPVKKPGTNDYRPVQDLREVNKRVEDIHPTVPNPYNLLSGLPPSHQWYTVLDLKDAFFCLRLHPTSQPLFAFEWRDPEMGISGQLTWTRLPQGFKNSPTLFNEALHRDLADFRIQHPDLILLQYVDDLLLAATSELDCQQGTRALLQTLGNLGYRASAKKAQICQKQVKYLGYLLKEGQRWLTEARKETVMGQPTPKTPRQLREFLGKAGFCRLFIPGFAEMAAPLYPLTKPGTLFNWGPDQQKAYQEIKQALLTAPALGLPDLTKPFELFVDEKQGYAKGVLTQKLGPWRRPVAYLSKKLDPVAAGWPPCLRMVAAIAVLTKDAGKLTMGQPLVILAPHAVEALVKQPPDRWLSNARMTHYQALLLDTDRVQFGPVVALNPATLLPLPEEGLQHNCLDILAEAHGTRPDLTDQPLPDADHTWYTDGSSLLQEGQRKAGAAVTTETEVIWAKALPAGTSAQRAELIALTQALKMAEGKKLNVYTDSRYAFATAHIHGEIYRRRGWLTSEGKEIKNKDEILALLKALFLPKRLSIIHCPGHQKGHSAEARGNRMADQAARKAAITETPDTSTLLKRTADGSEFESPKKKAKVE

SEQ ID NO: 16075 - protein, 2222 aa, synthetic construct
MPAAKRVKLDGGDKKYSIGLDIGTNSVGWAVITDEYKVPSKKFKVLGNTDRHSIKKNLIGALLFDSGETAEATRLKRTARRRYTRRKNRICYLQEIFSNEMAKVDDSFFHRLEESFLVEEDKKHERHPIFGNIVDEVAYHEKYPTIYHLRKKLVDSTDKADLRLIYLALAHMIKFRGHFLIEGDLNPDNSDVDKLFIQLVQTYNQLFEENPINASGVDAKAILSARLSKSRRLENLIAQLPGEKKNGLFGNLIALSLGLTPNFKSNFDLAEDAKLQLSKDTYDDDLDNLLAQIGDQYADLFLAAKNLSDAILLSDILRVNTEITKAPLSASMIKRYDEHHQDLTLLKALVRQQLPEKYKEIFFDQSKNGYAGYIDGGASQEEFYKFIKPILEKMDGTEELLVKLNREDLLRKQRTFDNGSIPHQIHLGELHAILRRQEDFYPFLKDNREKIEKILTFRIPYYVGPLARGNSRFAWMTRKSEETITPWNFEEVVDKGASAQSFIERMTNFDKNLPNEKVLPKHSLLYEYFTVYNELTKVKYVTEGMRKPAFLSGEQKKAIVDLLFKTNRKVTVKQLKEDYFKKIECFDSVEISGVEDRFNASLGTYHDLLKIIKDKDFLDNEENEDILEDIVLTLTLFEDREMIEERLKTYAHLFDDKVMKQLKRRRYTGWGRLSRKLINGIRDKQSGKTILDFLKSDGFANRNFMQLIHDDSLTFKEDIQKAQVSGQGDSLHEHIANLAGSPAIKKGILQTVKVVDELVKVMGRHKPENIVIEMARENQTTQKGQKNSRERMKRIEEGIKELGSQILKEHPVENTQLQNEKLYLYYLQNGRDMYVDQELDINRLSDYDVDHIVPQSFLKDDSIDNKVLTRSDKARGKSDNVPSEEVVKKMKNYWRQLLNAKLITQRKFDNLTKAERGGLSELDKAGFIKRQLVETRQITKHVAQILDSRMNTKYDENDKLIREVKVITLKSKLVSDFRKDFQFYKVREINNYHHAHDAYLNAVVGTALIKKYPKLESEFVYGDYKVYDVRKMIAKSEQEIGKATAKYFFYSNIMNFFKTEITLANGEIRKRPLIETNGETGEIVWDKGRDFATVRKVLSMPQVNIVKKTEVQTGGFSKESILPKRNSDKLIARKKDWDPKKYGGFDSPTVAYSVLVVAKVEKGKSKKLKSVKELLGITIMERSSFEKNPIDFLEAKGYKEVKKDLIIKLPKYSLFELENGRKRMLASAGELQKGNELALPSKYVNFLYLASHYEKLKGSPEDNEQKQLFVEQHKHYLDEIIEQISEFSKRVILADANLDKVLSAYNKHRDKPIREQAENIIHLFTLTNLGAPAAFKYFDTTIDRKRYTSTKEVLDATLIHQSITGLYETRIDLSQLGGDGSSGSSGSSGSSGSSGSSMASNFTQFVLVDNGGTGDVTVAPSNFANGIAEWISSNSRSQAYKVTCSVRQSSAQNRKYTIKVEVPKGAWRSYLNMELTIPIFATNSDCELIVKAMQGLLKDGNPIPSAIAANSGIYGSSGSSGSSGSSGSSGSSTLNIEDEHRLHETSKEPDVSLGSTWLSDFPQAWAETGGMGLAVRQAPLIIPLKATSTPVSIKQYPMSQEARLGIKPHIQRLLDQGILVPCQSPWNTPLLPVKKPGTNDYRPVQDLREVNKRVEDIHPTVPNPYNLLSGLPPSHQWYTVLDLKDAFFCLRLHPTSQPLFAFEWRDPEMGISGQLTWTRLPQGFKNSPTLFNEALHRDLADFRIQHPDLILLQYVDDLLLAATSELDCQQGTRALLQTLGNLGYRASAKKAQICQKQVKYLGYLLKEGQRWLTEARKETVMGQPTPKTPRQLREFLGKAGFCRLFIPGFAEMAAPLYPLTKPGTLFNWGPDQQKAYQEIKQALLTAPALGLPDLTKPFELFVDEKQGYAKGVLTQKLGPWRRPVAYLSKKLDPVAAGWPPCLRMVAAIAVLTKDAGKLTMGQPLVILAPHAVEALVKQPPDRWLSNARMTHYQALLLDTDRVQFGPVVALNPATLLPLPEEGLQHNCLDILAEAHGTRPDLTDQPLPDADHTWYTDGSSLLQEGQRKAGAAVTTETEVIWAKALPAGTSAQRAELIALTQALKMAEGKKLNVYTDSRYAFATAHIHGEIYRRRGWLTSEGKEIKNKDEILALLKALFLPKRLSIIHCPGHQKGHSAEARGNRMADQAARKAAITETPDTSTLLKRTADGSEFESPKKKAKVE

SEQ ID NO: 16076 - protein, 2215 aa, synthetic construct
MPAAKRVKLDGGDKKYSIGLDIGTNSVGWAVITDEYKVPSKKFKVLGNTDRHSIKKNLIGALLFDSGETAEATRLKRTARRRYTRRKNRICYLQEIFSNEMAKVDDSFFHRLEESFLVEEDKKHERHPIFGNIVDEVAYHEKYPTIYHLRKKLVDSTDKADLRLIYLALAHMIKFRGHFLIEGDLNPDNSDVDKLFIQLVQTYNQLFEENPINASGVDAKAILSARLSKSRRLENLIAQLPGEKKNGLFGNLIALSLGLTPNFKSNFDLAEDAKLQLSKDTYDDDLDNLLAQIGDQYADLFLAAKNLSDAILLSDILRVNTEITKAPLSASMIKRYDEHHQDLTLLKALVRQQLPEKYKEIFFDQSKNGYAGYIDGGASQEEFYKFIKPILEKMDGTEELLVKLNREDLLRKQRTFDNGSIPHQIHLGELHAILRRQEDFYPFLKDNREKIEKILTFRIPYYVGPLARGNSRFAWMTRKSEETITPWNFEEVVDKGASAQSFIERMTNFDKNLPNEKVLPKHSLLYEYFTVYNELTKVKYVTEGMRKPAFLSGEQKKAIVDLLFKTNRKVTVKQLKEDYFKKIECFDSVEISGVEDRFNASLGTYHDLLKIIKDKDFLDNEENEDILEDIVLTLTLFEDREMIEERLKTYAHLFDDKVMKQLKRRRYTGWGRLSRKLINGIRDKQSGKTILDFLKSDGFANRNFMQLIHDDSLTFKEDIQKAQVSGQGDSLHEHIANLAGSPAIKKGILQTVKVVDELVKVMGRHKPENIVIEMARENQTTQKGQKNSRERMKRIEEGIKELGSQILKEHPVENTQLQNEKLYLYYLQNGRDMYVDQELDINRLSDYDVDHIVPQSFLKDDSIDNKVLTRSDKARGKSDNVPSEEVVKKMKNYWRQLLNAKLITQRKFDNLTKAERGGLSELDKAGFIKRQLVETRQITKHVAQILDSRMNTKYDENDKLIREVKVITLKSKLVSDFRKDFQFYKVREINNYHHAHDAYLNAVVGTALIKKYPKLESEFVYGDYKVYDVRKMIAKSEQEIGKATAKYFFYSNIMNFFKTEITLANGEIRKRPLIETNGETGEIVWDKGRDFATVRKVLSMPQVNIVKKTEVQTGGFSKESILPKRNSDKLIARKKDWDPKKYGGFDSPTVAYSVLVVAKVEKGKSKKLKSVKELLGITIMERSSFEKNPIDFLEAKGYKEVKKDLIIKLPKYSLFELENGRKRMLASAGELQKGNELALPSKYVNFLYLASHYEKLKGSPEDNEQKQLFVEQHKHYLDEIIEQISEFSKRVILADANLDKVLSAYNKHRDKPIREQAENIIHLFTLTNLGAPAAFKYFDTTIDRKRYTSTKEVLDATLIHQSITGLYETRIDLSQLGGDGSSGSSGSSGSSGSSGSSMASNFTQFVLVDNGGTGDVTVAPSNFANGIAEWISSNSRSQAYKVTCSVRQSSAQNRKYTIKVEVPKGAWRSYLNMELTIPIFATNSDCELIVKAMQGLLKDGNPIPSAIAANSGIYGSSGGGEAAAKTLNIEDEHRLHETSKEPDVSLGSTWLSDFPQAWAETGGMGLAVRQAPLIIPLKATSTPVSIKQYPMSQEARLGIKPHIQRLLDQGILVPCQSPWNTPLLPVKKPGTNDYRPVQDLREVNKRVEDIHPTVPNPYNLLSGLPPSHQWYTVLDLKDAFFCLRLHPTSQPLFAFEWRDPEMGISGQLTWTRLPQGFKNSPTLFNEALHRDLADFRIQHPDLILLQYVDDLLLAATSELDCQQGTRALLQTLGNLGYRASAKKAQICQKQVKYLGYLLKEGQRWLTEARKETVMGQPTPKTPRQLREFLGKAGFCRLFIPGFAEMAAPLYPLTKPGTLFNWGPDQQKAYQEIKQALLTAPALGLPDLTKPFELFVDEKQGYAKGVLTQKLGPWRRPVAYLSKKLDPVAAGWPPCLRMVAAIAVLTKDAGKLTMGQPLVILAPHAVEALVKQPPDRWLSNARMTHYQALLLDTDRVQFGPVVALNPATLLPLPEEGLQHNCLDILAEAHGTRPDLTDQPLPDADHTWYTDGSSLLQEGQRKAGAAVTTETEVIWAKALPAGTSAQRAELIALTQALKMAEGKKLNVYTDSRYAFATAHIHGEIYRRRGWLTSEGKEIKNKDEILALLKALFLPKRLSIIHCPGHQKGHSAEARGNRMADQAARKAAITETPDTSTLLKRTADGSEFESPKKKAKVE

SEQ ID NO: 16077 - protein, 2373 aa, synthetic construct
MPAAKRVKLDGGDKKYSIGLDIGTNSVGWAVITDEYKVPSKKFKVLGNTDRHSIKKNLIGALLFDSGETAEATRLKRTARRRYTRRKNRICYLQEIFSNEMAKVDDSFFHRLEESFLVEEDKKHERHPIFGNIVDEVAYHEKYPTIYHLRKKLVDSTDKADLRLIYLALAHMIKFRGHFLIEGDLNPDNSDVDKLFIQLVQTYNQLFEENPINASGVDAKAILSARLSKSRRLENLIAQLPGEKKNGLFGNLIALSLGLTPNFKSNFDLAEDAKLQLSKDTYDDDLDNLLAQIGDQYADLFLAAKNLSDAILLSDILRVNTEITKAPLSASMIKRYDEHHQDLTLLKALVRQQLPEKYKEIFFDQSKNGYAGYIDGGASQEEFYKFIKPILEKMDGTEELLVKLNREDLLRKQRTFDNGSIPHQIHLGELHAILRRQEDFYPFLKDNREKIEKILTFRIPYYVGPLARGNSRFAWMTRKSEETITPWNFEEVVDKGASAQSFIERMTNFDKNLPNEKVLPKHSLLYEYFTVYNELTKVKYVTEGMRKPAFLSGEQKKAIVDLLFKTNRKVTVKQLKEDYFKKIECFDSVEISGVEDRFNASLGTYHDLLKIIKDKDFLDNEENEDILEDIVLTLTLFEDREMIEERLKTYAHLFDDKVMKQLKRRRYTGWGRLSRKLINGIRDKQSGKTILDFLKSDGFANRNFMQLIHDDSLTFKEDIQKAQVSGQGDSLHEHIANLAGSPAIKKGILQTVKVVDELVKVMGRHKPENIVIEMARENQTTQKGQKNSRERMKRIEEGIKELGSQILKEHPVENTQLQNEKLYLYYLQNGRDMYVDQELDINRLSDYDVDHIVPQSFLKDDSIDNKVLTRSDKARGKSDNVPSEEVVKKMKNYWRQLLNAKLITQRKFDNLTKAERGGLSELDKAGFIKRQLVETRQITKHVAQILDSRMNTKYDENDKLIREVKVITLKSKLVSDFRKDFQFYKVREINNYHHAHDAYLNAVVGTALIKKYPKLESEFVYGDYKVYDVRKMIAKSEQEIGKATAKYFFYSNIMNFFKTEITLANGEIRKRPLIETNGETGEIVWDKGRDFATVRKVLSMPQVNIVKKTEVQTGGFSKESILPKRNSDKLIARKKDWDPKKYGGFDSPTVAYSVLVVAKVEKGKSKKLKSVKELLGITIMERSSFEKNPIDFLEAKGYKEVKKDLIIKLPKYSLFELENGRKRMLASAGELQKGNELALPSKYVNFLYLASHYEKLKGSPEDNEQKQLFVEQHKHYLDEIIEQISEFSKRVILADANLDKVLSAYNKHRDKPIREQAENIIHLFTLTNLGAPAAFKYFDTTIDRKRYTSTKEVLDATLIHQSITGLYETRIDLSQLGGDGSSGSSGSSGSSGSSGSSMASNFTQFVLVDNGGTGDVTVAPSNFANGIAEWISSNSRSQAYKVTCSVRQSSAQNRKYTIKVEVPKGAWRSYLNMELTIPIFATNSDCELIVKAMQGLLKDGNPIPSAIAANSGIYGGSGGSMASNFTQFVLVDNGGTGDVTVAPSNFANGIAEWISSNSRSQAYKVTCSVRQSSAQNRKYTIKVEVPKGAWRSYLNMELTIPIFATNSDCELIVKAMQGLLKDGNPIPSAIAANSGIYAEAAAKEAAAKEAAAKEAAAKALEAEAAAKEAAAKEAAAKEAAAKATLNIEDEHRLHETSKEPDVSLGSTWLSDFPQAWAETGGMGLAVRQAPLIIPLKATSTPVSIKQYPMSQEARLGIKPHIQRLLDQGILVPCQSPWNTPLLPVKKPGTNDYRPVQDLREVNKRVEDIHPTVPNPYNLLSGLPPSHQWYTVLDLKDAFFCLRLHPTSQPLFAFEWRDPEMGISGQLTWTRLPQGFKNSPTLFNEALHRDLADFRIQHPDLILLQYVDDLLLAATSELDCQQGTRALLQTLGNLGYRASAKKAQICQKQVKYLGYLLKEGQRWLTEARKETVMGQPTPKTPRQLREFLGKAGFCRLFIPGFAEMAAPLYPLTKPGTLFNWGPDQQKAYQEIKQALLTAPALGLPDLTKPFELFVDEKQGYAKGVLTQKLGPWRRPVAYLSKKLDPVAAGWPPCLRMVAAIAVLTKDAGKLTMGQPLVILAPHAVEALVKQPPDRWLSNARMTHYQALLLDTDRVQFGPVVALNPATLLPLPEEGLQHNCLDILAEAHGTRPDLTDQPLPDADHTWYTDGSSLLQEGQRKAGAAVTTETEVIWAKALPAGTSAQRAELIALTQALKMAEGKKLNVYTDSRYAFATAHIHGEIYRRRGWLTSEGKEIKNKDEILALLKALFLPKRLSIIHCPGHQKGHSAEARGNRMADQAARKAAITETPDTSTLLKRTADGSEFESPKKKAKVE

SEQ ID NO: 16078 - protein, 2360 aa, synthetic construct
MPAAKRVKLDGGDKKYSIGLDIGTNSVGWAVITDEYKVPSKKFKVLGNTDRHSIKKNLIGALLFDSGETAEATRLKRTARRRYTRRKNRICYLQEIFSNEMAKVDDSFFHRLEESFLVEEDKKHERHPIFGNIVDEVAYHEKYPTIYHLRKKLVDSTDKADLRLIYLALAHMIKFRGHFLIEGDLNPDNSDVDKLFIQLVQTYNQLFEENPINASGVDAKAILSARLSKSRRLENLIAQLPGEKKNGLFGNLIALSLGLTPNFKSNFDLAEDAKLQLSKDTYDDDLDNLLAQIGDQYADLFLAAKNLSDAILLSDILRVNTEITKAPLSASMIKRYDEHHQDLTLLKALVRQQLPEKYKEIFFDQSKNGYAGYIDGGASQEEFYKFIKPILEKMDGTEELLVKLNREDLLRKQRTFDNGSIPHQIHLGELHAILRRQEDFYPFLKDNREKIEKILTFRIPYYVGPLARGNSRFAWMTRKSEETITPWNFEEVVDKGASAQSFIERMTNFDKNLPNEKVLPKHSLLYEYFTVYNELTKVKYVTEGMRKPAFLSGEQKKAIVDLLFKTNRKVTVKQLKEDYFKKIECFDSVEISGVEDRFNASLGTYHDLLKIIKDKDFLDNEENEDILEDIVLTLTLFEDREMIEERLKTYAHLFDDKVMKQLKRRRYTGWGRLSRKLINGIRDKQSGKTILDFLKSDGFANRNFMQLIHDDSLTFKEDIQKAQVSGQGDSLHEHIANLAGSPAIKKGILQTVKVVDELVKVMGRHKPENIVIEMARENQTTQKGQKNSRERMKRIEEGIKELGSQILKEHPVENTQLQNEKLYLYYLQNGRDMYVDQELDINRLSDYDVDHIVPQSFLKDDSIDNKVLTRSDKARGKSDNVPSEEVVKKMKNYWRQLLNAKLITQRKFDNLTKAERGGLSELDKAGFIKRQLVETRQITKHVAQILDSRMNTKYDENDKLIREVKVITLKSKLVSDFRKDFQFYKVREINNYHHAHDAYLNAVVGTALIKKYPKLESEFVYGDYKVYDVRKMIAKSEQEIGKATAKYFFYSNIMNFFKTEITLANGEIRKRPLIETNGETGEIVWDKGRDFATVRKVLSMPQVNIVKKTEVQTGGFSKESILPKRNSDKLIARKKDWDPKKYGGFDSPTVAYSVLVVAKVEKGKSKKLKSVKELLGITIMERSSFEKNPIDFLEAKGYKEVKKDLIIKLPKYSLFELENGRKRMLASAGELQKGNELALPSKYVNFLYLASHYEKLKGSPEDNEQKQLFVEQHKHYLDEIIEQISEFSKRVILADANLDKVLSAYNKHRDKPIREQAENIIHLFTLTNLGAPAAFKYFDTTIDRKRYTSTKEVLDATLIHQSITGLYETRIDLSQLGGDGSSGSSGSSGSSGSSGSSMASNFTQFVLVDNGGTGDVTVAPSNFANGIAEWISSNSRSQAYKVTCSVRQSSAQNRKYTIKVEVPKGAWRSYLNMELTIPIFATNSDCELIVKAMQGLLKDGNPIPSAIAANSGIYGGSGGSMASNFTQFVLVDNGGTGDVTVAPSNFANGIAEWISSNSRSQAYKVTCSVRQSSAQNRKYTIKVEVPKGAWRSYLNMELTIPIFATNSDCELIVKAMQGLLKDGNPIPSAIAANSGIYSGGSSGGSSGSETPGTSESATPESSGGSSGGSSTLNIEDEHRLHETSKEPDVSLGSTWLSDFPQAWAETGGMGLAVRQAPLIIPLKATSTPVSIKQYPMSQEARLGIKPHIQRLLDQGILVPCQSPWNTPLLPVKKPGTNDYRPVQDLREVNKRVEDIHPTVPNPYNLLSGLPPSHQWYTVLDLKDAFFCLRLHPTSQPLFAFEWRDPEMGISGQLTWTRLPQGFKNSPTLFNEALHRDLADFRIQHPDLILLQYVDDLLLAATSELDCQQGTRALLQTLGNLGYRASAKKAQICQKQVKYLGYLLKEGQRWLTEARKETVMGQPTPKTPRQLREFLGKAGFCRLFIPGFAEMAAPLYPLTKPGTLFNWGPDQQKAYQEIKQALLTAPALGLPDLTKPFELFVDEKQGYAKGVLTQKLGPWRRPVAYLSKKLDPVAAGWPPCLRMVAAIAVLTKDAGKLTMGQPLVILAPHAVEALVKQPPDRWLSNARMTHYQALLLDTDRVQFGPVVALNPATLLPLPEEGLQHNCLDILAEAHGTRPDLTDQPLPDADHTWYTDGSSLLQEGQRKAGAAVTTETEVIWAKALPAGTSAQRAELIALTQALKMAEGKKLNVYTDSRYAFATAHIHGEIYRRRGWLTSEGKEIKNKDEILALLKALFLPKRLSIIHCPGHQKGHSAEARGNRMADQAARKAAITETPDTSTLLKRTADGSEFESPKKKAKVE

SEQ ID NO: 16079 - protein, 2345 aa, synthetic construct
MPAAKRVKLDGGDKKYSIGLDIGTNSVGWAVITDEYKVPSKKFKVLGNTDRHSIKKNLIGALLFDSGETAEATRLKRTARRRYTRRKNRICYLQEIFSNEMAKVDDSFFHRLEESFLVEEDKKHERHPIFGNIVDEVAYHEKYPTIYHLRKKLVDSTDKADLRLIYLALAHMIKFRGHFLIEGDLNPDNSDVDKLFIQLVQTYNQLFEENPINASGVDAKAILSARLSKSRRLENLIAQLPGEKKNGLFGNLIALSLGLTPNFKSNFDLAEDAKLQLSKDTYDDDLDNLLAQIGDQYADLFLAAKNLSDAILLSDILRVNTEITKAPLSASMIKRYDEHHQDLTLLKALVRQQLPEKYKEIFFDQSKNGYAGYIDGGASQEEFYKFIKPILEKMDGTEELLVKLNREDLLRKQRTFDNGSIPHQIHLGELHAILRRQEDFYPFLKDNREKIEKILTFRIPYYVGPLARGNSRFAWMTRKSEETITPWNFEEVVDKGASAQSFIERMTNFDKNLPNEKVLPKHSLLYEYFTVYNELTKVKYVTEGMRKPAFLSGEQKKAIVDLLFKTNRKVTVKQLKEDYFKKIECFDSVEISGVEDRFNASLGTYHDLLKIIKDKDFLDNEENEDILEDIVLTLTLFEDREMIEERLKTYAHLFDDKVMKQLKRRRYTGWGRLSRKLINGIRDKQSGKTILDFLKSDGFANRNFMQLIHDDSLTFKEDIQKAQVSGQGDSLHEHIANLAGSPAIKKGILQTVKVVDELVKVMGRHKPENIVIEMARENQTTQKGQKNSRERMKRIEEGIKELGSQILKEHPVENTQLQNEKLYLYYLQNGRDMYVDQELDINRLSDYDVDHIVPQSFLKDDSIDNKVLTRSDKARGKSDNVPSEEVVKKMKNYWRQLLNAKLITQRKFDNLTKAERGGLSELDKAGFIKRQLVETRQITKHVAQILDSRMNTKYDENDKLIREVKVITLKSKLVSDFRKDFQFYKVREINNYHHAHDAYLNAVVGTALIKKYPKLESEFVYGDYKVYDVRKMIAKSEQEIGKATAKYFFYSNIMNFFKTEITLANGEIRKRPLIETNGETGEIVWDKGRDFATVRKVLSMPQVNIVKKTEVQTGGFSKESILPKRNSDKLIARKKDWDPKKYGGFDSPTVAYSVLVVAKVEKGKSKKLKSVKELLGITIMERSSFEKNPIDFLEAKGYKEVKKDLIIKLPKYSLFELENGRKRMLASAGELQKGNELALPSKYVNFLYLASHYEKLKGSPEDNEQKQLFVEQHKHYLDEIIEQISEFSKRVILADANLDKVLSAYNKHRDKPIREQAENIIHLFTLTNLGAPAAFKYFDTTIDRKRYTSTKEVLDATLIHQSITGLYETRIDLSQLGGDGSSGSSGSSGSSGSSGSSMASNFTQFVLVDNGGTGDVTVAPSNFANGIAEWISSNSRSQAYKVTCSVRQSSAQNRKYTIKVEVPKGAWRSYLNMELTIPIFATNSDCELIVKAMQGLLKDGNPIPSAIAANSGIYGGSGGSMASNFTQFVLVDNGGTGDVTVAPSNFANGIAEWISSNSRSQAYKVTCSVRQSSAQNRKYTIKVEVPKGAWRSYLNMELTIPIFATNSDCELIVKAMQGLLKDGNPIPSAIAANSGIYGSSGSSGSSGSSGSSGSSTLNIEDEHRLHETSKEPDVSLGSTWLSDFPQAWAETGGMGLAVRQAPLIIPLKATSTPVSIKQYPMSQEARLGIKPHIQRLLDQGILVPCQSPWNTPLLPVKKPGTNDYRPVQDLREVNKRVEDIHPTVPNPYNLLSGLPPSHQWYTVLDLKDAFFCLRLHPTSQPLFAFEWRDPEMGISGQLTWTRLPQGFKNSPTLFNEALHRDLADFRIQHPDLILLQYVDDLLLAATSELDCQQGTRALLQTLGNLGYRASAKKAQICQKQVKYLGYLLKEGQRWLTEARKETVMGQPTPKTPRQLREFLGKAGFCRLFIPGFAEMAAPLYPLTKPGTLFNWGPDQQKAYQEIKQALLTAPALGLPDLTKPFELFVDEKQGYAKGVLTQKLGPWRRPVAYLSKKLDPVAAGWPPCLRMVAAIAVLTKDAGKLTMGQPLVILAPHAVEALVKQPPDRWLSNARMTHYQALLLDTDRVQFGPVVALNPATLLPLPEEGLQHNCLDILAEAHGTRPDLTDQPLPDADHTWYTDGSSLLQEGQRKAGAAVTTETEVIWAKALPAGTSAQRAELIALTQALKMAEGKKLNVYTDSRYAFATAHIHGEIYRRRGWLTSEGKEIKNKDEILALLKALFLPKRLSIIHCPGHQKGHSAEARGNRMADQAARKAAITETPDTSTLLKRTADGSEFESPKKKAKVE

SEQ ID NO: 16080 - protein, 2338 aa, synthetic construct
MPAAKRVKLDGGDKKYSIGLDIGTNSVGWAVITDEYKVPSKKFKVLGNTDRHSIKKNLIGALLFDSGETAEATRLKRTARRRYTRRKNRICYLQEIFSNEMAKVDDSFFHRLEESFLVEEDKKHERHPIFGNIVDEVAYHEKYPTIYHLRKKLVDSTDKADLRLIYLALAHMIKFRGHFLIEGDLNPDNSDVDKLFIQLVQTYNQLFEENPINASGVDAKAILSARLSKSRRLENLIAQLPGEKKNGLFGNLIALSLGLTPNFKSNFDLAEDAKLQLSKDTYDDDLDNLLAQIGDQYADLFLAAKNLSDAILLSDILRVNTEITKAPLSASMIKRYDEHHQDLTLLKALVRQQLPEKYKEIFFDQSKNGYAGYIDGGASQEEFYKFIKPILEKMDGTEELLVKLNREDLLRKQRTFDNGSIPHQIHLGELHAILRRQEDFYPFLKDNREKIEKILTFRIPYYVGPLARGNSRFAWMTRKSEETITPWNFEEVVDKGASAQSFIERMTNFDKNLPNEKVLPKHSLLYEYFTVYNELTKVKYVTEGMRKPAFLSGEQKKAIVDLLFKTNRKVTVKQLKEDYFKKIECFDSVEISGVEDRFNASLGTYHDLLKIIKDKDFLDNEENEDILEDIVLTLTLFEDREMIEERLKTYAHLFDDKVMKQLKRRRYTGWGRLSRKLINGIRDKQSGKTILDFLKSDGFANRNFMQLIHDDSLTFKEDIQKAQVSGQGDSLHEHIANLAGSPAIKKGILQTVKVVDELVKVMGRHKPENIVIEMARENQTTQKGQKNSRERMKRIEEGIKELGSQILKEHPVENTQLQNEKLYLYYLQNGRDMYVDQELDINRLSDYDVDHIVPQSFLKDDSIDNKVLTRSDKARGKSDNVPSEEVVKKMKNYWRQLLNAKLITQRKFDNLTKAERGGLSELDKAGFIKRQLVETRQITKHVAQILDSRMNTKYDENDKLIREVKVITLKSKLVSDFRKDFQFYKVREINNYHHAHDAYLNAVVGTALIKKYPKLESEFVYGDYKVYDVRKMIAKSEQEIGKATAKYFFYSNIMNFFKTEITLANGEIRKRPLIETNGETGEIVWDKGRDFATVRKVLSMPQVNIVKKTEVQTGGFSKESILPKRNSDKLIARKKDWDPKKYGGFDSPTVAYSVLVVAKVEKGKSKKLKSVKELLGITIMERSSFEKNPIDFLEAKGYKEVKKDLIIKLPKYSLFELENGRKRMLASAGELQKGNELALPSKYVNFLYLASHYEKLKGSPEDNEQKQLFVEQHKHYLDEIIEQISEFSKRVILADANLDKVLSAYNKHRDKPIREQAENIIHLFTLTNLGAPAAFKYFDTTIDRKRYTSTKEVLDATLIHQSITGLYETRIDLSQLGGDGSSGSSGSSGSSGSSGSSMASNFTQFVLVDNGGTGDVTVAPSNFANGIAEWISSNSRSQAYKVTCSVRQSSAQNRKYTIKVEVPKGAWRSYLNMELTIPIFATNSDCELIVKAMQGLLKDGNPIPSAIAANSGIYGGSGGSMASNFTQFVLVDNGGTGDVTVAPSNFANGIAEWISSNSRSQAYKVTCSVRQSSAQNRKYTIKVEVPKGAWRSYLNMELTIPIFATNSDCELIVKAMQGLLKDGNPIPSAIAANSGIYGSSGGGEAAAKTLNIEDEHRLHETSKEPDVSLGSTWLSDFPQAWAETGGMGLAVRQAPLIIPLKATSTPVSIKQYPMSQEARLGIKPHIQRLLDQGILVPCQSPWNTPLLPVKKPGTNDYRPVQDLREVNKRVEDIHPTVPNPYNLLSGLPPSHQWYTVLDLKDAFFCLRLHPTSQPLFAFEWRDPEMGISGQLTWTRLPQGFKNSPTLFNEALHRDLADFRIQHPDLILLQYVDDLLLAATSELDCQQGTRALLQTLGNLGYRASAKKAQICQKQVKYLGYLLKEGQRWLTEARKETVMGQPTPKTPRQLREFLGKAGFCRLFIPGFAEMAAPLYPLTKPGTLFNWGPDQQKAYQEIKQALLTAPALGLPDLTKPFELFVDEKQGYAKGVLTQKLGPWRRPVAYLSKKLDPVAAGWPPCLRMVAAIAVLTKDAGKLTMGQPLVILAPHAVEALVKQPPDRWLSNARMTHYQALLLDTDRVQFGPVVALNPATLLPLPEEGLQHNCLDILAEAHGTRPDLTDQPLPDADHTWYTDGSSLLQEGQRKAGAAVTTETEVIWAKALPAGTSAQRAELIALTQALKMAEGKKLNVYTDSRYAFATAHIHGEIYRRRGWLTSEGKEIKNKDEILALLKALFLPKRLSIIHCPGHQKGHSAEARGNRMADQAARKAAITETPDTSTLLKRTADGSEFESPKKKAKVE

SEQ ID NO: 16081 - protein, 2629 aa, synthetic construct
MPAAKRVKLDGGDKKYSIGLDIGTNSVGWAVITDEYKVPSKKFKVLGNTDRHSIKKNLIGALLFDSGETAEATRLKRTARRRYTRRKNRICYLQEIFSNEMAKVDDSFFHRLEESFLVEEDKKHERHPIFGNIVDEVAYHEKYPTIYHLRKKLVDSTDKADLRLIYLALAHMIKFRGHFLIEGDLNPDNSDVDKLFIQLVQTYNQLFEENPINASGVDAKAILSARLSKSRRLENLIAQLPGEKKNGLFGNLIALSLGLTPNFKSNFDLAEDAKLQLSKDTYDDDLDNLLAQIGDQYADLFLAAKNLSDAILLSDILRVNTEITKAPLSASMIKRYDEHHQDLTLLKALVRQQLPEKYKEIFFDQSKNGYAGYIDGGASQEEFYKFIKPILEKMDGTEELLVKLNREDLLRKQRTFDNGSIPHQIHLGELHAILRRQEDFYPFLKDNREKIEKILTFRIPYYVGPLARGNSRFAWMTRKSEETITPWNFEEVVDKGASAQSFIERMTNFDKNLPNEKVLPKHSLLYEYFTVYNELTKVKYVTEGMRKPAFLSGEQKKAIVDLLFKTNRKVTVKQLKEDYFKKIECFDSVEISGVEDRFNASLGTYHDLLKIIKDKDFLDNEENEDILEDIVLTLTLFEDREMIEERLKTYAHLFDDKVMKQLKRRRYTGWGRLSRKLINGIRDKQSGKTILDFLKSDGFANRNFMQLIHDDSLTFKEDIQKAQVSGQGDSLHEHIANLAGSPAIKKGILQTVKVVDELVKVMGRHKPENIVIEMARENQTTQKGQKNSRERMKRIEEGIKELGSQILKEHPVENTQLQNEKLYLYYLQNGRDMYVDQELDINRLSDYDVDHIVPQSFLKDDSIDNKVLTRSDKARGKSDNVPSEEVVKKMKNYWRQLLNAKLITQRKFDNLTKAERGGLSELDKAGFIKRQLVETRQITKHVAQILDSRMNTKYDENDKLIREVKVITLKSKLVSDFRKDFQFYKVREINNYHHAHDAYLNAVVGTALIKKYPKLESEFVYGDYKVYDVRKMIAKSEQEIGKATAKYFFYSNIMNFFKTEITLANGEIRKRPLIETNGETGEIVWDKGRDFATVRKVLSMPQVNIVKKTEVQTGGFSKESILPKRNSDKLIARKKDWDPKKYGGFDSPTVAYSVLVVAKVEKGKSKKLKSVKELLGITIMERSSFEKNPIDFLEAKGYKEVKKDLIIKLPKYSLFELENGRKRMLASAGELQKGNELALPSKYVNFLYLASHYEKLKGSPEDNEQKQLFVEQHKHYLDEIIEQISEFSKRVILADANLDKVLSAYNKHRDKPIREQAENIIHLFTLTNLGAPAAFKYFDTTIDRKRYTSTKEVLDATLIHQSITGLYETRIDLSQLGGDGSSGSSGSSGSSGSSGSSMASNFTQFVLVDNGGTGDVTVAPSNFANGIAEWISSNSRSQAYKVTCSVRQSSAQNRKYTIKVEVPKGAWRSYLNMELTIPIFATNSDCELIVKAMQGLLKDGNPIPSAIAANSGIYGGSGGSMASNFTQFVLVDNGGTGDVTVAPSNFANGIAEWISSNSRSQAYKVTCSVRQSSAQNRKYTIKVEVPKGAWRSYLNMELTIPIFATNSDCELIVKAMQGLLKDGNPIPSAIAANSGIYGGGSGGGSGGGSGGGSMASNFTQFVLVDNGGTGDVTVAPSNFANGIAEWISSNSRSQAYKVTCSVRQSSAQNRKYTIKVEVPKGAWRSYLNMELTIPIFATNSDCELIVKAMQGLLKDGNPIPSAIAANSGIYGGSGGSMASNFTQFVLVDNGGTGDVTVAPSNFANGIAEWISSNSRSQAYKVTCSVRQSSAQNRKYTIKVEVPKGAWRSYLNMELTIPIFATNSDCELIVKAMQGLLKDGNPIPSAIAANSGIYAEAAAKEAAAKEAAAKEAAAKALEAEAAAKEAAAKEAAAKEAAAKATLNIEDEHRLHETSKEPDVSLGSTWLSDFPQAWAETGGMGLAVRQAPLIIPLKATSTPVSIKQYPMSQEARLGIKPHIQRLLDQGILVPCQSPWNTPLLPVKKPGTNDYRPVQDLREVNKRVEDIHPTVPNPYNLLSGLPPSHQWYTVLDLKDAFFCLRLHPTSQPLFAFEWRDPEMGISGQLTWTRLPQGFKNSPTLFNEALHRDLADFRIQHPDLILLQYVDDLLLAATSELDCQQGTRALLQTLGNLGYRASAKKAQICQKQVKYLGYLLKEGQRWLTEARKETVMGQPTPKTPRQLREFLGKAGFCRLFIPGFAEMAAPLYPLTKPGTLFNWGPDQQKAYQEIKQALLTAPALGLPDLTKPFELFVDEKQGYAKGVLTQKLGPWRRPVAYLSKKLDPVAAGWPPCLRMVAAIAVLTKDAGKLTMGQPLVILAPHAVEALVKQPPDRWLSNARMTHYQALLLDTDRVQFGPVVALNPATLLPLPEEGLQHNCLDILAEAHGTRPDLTDQPLPDADHTWYTDGSSLLQEGQRKAGAAVTTETEVIWAKALPAGTSAQRAELIALTQALKMAEGKKLNVYTDSRYAFATAHIHGEIYRRRGWLTSEGKEIKNKDEILALLKALFLPKRLSIIHCPGHQKGHSAEARGNRMADQAARKAAITETPDTSTLLKRTADGSEFESPKKKAKVE

SEQ ID NO: 16082 - protein, 2616 aa, synthetic construct
MPAAKRVKLDGGDKKYSIGLDIGTNSVGWAVITDEYKVPSKKFKVLGNTDRHSIKKNLIGALLFDSGETAEATRLKRTARRRYTRRKNRICYLQEIFSNEMAKVDDSFFHRLEESFLVEEDKKHERHPIFGNIVDEVAYHEKYPTIYHLRKKLVDSTDKADLRLIYLALAHMIKFRGHFLIEGDLNPDNSDVDKLFIQLVQTYNQLFEENPINASGVDAKAILSARLSKSRRLENLIAQLPGEKKNGLFGNLIALSLGLTPNFKSNFDLAEDAKLQLSKDTYDDDLDNLLAQIGDQYADLFLAAKNLSDAILLSDILRVNTEITKAPLSASMIKRYDEHHQDLTLLKALVRQQLPEKYKEIFFDQSKNGYAGYIDGGASQEEFYKFIKPILEKMDGTEELLVKLNREDLLRKQRTFDNGSIPHQIHLGELHAILRRQEDFYPFLKDNREKIEKILTFRIPYYVGPLARGNSRFAWMTRKSEETITPWNFEEVVDKGASAQSFIERMTNFDKNLPNEKVLPKHSLLYEYFTVYNELTKVKYVTEGMRKPAFLSGEQKKAIVDLLFKTNRKVTVKQLKEDYFKKIECFDSVEISGVEDRFNASLGTYHDLLKIIKDKDFLDNEENEDILEDIVLTLTLFEDREMIEERLKTYAHLFDDKVMKQLKRRRYTGWGRLSRKLINGIRDKQSGKTILDFLKSDGFANRNFMQLIHDDSLTFKEDIQKAQVSGQGDSLHEHIANLAGSPAIKKGILQTVKVVDELVKVMGRHKPENIVIEMARENQTTQKGQKNSRERMKRIEEGIKELGSQILKEHPVENTQLQNEKLYLYYLQNGRDMYVDQELDINRLSDYDVDHIVPQSFLKDDSIDNKVLTRSDKARGKSDNVPSEEVVKKMKNYWRQLLNAKLITQRKFDNLTKAERGGLSELDKAGFIKRQLVETRQITKHVAQILDSRMNTKYDENDKLIREVKVITLKSKLVSDFRKDFQFYKVREINNYHHAHDAYLNAVVGTALIKKYPKLESEFVYGDYKVYDVRKMIAKSEQEIGKATAKYFFYSNIMNFFKTEITLANGEIRKRPLIETNGETGEIVWDKGRDFATVRKVLSMPQVNIVKKTEVQTGGFSKESILPKRNSDKLIARKKDWDPKKYGGFDSPTVAYSVLVVAKVEKGKSKKLKSVKELLGITIMERSSFEKNPIDFLEAKGYKEVKKDLIIKLPKYSLFELENGRKRMLASAGELQKGNELALPSKYVNFLYLASHYEKLKGSPEDNEQKQLFVEQHKHYLDEIIEQISEFSKRVILADANLDKVLSAYNKHRDKPIREQAENIIHLFTLTNLGAPAAFKYFDTTIDRKRYTSTKEVLDATLIHQSITGLYETRIDLSQLGGDGSSGSSGSSGSSGSSGSSMASNFTQFVLVDNGGTGDVTVAPSNFANGIAEWISSNSRSQAYKVTCSVRQSSAQNRKYTIKVEVPKGAWRSYLNMELTIPIFATNSDCELIVKAMQGLLKDGNPIPSAIAANSGIYGGSGGSMASNFTQFVLVDNGGTGDVTVAPSNFANGIAEWISSNSRSQAYKVTCSVRQSSAQNRKYTIKVEVPKGAWRSYLNMELTIPIFATNSDCELIVKAMQGLLKDGNPIPSAIAANSGIYGGGSGGGSGGGSGGGSMASNFTQFVLVDNGGTGDVTVAPSNFANGIAEWISSNSRSQAYKVTCSVRQSSAQNRKYTIKVEVPKGAWRSYLNMELTIPIFATNSDCELIVKAMQGLLKDGNPIPSAIAANSGIYGGSGGSMASNFTQFVLVDNGGTGDVTVAPSNFANGIAEWISSNSRSQAYKVTCSVRQSSAQNRKYTIKVEVPKGAWRSYLNMELTIPIFATNSDCELIVKAMQGLLKDGNPIPSAIAANSGIYSGGSSGGSSGSETPGTSESATPESSGGSSGGSSTLNIEDEHRLHETSKEPDVSLGSTWLSDFPQAWAETGGMGLAVRQAPLIIPLKATSTPVSIKQYPMSQEARLGIKPHIQRLLDQGILVPCQSPWNTPLLPVKKPGTNDYRPVQDLREVNKRVEDIHPTVPNPYNLLSGLPPSHQWYTVLDLKDAFFCLRLHPTSQPLFAFEWRDPEMGISGQLTWTRLPQGFKNSPTLFNEALHRDLADFRIQHPDLILLQYVDDLLLAATSELDCQQGTRALLQTLGNLGYRASAKKAQICQKQVKYLGYLLKEGQRWLTEARKETVMGQPTPKTPRQLREFLGKAGFCRLFIPGFAEMAAPLYPLTKPGTLFNWGPDQQKAYQEIKQALLTAPALGLPDLTKPFELFVDEKQGYAKGVLTQKLGPWRRPVAYLSKKLDPVAAGWPPCLRMVAAIAVLTKDAGKLTMGQPLVILAPHAVEALVKQPPDRWLSNARMTHYQALLLDTDRVQFGPVVALNPATLLPLPEEGLQHNCLDILAEAHGTRPDLTDQPLPDADHTWYTDGSSLLQEGQRKAGAAVTTETEVIWAKALPAGTSAQRAELIALTQALKMAEGKKLNVYTDSRYAFATAHIHGEIYRRRGWLTSEGKEIKNKDEILALLKALFLPKRLSIIHCPGHQKGHSAEARGNRMADQAARKAAITETPDTSTLLKRTADGSEFESPKKKAKVE

SEQ ID NO: 16083 - protein, 2601 aa, synthetic construct
MPAAKRVKLDGGDKKYSIGLDIGTNSVGWAVITDEYKVPSKKFKVLGNTDRHSIKKNLIGALLFDSGETAEATRLKRTARRRYTRRKNRICYLQEIFSNEMAKVDDSFFHRLEESFLVEEDKKHERHPIFGNIVDEVAYHEKYPTIYHLRKKLVDSTDKADLRLIYLALAHMIKFRGHFLIEGDLNPDNSDVDKLFIQLVQTYNQLFEENPINASGVDAKAILSARLSKSRRLENLIAQLPGEKKNGLFGNLIALSLGLTPNFKSNFDLAEDAKLQLSKDTYDDDLDNLLAQIGDQYADLFLAAKNLSDAILLSDILRVNTEITKAPLSASMIKRYDEHHQDLTLLKALVRQQLPEKYKEIFFDQSKNGYAGYIDGGASQEEFYKFIKPILEKMDGTEELLVKLNREDLLRKQRTFDNGSIPHQIHLGELHAILRRQEDFYPFLKDNREKIEKILTFRIPYYVGPLARGNSRFAWMTRKSEETITPWNFEEVVDKGASAQSFIERMTNFDKNLPNEKVLPKHSLLYEYFTVYNELTKVKYVTEGMRKPAFLSGEQKKAIVDLLFKTNRKVTVKQLKEDYFKKIECFDSVEISGVEDRFNASLGTYHDLLKIIKDKDFLDNEENEDILEDIVLTLTLFEDREMIEERLKTYAHLFDDKVMKQLKRRRYTGWGRLSRKLINGIRDKQSGKTILDFLKSDGFANRNFMQLIHDDSLTFKEDIQKAQVSGQGDSLHEHIANLAGSPAIKKGILQTVKVVDELVKVMGRHKPENIVIEMARENQTTQKGQKNSRERMKRIEEGIKELGSQILKEHPVENTQLQNEKLYLYYLQNGRDMYVDQELDINRLSDYDVDHIVPQSFLKDDSIDNKVLTRSDKARGKSDNVPSEEVVKKMKNYWRQLLNAKLITQRKFDNLTKAERGGLSELDKAGFIKRQLVETRQITKHVAQILDSRMNTKYDENDKLIREVKVITLKSKLVSDFRKDFQFYKVREINNYHHAHDAYLNAVVGTALIKKYPKLESEFVYGDYKVYDVRKMIAKSEQEIGKATAKYFFYSNIMNFFKTEITLANGEIRKRPLIETNGETGEIVWDKGRDFATVRKVLSMPQVNIVKKTEVQTGGFSKESILPKRNSDKLIARKKDWDPKKYGGFDSPTVAYSVLVVAKVEKGKSKKLKSVKELLGITIMERSSFEKNPIDFLEAKGYKEVKKDLIIKLPKYSLFELENGRKRMLASAGELQKGNELALPSKYVNFLYLASHYEKLKGSPEDNEQKQLFVEQHKHYLDEIIEQISEFSKRVILADANLDKVLSAYNKHRDKPIREQAENIIHLFTLTNLGAPAAFKYFDTTIDRKRYTSTKEVLDATLIHQSITGLYETRIDLSQLGGDGSSGSSGSSGSSGSSGSSMASNFTQFVLVDNGGTGDVTVAPSNFANGIAEWISSNSRSQAYKVTCSVRQSSAQNRKYTIKVEVPKGAWRSYLNMELTIPIFATNSDCELIVKAMQGLLKDGNPIPSAIAANSGIYGGSGGSMASNFTQFVLVDNGGTGDVTVAPSNFANGIAEWISSNSRSQAYKVTCSVRQSSAQNRKYTIKVEVPKGAWRSYLNMELTIPIFATNSDCELIVKAMQGLLKDGNPIPSAIAANSGIYGGGSGGGSGGGSGGGSMASNFTQFVLVDNGGTGDVTVAPSNFANGIAEWISSNSRSQAYKVTCSVRQSSAQNRKYTIKVEVPKGAWRSYLNMELTIPIFATNSDCELIVKAMQGLLKDGNPIPSAIAANSGIYGGSGGSMASNFTQFVLVDNGGTGDVTVAPSNFANGIAEWISSNSRSQAYKVTCSVRQSSAQNRKYTIKVEVPKGAWRSYLNMELTIPIFATNSDCELIVKAMQGLLKDGNPIPSAIAANSGIYGSSGSSGSSGSSGSSGSSTLNIEDEHRLHETSKEPDVSLGSTWLSDFPQAWAETGGMGLAVRQAPLIIPLKATSTPVSIKQYPMSQEARLGIKPHIQRLLDQGILVPCQSPWNTPLLPVKKPGTNDYRPVQDLREVNKRVEDIHPTVPNPYNLLSGLPPSHQWYTVLDLKDAFFCLRLHPTSQPLFAFEWRDPEMGISGQLTWTRLPQGFKNSPTLFNEALHRDLADFRIQHPDLILLQYVDDLLLAATSELDCQQGTRALLQTLGNLGYRASAKKAQICQKQVKYLGYLLKEGQRWLTEARKETVMGQPTPKTPRQLREFLGKAGFCRLFIPGFAEMAAPLYPLTKPGTLFNWGPDQQKAYQEIKQALLTAPALGLPDLTKPFELFVDEKQGYAKGVLTQKLGPWRRPVAYLSKKLDPVAAGWPPCLRMVAAIAVLTKDAGKLTMGQPLVILAPHAVEALVKQPPDRWLSNARMTHYQALLLDTDRVQFGPVVALNPATLLPLPEEGLQHNCLDILAEAHGTRPDLTDQPLPDADHTWYTDGSSLLQEGQRKAGAAVTTETEVIWAKALPAGTSAQRAELIALTQALKMAEGKKLNVYTDSRYAFATAHIHGEIYRRRGWLTSEGKEIKNKDEILALLKALFLPKRLSIIHCPGHQKGHSAEARGNRMADQAARKAAITETPDTSTLLKRTADGSEFESPKKKAKVE

SEQ ID NO: 16084 - protein, 2594 aa, synthetic construct
MPAAKRVKLDGGDKKYSIGLDIGTNSVGWAVITDEYKVPSKKFKVLGNTDRHSIKKNLIGALLFDSGETAEATRLKRTARRRYTRRKNRICYLQEIFSNEMAKVDDSFFHRLEESFLVEEDKKHERHPIFGNIVDEVAYHEKYPTIYHLRKKLVDSTDKADLRLIYLALAHMIKFRGHFLIEGDLNPDNSDVDKLFIQLVQTYNQLFEENPINASGVDAKAILSARLSKSRRLENLIAQLPGEKKNGLFGNLIALSLGLTPNFKSNFDLAEDAKLQLSKDTYDDDLDNLLAQIGDQYADLFLAAKNLSDAILLSDILRVNTEITKAPLSASMIKRYDEHHQDLTLLKALVRQQLPEKYKEIFFDQSKNGYAGYIDGGASQEEFYKFIKPILEKMDGTEELLVKLNREDLLRKQRTFDNGSIPHQIHLGELHAILRRQEDFYPFLKDNREKIEKILTFRIPYYVGPLARGNSRFAWMTRKSEETITPWNFEEVVDKGASAQSFIERMTNFDKNLPNEKVLPKHSLLYEYFTVYNELTKVKYVTEGMRKPAFLSGEQKKAIVDLLFKTNRKVTVKQLKEDYFKKIECFDSVEISGVEDRFNASLGTYHDLLKIIKDKDFLDNEENEDILEDIVLTLTLFEDREMIEERLKTYAHLFDDKVMKQLKRRRYTGWGRLSRKLINGIRDKQSGKTILDFLKSDGFANRNFMQLIHDDSLTFKEDIQKAQVSGQGDSLHEHIANLAGSPAIKKGILQTVKVVDELVKVMGRHKPENIVIEMARENQTTQKGQKNSRERMKRIEEGIKELGSQILKEHPVENTQLQNEKLYLYYLQNGRDMYVDQELDINRLSDYDVDHIVPQSFLKDDSIDNKVLTRSDKARGKSDNVPSEEVVKKMKNYWRQLLNAKLITQRKFDNLTKAERGGLSELDKAGFIKRQLVETRQITKHVAQILDSRMNTKYDENDKLIREVKVITLKSKLVSDFRKDFQFYKVREINNYHHAHDAYLNAVVGTALIKKYPKLESEFVYGDYKVYDVRKMIAKSEQEIGKATAKYFFYSNIMNFFKTEITLANGEIRKRPLIETNGETGEIVWDKGRDFATVRKVLSMPQVNIVKKTEVQTGGFSKESILPKRNSDKLIARKKDWDPKKYGGFDSPTVAYSVLVVAKVEKGKSKKLKSVKELLGITIMERSSFEKNPIDFLEAKGYKEVKKDLIIKLPKYSLFELENGRKRMLASAGELQKGNELALPSKYVNFLYLASHYEKLKGSPEDNEQKQLFVEQHKHYLDEIIEQISEFSKRVILADANLDKVLSAYNKHRDKPIREQAENIIHLFTLTNLGAPAAFKYFDTTIDRKRYTSTKEVLDATLIHQSITGLYETRIDLSQLGGDGSSGSSGSSGSSGSSGSSMASNFTQFVLVDNGGTGDVTVAPSNFANGIAEWISSNSRSQAYKVTCSVRQSSAQNRKYTIKVEVPKGAWRSYLNMELTIPIFATNSDCELIVKAMQGLLKDGNPIPSAIAANSGIYGGSGGSMASNFTQFVLVDNGGTGDVTVAPSNFANGIAEWISSNSRSQAYKVTCSVRQSSAQNRKYTIKVEVPKGAWRSYLNMELTIPIFATNSDCELIVKAMQGLLKDGNPIPSAIAANSGIYGGGSGGGSGGGSGGGSMASNFTQFVLVDNGGTGDVTVAPSNFANGIAEWISSNSRSQAYKVTCSVRQSSAQNRKYTIKVEVPKGAWRSYLNMELTIPIFATNSDCELIVKAMQGLLKDGNPIPSAIAANSGIYGGSGGSMASNFTQFVLVDNGGTGDVTVAPSNFANGIAEWISSNSRSQAYKVTCSVRQSSAQNRKYTIKVEVPKGAWRSYLNMELTIPIFATNSDCELIVKAMQGLLKDGNPIPSAIAANSGIYGSSGGGEAAAKTLNIEDEHRLHETSKEPDVSLGSTWLSDFPQAWAETGGMGLAVRQAPLIIPLKATSTPVSIKQYPMSQEARLGIKPHIQRLLDQGILVPCQSPWNTPLLPVKKPGTNDYRPVQDLREVNKRVEDIHPTVPNPYNLLSGLPPSHQWYTVLDLKDAFFCLRLHPTSQPLFAFEWRDPEMGISGQLTWTRLPQGFKNSPTLFNEALHRDLADFRIQHPDLILLQYVDDLLLAATSELDCQQGTRALLQTLGNLGYRASAKKAQICQKQVKYLGYLLKEGQRWLTEARKETVMGQPTPKTPRQLREFLGKAGFCRLFIPGFAEMAAPLYPLTKPGTLFNWGPDQQKAYQEIKQALLTAPALGLPDLTKPFELFVDEKQGYAKGVLTQKLGPWRRPVAYLSKKLDPVAAGWPPCLRMVAAIAVLTKDAGKLTMGQPLVILAPHAVEALVKQPPDRWLSNARMTHYQALLLDTDRVQFGPVVALNPATLLPLPEEGLQHNCLDILAEAHGTRPDLTDQPLPDADHTWYTDGSSLLQEGQRKAGAAVTTETEVIWAKALPAGTSAQRAELIALTQALKMAEGKKLNVYTDSRYAFATAHIHGEIYRRRGWLTSEGKEIKNKDEILALLKALFLPKRLSIIHCPGHQKGHSAEARGNRMADQAARKAAITETPDTSTLLKRTADGSEFESPKKKAKVE

SEQ ID NO: 16085 - protein, 2243 aa, synthetic construct
MPAAKRVKLDGGDKKYSIGLDIGTNSVGWAVITDEYKVPSKKFKVLGNTDRHSIKKNLIGALLFDSGETAEATRLKRTARRRYTRRKNRICYLQEIFSNEMAKVDDSFFHRLEESFLVEEDKKHERHPIFGNIVDEVAYHEKYPTIYHLRKKLVDSTDKADLRLIYLALAHMIKFRGHFLIEGDLNPDNSDVDKLFIQLVQTYNQLFEENPINASGVDAKAILSARLSKSRRLENLIAQLPGEKKNGLFGNLIALSLGLTPNFKSNFDLAEDAKLQLSKDTYDDDLDNLLAQIGDQYADLFLAAKNLSDAILLSDILRVNTEITKAPLSASMIKRYDEHHQDLTLLKALVRQQLPEKYKEIFFDQSKNGYAGYIDGGASQEEFYKFIKPILEKMDGTEELLVKLNREDLLRKQRTFDNGSIPHQIHLGELHAILRRQEDFYPFLKDNREKIEKILTFRIPYYVGPLARGNSRFAWMTRKSEETITPWNFEEVVDKGASAQSFIERMTNFDKNLPNEKVLPKHSLLYEYFTVYNELTKVKYVTEGMRKPAFLSGEQKKAIVDLLFKTNRKVTVKQLKEDYFKKIECFDSVEISGVEDRFNASLGTYHDLLKIIKDKDFLDNEENEDILEDIVLTLTLFEDREMIEERLKTYAHLFDDKVMKQLKRRRYTGWGRLSRKLINGIRDKQSGKTILDFLKSDGFANRNFMQLIHDDSLTFKEDIQKAQVSGQGDSLHEHIANLAGSPAIKKGILQTVKVVDELVKVMGRHKPENIVIEMARENQTTQKGQKNSRERMKRIEEGIKELGSQILKEHPVENTQLQNEKLYLYYLQNGRDMYVDQELDINRLSDYDVDHIVPQSFLKDDSIDNKVLTRSDKARGKSDNVPSEEVVKKMKNYWRQLLNAKLITQRKFDNLTKAERGGLSELDKAGFIKRQLVETRQITKHVAQILDSRMNTKYDENDKLIREVKVITLKSKLVSDFRKDFQFYKVREINNYHHAHDAYLNAVVGTALIKKYPKLESEFVYGDYKVYDVRKMIAKSEQEIGKATAKYFFYSNIMNFFKTEITLANGEIRKRPLIETNGETGEIVWDKGRDFATVRKVLSMPQVNIVKKTEVQTGGFSKESILPKRNSDKLIARKKDWDPKKYGGFDSPTVAYSVLVVAKVEKGKSKKLKSVKELLGITIMERSSFEKNPIDFLEAKGYKEVKKDLIIKLPKYSLFELENGRKRMLASAGELQKGNELALPSKYVNFLYLASHYEKLKGSPEDNEQKQLFVEQHKHYLDEIIEQISEFSKRVILADANLDKVLSAYNKHRDKPIREQAENIIHLFTLTNLGAPAAFKYFDTTIDRKRYTSTKEVLDATLIHQSITGLYETRIDLSQLGGDGSSGGGEAAAKMASNFTQFVLVDNGGTGDVTVAPSNFANGIAEWISSNSRSQAYKVTCSVRQSSAQNRKYTIKVEVPKGAWRSYLNMELTIPIFATNSDCELIVKAMQGLLKDGNPIPSAIAANSGIYAEAAAKEAAAKEAAAKEAAAKALEAEAAAKEAAAKEAAAKEAAAKATLNIEDEHRLHETSKEPDVSLGSTWLSDFPQAWAETGGMGLAVRQAPLIIPLKATSTPVSIKQYPMSQEARLGIKPHIQRLLDQGILVPCQSPWNTPLLPVKKPGTNDYRPVQDLREVNKRVEDIHPTVPNPYNLLSGLPPSHQWYTVLDLKDAFFCLRLHPTSQPLFAFEWRDPEMGISGQLTWTRLPQGFKNSPTLFNEALHRDLADFRIQHPDLILLQYVDDLLLAATSELDCQQGTRALLQTLGNLGYRASAKKAQICQKQVKYLGYLLKEGQRWLTEARKETVMGQPTPKTPRQLREFLGKAGFCRLFIPGFAEMAAPLYPLTKPGTLFNWGPDQQKAYQEIKQALLTAPALGLPDLTKPFELFVDEKQGYAKGVLTQKLGPWRRPVAYLSKKLDPVAAGWPPCLRMVAAIAVLTKDAGKLTMGQPLVILAPHAVEALVKQPPDRWLSNARMTHYQALLLDTDRVQFGPVVALNPATLLPLPEEGLQHNCLDILAEAHGTRPDLTDQPLPDADHTWYTDGSSLLQEGQRKAGAAVTTETEVIWAKALPAGTSAQRAELIALTQALKMAEGKKLNVYTDSRYAFATAHIHGEIYRRRGWLTSEGKEIKNKDEILALLKALFLPKRLSIIHCPGHQKGHSAEARGNRMADQAARKAAITETPDTSTLLKRTADGSEFESPKKKAKVE

SEQ ID NO: 16086 - protein, 2230 aa, synthetic construct
MPAAKRVKLDGGDKKYSIGLDIGTNSVGWAVITDEYKVPSKKFKVLGNTDRHSIKKNLIGALLFDSGETAEATRLKRTARRRYTRRKNRICYLQEIFSNEMAKVDDSFFHRLEESFLVEEDKKHERHPIFGNIVDEVAYHEKYPTIYHLRKKLVDSTDKADLRLIYLALAHMIKFRGHFLIEGDLNPDNSDVDKLFIQLVQTYNQLFEENPINASGVDAKAILSARLSKSRRLENLIAQLPGEKKNGLFGNLIALSLGLTPNFKSNFDLAEDAKLQLSKDTYDDDLDNLLAQIGDQYADLFLAAKNLSDAILLSDILRVNTEITKAPLSASMIKRYDEHHQDLTLLKALVRQQLPEKYKEIFFDQSKNGYAGYIDGGASQEEFYKFIKPILEKMDGTEELLVKLNREDLLRKQRTFDNGSIPHQIHLGELHAILRRQEDFYPFLKDNREKIEKILTFRIPYYVGPLARGNSRFAWMTRKSEETITPWNFEEVVDKGASAQSFIERMTNFDKNLPNEKVLPKHSLLYEYFTVYNELTKVKYVTEGMRKPAFLSGEQKKAIVDLLFKTNRKVTVKQLKEDYFKKIECFDSVEISGVEDRFNASLGTYHDLLKIIKDKDFLDNEENEDILEDIVLTLTLFEDREMIEERLKTYAHLFDDKVMKQLKRRRYTGWGRLSRKLINGIRDKQSGKTILDFLKSDGFANRNFMQLIHDDSLTFKEDIQKAQVSGQGDSLHEHIANLAGSPAIKKGILQTVKVVDELVKVMGRHKPENIVIEMARENQTTQKGQKNSRERMKRIEEGIKELGSQILKEHPVENTQLQNEKLYLYYLQNGRDMYVDQELDINRLSDYDVDHIVPQSFLKDDSIDNKVLTRSDKARGKSDNVPSEEVVKKMKNYWRQLLNAKLITQRKFDNLTKAERGGLSELDKAGFIKRQLVETRQITKHVAQILDSRMNTKYDENDKLIREVKVITLKSKLVSDFRKDFQFYKVREINNYHHAHDAYLNAVVGTALIKKYPKLESEFVYGDYKVYDVRKMIAKSEQEIGKATAKYFFYSNIMNFFKTEITLANGEIRKRPLIETNGETGEIVWDKGRDFATVRKVLSMPQVNIVKKTEVQTGGFSKESILPKRNSDKLIARKKDWDPKKYGGFDSPTVAYSVLVVAKVEKGKSKKLKSVKELLGITIMERSSFEKNPIDFLEAKGYKEVKKDLIIKLPKYSLFELENGRKRMLASAGELQKGNELALPSKYVNFLYLASHYEKLKGSPEDNEQKQLFVEQHKHYLDEIIEQISEFSKRVILADANLDKVLSAYNKHRDKPIREQAENIIHLFTLTNLGAPAAFKYFDTTIDRKRYTSTKEVLDATLIHQSITGLYETRIDLSQLGGDGSSGGGEAAAKMASNFTQFVLVDNGGTGDVTVAPSNFANGIAEWISSNSRSQAYKVTCSVRQSSAQNRKYTIKVEVPKGAWRSYLNMELTIPIFATNSDCELIVKAMQGLLKDGNPIPSAIAANSGIYSGGSSGGSSGSETPGTSESATPESSGGSSGGSSTLNIEDEHRLHETSKEPDVSLGSTWLSDFPQAWAETGGMGLAVRQAPLIIPLKATSTPVSIKQYPMSQEARLGIKPHIQRLLDQGILVPCQSPWNTPLLPVKKPGTNDYRPVQDLREVNKRVEDIHPTVPNPYNLLSGLPPSHQWYTVLDLKDAFFCLRLHPTSQPLFAFEWRDPEMGISGQLTWTRLPQGFKNSPTLFNEALHRDLADFRIQHPDLILLQYVDDLLLAATSELDCQQGTRALLQTLGNLGYRASAKKAQICQKQVKYLGYLLKEGQRWLTEARKETVMGQPTPKTPRQLREFLGKAGFCRLFIPGFAEMAAPLYPLTKPGTLFNWGPDQQKAYQEIKQALLTAPALGLPDLTKPFELFVDEKQGYAKGVLTQKLGPWRRPVAYLSKKLDPVAAGWPPCLRMVAAIAVLTKDAGKLTMGQPLVILAPHAVEALVKQPPDRWLSNARMTHYQALLLDTDRVQFGPVVALNPATLLPLPEEGLQHNCLDILAEAHGTRPDLTDQPLPDADHTWYTDGSSLLQEGQRKAGAAVTTETEVIWAKALPAGTSAQRAELIALTQALKMAEGKKLNVYTDSRYAFATAHIHGEIYRRRGWLTSEGKEIKNKDEILALLKALFLPKRLSIIHCPGHQKGHSAEARGNRMADQAARKAAITETPDTSTLLKRTADGSEFESPKKKAKVE

SEQ ID NO: 16087 - protein, 2215 aa, synthetic construct
MPAAKRVKLDGGDKKYSIGLDIGTNSVGWAVITDEYKVPSKKFKVLGNTDRHSIKKNLIGALLFDSGETAEATRLKRTARRRYTRRKNRICYLQEIFSNEMAKVDDSFFHRLEESFLVEEDKKHERHPIFGNIVDEVAYHEKYPTIYHLRKKLVDSTDKADLRLIYLALAHMIKFRGHFLIEGDLNPDNSDVDKLFIQLVQTYNQLFEENPINASGVDAKAILSARLSKSRRLENLIAQLPGEKKNGLFGNLIALSLGLTPNFKSNFDLAEDAKLQLSKDTYDDDLDNLLAQIGDQYADLFLAAKNLSDAILLSDILRVNTEITKAPLSASMIKRYDEHHQDLTLLKALVRQQLPEKYKEIFFDQSKNGYAGYIDGGASQEEFYKFIKPILEKMDGTEELLVKLNREDLLRKQRTFDNGSIPHQIHLGELHAILRRQEDFYPFLKDNREKIEKILTFRIPYYVGPLARGNSRFAWMTRKSEETITPWNFEEVVDKGASAQSFIERMTNFDKNLPNEKVLPKHSLLYEYFTVYNELTKVKYVTEGMRKPAFLSGEQKKAIVDLLFKTNRKVTVKQLKEDYFKKIECFDSVEISGVEDRFNASLGTYHDLLKIIKDKDFLDNEENEDILEDIVLTLTLFEDREMIEERLKTYAHLFDDKVMKQLKRRRYTGWGRLSRKLINGIRDKQSGKTILDFLKSDGFANRNFMQLIHDDSLTFKEDIQKAQVSGQGDSLHEHIANLAGSPAIKKGILQTVKVVDELVKVMGRHKPENIVIEMARENQTTQKGQKNSRERMKRIEEGIKELGSQILKEHPVENTQLQNEKLYLYYLQNGRDMYVDQELDINRLSDYDVDHIVPQSFLKDDSIDNKVLTRSDKARGKSDNVPSEEVVKKMKNYWRQLLNAKLITQRKFDNLTKAERGGLSELDKAGFIKRQLVETRQITKHVAQILDSRMNTKYDENDKLIREVKVITLKSKLVSDFRKDFQFYKVREINNYHHAHDAYLNAVVGTALIKKYPKLESEFVYGDYKVYDVRKMIAKSEQEIGKATAKYFFYSNIMNFFKTEITLANGEIRKRPLIETNGETGEIVWDKGRDFATVRKVLSMPQVNIVKKTEVQTGGFSKESILPKRNSDKLIARKKDWDPKKYGGFDSPTVAYSVLVVAKVEKGKSKKLKSVKELLGITIMERSSFEKNPIDFLEAKGYKEVKKDLIIKLPKYSLFELENGRKRMLASAGELQKGNELALPSKYVNFLYLASHYEKLKGSPEDNEQKQLFVEQHKHYLDEIIEQISEFSKRVILADANLDKVLSAYNKHRDKPIREQAENIIHLFTLTNLGAPAAFKYFDTTIDRKRYTSTKEVLDATLIHQSITGLYETRIDLSQLGGDGSSGGGEAAAKMASNFTQFVLVDNGGTGDVTVAPSNFANGIAEWISSNSRSQAYKVTCSVRQSSAQNRKYTIKVEVPKGAWRSYLNMELTIPIFATNSDCELIVKAMQGLLKDGNPIPSAIAANSGIYGSSGSSGSSGSSGSSGSSTLNIEDEHRLHETSKEPDVSLGSTWLSDFPQAWAETGGMGLAVRQAPLIIPLKATSTPVSIKQYPMSQEARLGIKPHIQRLLDQGILVPCQSPWNTPLLPVKKPGTNDYRPVQDLREVNKRVEDIHPTVPNPYNLLSGLPPSHQWYTVLDLKDAFFCLRLHPTSQPLFAFEWRDPEMGISGQLTWTRLPQGFKNSPTLFNEALHRDLADFRIQHPDLILLQYVDDLLLAATSELDCQQGTRALLQTLGNLGYRASAKKAQICQKQVKYLGYLLKEGQRWLTEARKETVMGQPTPKTPRQLREFLGKAGFCRLFIPGFAEMAAPLYPLTKPGTLFNWGPDQQKAYQEIKQALLTAPALGLPDLTKPFELFVDEKQGYAKGVLTQKLGPWRRPVAYLSKKLDPVAAGWPPCLRMVAAIAVLTKDAGKLTMGQPLVILAPHAVEALVKQPPDRWLSNARMTHYQALLLDTDRVQFGPVVALNPATLLPLPEEGLQHNCLDILAEAHGTRPDLTDQPLPDADHTWYTDGSSLLQEGQRKAGAAVTTETEVIWAKALPAGTSAQRAELIALTQALKMAEGKKLNVYTDSRYAFATAHIHGEIYRRRGWLTSEGKEIKNKDEILALLKALFLPKRLSIIHCPGHQKGHSAEARGNRMADQAARKAAITETPDTSTLLKRTADGSEFESPKKKAKVE

SEQ ID NO: 16088 - protein, 2208 aa, synthetic construct
MPAAKRVKLDGGDKKYSIGLDIGTNSVGWAVITDEYKVPSKKFKVLGNTDRHSIKKNLIGALLFDSGETAEATRLKRTARRRYTRRKNRICYLQEIFSNEMAKVDDSFFHRLEESFLVEEDKKHERHPIFGNIVDEVAYHEKYPTIYHLRKKLVDSTDKADLRLIYLALAHMIKFRGHFLIEGDLNPDNSDVDKLFIQLVQTYNQLFEENPINASGVDAKAILSARLSKSRRLENLIAQLPGEKKNGLFGNLIALSLGLTPNFKSNFDLAEDAKLQLSKDTYDDDLDNLLAQIGDQYADLFLAAKNLSDAILLSDILRVNTEITKAPLSASMIKRYDEHHQDLTLLKALVRQQLPEKYKEIFFDQSKNGYAGYIDGGASQEEFYKFIKPILEKMDGTEELLVKLNREDLLRKQRTFDNGSIPHQIHLGELHAILRRQEDFYPFLKDNREKIEKILTFRIPYYVGPLARGNSRFAWMTRKSEETITPWNFEEVVDKGASAQSFIERMTNFDKNLPNEKVLPKHSLLYEYFTVYNELTKVKYVTEGMRKPAFLSGEQKKAIVDLLFKTNRKVTVKQLKEDYFKKIECFDSVEISGVEDRFNASLGTYHDLLKIIKDKDFLDNEENEDILEDIVLTLTLFEDREMIEERLKTYAHLFDDKVMKQLKRRRYTGWGRLSRKLINGIRDKQSGKTILDFLKSDGFANRNFMQLIHDDSLTFKEDIQKAQVSGQGDSLHEHIANLAGSPAIKKGILQTVKVVDELVKVMGRHKPENIVIEMARENQTTQKGQKNSRERMKRIEEGIKELGSQILKEHPVENTQLQNEKLYLYYLQNGRDMYVDQELDINRLSDYDVDHIVPQSFLKDDSIDNKVLTRSDKARGKSDNVPSEEVVKKMKNYWRQLLNAKLITQRKFDNLTKAERGGLSELDKAGFIKRQLVETRQITKHVAQILDSRMNTKYDENDKLIREVKVITLKSKLVSDFRKDFQFYKVREINNYHHAHDAYLNAVVGTALIKKYPKLESEFVYGDYKVYDVRKMIAKSEQEIGKATAKYFFYSNIMNFFKTEITLANGEIRKRPLIETNGETGEIVWDKGRDFATVRKVLSMPQVNIVKKTEVQTGGFSKESILPKRNSDKLIARKKDWDPKKYGGFDSPTVAYSVLVVAKVEKGKSKKLKSVKELLGITIMERSSFEKNPIDFLEAKGYKEVKKDLIIKLPKYSLFELENGRKRMLASAGELQKGNELALPSKYVNFLYLASHYEKLKGSPEDNEQKQLFVEQHKHYLDEIIEQISEFSKRVILADANLDKVLSAYNKHRDKPIREQAENIIHLFTLTNLGAPAAFKYFDTTIDRKRYTSTKEVLDATLIHQSITGLYETRIDLSQLGGDGSSGGGEAAAKMASNFTQFVLVDNGGTGDVTVAPSNFANGIAEWISSNSRSQAYKVTCSVRQSSAQNRKYTIKVEVPKGAWRSYLNMELTIPIFATNSDCELIVKAMQGLLKDGNPIPSAIAANSGIYGSSGGGEAAAKTLNIEDEHRLHETSKEPDVSLGSTWLSDFPQAWAETGGMGLAVRQAPLIIPLKATSTPVSIKQYPMSQEARLGIKPHIQRLLDQGILVPCQSPWNTPLLPVKKPGTNDYRPVQDLREVNKRVEDIHPTVPNPYNLLSGLPPSHQWYTVLDLKDAFFCLRLHPTSQPLFAFEWRDPEMGISGQLTWTRLPQGFKNSPTLFNEALHRDLADFRIQHPDLILLQYVDDLLLAATSELDCQQGTRALLQTLGNLGYRASAKKAQICQKQVKYLGYLLKEGQRWLTEARKETVMGQPTPKTPRQLREFLGKAGFCRLFIPGFAEMAAPLYPLTKPGTLFNWGPDQQKAYQEIKQALLTAPALGLPDLTKPFELFVDEKQGYAKGVLTQKLGPWRRPVAYLSKKLDPVAAGWPPCLRMVAAIAVLTKDAGKLTMGQPLVILAPHAVEALVKQPPDRWLSNARMTHYQALLLDTDRVQFGPVVALNPATLLPLPEEGLQHNCLDILAEAHGTRPDLTDQPLPDADHTWYTDGSSLLQEGQRKAGAAVTTETEVIWAKALPAGTSAQRAELIALTQALKMAEGKKLNVYTDSRYAFATAHIHGEIYRRRGWLTSEGKEIKNKDEILALLKALFLPKRLSIIHCPGHQKGHSAEARGNRMADQAARKAAITETPDTSTLLKRTADGSEFESPKKKAKVE

SEQ ID NO: 16089 - protein, 2366 aa, synthetic construct
MPAAKRVKLDGGDKKYSIGLDIGTNSVGWAVITDEYKVPSKKFKVLGNTDRHSIKKNLIGALLFDSGETAEATRLKRTARRRYTRRKNRICYLQEIFSNEMAKVDDSFFHRLEESFLVEEDKKHERHPIFGNIVDEVAYHEKYPTIYHLRKKLVDSTDKADLRLIYLALAHMIKFRGHFLIEGDLNPDNSDVDKLFIQLVQTYNQLFEENPINASGVDAKAILSARLSKSRRLENLIAQLPGEKKNGLFGNLIALSLGLTPNFKSNFDLAEDAKLQLSKDTYDDDLDNLLAQIGDQYADLFLAAKNLSDAILLSDILRVNTEITKAPLSASMIKRYDEHHQDLTLLKALVRQQLPEKYKEIFFDQSKNGYAGYIDGGASQEEFYKFIKPILEKMDGTEELLVKLNREDLLRKQRTFDNGSIPHQIHLGELHAILRRQEDFYPFLKDNREKIEKILTFRIPYYVGPLARGNSRFAWMTRKSEETITPWNFEEVVDKGASAQSFIERMTNFDKNLPNEKVLPKHSLLYEYFTVYNELTKVKYVTEGMRKPAFLSGEQKKAIVDLLFKTNRKVTVKQLKEDYFKKIECFDSVEISGVEDRFNASLGTYHDLLKIIKDKDFLDNEENEDILEDIVLTLTLFEDREMIEERLKTYAHLFDDKVMKQLKRRRYTGWGRLSRKLINGIRDKQSGKTILDFLKSDGFANRNFMQLIHDDSLTFKEDIQKAQVSGQGDSLHEHIANLAGSPAIKKGILQTVKVVDELVKVMGRHKPENIVIEMARENQTTQKGQKNSRERMKRIEEGIKELGSQILKEHPVENTQLQNEKLYLYYLQNGRDMYVDQELDINRLSDYDVDHIVPQSFLKDDSIDNKVLTRSDKARGKSDNVPSEEVVKKMKNYWRQLLNAKLITQRKFDNLTKAERGGLSELDKAGFIKRQLVETRQITKHVAQILDSRMNTKYDENDKLIREVKVITLKSKLVSDFRKDFQFYKVREINNYHHAHDAYLNAVVGTALIKKYPKLESEFVYGDYKVYDVRKMIAKSEQEIGKATAKYFFYSNIMNFFKTEITLANGEIRKRPLIETNGETGEIVWDKGRDFATVRKVLSMPQVNIVKKTEVQTGGFSKESILPKRNSDKLIARKKDWDPKKYGGFDSPTVAYSVLVVAKVEKGKSKKLKSVKELLGITIMERSSFEKNPIDFLEAKGYKEVKKDLIIKLPKYSLFELENGRKRMLASAGELQKGNELALPSKYVNFLYLASHYEKLKGSPEDNEQKQLFVEQHKHYLDEIIEQISEFSKRVILADANLDKVLSAYNKHRDKPIREQAENIIHLFTLTNLGAPAAFKYFDTTIDRKRYTSTKEVLDATLIHQSITGLYETRIDLSQLGGDGSSGGGEAAAKMASNFTQFVLVDNGGTGDVTVAPSNFANGIAEWISSNSRSQAYKVTCSVRQSSAQNRKYTIKVEVPKGAWRSYLNMELTIPIFATNSDCELIVKAMQGLLKDGNPIPSAIAANSGIYGGSGGSMASNFTQFVLVDNGGTGDVTVAPSNFANGIAEWISSNSRSQAYKVTCSVRQSSAQNRKYTIKVEVPKGAWRSYLNMELTIPIFATNSDCELIVKAMQGLLKDGNPIPSAIAANSGIYAEAAAKEAAAKEAAAKEAAAKALEAEAAAKEAAAKEAAAKEAAAKATLNIEDEHRLHETSKEPDVSLGSTWLSDFPQAWAETGGMGLAVRQAPLIIPLKATSTPVSIKQYPMSQEARLGIKPHIQRLLDQGILVPCQSPWNTPLLPVKKPGTNDYRPVQDLREVNKRVEDIHPTVPNPYNLLSGLPPSHQWYTVLDLKDAFFCLRLHPTSQPLFAFEWRDPEMGISGQLTWTRLPQGFKNSPTLFNEALHRDLADFRIQHPDLILLQYVDDLLLAATSELDCQQGTRALLQTLGNLGYRASAKKAQICQKQVKYLGYLLKEGQRWLTEARKETVMGQPTPKTPRQLREFLGKAGFCRLFIPGFAEMAAPLYPLTKPGTLFNWGPDQQKAYQEIKQALLTAPALGLPDLTKPFELFVDEKQGYAKGVLTQKLGPWRRPVAYLSKKLDPVAAGWPPCLRMVAAIAVLTKDAGKLTMGQPLVILAPHAVEALVKQPPDRWLSNARMTHYQALLLDTDRVQFGPVVALNPATLLPLPEEGLQHNCLDILAEAHGTRPDLTDQPLPDADHTWYTDGSSLLQEGQRKAGAAVTTETEVIWAKALPAGTSAQRAELIALTQALKMAEGKKLNVYTDSRYAFATAHIHGEIYRRRGWLTSEGKEIKNKDEILALLKALFLPKRLSIIHCPGHQKGHSAEARGNRMADQAARKAAITETPDTSTLLKRTADGSEFESPKKKAKVE

SEQ ID NO: 16090 - protein, 2353 aa, synthetic construct
MPAAKRVKLDGGDKKYSIGLDIGTNSVGWAVITDEYKVPSKKFKVLGNTDRHSIKKNLIGALLFDSGETAEATRLKRTARRRYTRRKNRICYLQEIFSNEMAKVDDSFFHRLEESFLVEEDKKHERHPIFGNIVDEVAYHEKYPTIYHLRKKLVDSTDKADLRLIYLALAHMIKFRGHFLIEGDLNPDNSDVDKLFIQLVQTYNQLFEENPINASGVDAKAILSARLSKSRRLENLIAQLPGEKKNGLFGNLIALSLGLTPNFKSNFDLAEDAKLQLSKDTYDDDLDNLLAQIGDQYADLFLAAKNLSDAILLSDILRVNTEITKAPLSASMIKRYDEHHQDLTLLKALVRQQLPEKYKEIFFDQSKNGYAGYIDGGASQEEFYKFIKPILEKMDGTEELLVKLNREDLLRKQRTFDNGSIPHQIHLGELHAILRRQEDFYPFLKDNREKIEKILTFRIPYYVGPLARGNSRFAWMTRKSEETITPWNFEEVVDKGASAQSFIERMTNFDKNLPNEKVLPKHSLLYEYFTVYNELTKVKYVTEGMRKPAFLSGEQKKAIVDLLFKTNRKVTVKQLKEDYFKKIECFDSVEISGVEDRFNASLGTYHDLLKIIKDKDFLDNEENEDILEDIVLTLTLFEDREMIEERLKTYAHLFDDKVMKQLKRRRYTGWGRLSRKLINGIRDKQSGKTILDFLKSDGFANRNFMQLIHDDSLTFKEDIQKAQVSGQGDSLHEHIANLAGSPAIKKGILQTVKVVDELVKVMGRHKPENIVIEMARENQTTQKGQKNSRERMKRIEEGIKELGSQILKEHPVENTQLQNEKLYLYYLQNGRDMYVDQELDINRLSDYDVDHIVPQSFLKDDSIDNKVLTRSDKARGKSDNVPSEEVVKKMKNYWRQLLNAKLITQRKFDNLTKAERGGLSELDKAGFIKRQLVETRQITKHVAQILDSRMNTKYDENDKLIREVKVITLKSKLVSDFRKDFQFYKVREINNYHHAHDAYLNAVVGTALIKKYPKLESEFVYGDYKVYDVRKMIAKSEQEIGKATAKYFFYSNIMNFFKTEITLANGEIRKRPLIETNGETGEIVWDKGRDFATVRKVLSMPQVNIVKKTEVQTGGFSKESILPKRNSDKLIARKKDWDPKKYGGFDSPTVAYSVLVVAKVEKGKSKKLKSVKELLGITIMERSSFEKNPIDFLEAKGYKEVKKDLIIKLPKYSLFELENGRKRMLASAGELQKGNELALPSKYVNFLYLASHYEKLKGSPEDNEQKQLFVEQHKHYLDEIIEQISEFSKRVILADANLDKVLSAYNKHRDKPIREQAENIIHLFTLTNLGAPAAFKYFDTTIDRKRYTSTKEVLDATLIHQSITGLYETRIDLSQLGGDGSSGGGEAAAKMASNFTQFVLVDNGGTGDVTVAPSNFANGIAEWISSNSRSQAYKVTCSVRQSSAQNRKYTIKVEVPKGAWRSYLNMELTIPIFATNSDCELIVKAMQGLLKDGNPIPSAIAANSGIYGGSGGSMASNFTQFVLVDNGGTGDVTVAPSNFANGIAEWISSNSRSQAYKVTCSVRQSSAQNRKYTIKVEVPKGAWRSYLNMELTIPIFATNSDCELIVKAMQGLLKDGNPIPSAIAANSGIYSGGSSGGSSGSETPGTSESATPESSGGSSGGSSTLNIEDEHRLHETSKEPDVSLGSTWLSDFPQAWAETGGMGLAVRQAPLIIPLKATSTPVSIKQYPMSQEARLGIKPHIQRLLDQGILVPCQSPWNTPLLPVKKPGTNDYRPVQDLREVNKRVEDIHPTVPNPYNLLSGLPPSHQWYTVLDLKDAFFCLRLHPTSQPLFAFEWRDPEMGISGQLTWTRLPQGFKNSPTLFNEALHRDLADFRIQHPDLILLQYVDDLLLAATSELDCQQGTRALLQTLGNLGYRASAKKAQICQKQVKYLGYLLKEGQRWLTEARKETVMGQPTPKTPRQLREFLGKAGFCRLFIPGFAEMAAPLYPLTKPGTLFNWGPDQQKAYQEIKQALLTAPALGLPDLTKPFELFVDEKQGYAKGVLTQKLGPWRRPVAYLSKKLDPVAAGWPPCLRMVAAIAVLTKDAGKLTMGQPLVILAPHAVEALVKQPPDRWLSNARMTHYQALLLDTDRVQFGPVVALNPATLLPLPEEGLQHNCLDILAEAHGTRPDLTDQPLPDADHTWYTDGSSLLQEGQRKAGAAVTTETEVIWAKALPAGTSAQRAELIALTQALKMAEGKKLNVYTDSRYAFATAHIHGEIYRRRGWLTSEGKEIKNKDEILALLKALFLPKRLSIIHCPGHQKGHSAEARGNRMADQAARKAAITETPDTSTLLKRTADGSEFESPKKKAKVE

SEQ ID NO: 16091 - protein, 2338 aa, synthetic construct
MPAAKRVKLDGGDKKYSIGLDIGTNSVGWAVITDEYKVPSKKFKVLGNTDRHSIKKNLIGALLFDSGETAEATRLKRTARRRYTRRKNRICYLQEIFSNEMAKVDDSFFHRLEESFLVEEDKKHERHPIFGNIVDEVAYHEKYPTIYHLRKKLVDSTDKADLRLIYLALAHMIKFRGHFLIEGDLNPDNSDVDKLFIQLVQTYNQLFEENPINASGVDAKAILSARLSKSRRLENLIAQLPGEKKNGLFGNLIALSLGLTPNFKSNFDLAEDAKLQLSKDTYDDDLDNLLAQIGDQYADLFLAAKNLSDAILLSDILRVNTEITKAPLSASMIKRYDEHHQDLTLLKALVRQQLPEKYKEIFFDQSKNGYAGYIDGGASQEEFYKFIKPILEKMDGTEELLVKLNREDLLRKQRTFDNGSIPHQIHLGELHAILRRQEDFYPFLKDNREKIEKILTFRIPYYVGPLARGNSRFAWMTRKSEETITPWNFEEVVDKGASAQSFIERMTNFDKNLPNEKVLPKHSLLYEYFTVYNELTKVKYVTEGMRKPAFLSGEQKKAIVDLLFKTNRKVTVKQLKEDYFKKIECFDSVEISGVEDRFNASLGTYHDLLKIIKDKDFLDNEENEDILEDIVLTLTLFEDREMIEERLKTYAHLFDDKVMKQLKRRRYTGWGRLSRKLINGIRDKQSGKTILDFLKSDGFANRNFMQLIHDDSLTFKEDIQKAQVSGQGDSLHEHIANLAGSPAIKKGILQTVKVVDELVKVMGRHKPENIVIEMARENQTTQKGQKNSRERMKRIEEGIKELGSQILKEHPVENTQLQNEKLYLYYLQNGRDMYVDQELDINRLSDYDVDHIVPQSFLKDDSIDNKVLTRSDKARGKSDNVPSEEVVKKMKNYWRQLLNAKLITQRKFDNLTKAERGGLSELDKAGFIKRQLVETRQITKHVAQILDSRMNTKYDENDKLIREVKVITLKSKLVSDFRKDFQFYKVREINNYHHAHDAYLNAVVGTALIKKYPKLESEFVYGDYKVYDVRKMIAKSEQEIGKATAKYFFYSNIMNFFKTEITLANGEIRKRPLIETNGETGEIVWDKGRDFATVRKVLSMPQVNIVKKTEVQTGGFSKESILPKRNSDKLIARKKDWDPKKYGGFDSPTVAYSVLVVAKVEKGKSKKLKSVKELLGITIMERSSFEKNPIDFLEAKGYKEVKKDLIIKLPKYSLFELENGRKRMLASAGELQKGNELALPSKYVNFLYLASHYEKLKGSPEDNEQKQLFVEQHKHYLDEIIEQISEFSKRVILADANLDKVLSAYNKHRDKPIREQAENIIHLFTLTNLGAPAAFKYFDTTIDRKRYTSTKEVLDATLIHQSITGLYETRIDLSQLGGDGSSGGGEAAAKMASNFTQFVLVDNGGTGDVTVAPSNFANGIAEWISSNSRSQAYKVTCSVRQSSAQNRKYTIKVEVPKGAWRSYLNMELTIPIFATNSDCELIVKAMQGLLKDGNPIPSAIAANSGIYGGSGGSMASNFTQFVLVDNGGTGDVTVAPSNFANGIAEWISSNSRSQAYKVTCSVRQSSAQNRKYTIKVEVPKGAWRSYLNMELTIPIFATNSDCELIVKAMQGLLKDGNPIPSAIAANSGIYGSSGSSGSSGSSGSSGSSTLNIEDEHRLHETSKEPDVSLGSTWLSDFPQAWAETGGMGLAVRQAPLIIPLKATSTPVSIKQYPMSQEARLGIKPHIQRLLDQGILVPCQSPWNTPLLPVKKPGTNDYRPVQDLREVNKRVEDIHPTVPNPYNLLSGLPPSHQWYTVLDLKDAFFCLRLHPTSQPLFAFEWRDPEMGISGQLTWTRLPQGFKNSPTLFNEALHRDLADFRIQHPDLILLQYVDDLLLAATSELDCQQGTRALLQTLGNLGYRASAKKAQICQKQVKYLGYLLKEGQRWLTEARKETVMGQPTPKTPRQLREFLGKAGFCRLFIPGFAEMAAPLYPLTKPGTLFNWGPDQQKAYQEIKQALLTAPALGLPDLTKPFELFVDEKQGYAKGVLTQKLGPWRRPVAYLSKKLDPVAAGWPPCLRMVAAIAVLTKDAGKLTMGQPLVILAPHAVEALVKQPPDRWLSNARMTHYQALLLDTDRVQFGPVVALNPATLLPLPEEGLQHNCLDILAEAHGTRPDLTDQPLPDADHTWYTDGSSLLQEGQRKAGAAVTTETEVIWAKALPAGTSAQRAELIALTQALKMAEGKKLNVYTDSRYAFATAHIHGEIYRRRGWLTSEGKEIKNKDEILALLKALFLPKRLSIIHCPGHQKGHSAEARGNRMADQAARKAAITETPDTSTLLKRTADGSEFESPKKKAKVE

SEQ ID NO: 16092 - protein, 2331 aa, synthetic construct
MPAAKRVKLDGGDKKYSIGLDIGTNSVGWAVITDEYKVPSKKFKVLGNTDRHSIKKNLIGALLFDSGETAEATRLKRTARRRYTRRKNRICYLQEIFSNEMAKVDDSFFHRLEESFLVEEDKKHERHPIFGNIVDEVAYHEKYPTIYHLRKKLVDSTDKADLRLIYLALAHMIKFRGHFLIEGDLNPDNSDVDKLFIQLVQTYNQLFEENPINASGVDAKAILSARLSKSRRLENLIAQLPGEKKNGLFGNLIALSLGLTPNFKSNFDLAEDAKLQLSKDTYDDDLDNLLAQIGDQYADLFLAAKNLSDAILLSDILRVNTEITKAPLSASMIKRYDEHHQDLTLLKALVRQQLPEKYKEIFFDQSKNGYAGYIDGGASQEEFYKFIKPILEKMDGTEELLVKLNREDLLRKQRTFDNGSIPHQIHLGELHAILRRQEDFYPFLKDNREKIEKILTFRIPYYVGPLARGNSRFAWMTRKSEETITPWNFEEVVDKGASAQSFIERMTNFDKNLPNEKVLPKHSLLYEYFTVYNELTKVKYVTEGMRKPAFLSGEQKKAIVDLLFKTNRKVTVKQLKEDYFKKIECFDSVEISGVEDRFNASLGTYHDLLKIIKDKDFLDNEENEDILEDIVLTLTLFEDREMIEERLKTYAHLFDDKVMKQLKRRRYTGWGRLSRKLINGIRDKQSGKTILDFLKSDGFANRNFMQLIHDDSLTFKEDIQKAQVSGQGDSLHEHIANLAGSPAIKKGILQTVKVVDELVKVMGRHKPENIVIEMARENQTTQKGQKNSRERMKRIEEGIKELGSQILKEHPVENTQLQNEKLYLYYLQNGRDMYVDQELDINRLSDYDVDHIVPQSFLKDDSIDNKVLTRSDKARGKSDNVPSEEVVKKMKNYWRQLLNAKLITQRKFDNLTKAERGGLSELDKAGFIKRQLVETRQITKHVAQILDSRMNTKYDENDKLIREVKVITLKSKLVSDFRKDFQFYKVREINNYHHAHDAYLNAVVGTALIKKYPKLESEFVYGDYKVYDVRKMIAKSEQEIGKATAKYFFYSNIMNFFKTEITLANGEIRKRPLIETNGETGEIVWDKGRDFATVRKVLSMPQVNIVKKTEVQTGGFSKESILPKRNSDKLIARKKDWDPKKYGGFDSPTVAYSVLVVAKVEKGKSKKLKSVKELLGITIMERSSFEKNPIDFLEAKGYKEVKKDLIIKLPKYSLFELENGRKRMLASAGELQKGNELALPSKYVNFLYLASHYEKLKGSPEDNEQKQLFVEQHKHYLDEIIEQISEFSKRVILADANLDKVLSAYNKHRDKPIREQAENIIHLFTLTNLGAPAAFKYFDTTIDRKRYTSTKEVLDATLIHQSITGLYETRIDLSQLGGDGSSGGGEAAAKMASNFTQFVLVDNGGTGDVTVAPSNFANGIAEWISSNSRSQAYKVTCSVRQSSAQNRKYTIKVEVPKGAWRSYLNMELTIPIFATNSDCELIVKAMQGLLKDGNPIPSAIAANSGIYGGSGGSMASNFTQFVLVDNGGTGDVTVAPSNFANGIAEWISSNSRSQAYKVTCSVRQSSAQNRKYTIKVEVPKGAWRSYLNMELTIPIFATNSDCELIVKAMQGLLKDGNPIPSAIAANSGIYGSSGGGEAAAKTLNIEDEHRLHETSKEPDVSLGSTWLSDFPQAWAETGGMGLAVRQAPLIIPLKATSTPVSIKQYPMSQEARLGIKPHIQRLLDQGILVPCQSPWNTPLLPVKKPGTNDYRPVQDLREVNKRVEDIHPTVPNPYNLLSGLPPSHQWYTVLDLKDAFFCLRLHPTSQPLFAFEWRDPEMGISGQLTWTRLPQGFKNSPTLFNEALHRDLADFRIQHPDLILLQYVDDLLLAATSELDCQQGTRALLQTLGNLGYRASAKKAQICQKQVKYLGYLLKEGQRWLTEARKETVMGQPTPKTPRQLREFLGKAGFCRLFIPGFAEMAAPLYPLTKPGTLFNWGPDQQKAYQEIKQALLTAPALGLPDLTKPFELFVDEKQGYAKGVLTQKLGPWRRPVAYLSKKLDPVAAGWPPCLRMVAAIAVLTKDAGKLTMGQPLVILAPHAVEALVKQPPDRWLSNARMTHYQALLLDTDRVQFGPVVALNPATLLPLPEEGLQHNCLDILAEAHGTRPDLTDQPLPDADHTWYTDGSSLLQEGQRKAGAAVTTETEVIWAKALPAGTSAQRAELIALTQALKMAEGKKLNVYTDSRYAFATAHIHGEIYRRRGWLTSEGKEIKNKDEILALLKALFLPKRLSIIHCPGHQKGHSAEARGNRMADQAARKAAITETPDTSTLLKRTADGSEFESPKKKAKVE

SEQ ID NO: 16093 - protein, 2622 aa, synthetic construct
MPAAKRVKLDGGDKKYSIGLDIGTNSVGWAVITDEYKVPSKKFKVLGNTDRHSIKKNLIGALLFDSGETAEATRLKRTARRRYTRRKNRICYLQEIFSNEMAKVDDSFFHRLEESFLVEEDKKHERHPIFGNIVDEVAYHEKYPTIYHLRKKLVDSTDKADLRLIYLALAHMIKFRGHFLIEGDLNPDNSDVDKLFIQLVQTYNQLFEENPINASGVDAKAILSARLSKSRRLENLIAQLPGEKKNGLFGNLIALSLGLTPNFKSNFDLAEDAKLQLSKDTYDDDLDNLLAQIGDQYADLFLAAKNLSDAILLSDILRVNTEITKAPLSASMIKRYDEHHQDLTLLKALVRQQLPEKYKEIFFDQSKNGYAGYIDGGASQEEFYKFIKPILEKMDGTEELLVKLNREDLLRKQRTFDNGSIPHQIHLGELHAILRRQEDFYPFLKDNREKIEKILTFRIPYYVGPLARGNSRFAWMTRKSEETITPWNFEEVVDKGASAQSFIERMTNFDKNLPNEKVLPKHSLLYEYFTVYNELTKVKYVTEGMRKPAFLSGEQKKAIVDLLFKTNRKVTVKQLKEDYFKKIECFDSVEISGVEDRFNASLGTYHDLLKIIKDKDFLDNEENEDILEDIVLTLTLFEDREMIEERLKTYAHLFDDKVMKQLKRRRYTGWGRLSRKLINGIRDKQSGKTILDFLKSDGFANRNFMQLIHDDSLTFKEDIQKAQVSGQGDSLHEHIANLAGSPAIKKGILQTVKVVDELVKVMGRHKPENIVIEMARENQTTQKGQKNSRERMKRIEEGIKELGSQILKEHPVENTQLQNEKLYLYYLQNGRDMYVDQELDINRLSDYDVDHIVPQSFLKDDSIDNKVLTRSDKARGKSDNVPSEEVVKKMKNYWRQLLNAKLITQRKFDNLTKAERGGLSELDKAGFIKRQLVETRQITKHVAQILDSRMNTKYDENDKLIREVKVITLKSKLVSDFRKDFQFYKVREINNYHHAHDAYLNAVVGTALIKKYPKLESEFVYGDYKVYDVRKMIAKSEQEIGKATAKYFFYSNIMNFFKTEITLANGEIRKRPLIETNGETGEIVWDKGRDFATVRKVLSMPQVNIVKKTEVQTGGFSKESILPKRNSDKLIARKKDWDPKKYGGFDSPTVAYSVLVVAKVEKGKSKKLKSVKELLGITIMERSSFEKNPIDFLEAKGYKEVKKDLIIKLPKYSLFELENGRKRMLASAGELQKGNELALPSKYVNFLYLASHYEKLKGSPEDNEQKQLFVEQHKHYLDEIIEQISEFSKRVILADANLDKVLSAYNKHRDKPIREQAENIIHLFTLTNLGAPAAFKYFDTTIDRKRYTSTKEVLDATLIHQSITGLYETRIDLSQLGGDGSSGGGEAAAKMASNFTQFVLVDNGGTGDVTVAPSNFANGIAEWISSNSRSQAYKVTCSVRQSSAQNRKYTIKVEVPKGAWRSYLNMELTIPIFATNSDCELIVKAMQGLLKDGNPIPSAIAANSGIYGGSGGSMASNFTQFVLVDNGGTGDVTVAPSNFANGIAEWISSNSRSQAYKVTCSVRQSSAQNRKYTIKVEVPKGAWRSYLNMELTIPIFATNSDCELIVKAMQGLLKDGNPIPSAIAANSGIYGGGSGGGSGGGSGGGSMASNFTQFVLVDNGGTGDVTVAPSNFANGIAEWISSNSRSQAYKVTCSVRQSSAQNRKYTIKVEVPKGAWRSYLNMELTIPIFATNSDCELIVKAMQGLLKDGNPIPSAIAANSGIYGGSGGSMASNFTQFVLVDNGGTGDVTVAPSNFANGIAEWISSNSRSQAYKVTCSVRQSSAQNRKYTIKVEVPKGAWRSYLNMELTIPIFATNSDCELIVKAMQGLLKDGNPIPSAIAANSGIYAEAAAKEAAAKEAAAKEAAAKALEAEAAAKEAAAKEAAAKEAAAKATLNIEDEHRLHETSKEPDVSLGSTWLSDFPQAWAETGGMGLAVRQAPLIIPLKATSTPVSIKQYPMSQEARLGIKPHIQRLLDQGILVPCQSPWNTPLLPVKKPGTNDYRPVQDLREVNKRVEDIHPTVPNPYNLLSGLPPSHQWYTVLDLKDAFFCLRLHPTSQPLFAFEWRDPEMGISGQLTWTRLPQGFKNSPTLFNEALHRDLADFRIQHPDLILLQYVDDLLLAATSELDCQQGTRALLQTLGNLGYRASAKKAQICQKQVKYLGYLLKEGQRWLTEARKETVMGQPTPKTPRQLREFLGKAGFCRLFIPGFAEMAAPLYPLTKPGTLFNWGPDQQKAYQEIKQALLTAPALGLPDLTKPFELFVDEKQGYAKGVLTQKLGPWRRPVAYLSKKLDPVAAGWPPCLRMVAAIAVLTKDAGKLTMGQPLVILAPHAVEALVKQPPDRWLSNARMTHYQALLLDTDRVQFGPVVALNPATLLPLPEEGLQHNCLDILAEAHGTRPDLTDQPLPDADHTWYTDGSSLLQEGQRKAGAAVTTETEVIWAKALPAGTSAQRAELIALTQALKMAEGKKLNVYTDSRYAFATAHIHGEIYRRRGWLTSEGKEIKNKDEILALLKALFLPKRLSIIHCPGHQKGHSAEARGNRMADQAARKAAITETPDTSTLLKRTADGSEFESPKKKAKVE

SEQ ID NO: 16094 - protein, 2609 aa, synthetic construct
MPAAKRVKLDGGDKKYSIGLDIGTNSVGWAVITDEYKVPSKKFKVLGNTDRHSIKKNLIGALLFDSGETAEATRLKRTARRRYTRRKNRICYLQEIFSNEMAKVDDSFFHRLEESFLVEEDKKHERHPIFGNIVDEVAYHEKYPTIYHLRKKLVDSTDKADLRLIYLALAHMIKFRGHFLIEGDLNPDNSDVDKLFIQLVQTYNQLFEENPINASGVDAKAILSARLSKSRRLENLIAQLPGEKKNGLFGNLIALSLGLTPNFKSNFDLAEDAKLQLSKDTYDDDLDNLLAQIGDQYADLFLAAKNLSDAILLSDILRVNTEITKAPLSASMIKRYDEHHQDLTLLKALVRQQLPEKYKEIFFDQSKNGYAGYIDGGASQEEFYKFIKPILEKMDGTEELLVKLNREDLLRKQRTFDNGSIPHQIHLGELHAILRRQEDFYPFLKDNREKIEKILTFRIPYYVGPLARGNSRFAWMTRKSEETITPWNFEEVVDKGASAQSFIERMTNFDKNLPNEKVLPKHSLLYEYFTVYNELTKVKYVTEGMRKPAFLSGEQKKAIVDLLFKTNRKVTVKQLKEDYFKKIECFDSVEISGVEDRFNASLGTYHDLLKIIKDKDFLDNEENEDILEDIVLTLTLFEDREMIEERLKTYAHLFDDKVMKQLKRRRYTGWGRLSRKLINGIRDKQSGKTILDFLKSDGFANRNFMQLIHDDSLTFKEDIQKAQVSGQGDSLHEHIANLAGSPAIKKGILQTVKVVDELVKVMGRHKPENIVIEMARENQTTQKGQKNSRERMKRIEEGIKELGSQILKEHPVENTQLQNEKLYLYYLQNGRDMYVDQELDINRLSDYDVDHIVPQSFLKDDSIDNKVLTRSDKARGKSDNVPSEEVVKKMKNYWRQLLNAKLITQRKFDNLTKAERGGLSELDKAGFIKRQLVETRQITKHVAQILDSRMNTKYDENDKLIREVKVITLKSKLVSDFRKDFQFYKVREINNYHHAHDAYLNAVVGTALIKKYPKLESEFVYGDYKVYDVRKMIAKSEQEIGKATAKYFFYSNIMNFFKTEITLANGEIRKRPLIETNGETGEIVWDKGRDFATVRKVLSMPQVNIVKKTEVQTGGFSKESILPKRNSDKLIARKKDWDPKKYGGFDSPTVAYSVLVVAKVEKGKSKKLKSVKELLGITIMERSSFEKNPIDFLEAKGYKEVKKDLIIKLPKYSLFELENGRKRMLASAGELQKGNELALPSKYVNFLYLASHYEKLKGSPEDNEQKQLFVEQHKHYLDEIIEQISEFSKRVILADANLDKVLSAYNKHRDKPIREQAENIIHLFTLTNLGAPAAFKYFDTTIDRKRYTSTKEVLDATLIHQSITGLYETRIDLSQLGGDGSSGGGEAAAKMASNFTQFVLVDNGGTGDVTVAPSNFANGIAEWISSNSRSQAYKVTCSVRQSSAQNRKYTIKVEVPKGAWRSYLNMELTIPIFATNSDCELIVKAMQGLLKDGNPIPSAIAANSGIYGGSGGSMASNFTQFVLVDNGGTGDVTVAPSNFANGIAEWISSNSRSQAYKVTCSVRQSSAQNRKYTIKVEVPKGAWRSYLNMELTIPIFATNSDCELIVKAMQGLLKDGNPIPSAIAANSGIYGGGSGGGSGGGSGGGSMASNFTQFVLVDNGGTGDVTVAPSNFANGIAEWISSNSRSQAYKVTCSVRQSSAQNRKYTIKVEVPKGAWRSYLNMELTIPIFATNSDCELIVKAMQGLLKDGNPIPSAIAANSGIYGGSGGSMASNFTQFVLVDNGGTGDVTVAPSNFANGIAEWISSNSRSQAYKVTCSVRQSSAQNRKYTIKVEVPKGAWRSYLNMELTIPIFATNSDCELIVKAMQGLLKDGNPIPSAIAANSGIYSGGSSGGSSGSETPGTSESATPESSGGSSGGSSTLNIEDEHRLHETSKEPDVSLGSTWLSDFPQAWAETGGMGLAVRQAPLIIPLKATSTPVSIKQYPMSQEARLGIKPHIQRLLDQGILVPCQSPWNTPLLPVKKPGTNDYRPVQDLREVNKRVEDIHPTVPNPYNLLSGLPPSHQWYTVLDLKDAFFCLRLHPTSQPLFAFEWRDPEMGISGQLTWTRLPQGFKNSPTLFNEALHRDLADFRIQHPDLILLQYVDDLLLAATSELDCQQGTRALLQTLGNLGYRASAKKAQICQKQVKYLGYLLKEGQRWLTEARKETVMGQPTPKTPRQLREFLGKAGFCRLFIPGFAEMAAPLYPLTKPGTLFNWGPDQQKAYQEIKQALLTAPALGLPDLTKPFELFVDEKQGYAKGVLTQKLGPWRRPVAYLSKKLDPVAAGWPPCLRMVAAIAVLTKDAGKLTMGQPLVILAPHAVEALVKQPPDRWLSNARMTHYQALLLDTDRVQFGPVVALNPATLLPLPEEGLQHNCLDILAEAHGTRPDLTDQPLPDADHTWYTDGSSLLQEGQRKAGAAVTTETEVIWAKALPAGTSAQRAELIALTQALKMAEGKKLNVYTDSRYAFATAHIHGEIYRRRGWLTSEGKEIKNKDEILALLKALFLPKRLSIIHCPGHQKGHSAEARGNRMADQAARKAAITETPDTSTLLKRTADGSEFESPKKKAKVE

SEQ ID NO: 16095 - protein, 2594 aa, synthetic construct
MPAAKRVKLDGGDKKYSIGLDIGTNSVGWAVITDEYKVPSKKFKVLGNTDRHSIKKNLIGALLFDSGETAEATRLKRTARRRYTRRKNRICYLQEIFSNEMAKVDDSFFHRLEESFLVEEDKKHERHPIFGNIVDEVAYHEKYPTIYHLRKKLVDSTDKADLRLIYLALAHMIKFRGHFLIEGDLNPDNSDVDKLFIQLVQTYNQLFEENPINASGVDAKAILSARLSKSRRLENLIAQLPGEKKNGLFGNLIALSLGLTPNFKSNFDLAEDAKLQLSKDTYDDDLDNLLAQIGDQYADLFLAAKNLSDAILLSDILRVNTEITKAPLSASMIKRYDEHHQDLTLLKALVRQQLPEKYKEIFFDQSKNGYAGYIDGGASQEEFYKFIKPILEKMDGTEELLVKLNREDLLRKQRTFDNGSIPHQIHLGELHAILRRQEDFYPFLKDNREKIEKILTFRIPYYVGPLARGNSRFAWMTRKSEETITPWNFEEVVDKGASAQSFIERMTNFDKNLPNEKVLPKHSLLYEYFTVYNELTKVKYVTEGMRKPAFLSGEQKKAIVDLLFKTNRKVTVKQLKEDYFKKIECFDSVEISGVEDRFNASLGTYHDLLKIIKDKDFLDNEENEDILEDIVLTLTLFEDREMIEERLKTYAHLFDDKVMKQLKRRRYTGWGRLSRKLINGIRDKQSGKTILDFLKSDGFANRNFMQLIHDDSLTFKEDIQKAQVSGQGDSLHEHIANLAGSPAIKKGILQTVKVVDELVKVMGRHKPENIVIEMARENQTTQKGQKNSRERMKRIEEGIKELGSQILKEHPVENTQLQNEKLYLYYLQNGRDMYVDQELDINRLSDYDVDHIVPQSFLKDDSIDNKVLTRSDKARGKSDNVPSEEVVKKMKNYWRQLLNAKLITQRKFDNLTKAERGGLSELDKAGFIKRQLVETRQITKHVAQILDSRMNTKYDENDKLIREVKVITLKSKLVSDFRKDFQFYKVREINNYHHAHDAYLNAVVGTALIKKYPKLESEFVYGDYKVYDVRKMIAKSEQEIGKATAKYFFYSNIMNFFKTEITLANGEIRKRPLIETNGETGEIVWDKGRDFATVRKVLSMPQVNIVKKTEVQTGGFSKESILPKRNSDKLIARKKDWDPKKYGGFDSPTVAYSVLVVAKVEKGKSKKLKSVKELLGITIMERSSFEKNPIDFLEAKGYKEVKKDLIIKLPKYSLFELENGRKRMLASAGELQKGNELALPSKYVNFLYLASHYEKLKGSPEDNEQKQLFVEQHKHYLDEIIEQISEFSKRVILADANLDKVLSAYNKHRDKPIREQAENIIHLFTLTNLGAPAAFKYFDTTIDRKRYTSTKEVLDATLIHQSITGLYETRIDLSQLGGDGSSGGGEAAAKMASNFTQFVLVDNGGTGDVTVAPSNFANGIAEWISSNSRSQAYKVTCSVRQSSAQNRKYTIKVEVPKGAWRSYLNMELTIPIFATNSDCELIVKAMQGLLKDGNPIPSAIAANSGIYGGSGGSMASNFTQFVLVDNGGTGDVTVAPSNFANGIAEWISSNSRSQAYKVTCSVRQSSAQNRKYTIKVEVPKGAWRSYLNMELTIPIFATNSDCELIVKAMQGLLKDGNPIPSAIAANSGIYGGGSGGGSGGGSGGGSMASNFTQFVLVDNGGTGDVTVAPSNFANGIAEWISSNSRSQAYKVTCSVRQSSAQNRKYTIKVEVPKGAWRSYLNMELTIPIFATNSDCELIVKAMQGLLKDGNPIPSAIAANSGIYGGSGGSMASNFTQFVLVDNGGTGDVTVAPSNFANGIAEWISSNSRSQAYKVTCSVRQSSAQNRKYTIKVEVPKGAWRSYLNMELTIPIFATNSDCELIVKAMQGLLKDGNPIPSAIAANSGIYGSSGSSGSSGSSGSSGSSTLNIEDEHRLHETSKEPDVSLGSTWLSDFPQAWAETGGMGLAVRQAPLIIPLKATSTPVSIKQYPMSQEARLGIKPHIQRLLDQGILVPCQSPWNTPLLPVKKPGTNDYRPVQDLREVNKRVEDIHPTVPNPYNLLSGLPPSHQWYTVLDLKDAFFCLRLHPTSQPLFAFEWRDPEMGISGQLTWTRLPQGFKNSPTLFNEALHRDLADFRIQHPDLILLQYVDDLLLAATSELDCQQGTRALLQTLGNLGYRASAKKAQICQKQVKYLGYLLKEGQRWLTEARKETVMGQPTPKTPRQLREFLGKAGFCRLFIPGFAEMAAPLYPLTKPGTLFNWGPDQQKAYQEIKQALLTAPALGLPDLTKPFELFVDEKQGYAKGVLTQKLGPWRRPVAYLSKKLDPVAAGWPPCLRMVAAIAVLTKDAGKLTMGQPLVILAPHAVEALVKQPPDRWLSNARMTHYQALLLDTDRVQFGPVVALNPATLLPLPEEGLQHNCLDILAEAHGTRPDLTDQPLPDADHTWYTDGSSLLQEGQRKAGAAVTTETEVIWAKALPAGTSAQRAELIALTQALKMAEGKKLNVYTDSRYAFATAHIHGEIYRRRGWLTSEGKEIKNKDEILALLKALFLPKRLSIIHCPGHQKGHSAEARGNRMADQAARKAAITETPDTSTLLKRTADGSEFESPKKKAKVE

SEQ ID NO: 16096 - protein, 2587 aa, synthetic construct
MPAAKRVKLDGGDKKYSIGLDIGTNSVGWAVITDEYKVPSKKFKVLGNTDRHSIKKNLIGALLFDSGETAEATRLKRTARRRYTRRKNRICYLQEIFSNEMAKVDDSFFHRLEESFLVEEDKKHERHPIFGNIVDEVAYHEKYPTIYHLRKKLVDSTDKADLRLIYLALAHMIKFRGHFLIEGDLNPDNSDVDKLFIQLVQTYNQLFEENPINASGVDAKAILSARLSKSRRLENLIAQLPGEKKNGLFGNLIALSLGLTPNFKSNFDLAEDAKLQLSKDTYDDDLDNLLAQIGDQYADLFLAAKNLSDAILLSDILRVNTEITKAPLSASMIKRYDEHHQDLTLLKALVRQQLPEKYKEIFFDQSKNGYAGYIDGGASQEEFYKFIKPILEKMDGTEELLVKLNREDLLRKQRTFDNGSIPHQIHLGELHAILRRQEDFYPFLKDNREKIEKILTFRIPYYVGPLARGNSRFAWMTRKSEETITPWNFEEVVDKGASAQSFIERMTNFDKNLPNEKVLPKHSLLYEYFTVYNELTKVKYVTEGMRKPAFLSGEQKKAIVDLLFKTNRKVTVKQLKEDYFKKIECFDSVEISGVEDRFNASLGTYHDLLKIIKDKDFLDNEENEDILEDIVLTLTLFEDREMIEERLKTYAHLFDDKVMKQLKRRRYTGWGRLSRKLINGIRDKQSGKTILDFLKSDGFANRNFMQLIHDDSLTFKEDIQKAQVSGQGDSLHEHIANLAGSPAIKKGILQTVKVVDELVKVMGRHKPENIVIEMARENQTTQKGQKNSRERMKRIEEGIKELGSQILKEHPVENTQLQNEKLYLYYLQNGRDMYVDQELDINRLSDYDVDHIVPQSFLKDDSIDNKVLTRSDKARGKSDNVPSEEVVKKMKNYWRQLLNAKLITQRKFDNLTKAERGGLSELDKAGFIKRQLVETRQITKHVAQILDSRMNTKYDENDKLIREVKVITLKSKLVSDFRKDFQFYKVREINNYHHAHDAYLNAVVGTALIKKYPKLESEFVYGDYKVYDVRKMIAKSEQEIGKATAKYFFYSNIMNFFKTEITLANGEIRKRPLIETNGETGEIVWDKGRDFATVRKVLSMPQVNIVKKTEVQTGGFSKESILPKRNSDKLIARKKDWDPKKYGGFDSPTVAYSVLVVAKVEKGKSKKLKSVKELLGITIMERSSFEKNPIDFLEAKGYKEVKKDLIIKLPKYSLFELENGRKRMLASAGELQKGNELALPSKYVNFLYLASHYEKLKGSPEDNEQKQLFVEQHKHYLDEIIEQISEFSKRVILADANLDKVLSAYNKHRDKPIREQAENIIHLFTLTNLGAPAAFKYFDTTIDRKRYTSTKEVLDATLIHQSITGLYETRIDLSQLGGDGSSGGGEAAAKMASNFTQFVLVDNGGTGDVTVAPSNFANGIAEWISSNSRSQAYKVTCSVRQSSAQNRKYTIKVEVPKGAWRSYLNMELTIPIFATNSDCELIVKAMQGLLKDGNPIPSAIAANSGIYGGSGGSMASNFTQFVLVDNGGTGDVTVAPSNFANGIAEWISSNSRSQAYKVTCSVRQSSAQNRKYTIKVEVPKGAWRSYLNMELTIPIFATNSDCELIVKAMQGLLKDGNPIPSAIAANSGIYGGGSGGGSGGGSGGGSMASNFTQFVLVDNGGTGDVTVAPSNFANGIAEWISSNSRSQAYKVTCSVRQSSAQNRKYTIKVEVPKGAWRSYLNMELTIPIFATNSDCELIVKAMQGLLKDGNPIPSAIAANSGIYGGSGGSMASNFTQFVLVDNGGTGDVTVAPSNFANGIAEWISSNSRSQAYKVTCSVRQSSAQNRKYTIKVEVPKGAWRSYLNMELTIPIFATNSDCELIVKAMQGLLKDGNPIPSAIAANSGIYGSSGGGEAAAKTLNIEDEHRLHETSKEPDVSLGSTWLSDFPQAWAETGGMGLAVRQAPLIIPLKATSTPVSIKQYPMSQEARLGIKPHIQRLLDQGILVPCQSPWNTPLLPVKKPGTNDYRPVQDLREVNKRVEDIHPTVPNPYNLLSGLPPSHQWYTVLDLKDAFFCLRLHPTSQPLFAFEWRDPEMGISGQLTWTRLPQGFKNSPTLFNEALHRDLADFRIQHPDLILLQYVDDLLLAATSELDCQQGTRALLQTLGNLGYRASAKKAQICQKQVKYLGYLLKEGQRWLTEARKETVMGQPTPKTPRQLREFLGKAGFCRLFIPGFAEMAAPLYPLTKPGTLFNWGPDQQKAYQEIKQALLTAPALGLPDLTKPFELFVDEKQGYAKGVLTQKLGPWRRPVAYLSKKLDPVAAGWPPCLRMVAAIAVLTKDAGKLTMGQPLVILAPHAVEALVKQPPDRWLSNARMTHYQALLLDTDRVQFGPVVALNPATLLPLPEEGLQHNCLDILAEAHGTRPDLTDQPLPDADHTWYTDGSSLLQEGQRKAGAAVTTETEVIWAKALPAGTSAQRAELIALTQALKMAEGKKLNVYTDSRYAFATAHIHGEIYRRRGWLTSEGKEIKNKDEILALLKALFLPKRLSIIHCPGHQKGHSAEARGNRMADQAARKAAITETPDTSTLLKRTADGSEFESPKKKAKVE

SEQ ID NO: 16097-16099 - skipped (3 entries)

SEQ ID NO: 16100 - protein, 2278 aa, synthetic construct
MPAAKRVKLDGGTLNIEDEHRLHETSKEPDVSLGSTWLSDFPQAWAETGGMGLAVRQAPLIIPLKATSTPVSIKQYPMSQEARLGIKPHIQRLLDQGILVPCQSPWNTPLLPVKKPGTNDYRPVQDLREVNKRVEDIHPTVPNPYNLLSGLPPSHQWYTVLDLKDAFFCLRLHPTSQPLFAFEWRDPEMGISGQLTWTRLPQGFKNSPTLFNEALHRDLADFRIQHPDLILLQYVDDLLLAATSELDCQQGTRALLQTLGNLGYRASAKKAQICQKQVKYLGYLLKEGQRWLTEARKETVMGQPTPKTPRQLREFLGKAGFCRLFIPGFAEMAAPLYPLTKPGTLFNWGPDQQKAYQEIKQALLTAPALGLPDLTKPFELFVDEKQGYAKGVLTQKLGPWRRPVAYLSKKLDPVAAGWPPCLRMVAAIAVLTKDAGKLTMGQPLVILAPHAVEALVKQPPDRWLSNARMTHYQALLLDTDRVQFGPVVALNPATLLPLPEEGLQHNCLDILAEAHGTRPDLTDQPLPDADHTWYTDGSSLLQEGQRKAGAAVTTETEVIWAKALPAGTSAQRAELIALTQALKMAEGKKLNVYTDSRYAFATAHIHGEIYRRRGWLTSEGKEIKNKDEILALLKALFLPKRLSIIHCPGHQKGHSAEARGNRMADQAARKAAITETPDTSTLLAEAAAKEAAAKEAAAKEAAAKALEAEAAAKEAAAKEAAAKEAAAKAMASNFTQFVLVDNGGTGDVTVAPSNFANGIAEWISSNSRSQAYKVTCSVRQSSAQNRKYTIKVEVPKGAWRSYLNMELTIPIFATNSDCELIVKAMQGLLKDGNPIPSAIAANSGIYAEAAAKEAAAKEAAAKEAAAKALEAEAAAKEAAAKEAAAKEAAAKADKKYSIGLDIGTNSVGWAVITDEYKVPSKKFKVLGNTDRHSIKKNLIGALLFDSGETAEATRLKRTARRRYTRRKNRICYLQEIFSNEMAKVDDSFFHRLEESFLVEEDKKHERHPIFGNIVDEVAYHEKYPTIYHLRKKLVDSTDKADLRLIYLALAHMIKFRGHFLIEGDLNPDNSDVDKLFIQLVQTYNQLFEENPINASGVDAKAILSARLSKSRRLENLIAQLPGEKKNGLFGNLIALSLGLTPNFKSNFDLAEDAKLQLSKDTYDDDLDNLLAQIGDQYADLFLAAKNLSDAILLSDILRVNTEITKAPLSASMIKRYDEHHQDLTLLKALVRQQLPEKYKEIFFDQSKNGYAGYIDGGASQEEFYKFIKPILEKMDGTEELLVKLNREDLLRKQRTFDNGSIPHQIHLGELHAILRRQEDFYPFLKDNREKIEKILTFRIPYYVGPLARGNSRFAWMTRKSEETITPWNFEEVVDKGASAQSFIERMTNFDKNLPNEKVLPKHSLLYEYFTVYNELTKVKYVTEGMRKPAFLSGEQKKAIVDLLFKTNRKVTVKQLKEDYFKKIECFDSVEISGVEDRFNASLGTYHDLLKIIKDKDFLDNEENEDILEDIVLTLTLFEDREMIEERLKTYAHLFDDKVMKQLKRRRYTGWGRLSRKLINGIRDKQSGKTILDFLKSDGFANRNFMQLIHDDSLTFKEDIQKAQVSGQGDSLHEHIANLAGSPAIKKGILQTVKVVDELVKVMGRHKPENIVIEMARENQTTQKGQKNSRERMKRIEEGIKELGSQILKEHPVENTQLQNEKLYLYYLQNGRDMYVDQELDINRLSDYDVDHIVPQSFLKDDSIDNKVLTRSDKARGKSDNVPSEEVVKKMKNYWRQLLNAKLITQRKFDNLTKAERGGLSELDKAGFIKRQLVETRQITKHVAQILDSRMNTKYDENDKLIREVKVITLKSKLVSDFRKDFQFYKVREINNYHHAHDAYLNAVVGTALIKKYPKLESEFVYGDYKVYDVRKMIAKSEQEIGKATAKYFFYSNIMNFFKTEITLANGEIRKRPLIETNGETGEIVWDKGRDFATVRKVLSMPQVNIVKKTEVQTGGFSKESILPKRNSDKLIARKKDWDPKKYGGFDSPTVAYSVLVVAKVEKGKSKKLKSVKELLGITIMERSSFEKNPIDFLEAKGYKEVKKDLIIKLPKYSLFELENGRKRMLASAGELQKGNELALPSKYVNFLYLASHYEKLKGSPEDNEQKQLFVEQHKHYLDEIIEQISEFSKRVILADANLDKVLSAYNKHRDKPIREQAENIIHLFTLTNLGAPAAFKYFDTTIDRKRYTSTKEVLDATLIHQSITGLYETRIDLSQLGGDKRTADGSEFESPKKKAKVE

SEQ ID NO: 16101 - protein, 2265 aa, synthetic construct
MPAAKRVKLDGGTLNIEDEHRLHETSKEPDVSLGSTWLSDFPQAWAETGGMGLAVRQAPLIIPLKATSTPVSIKQYPMSQEARLGIKPHIQRLLDQGILVPCQSPWNTPLLPVKKPGTNDYRPVQDLREVNKRVEDIHPTVPNPYNLLSGLPPSHQWYTVLDLKDAFFCLRLHPTSQPLFAFEWRDPEMGISGQLTWTRLPQGFKNSPTLFNEALHRDLADFRIQHPDLILLQYVDDLLLAATSELDCQQGTRALLQTLGNLGYRASAKKAQICQKQVKYLGYLLKEGQRWLTEARKETVMGQPTPKTPRQLREFLGKAGFCRLFIPGFAEMAAPLYPLTKPGTLFNWGPDQQKAYQEIKQALLTAPALGLPDLTKPFELFVDEKQGYAKGVLTQKLGPWRRPVAYLSKKLDPVAAGWPPCLRMVAAIAVLTKDAGKLTMGQPLVILAPHAVEALVKQPPDRWLSNARMTHYQALLLDTDRVQFGPVVALNPATLLPLPEEGLQHNCLDILAEAHGTRPDLTDQPLPDADHTWYTDGSSLLQEGQRKAGAAVTTETEVIWAKALPAGTSAQRAELIALTQALKMAEGKKLNVYTDSRYAFATAHIHGEIYRRRGWLTSEGKEIKNKDEILALLKALFLPKRLSIIHCPGHQKGHSAEARGNRMADQAARKAAITETPDTSTLLAEAAAKEAAAKEAAAKEAAAKALEAEAAAKEAAAKEAAAKEAAAKAMASNFTQFVLVDNGGTGDVTVAPSNFANGIAEWISSNSRSQAYKVTCSVRQSSAQNRKYTIKVEVPKGAWRSYLNMELTIPIFATNSDCELIVKAMQGLLKDGNPIPSAIAANSGIYSGGSSGGSSGSETPGTSESATPESSGGSSGGSSDKKYSIGLDIGTNSVGWAVITDEYKVPSKKFKVLGNTDRHSIKKNLIGALLFDSGETAEATRLKRTARRRYTRRKNRICYLQEIFSNEMAKVDDSFFHRLEESFLVEEDKKHERHPIFGNIVDEVAYHEKYPTIYHLRKKLVDSTDKADLRLIYLALAHMIKFRGHFLIEGDLNPDNSDVDKLFIQLVQTYNQLFEENPINASGVDAKAILSARLSKSRRLENLIAQLPGEKKNGLFGNLIALSLGLTPNFKSNFDLAEDAKLQLSKDTYDDDLDNLLAQIGDQYADLFLAAKNLSDAILLSDILRVNTEITKAPLSASMIKRYDEHHQDLTLLKALVRQQLPEKYKEIFFDQSKNGYAGYIDGGASQEEFYKFIKPILEKMDGTEELLVKLNREDLLRKQRTFDNGSIPHQIHLGELHAILRRQEDFYPFLKDNREKIEKILTFRIPYYVGPLARGNSRFAWMTRKSEETITPWNFEEVVDKGASAQSFIERMTNFDKNLPNEKVLPKHSLLYEYFTVYNELTKVKYVTEGMRKPAFLSGEQKKAIVDLLFKTNRKVTVKQLKEDYFKKIECFDSVEISGVEDRFNASLGTYHDLLKIIKDKDFLDNEENEDILEDIVLTLTLFEDREMIEERLKTYAHLFDDKVMKQLKRRRYTGWGRLSRKLINGIRDKQSGKTILDFLKSDGFANRNFMQLIHDDSLTFKEDIQKAQVSGQGDSLHEHIANLAGSPAIKKGILQTVKVVDELVKVMGRHKPENIVIEMARENQTTQKGQKNSRERMKRIEEGIKELGSQILKEHPVENTQLQNEKLYLYYLQNGRDMYVDQELDINRLSDYDVDHIVPQSFLKDDSIDNKVLTRSDKARGKSDNVPSEEVVKKMKNYWRQLLNAKLITQRKFDNLTKAERGGLSELDKAGFIKRQLVETRQITKHVAQILDSRMNTKYDENDKLIREVKVITLKSKLVSDFRKDFQFYKVREINNYHHAHDAYLNAVVGTALIKKYPKLESEFVYGDYKVYDVRKMIAKSEQEIGKATAKYFFYSNIMNFFKTEITLANGEIRKRPLIETNGETGEIVWDKGRDFATVRKVLSMPQVNIVKKTEVQTGGFSKESILPKRNSDKLIARKKDWDPKKYGGFDSPTVAYSVLVVAKVEKGKSKKLKSVKELLGITIMERSSFEKNPIDFLEAKGYKEVKKDLIIKLPKYSLFELENGRKRMLASAGELQKGNELALPSKYVNFLYLASHYEKLKGSPEDNEQKQLFVEQHKHYLDEIIEQISEFSKRVILADANLDKVLSAYNKHRDKPIREQAENIIHLFTLTNLGAPAAFKYFDTTIDRKRYTSTKEVLDATLIHQSITGLYETRIDLSQLGGDKRTADGSEFESPKKKAKVE

SEQ ID NO: 16102 - protein, 2250 aa, synthetic construct
MPAAKRVKLDGGTLNIEDEHRLHETSKEPDVSLGSTWLSDFPQAWAETGGMGLAVRQAPLIIPLKATSTPVSIKQYPMSQEARLGIKPHIQRLLDQGILVPCQSPWNTPLLPVKKPGTNDYRPVQDLREVNKRVEDIHPTVPNPYNLLSGLPPSHQWYTVLDLKDAFFCLRLHPTSQPLFAFEWRDPEMGISGQLTWTRLPQGFKNSPTLFNEALHRDLADFRIQHPDLILLQYVDDLLLAATSELDCQQGTRALLQTLGNLGYRASAKKAQICQKQVKYLGYLLKEGQRWLTEARKETVMGQPTPKTPRQLREFLGKAGFCRLFIPGFAEMAAPLYPLTKPGTLFNWGPDQQKAYQEIKQALLTAPALGLPDLTKPFELFVDEKQGYAKGVLTQKLGPWRRPVAYLSKKLDPVAAGWPPCLRMVAAIAVLTKDAGKLTMGQPLVILAPHAVEALVKQPPDRWLSNARMTHYQALLLDTDRVQFGPVVALNPATLLPLPEEGLQHNCLDILAEAHGTRPDLTDQPLPDADHTWYTDGSSLLQEGQRKAGAAVTTETEVIWAKALPAGTSAQRAELIALTQALKMAEGKKLNVYTDSRYAFATAHIHGEIYRRRGWLTSEGKEIKNKDEILALLKALFLPKRLSIIHCPGHQKGHSAEARGNRMADQAARKAAITETPDTSTLLAEAAAKEAAAKEAAAKEAAAKALEAEAAAKEAAAKEAAAKEAAAKAMASNFTQFVLVDNGGTGDVTVAPSNFANGIAEWISSNSRSQAYKVTCSVRQSSAQNRKYTIKVEVPKGAWRSYLNMELTIPIFATNSDCELIVKAMQGLLKDGNPIPSAIAANSGIYGSSGSSGSSGSSGSSGSSDKKYSIGLDIGTNSVGWAVITDEYKVPSKKFKVLGNTDRHSIKKNLIGALLFDSGETAEATRLKRTARRRYTRRKNRICYLQEIFSNEMAKVDDSFFHRLEESFLVEEDKKHERHPIFGNIVDEVAYHEKYPTIYHLRKKLVDSTDKADLRLIYLALAHMIKFRGHFLIEGDLNPDNSDVDKLFIQLVQTYNQLFEENPINASGVDAKAILSARLSKSRRLENLIAQLPGEKKNGLFGNLIALSLGLTPNFKSNFDLAEDAKLQLSKDTYDDDLDNLLAQIGDQYADLFLAAKNLSDAILLSDILRVNTEITKAPLSASMIKRYDEHHQDLTLLKALVRQQLPEKYKEIFFDQSKNGYAGYIDGGASQEEFYKFIKPILEKMDGTEELLVKLNREDLLRKQRTFDNGSIPHQIHLGELHAILRRQEDFYPFLKDNREKIEKILTFRIPYYVGPLARGNSRFAWMTRKSEETITPWNFEEVVDKGASAQSFIERMTNFDKNLPNEKVLPKHSLLYEYFTVYNELTKVKYVTEGMRKPAFLSGEQKKAIVDLLFKTNRKVTVKQLKEDYFKKIECFDSVEISGVEDRFNASLGTYHDLLKIIKDKDFLDNEENEDILEDIVLTLTLFEDREMIEERLKTYAHLFDDKVMKQLKRRRYTGWGRLSRKLINGIRDKQSGKTILDFLKSDGFANRNFMQLIHDDSLTFKEDIQKAQVSGQGDSLHEHIANLAGSPAIKKGILQTVKVVDELVKVMGRHKPENIVIEMARENQTTQKGQKNSRERMKRIEEGIKELGSQILKEHPVENTQLQNEKLYLYYLQNGRDMYVDQELDINRLSDYDVDHIVPQSFLKDDSIDNKVLTRSDKARGKSDNVPSEEVVKKMKNYWRQLLNAKLITQRKFDNLTKAERGGLSELDKAGFIKRQLVETRQITKHVAQILDSRMNTKYDENDKLIREVKVITLKSKLVSDFRKDFQFYKVREINNYHHAHDAYLNAVVGTALIKKYPKLESEFVYGDYKVYDVRKMIAKSEQEIGKATAKYFFYSNIMNFFKTEITLANGEIRKRPLIETNGETGEIVWDKGRDFATVRKVLSMPQVNIVKKTEVQTGGFSKESILPKRNSDKLIARKKDWDPKKYGGFDSPTVAYSVLVVAKVEKGKSKKLKSVKELLGITIMERSSFEKNPIDFLEAKGYKEVKKDLIIKLPKYSLFELENGRKRMLASAGELQKGNELALPSKYVNFLYLASHYEKLKGSPEDNEQKQLFVEQHKHYLDEIIEQISEFSKRVILADANLDKVLSAYNKHRDKPIREQAENIIHLFTLTNLGAPAAFKYFDTTIDRKRYTSTKEVLDATLIHQSITGLYETRIDLSQLGGDKRTADGSEFESPKKKAKVE

SEQ ID NO: 16103 - protein, 2243 aa, synthetic construct
MPAAKRVKLDGGTLNIEDEHRLHETSKEPDVSLGSTWLSDFPQAWAETGGMGLAVRQAPLIIPLKATSTPVSIKQYPMSQEARLGIKPHIQRLLDQGILVPCQSPWNTPLLPVKKPGTNDYRPVQDLREVNKRVEDIHPTVPNPYNLLSGLPPSHQWYTVLDLKDAFFCLRLHPTSQPLFAFEWRDPEMGISGQLTWTRLPQGFKNSPTLFNEALHRDLADFRIQHPDLILLQYVDDLLLAATSELDCQQGTRALLQTLGNLGYRASAKKAQICQKQVKYLGYLLKEGQRWLTEARKETVMGQPTPKTPRQLREFLGKAGFCRLFIPGFAEMAAPLYPLTKPGTLFNWGPDQQKAYQEIKQALLTAPALGLPDLTKPFELFVDEKQGYAKGVLTQKLGPWRRPVAYLSKKLDPVAAGWPPCLRMVAAIAVLTKDAGKLTMGQPLVILAPHAVEALVKQPPDRWLSNARMTHYQALLLDTDRVQFGPVVALNPATLLPLPEEGLQHNCLDILAEAHGTRPDLTDQPLPDADHTWYTDGSSLLQEGQRKAGAAVTTETEVIWAKALPAGTSAQRAELIALTQALKMAEGKKLNVYTDSRYAFATAHIHGEIYRRRGWLTSEGKEIKNKDEILALLKALFLPKRLSIIHCPGHQKGHSAEARGNRMADQAARKAAITETPDTSTLLAEAAAKEAAAKEAAAKEAAAKALEAEAAAKEAAAKEAAAKEAAAKAMASNFTQFVLVDNGGTGDVTVAPSNFANGIAEWISSNSRSQAYKVTCSVRQSSAQNRKYTIKVEVPKGAWRSYLNMELTIPIFATNSDCELIVKAMQGLLKDGNPIPSAIAANSGIYGSSGGGEAAAKDKKYSIGLDIGTNSVGWAVITDEYKVPSKKFKVLGNTDRHSIKKNLIGALLFDSGETAEATRLKRTARRRYTRRKNRICYLQEIFSNEMAKVDDSFFHRLEESFLVEEDKKHERHPIFGNIVDEVAYHEKYPTIYHLRKKLVDSTDKADLRLIYLALAHMIKFRGHFLIEGDLNPDNSDVDKLFIQLVQTYNQLFEENPINASGVDAKAILSARLSKSRRLENLIAQLPGEKKNGLFGNLIALSLGLTPNFKSNFDLAEDAKLQLSKDTYDDDLDNLLAQIGDQYADLFLAAKNLSDAILLSDILRVNTEITKAPLSASMIKRYDEHHQDLTLLKALVRQQLPEKYKEIFFDQSKNGYAGYIDGGASQEEFYKFIKPILEKMDGTEELLVKLNREDLLRKQRTFDNGSIPHQIHLGELHAILRRQEDFYPFLKDNREKIEKILTFRIPYYVGPLARGNSRFAWMTRKSEETITPWNFEEVVDKGASAQSFIERMTNFDKNLPNEKVLPKHSLLYEYFTVYNELTKVKYVTEGMRKPAFLSGEQKKAIVDLLFKTNRKVTVKQLKEDYFKKIECFDSVEISGVEDRFNASLGTYHDLLKIIKDKDFLDNEENEDILEDIVLTLTLFEDREMIEERLKTYAHLFDDKVMKQLKRRRYTGWGRLSRKLINGIRDKQSGKTILDFLKSDGFANRNFMQLIHDDSLTFKEDIQKAQVSGQGDSLHEHIANLAGSPAIKKGILQTVKVVDELVKVMGRHKPENIVIEMARENQTTQKGQKNSRERMKRIEEGIKELGSQILKEHPVENTQLQNEKLYLYYLQNGRDMYVDQELDINRLSDYDVDHIVPQSFLKDDSIDNKVLTRSDKARGKSDNVPSEEVVKKMKNYWRQLLNAKLITQRKFDNLTKAERGGLSELDKAGFIKRQLVETRQITKHVAQILDSRMNTKYDENDKLIREVKVITLKSKLVSDFRKDFQFYKVREINNYHHAHDAYLNAVVGTALIKKYPKLESEFVYGDYKVYDVRKMIAKSEQEIGKATAKYFFYSNIMNFFKTEITLANGEIRKRPLIETNGETGEIVWDKGRDFATVRKVLSMPQVNIVKKTEVQTGGFSKESILPKRNSDKLIARKKDWDPKKYGGFDSPTVAYSVLVVAKVEKGKSKKLKSVKELLGITIMERSSFEKNPIDFLEAKGYKEVKKDLIIKLPKYSLFELENGRKRMLASAGELQKGNELALPSKYVNFLYLASHYEKLKGSPEDNEQKQLFVEQHKHYLDEIIEQISEFSKRVILADANLDKVLSAYNKHRDKPIREQAENIIHLFTLTNLGAPAAFKYFDTTIDRKRYTSTKEVLDATLIHQSITGLYETRIDLSQLGGDKRTADGSEFESPKKKAKVE

SEQ ID NO: 16104 - protein, 2401 aa, synthetic construct
MPAAKRVKLDGGTLNIEDEHRLHETSKEPDVSLGSTWLSDFPQAWAETGGMGLAVRQAPLIIPLKATSTPVSIKQYPMSQEARLGIKPHIQRLLDQGILVPCQSPWNTPLLPVKKPGTNDYRPVQDLREVNKRVEDIHPTVPNPYNLLSGLPPSHQWYTVLDLKDAFFCLRLHPTSQPLFAFEWRDPEMGISGQLTWTRLPQGFKNSPTLFNEALHRDLADFRIQHPDLILLQYVDDLLLAATSELDCQQGTRALLQTLGNLGYRASAKKAQICQKQVKYLGYLLKEGQRWLTEARKETVMGQPTPKTPRQLREFLGKAGFCRLFIPGFAEMAAPLYPLTKPGTLFNWGPDQQKAYQEIKQALLTAPALGLPDLTKPFELFVDEKQGYAKGVLTQKLGPWRRPVAYLSKKLDPVAAGWPPCLRMVAAIAVLTKDAGKLTMGQPLVILAPHAVEALVKQPPDRWLSNARMTHYQALLLDTDRVQFGPVVALNPATLLPLPEEGLQHNCLDILAEAHGTRPDLTDQPLPDADHTWYTDGSSLLQEGQRKAGAAVTTETEVIWAKALPAGTSAQRAELIALTQALKMAEGKKLNVYTDSRYAFATAHIHGEIYRRRGWLTSEGKEIKNKDEILALLKALFLPKRLSIIHCPGHQKGHSAEARGNRMADQAARKAAITETPDTSTLLAEAAAKEAAAKEAAAKEAAAKALEAEAAAKEAAAKEAAAKEAAAKAMASNFTQFVLVDNGGTGDVTVAPSNFANGIAEWISSNSRSQAYKVTCSVRQSSAQNRKYTIKVEVPKGAWRSYLNMELTIPIFATNSDCELIVKAMQGLLKDGNPIPSAIAANSGIYGGSGGSMASNFTQFVLVDNGGTGDVTVAPSNFANGIAEWISSNSRSQAYKVTCSVRQSSAQNRKYTIKVEVPKGAWRSYLNMELTIPIFATNSDCELIVKAMQGLLKDGNPIPSAIAANSGIYAEAAAKEAAAKEAAAKEAAAKALEAEAAAKEAAAKEAAAKEAAAKADKKYSIGLDIGTNSVGWAVITDEYKVPSKKFKVLGNTDRHSIKKNLIGALLFDSGETAEATRLKRTARRRYTRRKNRICYLQEIFSNEMAKVDDSFFHRLEESFLVEEDKKHERHPIFGNIVDEVAYHEKYPTIYHLRKKLVDSTDKADLRLIYLALAHMIKFRGHFLIEGDLNPDNSDVDKLFIQLVQTYNQLFEENPINASGVDAKAILSARLSKSRRLENLIAQLPGEKKNGLFGNLIALSLGLTPNFKSNFDLAEDAKLQLSKDTYDDDLDNLLAQIGDQYADLFLAAKNLSDAILLSDILRVNTEITKAPLSASMIKRYDEHHQDLTLLKALVRQQLPEKYKEIFFDQSKNGYAGYIDGGASQEEFYKFIKPILEKMDGTEELLVKLNREDLLRKQRTFDNGSIPHQIHLGELHAILRRQEDFYPFLKDNREKIEKILTFRIPYYVGPLARGNSRFAWMTRKSEETITPWNFEEVVDKGASAQSFIERMTNFDKNLPNEKVLPKHSLLYEYFTVYNELTKVKYVTEGMRKPAFLSGEQKKAIVDLLFKTNRKVTVKQLKEDYFKKIECFDSVEISGVEDRFNASLGTYHDLLKIIKDKDFLDNEENEDILEDIVLTLTLFEDREMIEERLKTYAHLFDDKVMKQLKRRRYTGWGRLSRKLINGIRDKQSGKTILDFLKSDGFANRNFMQLIHDDSLTFKEDIQKAQVSGQGDSLHEHIANLAGSPAIKKGILQTVKVVDELVKVMGRHKPENIVIEMARENQTTQKGQKNSRERMKRIEEGIKELGSQILKEHPVENTQLQNEKLYLYYLQNGRDMYVDQELDINRLSDYDVDHIVPQSFLKDDSIDNKVLTRSDKARGKSDNVPSEEVVKKMKNYWRQLLNAKLITQRKFDNLTKAERGGLSELDKAGFIKRQLVETRQITKHVAQILDSRMNTKYDENDKLIREVKVITLKSKLVSDFRKDFQFYKVREINNYHHAHDAYLNAVVGTALIKKYPKLESEFVYGDYKVYDVRKMIAKSEQEIGKATAKYFFYSNIMNFFKTEITLANGEIRKRPLIETNGETGEIVWDKGRDFATVRKVLSMPQVNIVKKTEVQTGGFSKESILPKRNSDKLIARKKDWDPKKYGGFDSPTVAYSVLVVAKVEKGKSKKLKSVKELLGITIMERSSFEKNPIDFLEAKGYKEVKKDLIIKLPKYSLFELENGRKRMLASAGELQKGNELALPSKYVNFLYLASHYEKLKGSPEDNEQKQLFVEQHKHYLDEIIEQISEFSKRVILADANLDKVLSAYNKHRDKPIREQAENIIHLFTLTNLGAPAAFKYFDTTIDRKRYTSTKEVLDATLIHQSITGLYETRIDLSQLGGDKRTADGSEFESPKKKAKVE

SEQ ID NO: 16105 - protein, 2388 aa, synthetic construct
MPAAKRVKLDGGTLNIEDEHRLHETSKEPDVSLGSTWLSDFPQAWAETGGMGLAVRQAPLIIPLKATSTPVSIKQYPMSQEARLGIKPHIQRLLDQGILVPCQSPWNTPLLPVKKPGTNDYRPVQDLREVNKRVEDIHPTVPNPYNLLSGLPPSHQWYTVLDLKDAFFCLRLHPTSQPLFAFEWRDPEMGISGQLTWTRLPQGFKNSPTLFNEALHRDLADFRIQHPDLILLQYVDDLLLAATSELDCQQGTRALLQTLGNLGYRASAKKAQICQKQVKYLGYLLKEGQRWLTEARKETVMGQPTPKTPRQLREFLGKAGFCRLFIPGFAEMAAPLYPLTKPGTLFNWGPDQQKAYQEIKQALLTAPALGLPDLTKPFELFVDEKQGYAKGVLTQKLGPWRRPVAYLSKKLDPVAAGWPPCLRMVAAIAVLTKDAGKLTMGQPLVILAPHAVEALVKQPPDRWLSNARMTHYQALLLDTDRVQFGPVVALNPATLLPLPEEGLQHNCLDILAEAHGTRPDLTDQPLPDADHTWYTDGSSLLQEGQRKAGAAVTTETEVIWAKALPAGTSAQRAELIALTQALKMAEGKKLNVYTDSRYAFATAHIHGEIYRRRGWLTSEGKEIKNKDEILALLKALFLPKRLSIIHCPGHQKGHSAEARGNRMADQAARKAAITETPDTSTLLAEAAAKEAAAKEAAAKEAAAKALEAEAAAKEAAAKEAAAKEAAAKAMASNFTQFVLVDNGGTGDVTVAPSNFANGIAEWISSNSRSQAYKVTCSVRQSSAQNRKYTIKVEVPKGAWRSYLNMELTIPIFATNSDCELIVKAMQGLLKDGNPIPSAIAANSGIYGGSGGSMASNFTQFVLVDNGGTGDVTVAPSNFANGIAEWISSNSRSQAYKVTCSVRQSSAQNRKYTIKVEVPKGAWRSYLNMELTIPIFATNSDCELIVKAMQGLLKDGNPIPSAIAANSGIYSGGSSGGSSGSETPGTSESATPESSGGSSGGSSDKKYSIGLDIGTNSVGWAVITDEYKVPSKKFKVLGNTDRHSIKKNLIGALLFDSGETAEATRLKRTARRRYTRRKNRICYLQEIFSNEMAKVDDSFFHRLEESFLVEEDKKHERHPIFGNIVDEVAYHEKYPTIYHLRKKLVDSTDKADLRLIYLALAHMIKFRGHFLIEGDLNPDNSDVDKLFIQLVQTYNQLFEENPINASGVDAKAILSARLSKSRRLENLIAQLPGEKKNGLFGNLIALSLGLTPNFKSNFDLAEDAKLQLSKDTYDDDLDNLLAQIGDQYADLFLAAKNLSDAILLSDILRVNTEITKAPLSASMIKRYDEHHQDLTLLKALVRQQLPEKYKEIFFDQSKNGYAGYIDGGASQEEFYKFIKPILEKMDGTEELLVKLNREDLLRKQRTFDNGSIPHQIHLGELHAILRRQEDFYPFLKDNREKIEKILTFRIPYYVGPLARGNSRFAWMTRKSEETITPWNFEEVVDKGASAQSFIERMTNFDKNLPNEKVLPKHSLLYEYFTVYNELTKVKYVTEGMRKPAFLSGEQKKAIVDLLFKTNRKVTVKQLKEDYFKKIECFDSVEISGVEDRFNASLGTYHDLLKIIKDKDFLDNEENEDILEDIVLTLTLFEDREMIEERLKTYAHLFDDKVMKQLKRRRYTGWGRLSRKLINGIRDKQSGKTILDFLKSDGFANRNFMQLIHDDSLTFKEDIQKAQVSGQGDSLHEHIANLAGSPAIKKGILQTVKVVDELVKVMGRHKPENIVIEMARENQTTQKGQKNSRERMKRIEEGIKELGSQILKEHPVENTQLQNEKLYLYYLQNGRDMYVDQELDINRLSDYDVDHIVPQSFLKDDSIDNKVLTRSDKARGKSDNVPSEEVVKKMKNYWRQLLNAKLITQRKFDNLTKAERGGLSELDKAGFIKRQLVETRQITKHVAQILDSRMNTKYDENDKLIREVKVITLKSKLVSDFRKDFQFYKVREINNYHHAHDAYLNAVVGTALIKKYPKLESEFVYGDYKVYDVRKMIAKSEQEIGKATAKYFFYSNIMNFFKTEITLANGEIRKRPLIETNGETGEIVWDKGRDFATVRKVLSMPQVNIVKKTEVQTGGFSKESILPKRNSDKLIARKKDWDPKKYGGFDSPTVAYSVLVVAKVEKGKSKKLKSVKELLGITIMERSSFEKNPIDFLEAKGYKEVKKDLIIKLPKYSLFELENGRKRMLASAGELQKGNELALPSKYVNFLYLASHYEKLKGSPEDNEQKQLFVEQHKHYLDEIIEQISEFSKRVILADANLDKVLSAYNKHRDKPIREQAENIIHLFTLTNLGAPAAFKYFDTTIDRKRYTSTKEVLDATLIHQSITGLYETRIDLSQLGGDKRTADGSEFESPKKKAKVE

SEQ ID NO: 16106 - protein, 2373 aa, synthetic construct
MPAAKRVKLDGGTLNIEDEHRLHETSKEPDVSLGSTWLSDFPQAWAETGGMGLAVRQAPLIIPLKATSTPVSIKQYPMSQEARLGIKPHIQRLLDQGILVPCQSPWNTPLLPVKKPGTNDYRPVQDLREVNKRVEDIHPTVPNPYNLLSGLPPSHQWYTVLDLKDAFFCLRLHPTSQPLFAFEWRDPEMGISGQLTWTRLPQGFKNSPTLFNEALHRDLADFRIQHPDLILLQYVDDLLLAATSELDCQQGTRALLQTLGNLGYRASAKKAQICQKQVKYLGYLLKEGQRWLTEARKETVMGQPTPKTPRQLREFLGKAGFCRLFIPGFAEMAAPLYPLTKPGTLFNWGPDQQKAYQEIKQALLTAPALGLPDLTKPFELFVDEKQGYAKGVLTQKLGPWRRPVAYLSKKLDPVAAGWPPCLRMVAAIAVLTKDAGKLTMGQPLVILAPHAVEALVKQPPDRWLSNARMTHYQALLLDTDRVQFGPVVALNPATLLPLPEEGLQHNCLDILAEAHGTRPDLTDQPLPDADHTWYTDGSSLLQEGQRKAGAAVTTETEVIWAKALPAGTSAQRAELIALTQALKMAEGKKLNVYTDSRYAFATAHIHGEIYRRRGWLTSEGKEIKNKDEILALLKALFLPKRLSIIHCPGHQKGHSAEARGNRMADQAARKAAITETPDTSTLLAEAAAKEAAAKEAAAKEAAAKALEAEAAAKEAAAKEAAAKEAAAKAMASNFTQFVLVDNGGTGDVTVAPSNFANGIAEWISSNSRSQAYKVTCSVRQSSAQNRKYTIKVEVPKGAWRSYLNMELTIPIFATNSDCELIVKAMQGLLKDGNPIPSAIAANSGIYGGSGGSMASNFTQFVLVDNGGTGDVTVAPSNFANGIAEWISSNSRSQAYKVTCSVRQSSAQNRKYTIKVEVPKGAWRSYLNMELTIPIFATNSDCELIVKAMQGLLKDGNPIPSAIAANSGIYGSSGSSGSSGSSGSSGSSDKKYSIGLDIGTNSVGWAVITDEYKVPSKKFKVLGNTDRHSIKKNLIGALLFDSGETAEATRLKRTARRRYTRRKNRICYLQEIFSNEMAKVDDSFFHRLEESFLVEEDKKHERHPIFGNIVDEVAYHEKYPTIYHLRKKLVDSTDKADLRLIYLALAHMIKFRGHFLIEGDLNPDNSDVDKLFIQLVQTYNQLFEENPINASGVDAKAILSARLSKSRRLENLIAQLPGEKKNGLFGNLIALSLGLTPNFKSNFDLAEDAKLQLSKDTYDDDLDNLLAQIGDQYADLFLAAKNLSDAILLSDILRVNTEITKAPLSASMIKRYDEHHQDLTLLKALVRQQLPEKYKEIFFDQSKNGYAGYIDGGASQEEFYKFIKPILEKMDGTEELLVKLNREDLLRKQRTFDNGSIPHQIHLGELHAILRRQEDFYPFLKDNREKIEKILTFRIPYYVGPLARGNSRFAWMTRKSEETITPWNFEEVVDKGASAQSFIERMTNFDKNLPNEKVLPKHSLLYEYFTVYNELTKVKYVTEGMRKPAFLSGEQKKAIVDLLFKTNRKVTVKQLKEDYFKKIECFDSVEISGVEDRFNASLGTYHDLLKIIKDKDFLDNEENEDILEDIVLTLTLFEDREMIEERLKTYAHLFDDKVMKQLKRRRYTGWGRLSRKLINGIRDKQSGKTILDFLKSDGFANRNFMQLIHDDSLTFKEDIQKAQVSGQGDSLHEHIANLAGSPAIKKGILQTVKVVDELVKVMGRHKPENIVIEMARENQTTQKGQKNSRERMKRIEEGIKELGSQILKEHPVENTQLQNEKLYLYYLQNGRDMYVDQELDINRLSDYDVDHIVPQSFLKDDSIDNKVLTRSDKARGKSDNVPSEEVVKKMKNYWRQLLNAKLITQRKFDNLTKAERGGLSELDKAGFIKRQLVETRQITKHVAQILDSRMNTKYDENDKLIREVKVITLKSKLVSDFRKDFQFYKVREINNYHHAHDAYLNAVVGTALIKKYPKLESEFVYGDYKVYDVRKMIAKSEQEIGKATAKYFFYSNIMNFFKTEITLANGEIRKRPLIETNGETGEIVWDKGRDFATVRKVLSMPQVNIVKKTEVQTGGFSKESILPKRNSDKLIARKKDWDPKKYGGFDSPTVAYSVLVVAKVEKGKSKKLKSVKELLGITIMERSSFEKNPIDFLEAKGYKEVKKDLIIKLPKYSLFELENGRKRMLASAGELQKGNELALPSKYVNFLYLASHYEKLKGSPEDNEQKQLFVEQHKHYLDEIIEQISEFSKRVILADANLDKVLSAYNKHRDKPIREQAENIIHLFTLTNLGAPAAFKYFDTTIDRKRYTSTKEVLDATLIHQSITGLYETRIDLSQLGGDKRTADGSEFESPKKKAKVE

SEQ ID NO: 16107 - protein, 2366 aa, synthetic construct
MPAAKRVKLDGGTLNIEDEHRLHETSKEPDVSLGSTWLSDFPQAWAETGGMGLAVRQAPLIIPLKATSTPVSIKQYPMSQEARLGIKPHIQRLLDQGILVPCQSPWNTPLLPVKKPGTNDYRPVQDLREVNKRVEDIHPTVPNPYNLLSGLPPSHQWYTVLDLKDAFFCLRLHPTSQPLFAFEWRDPEMGISGQLTWTRLPQGFKNSPTLFNEALHRDLADFRIQHPDLILLQYVDDLLLAATSELDCQQGTRALLQTLGNLGYRASAKKAQICQKQVKYLGYLLKEGQRWLTEARKETVMGQPTPKTPRQLREFLGKAGFCRLFIPGFAEMAAPLYPLTKPGTLFNWGPDQQKAYQEIKQALLTAPALGLPDLTKPFELFVDEKQGYAKGVLTQKLGPWRRPVAYLSKKLDPVAAGWPPCLRMVAAIAVLTKDAGKLTMGQPLVILAPHAVEALVKQPPDRWLSNARMTHYQALLLDTDRVQFGPVVALNPATLLPLPEEGLQHNCLDILAEAHGTRPDLTDQPLPDADHTWYTDGSSLLQEGQRKAGAAVTTETEVIWAKALPAGTSAQRAELIALTQALKMAEGKKLNVYTDSRYAFATAHIHGEIYRRRGWLTSEGKEIKNKDEILALLKALFLPKRLSIIHCPGHQKGHSAEARGNRMADQAARKAAITETPDTSTLLAEAAAKEAAAKEAAAKEAAAKALEAEAAAKEAAAKEAAAKEAAAKAMASNFTQFVLVDNGGTGDVTVAPSNFANGIAEWISSNSRSQAYKVTCSVRQSSAQNRKYTIKVEVPKGAWRSYLNMELTIPIFATNSDCELIVKAMQGLLKDGNPIPSAIAANSGIYGGSGGSMASNFTQFVLVDNGGTGDVTVAPSNFANGIAEWISSNSRSQAYKVTCSVRQSSAQNRKYTIKVEVPKGAWRSYLNMELTIPIFATNSDCELIVKAMQGLLKDGNPIPSAIAANSGIYGSSGGGEAAAKDKKYSIGLDIGTNSVGWAVITDEYKVPSKKFKVLGNTDRHSIKKNLIGALLFDSGETAEATRLKRTARRRYTRRKNRICYLQEIFSNEMAKVDDSFFHRLEESFLVEEDKKHERHPIFGNIVDEVAYHEKYPTIYHLRKKLVDSTDKADLRLIYLALAHMIKFRGHFLIEGDLNPDNSDVDKLFIQLVQTYNQLFEENPINASGVDAKAILSARLSKSRRLENLIAQLPGEKKNGLFGNLIALSLGLTPNFKSNFDLAEDAKLQLSKDTYDDDLDNLLAQIGDQYADLFLAAKNLSDAILLSDILRVNTEITKAPLSASMIKRYDEHHQDLTLLKALVRQQLPEKYKEIFFDQSKNGYAGYIDGGASQEEFYKFIKPILEKMDGTEELLVKLNREDLLRKQRTFDNGSIPHQIHLGELHAILRRQEDFYPFLKDNREKIEKILTFRIPYYVGPLARGNSRFAWMTRKSEETITPWNFEEVVDKGASAQSFIERMTNFDKNLPNEKVLPKHSLLYEYFTVYNELTKVKYVTEGMRKPAFLSGEQKKAIVDLLFKTNRKVTVKQLKEDYFKKIECFDSVEISGVEDRFNASLGTYHDLLKIIKDKDFLDNEENEDILEDIVLTLTLFEDREMIEERLKTYAHLFDDKVMKQLKRRRYTGWGRLSRKLINGIRDKQSGKTILDFLKSDGFANRNFMQLIHDDSLTFKEDIQKAQVSGQGDSLHEHIANLAGSPAIKKGILQTVKVVDELVKVMGRHKPENIVIEMARENQTTQKGQKNSRERMKRIEEGIKELGSQILKEHPVENTQLQNEKLYLYYLQNGRDMYVDQELDINRLSDYDVDHIVPQSFLKDDSIDNKVLTRSDKARGKSDNVPSEEVVKKMKNYWRQLLNAKLITQRKFDNLTKAERGGLSELDKAGFIKRQLVETRQITKHVAQILDSRMNTKYDENDKLIREVKVITLKSKLVSDFRKDFQFYKVREINNYHHAHDAYLNAVVGTALIKKYPKLESEFVYGDYKVYDVRKMIAKSEQEIGKATAKYFFYSNIMNFFKTEITLANGEIRKRPLIETNGETGEIVWDKGRDFATVRKVLSMPQVNIVKKTEVQTGGFSKESILPKRNSDKLIARKKDWDPKKYGGFDSPTVAYSVLVVAKVEKGKSKKLKSVKELLGITIMERSSFEKNPIDFLEAKGYKEVKKDLIIKLPKYSLFELENGRKRMLASAGELQKGNELALPSKYVNFLYLASHYEKLKGSPEDNEQKQLFVEQHKHYLDEIIEQISEFSKRVILADANLDKVLSAYNKHRDKPIREQAENIIHLFTLTNLGAPAAFKYFDTTIDRKRYTSTKEVLDATLIHQSITGLYETRIDLSQLGGDKRTADGSEFESPKKKAKVE

SEQ ID NO: 16108 - protein, 2657 aa, synthetic construct
MPAAKRVKLDGGTLNIEDEHRLHETSKEPDVSLGSTWLSDFPQAWAETGGMGLAVRQAPLIIPLKATSTPVSIKQYPMSQEARLGIKPHIQRLLDQGILVPCQSPWNTPLLPVKKPGTNDYRPVQDLREVNKRVEDIHPTVPNPYNLLSGLPPSHQWYTVLDLKDAFFCLRLHPTSQPLFAFEWRDPEMGISGQLTWTRLPQGFKNSPTLFNEALHRDLADFRIQHPDLILLQYVDDLLLAATSELDCQQGTRALLQTLGNLGYRASAKKAQICQKQVKYLGYLLKEGQRWLTEARKETVMGQPTPKTPRQLREFLGKAGFCRLFIPGFAEMAAPLYPLTKPGTLFNWGPDQQKAYQEIKQALLTAPALGLPDLTKPFELFVDEKQGYAKGVLTQKLGPWRRPVAYLSKKLDPVAAGWPPCLRMVAAIAVLTKDAGKLTMGQPLVILAPHAVEALVKQPPDRWLSNARMTHYQALLLDTDRVQFGPVVALNPATLLPLPEEGLQHNCLDILAEAHGTRPDLTDQPLPDADHTWYTDGSSLLQEGQRKAGAAVTTETEVIWAKALPAGTSAQRAELIALTQALKMAEGKKLNVYTDSRYAFATAHIHGEIYRRRGWLTSEGKEIKNKDEILALLKALFLPKRLSIIHCPGHQKGHSAEARGNRMADQAARKAAITETPDTSTLLAEAAAKEAAAKEAAAKEAAAKALEAEAAAKEAAAKEAAAKEAAAKAMASNFTQFVLVDNGGTGDVTVAPSNFANGIAEWISSNSRSQAYKVTCSVRQSSAQNRKYTIKVEVPKGAWRSYLNMELTIPIFATNSDCELIVKAMQGLLKDGNPIPSAIAANSGIYGGSGGSMASNFTQFVLVDNGGTGDVTVAPSNFANGIAEWISSNSRSQAYKVTCSVRQSSAQNRKYTIKVEVPKGAWRSYLNMELTIPIFATNSDCELIVKAMQGLLKDGNPIPSAIAANSGIYGGGSGGGSGGGSGGGSMASNFTQFVLVDNGGTGDVTVAPSNFANGIAEWISSNSRSQAYKVTCSVRQSSAQNRKYTIKVEVPKGAWRSYLNMELTIPIFATNSDCELIVKAMQGLLKDGNPIPSAIAANSGIYGGSGGSMASNFTQFVLVDNGGTGDVTVAPSNFANGIAEWISSNSRSQAYKVTCSVRQSSAQNRKYTIKVEVPKGAWRSYLNMELTIPIFATNSDCELIVKAMQGLLKDGNPIPSAIAANSGIYAEAAAKEAAAKEAAAKEAAAKALEAEAAAKEAAAKEAAAKEAAAKADKKYSIGLDIGTNSVGWAVITDEYKVPSKKFKVLGNTDRHSIKKNLIGALLFDSGETAEATRLKRTARRRYTRRKNRICYLQEIFSNEMAKVDDSFFHRLEESFLVEEDKKHERHPIFGNIVDEVAYHEKYPTIYHLRKKLVDSTDKADLRLIYLALAHMIKFRGHFLIEGDLNPDNSDVDKLFIQLVQTYNQLFEENPINASGVDAKAILSARLSKSRRLENLIAQLPGEKKNGLFGNLIALSLGLTPNFKSNFDLAEDAKLQLSKDTYDDDLDNLLAQIGDQYADLFLAAKNLSDAILLSDILRVNTEITKAPLSASMIKRYDEHHQDLTLLKALVRQQLPEKYKEIFFDQSKNGYAGYIDGGASQEEFYKFIKPILEKMDGTEELLVKLNREDLLRKQRTFDNGSIPHQIHLGELHAILRRQEDFYPFLKDNREKIEKILTFRIPYYVGPLARGNSRFAWMTRKSEETITPWNFEEVVDKGASAQSFIERMTNFDKNLPNEKVLPKHSLLYEYFTVYNELTKVKYVTEGMRKPAFLSGEQKKAIVDLLFKTNRKVTVKQLKEDYFKKIECFDSVEISGVEDRFNASLGTYHDLLKIIKDKDFLDNEENEDILEDIVLTLTLFEDREMIEERLKTYAHLFDDKVMKQLKRRRYTGWGRLSRKLINGIRDKQSGKTILDFLKSDGFANRNFMQLIHDDSLTFKEDIQKAQVSGQGDSLHEHIANLAGSPAIKKGILQTVKVVDELVKVMGRHKPENIVIEMARENQTTQKGQKNSRERMKRIEEGIKELGSQILKEHPVENTQLQNEKLYLYYLQNGRDMYVDQELDINRLSDYDVDHIVPQSFLKDDSIDNKVLTRSDKARGKSDNVPSEEVVKKMKNYWRQLLNAKLITQRKFDNLTKAERGGLSELDKAGFIKRQLVETRQITKHVAQILDSRMNTKYDENDKLIREVKVITLKSKLVSDFRKDFQFYKVREINNYHHAHDAYLNAVVGTALIKKYPKLESEFVYGDYKVYDVRKMIAKSEQEIGKATAKYFFYSNIMNFFKTEITLANGEIRKRPLIETNGETGEIVWDKGRDFATVRKVLSMPQVNIVKKTEVQTGGFSKESILPKRNSDKLIARKKDWDPKKYGGFDSPTVAYSVLVVAKVEKGKSKKLKSVKELLGITIMERSSFEKNPIDFLEAKGYKEVKKDLIIKLPKYSLFELENGRKRMLASAGELQKGNELALPSKYVNFLYLASHYEKLKGSPEDNEQKQLFVEQHKHYLDEIIEQISEFSKRVILADANLDKVLSAYNKHRDKPIREQAENIIHLFTLTNLGAPAAFKYFDTTIDRKRYTSTKEVLDATLIHQSITGLYETRIDLSQLGGDKRTADGSEFESPKKKAKVE

SEQ ID NO: 16109 - protein, 2644 aa, synthetic construct
MPAAKRVKLDGGTLNIEDEHRLHETSKEPDVSLGSTWLSDFPQAWAETGGMGLAVRQAPLIIPLKATSTPVSIKQYPMSQEARLGIKPHIQRLLDQGILVPCQSPWNTPLLPVKKPGTNDYRPVQDLREVNKRVEDIHPTVPNPYNLLSGLPPSHQWYTVLDLKDAFFCLRLHPTSQPLFAFEWRDPEMGISGQLTWTRLPQGFKNSPTLFNEALHRDLADFRIQHPDLILLQYVDDLLLAATSELDCQQGTRALLQTLGNLGYRASAKKAQICQKQVKYLGYLLKEGQRWLTEARKETVMGQPTPKTPRQLREFLGKAGFCRLFIPGFAEMAAPLYPLTKPGTLFNWGPDQQKAYQEIKQALLTAPALGLPDLTKPFELFVDEKQGYAKGVLTQKLGPWRRPVAYLSKKLDPVAAGWPPCLRMVAAIAVLTKDAGKLTMGQPLVILAPHAVEALVKQPPDRWLSNARMTHYQALLLDTDRVQFGPVVALNPATLLPLPEEGLQHNCLDILAEAHGTRPDLTDQPLPDADHTWYTDGSSLLQEGQRKAGAAVTTETEVIWAKALPAGTSAQRAELIALTQALKMAEGKKLNVYTDSRYAFATAHIHGEIYRRRGWLTSEGKEIKNKDEILALLKALFLPKRLSIIHCPGHQKGHSAEARGNRMADQAARKAAITETPDTSTLLAEAAAKEAAAKEAAAKEAAAKALEAEAAAKEAAAKEAAAKEAAAKAMASNFTQFVLVDNGGTGDVTVAPSNFANGIAEWISSNSRSQAYKVTCSVRQSSAQNRKYTIKVEVPKGAWRSYLNMELTIPIFATNSDCELIVKAMQGLLKDGNPIPSAIAANSGIYGGSGGSMASNFTQFVLVDNGGTGDVTVAPSNFANGIAEWISSNSRSQAYKVTCSVRQSSAQNRKYTIKVEVPKGAWRSYLNMELTIPIFATNSDCELIVKAMQGLLKDGNPIPSAIAANSGIYGGGSGGGSGGGSGGGSMASNFTQFVLVDNGGTGDVTVAPSNFANGIAEWISSNSRSQAYKVTCSVRQSSAQNRKYTIKVEVPKGAWRSYLNMELTIPIFATNSDCELIVKAMQGLLKDGNPIPSAIAANSGIYGGSGGSMASNFTQFVLVDNGGTGDVTVAPSNFANGIAEWISSNSRSQAYKVTCSVRQSSAQNRKYTIKVEVPKGAWRSYLNMELTIPIFATNSDCELIVKAMQGLLKDGNPIPSAIAANSGIYSGGSSGGSSGSETPGTSESATPESSGGSSGGSSDKKYSIGLDIGTNSVGWAVITDEYKVPSKKFKVLGNTDRHSIKKNLIGALLFDSGETAEATRLKRTARRRYTRRKNRICYLQEIFSNEMAKVDDSFFHRLEESFLVEEDKKHERHPIFGNIVDEVAYHEKYPTIYHLRKKLVDSTDKADLRLIYLALAHMIKFRGHFLIEGDLNPDNSDVDKLFIQLVQTYNQLFEENPINASGVDAKAILSARLSKSRRLENLIAQLPGEKKNGLFGNLIALSLGLTPNFKSNFDLAEDAKLQLSKDTYDDDLDNLLAQIGDQYADLFLAAKNLSDAILLSDILRVNTEITKAPLSASMIKRYDEHHQDLTLLKALVRQQLPEKYKEIFFDQSKNGYAGYIDGGASQEEFYKFIKPILEKMDGTEELLVKLNREDLLRKQRTFDNGSIPHQIHLGELHAILRRQEDFYPFLKDNREKIEKILTFRIPYYVGPLARGNSRFAWMTRKSEETITPWNFEEVVDKGASAQSFIERMTNFDKNLPNEKVLPKHSLLYEYFTVYNELTKVKYVTEGMRKPAFLSGEQKKAIVDLLFKTNRKVTVKQLKEDYFKKIECFDSVEISGVEDRFNASLGTYHDLLKIIKDKDFLDNEENEDILEDIVLTLTLFEDREMIEERLKTYAHLFDDKVMKQLKRRRYTGWGRLSRKLINGIRDKQSGKTILDFLKSDGFANRNFMQLIHDDSLTFKEDIQKAQVSGQGDSLHEHIANLAGSPAIKKGILQTVKVVDELVKVMGRHKPENIVIEMARENQTTQKGQKNSRERMKRIEEGIKELGSQILKEHPVENTQLQNEKLYLYYLQNGRDMYVDQELDINRLSDYDVDHIVPQSFLKDDSIDNKVLTRSDKARGKSDNVPSEEVVKKMKNYWRQLLNAKLITQRKFDNLTKAERGGLSELDKAGFIKRQLVETRQITKHVAQILDSRMNTKYDENDKLIREVKVITLKSKLVSDFRKDFQFYKVREINNYHHAHDAYLNAVVGTALIKKYPKLESEFVYGDYKVYDVRKMIAKSEQEIGKATAKYFFYSNIMNFFKTEITLANGEIRKRPLIETNGETGEIVWDKGRDFATVRKVLSMPQVNIVKKTEVQTGGFSKESILPKRNSDKLIARKKDWDPKKYGGFDSPTVAYSVLVVAKVEKGKSKKLKSVKELLGITIMERSSFEKNPIDFLEAKGYKEVKKDLIIKLPKYSLFELENGRKRMLASAGELQKGNELALPSKYVNFLYLASHYEKLKGSPEDNEQKQLFVEQHKHYLDEIIEQISEFSKRVILADANLDKVLSAYNKHRDKPIREQAENIIHLFTLTNLGAPAAFKYFDTTIDRKRYTSTKEVLDATLIHQSITGLYETRIDLSQLGGDKRTADGSEFESPKKKAKVE

SEQ ID NO: 16110 - protein, 2629 aa, synthetic construct
MPAAKRVKLDGGTLNIEDEHRLHETSKEPDVSLGSTWLSDFPQAWAETGGMGLAVRQAPLIIPLKATSTPVSIKQYPMSQEARLGIKPHIQRLLDQGILVPCQSPWNTPLLPVKKPGTNDYRPVQDLREVNKRVEDIHPTVPNPYNLLSGLPPSHQWYTVLDLKDAFFCLRLHPTSQPLFAFEWRDPEMGISGQLTWTRLPQGFKNSPTLFNEALHRDLADFRIQHPDLILLQYVDDLLLAATSELDCQQGTRALLQTLGNLGYRASAKKAQICQKQVKYLGYLLKEGQRWLTEARKETVMGQPTPKTPRQLREFLGKAGFCRLFIPGFAEMAAPLYPLTKPGTLFNWGPDQQKAYQEIKQALLTAPALGLPDLTKPFELFVDEKQGYAKGVLTQKLGPWRRPVAYLSKKLDPVAAGWPPCLRMVAAIAVLTKDAGKLTMGQPLVILAPHAVEALVKQPPDRWLSNARMTHYQALLLDTDRVQFGPVVALNPATLLPLPEEGLQHNCLDILAEAHGTRPDLTDQPLPDADHTWYTDGSSLLQEGQRKAGAAVTTETEVIWAKALPAGTSAQRAELIALTQALKMAEGKKLNVYTDSRYAFATAHIHGEIYRRRGWLTSEGKEIKNKDEILALLKALFLPKRLSIIHCPGHQKGHSAEARGNRMADQAARKAAITETPDTSTLLAEAAAKEAAAKEAAAKEAAAKALEAEAAAKEAAAKEAAAKEAAAKAMASNFTQFVLVDNGGTGDVTVAPSNFANGIAEWISSNSRSQAYKVTCSVRQSSAQNRKYTIKVEVPKGAWRSYLNMELTIPIFATNSDCELIVKAMQGLLKDGNPIPSAIAANSGIYGGSGGSMASNFTQFVLVDNGGTGDVTVAPSNFANGIAEWISSNSRSQAYKVTCSVRQSSAQNRKYTIKVEVPKGAWRSYLNMELTIPIFATNSDCELIVKAMQGLLKDGNPIPSAIAANSGIYGGGSGGGSGGGSGGGSMASNFTQFVLVDNGGTGDVTVAPSNFANGIAEWISSNSRSQAYKVTCSVRQSSAQNRKYTIKVEVPKGAWRSYLNMELTIPIFATNSDCELIVKAMQGLLKDGNPIPSAIAANSGIYGGSGGSMASNFTQFVLVDNGGTGDVTVAPSNFANGIAEWISSNSRSQAYKVTCSVRQSSAQNRKYTIKVEVPKGAWRSYLNMELTIPIFATNSDCELIVKAMQGLLKDGNPIPSAIAANSGIYGSSGSSGSSGSSGSSGSSDKKYSIGLDIGTNSVGWAVITDEYKVPSKKFKVLGNTDRHSIKKNLIGALLFDSGETAEATRLKRTARRRYTRRKNRICYLQEIFSNEMAKVDDSFFHRLEESFLVEEDKKHERHPIFGNIVDEVAYHEKYPTIYHLRKKLVDSTDKADLRLIYLALAHMIKFRGHFLIEGDLNPDNSDVDKLFIQLVQTYNQLFEENPINASGVDAKAILSARLSKSRRLENLIAQLPGEKKNGLFGNLIALSLGLTPNFKSNFDLAEDAKLQLSKDTYDDDLDNLLAQIGDQYADLFLAAKNLSDAILLSDILRVNTEITKAPLSASMIKRYDEHHQDLTLLKALVRQQLPEKYKEIFFDQSKNGYAGYIDGGASQEEFYKFIKPILEKMDGTEELLVKLNREDLLRKQRTFDNGSIPHQIHLGELHAILRRQEDFYPFLKDNREKIEKILTFRIPYYVGPLARGNSRFAWMTRKSEETITPWNFEEVVDKGASAQSFIERMTNFDKNLPNEKVLPKHSLLYEYFTVYNELTKVKYVTEGMRKPAFLSGEQKKAIVDLLFKTNRKVTVKQLKEDYFKKIECFDSVEISGVEDRFNASLGTYHDLLKIIKDKDFLDNEENEDILEDIVLTLTLFEDREMIEERLKTYAHLFDDKVMKQLKRRRYTGWGRLSRKLINGIRDKQSGKTILDFLKSDGFANRNFMQLIHDDSLTFKEDIQKAQVSGQGDSLHEHIANLAGSPAIKKGILQTVKVVDELVKVMGRHKPENIVIEMARENQTTQKGQKNSRERMKRIEEGIKELGSQILKEHPVENTQLQNEKLYLYYLQNGRDMYVDQELDINRLSDYDVDHIVPQSFLKDDSIDNKVLTRSDKARGKSDNVPSEEVVKKMKNYWRQLLNAKLITQRKFDNLTKAERGGLSELDKAGFIKRQLVETRQITKHVAQILDSRMNTKYDENDKLIREVKVITLKSKLVSDFRKDFQFYKVREINNYHHAHDAYLNAVVGTALIKKYPKLESEFVYGDYKVYDVRKMIAKSEQEIGKATAKYFFYSNIMNFFKTEITLANGEIRKRPLIETNGETGEIVWDKGRDFATVRKVLSMPQVNIVKKTEVQTGGFSKESILPKRNSDKLIARKKDWDPKKYGGFDSPTVAYSVLVVAKVEKGKSKKLKSVKELLGITIMERSSFEKNPIDFLEAKGYKEVKKDLIIKLPKYSLFELENGRKRMLASAGELQKGNELALPSKYVNFLYLASHYEKLKGSPEDNEQKQLFVEQHKHYLDEIIEQISEFSKRVILADANLDKVLSAYNKHRDKPIREQAENIIHLFTLTNLGAPAAFKYFDTTIDRKRYTSTKEVLDATLIHQSITGLYETRIDLSQLGGDKRTADGSEFESPKKKAKVE

SEQ ID NO: 16111 - protein, 2622 aa, synthetic construct
MPAAKRVKLDGGTLNIEDEHRLHETSKEPDVSLGSTWLSDFPQAWAETGGMGLAVRQAPLIIPLKATSTPVSIKQYPMSQEARLGIKPHIQRLLDQGILVPCQSPWNTPLLPVKKPGTNDYRPVQDLREVNKRVEDIHPTVPNPYNLLSGLPPSHQWYTVLDLKDAFFCLRLHPTSQPLFAFEWRDPEMGISGQLTWTRLPQGFKNSPTLFNEALHRDLADFRIQHPDLILLQYVDDLLLAATSELDCQQGTRALLQTLGNLGYRASAKKAQICQKQVKYLGYLLKEGQRWLTEARKETVMGQPTPKTPRQLREFLGKAGFCRLFIPGFAEMAAPLYPLTKPGTLFNWGPDQQKAYQEIKQALLTAPALGLPDLTKPFELFVDEKQGYAKGVLTQKLGPWRRPVAYLSKKLDPVAAGWPPCLRMVAAIAVLTKDAGKLTMGQPLVILAPHAVEALVKQPPDRWLSNARMTHYQALLLDTDRVQFGPVVALNPATLLPLPEEGLQHNCLDILAEAHGTRPDLTDQPLPDADHTWYTDGSSLLQEGQRKAGAAVTTETEVIWAKALPAGTSAQRAELIALTQALKMAEGKKLNVYTDSRYAFATAHIHGEIYRRRGWLTSEGKEIKNKDEILALLKALFLPKRLSIIHCPGHQKGHSAEARGNRMADQAARKAAITETPDTSTLLAEAAAKEAAAKEAAAKEAAAKALEAEAAAKEAAAKEAAAKEAAAKAMASNFTQFVLVDNGGTGDVTVAPSNFANGIAEWISSNSRSQAYKVTCSVRQSSAQNRKYTIKVEVPKGAWRSYLNMELTIPIFATNSDCELIVKAMQGLLKDGNPIPSAIAANSGIYGGSGGSMASNFTQFVLVDNGGTGDVTVAPSNFANGIAEWISSNSRSQAYKVTCSVRQSSAQNRKYTIKVEVPKGAWRSYLNMELTIPIFATNSDCELIVKAMQGLLKDGNPIPSAIAANSGIYGGGSGGGSGGGSGGGSMASNFTQFVLVDNGGTGDVTVAPSNFANGIAEWISSNSRSQAYKVTCSVRQSSAQNRKYTIKVEVPKGAWRSYLNMELTIPIFATNSDCELIVKAMQGLLKDGNPIPSAIAANSGIYGGSGGSMASNFTQFVLVDNGGTGDVTVAPSNFANGIAEWISSNSRSQAYKVTCSVRQSSAQNRKYTIKVEVPKGAWRSYLNMELTIPIFATNSDCELIVKAMQGLLKDGNPIPSAIAANSGIYGSSGGGEAAAKDKKYSIGLDIGTNSVGWAVITDEYKVPSKKFKVLGNTDRHSIKKNLIGALLFDSGETAEATRLKRTARRRYTRRKNRICYLQEIFSNEMAKVDDSFFHRLEESFLVEEDKKHERHPIFGNIVDEVAYHEKYPTIYHLRKKLVDSTDKADLRLIYLALAHMIKFRGHFLIEGDLNPDNSDVDKLFIQLVQTYNQLFEENPINASGVDAKAILSARLSKSRRLENLIAQLPGEKKNGLFGNLIALSLGLTPNFKSNFDLAEDAKLQLSKDTYDDDLDNLLAQIGDQYADLFLAAKNLSDAILLSDILRVNTEITKAPLSASMIKRYDEHHQDLTLLKALVRQQLPEKYKEIFFDQSKNGYAGYIDGGASQEEFYKFIKPILEKMDGTEELLVKLNREDLLRKQRTFDNGSIPHQIHLGELHAILRRQEDFYPFLKDNREKIEKILTFRIPYYVGPLARGNSRFAWMTRKSEETITPWNFEEVVDKGASAQSFIERMTNFDKNLPNEKVLPKHSLLYEYFTVYNELTKVKYVTEGMRKPAFLSGEQKKAIVDLLFKTNRKVTVKQLKEDYFKKIECFDSVEISGVEDRFNASLGTYHDLLKIIKDKDFLDNEENEDILEDIVLTLTLFEDREMIEERLKTYAHLFDDKVMKQLKRRRYTGWGRLSRKLINGIRDKQSGKTILDFLKSDGFANRNFMQLIHDDSLTFKEDIQKAQVSGQGDSLHEHIANLAGSPAIKKGILQTVKVVDELVKVMGRHKPENIVIEMARENQTTQKGQKNSRERMKRIEEGIKELGSQILKEHPVENTQLQNEKLYLYYLQNGRDMYVDQELDINRLSDYDVDHIVPQSFLKDDSIDNKVLTRSDKARGKSDNVPSEEVVKKMKNYWRQLLNAKLITQRKFDNLTKAERGGLSELDKAGFIKRQLVETRQITKHVAQILDSRMNTKYDENDKLIREVKVITLKSKLVSDFRKDFQFYKVREINNYHHAHDAYLNAVVGTALIKKYPKLESEFVYGDYKVYDVRKMIAKSEQEIGKATAKYFFYSNIMNFFKTEITLANGEIRKRPLIETNGETGEIVWDKGRDFATVRKVLSMPQVNIVKKTEVQTGGFSKESILPKRNSDKLIARKKDWDPKKYGGFDSPTVAYSVLVVAKVEKGKSKKLKSVKELLGITIMERSSFEKNPIDFLEAKGYKEVKKDLIIKLPKYSLFELENGRKRMLASAGELQKGNELALPSKYVNFLYLASHYEKLKGSPEDNEQKQLFVEQHKHYLDEIIEQISEFSKRVILADANLDKVLSAYNKHRDKPIREQAENIIHLFTLTNLGAPAAFKYFDTTIDRKRYTSTKEVLDATLIHQSITGLYETRIDLSQLGGDKRTADGSEFESPKKKAKVE

SEQ ID NO: 16112 - protein, 2265 aa, synthetic construct
MPAAKRVKLDGGTLNIEDEHRLHETSKEPDVSLGSTWLSDFPQAWAETGGMGLAVRQAPLIIPLKATSTPVSIKQYPMSQEARLGIKPHIQRLLDQGILVPCQSPWNTPLLPVKKPGTNDYRPVQDLREVNKRVEDIHPTVPNPYNLLSGLPPSHQWYTVLDLKDAFFCLRLHPTSQPLFAFEWRDPEMGISGQLTWTRLPQGFKNSPTLFNEALHRDLADFRIQHPDLILLQYVDDLLLAATSELDCQQGTRALLQTLGNLGYRASAKKAQICQKQVKYLGYLLKEGQRWLTEARKETVMGQPTPKTPRQLREFLGKAGFCRLFIPGFAEMAAPLYPLTKPGTLFNWGPDQQKAYQEIKQALLTAPALGLPDLTKPFELFVDEKQGYAKGVLTQKLGPWRRPVAYLSKKLDPVAAGWPPCLRMVAAIAVLTKDAGKLTMGQPLVILAPHAVEALVKQPPDRWLSNARMTHYQALLLDTDRVQFGPVVALNPATLLPLPEEGLQHNCLDILAEAHGTRPDLTDQPLPDADHTWYTDGSSLLQEGQRKAGAAVTTETEVIWAKALPAGTSAQRAELIALTQALKMAEGKKLNVYTDSRYAFATAHIHGEIYRRRGWLTSEGKEIKNKDEILALLKALFLPKRLSIIHCPGHQKGHSAEARGNRMADQAARKAAITETPDTSTLLSGGSSGGSSGSETPGTSESATPESSGGSSGGSSMASNFTQFVLVDNGGTGDVTVAPSNFANGIAEWISSNSRSQAYKVTCSVRQSSAQNRKYTIKVEVPKGAWRSYLNMELTIPIFATNSDCELIVKAMQGLLKDGNPIPSAIAANSGIYAEAAAKEAAAKEAAAKEAAAKALEAEAAAKEAAAKEAAAKEAAAKADKKYSIGLDIGTNSVGWAVITDEYKVPSKKFKVLGNTDRHSIKKNLIGALLFDSGETAEATRLKRTARRRYTRRKNRICYLQEIFSNEMAKVDDSFFHRLEESFLVEEDKKHERHPIFGNIVDEVAYHEKYPTIYHLRKKLVDSTDKADLRLIYLALAHMIKFRGHFLIEGDLNPDNSDVDKLFIQLVQTYNQLFEENPINASGVDAKAILSARLSKSRRLENLIAQLPGEKKNGLFGNLIALSLGLTPNFKSNFDLAEDAKLQLSKDTYDDDLDNLLAQIGDQYADLFLAAKNLSDAILLSDILRVNTEITKAPLSASMIKRYDEHHQDLTLLKALVRQQLPEKYKEIFFDQSKNGYAGYIDGGASQEEFYKFIKPILEKMDGTEELLVKLNREDLLRKQRTFDNGSIPHQIHLGELHAILRRQEDFYPFLKDNREKIEKILTFRIPYYVGPLARGNSRFAWMTRKSEETITPWNFEEVVDKGASAQSFIERMTNFDKNLPNEKVLPKHSLLYEYFTVYNELTKVKYVTEGMRKPAFLSGEQKKAIVDLLFKTNRKVTVKQLKEDYFKKIECFDSVEISGVEDRFNASLGTYHDLLKIIKDKDFLDNEENEDILEDIVLTLTLFEDREMIEERLKTYAHLFDDKVMKQLKRRRYTGWGRLSRKLINGIRDKQSGKTILDFLKSDGFANRNFMQLIHDDSLTFKEDIQKAQVSGQGDSLHEHIANLAGSPAIKKGILQTVKVVDELVKVMGRHKPENIVIEMARENQTTQKGQKNSRERMKRIEEGIKELGSQILKEHPVENTQLQNEKLYLYYLQNGRDMYVDQELDINRLSDYDVDHIVPQSFLKDDSIDNKVLTRSDKARGKSDNVPSEEVVKKMKNYWRQLLNAKLITQRKFDNLTKAERGGLSELDKAGFIKRQLVETRQITKHVAQILDSRMNTKYDENDKLIREVKVITLKSKLVSDFRKDFQFYKVREINNYHHAHDAYLNAVVGTALIKKYPKLESEFVYGDYKVYDVRKMIAKSEQEIGKATAKYFFYSNIMNFFKTEITLANGEIRKRPLIETNGETGEIVWDKGRDFATVRKVLSMPQVNIVKKTEVQTGGFSKESILPKRNSDKLIARKKDWDPKKYGGFDSPTVAYSVLVVAKVEKGKSKKLKSVKELLGITIMERSSFEKNPIDFLEAKGYKEVKKDLIIKLPKYSLFELENGRKRMLASAGELQKGNELALPSKYVNFLYLASHYEKLKGSPEDNEQKQLFVEQHKHYLDEIIEQISEFSKRVILADANLDKVLSAYNKHRDKPIREQAENIIHLFTLTNLGAPAAFKYFDTTIDRKRYTSTKEVLDATLIHQSITGLYETRIDLSQLGGDKRTADGSEFESPKKKAKVE

SEQ ID NO: 16113 - protein, 2252 aa, synthetic construct
MPAAKRVKLDGGTLNIEDEHRLHETSKEPDVSLGSTWLSDFPQAWAETGGMGLAVRQAPLIIPLKATSTPVSIKQYPMSQEARLGIKPHIQRLLDQGILVPCQSPWNTPLLPVKKPGTNDYRPVQDLREVNKRVEDIHPTVPNPYNLLSGLPPSHQWYTVLDLKDAFFCLRLHPTSQPLFAFEWRDPEMGISGQLTWTRLPQGFKNSPTLFNEALHRDLADFRIQHPDLILLQYVDDLLLAATSELDCQQGTRALLQTLGNLGYRASAKKAQICQKQVKYLGYLLKEGQRWLTEARKETVMGQPTPKTPRQLREFLGKAGFCRLFIPGFAEMAAPLYPLTKPGTLFNWGPDQQKAYQEIKQALLTAPALGLPDLTKPFELFVDEKQGYAKGVLTQKLGPWRRPVAYLSKKLDPVAAGWPPCLRMVAAIAVLTKDAGKLTMGQPLVILAPHAVEALVKQPPDRWLSNARMTHYQALLLDTDRVQFGPVVALNPATLLPLPEEGLQHNCLDILAEAHGTRPDLTDQPLPDADHTWYTDGSSLLQEGQRKAGAAVTTETEVIWAKALPAGTSAQRAELIALTQALKMAEGKKLNVYTDSRYAFATAHIHGEIYRRRGWLTSEGKEIKNKDEILALLKALFLPKRLSIIHCPGHQKGHSAEARGNRMADQAARKAAITETPDTSTLLSGGSSGGSSGSETPGTSESATPESSGGSSGGSSMASNFTQFVLVDNGGTGDVTVAPSNFANGIAEWISSNSRSQAYKVTCSVRQSSAQNRKYTIKVEVPKGAWRSYLNMELTIPIFATNSDCELIVKAMQGLLKDGNPIPSAIAANSGIYSGGSSGGSSGSETPGTSESATPESSGGSSGGSSDKKYSIGLDIGTNSVGWAVITDEYKVPSKKFKVLGNTDRHSIKKNLIGALLFDSGETAEATRLKRTARRRYTRRKNRICYLQEIFSNEMAKVDDSFFHRLEESFLVEEDKKHERHPIFGNIVDEVAYHEKYPTIYHLRKKLVDSTDKADLRLIYLALAHMIKFRGHFLIEGDLNPDNSDVDKLFIQLVQTYNQLFEENPINASGVDAKAILSARLSKSRRLENLIAQLPGEKKNGLFGNLIALSLGLTPNFKSNFDLAEDAKLQLSKDTYDDDLDNLLAQIGDQYADLFLAAKNLSDAILLSDILRVNTEITKAPLSASMIKRYDEHHQDLTLLKALVRQQLPEKYKEIFFDQSKNGYAGYIDGGASQEEFYKFIKPILEKMDGTEELLVKLNREDLLRKQRTFDNGSIPHQIHLGELHAILRRQEDFYPFLKDNREKIEKILTFRIPYYVGPLARGNSRFAWMTRKSEETITPWNFEEVVDKGASAQSFIERMTNFDKNLPNEKVLPKHSLLYEYFTVYNELTKVKYVTEGMRKPAFLSGEQKKAIVDLLFKTNRKVTVKQLKEDYFKKIECFDSVEISGVEDRFNASLGTYHDLLKIIKDKDFLDNEENEDILEDIVLTLTLFEDREMIEERLKTYAHLFDDKVMKQLKRRRYTGWGRLSRKLINGIRDKQSGKTILDFLKSDGFANRNFMQLIHDDSLTFKEDIQKAQVSGQGDSLHEHIANLAGSPAIKKGILQTVKVVDELVKVMGRHKPENIVIEMARENQTTQKGQKNSRERMKRIEEGIKELGSQILKEHPVENTQLQNEKLYLYYLQNGRDMYVDQELDINRLSDYDVDHIVPQSFLKDDSIDNKVLTRSDKARGKSDNVPSEEVVKKMKNYWRQLLNAKLITQRKFDNLTKAERGGLSELDKAGFIKRQLVETRQITKHVAQILDSRMNTKYDENDKLIREVKVITLKSKLVSDFRKDFQFYKVREINNYHHAHDAYLNAVVGTALIKKYPKLESEFVYGDYKVYDVRKMIAKSEQEIGKATAKYFFYSNIMNFFKTEITLANGEIRKRPLIETNGETGEIVWDKGRDFATVRKVLSMPQVNIVKKTEVQTGGFSKESILPKRNSDKLIARKKDWDPKKYGGFDSPTVAYSVLVVAKVEKGKSKKLKSVKELLGITIMERSSFEKNPIDFLEAKGYKEVKKDLIIKLPKYSLFELENGRKRMLASAGELQKGNELALPSKYVNFLYLASHYEKLKGSPEDNEQKQLFVEQHKHYLDEIIEQISEFSKRVILADANLDKVLSAYNKHRDKPIREQAENIIHLFTLTNLGAPAAFKYFDTTIDRKRYTSTKEVLDATLIHQSITGLYETRIDLSQLGGDKRTADGSEFESPKKKAKVE

SEQ ID NO: 16114 - protein, 2237 aa, synthetic construct
MPAAKRVKLDGGTLNIEDEHRLHETSKEPDVSLGSTWLSDFPQAWAETGGMGLAVRQAPLIIPLKATSTPVSIKQYPMSQEARLGIKPHIQRLLDQGILVPCQSPWNTPLLPVKKPGTNDYRPVQDLREVNKRVEDIHPTVPNPYNLLSGLPPSHQWYTVLDLKDAFFCLRLHPTSQPLFAFEWRDPEMGISGQLTWTRLPQGFKNSPTLFNEALHRDLADFRIQHPDLILLQYVDDLLLAATSELDCQQGTRALLQTLGNLGYRASAKKAQICQKQVKYLGYLLKEGQRWLTEARKETVMGQPTPKTPRQLREFLGKAGFCRLFIPGFAEMAAPLYPLTKPGTLFNWGPDQQKAYQEIKQALLTAPALGLPDLTKPFELFVDEKQGYAKGVLTQKLGPWRRPVAYLSKKLDPVAAGWPPCLRMVAAIAVLTKDAGKLTMGQPLVILAPHAVEALVKQPPDRWLSNARMTHYQALLLDTDRVQFGPVVALNPATLLPLPEEGLQHNCLDILAEAHGTRPDLTDQPLPDADHTWYTDGSSLLQEGQRKAGAAVTTETEVIWAKALPAGTSAQRAELIALTQALKMAEGKKLNVYTDSRYAFATAHIHGEIYRRRGWLTSEGKEIKNKDEILALLKALFLPKRLSIIHCPGHQKGHSAEARGNRMADQAARKAAITETPDTSTLLSGGSSGGSSGSETPGTSESATPESSGGSSGGSSMASNFTQFVLVDNGGTGDVTVAPSNFANGIAEWISSNSRSQAYKVTCSVRQSSAQNRKYTIKVEVPKGAWRSYLNMELTIPIFATNSDCELIVKAMQGLLKDGNPIPSAIAANSGIYGSSGSSGSSGSSGSSGSSDKKYSIGLDIGTNSVGWAVITDEYKVPSKKFKVLGNTDRHSIKKNLIGALLFDSGETAEATRLKRTARRRYTRRKNRICYLQEIFSNEMAKVDDSFFHRLEESFLVEEDKKHERHPIFGNIVDEVAYHEKYPTIYHLRKKLVDSTDKADLRLIYLALAHMIKFRGHFLIEGDLNPDNSDVDKLFIQLVQTYNQLFEENPINASGVDAKAILSARLSKSRRLENLIAQLPGEKKNGLFGNLIALSLGLTPNFKSNFDLAEDAKLQLSKDTYDDDLDNLLAQIGDQYADLFLAAKNLSDAILLSDILRVNTEITKAPLSASMIKRYDEHHQDLTLLKALVRQQLPEKYKEIFFDQSKNGYAGYIDGGASQEEFYKFIKPILEKMDGTEELLVKLNREDLLRKQRTFDNGSIPHQIHLGELHAILRRQEDFYPFLKDNREKIEKILTFRIPYYVGPLARGNSRFAWMTRKSEETITPWNFEEVVDKGASAQSFIERMTNFDKNLPNEKVLPKHSLLYEYFTVYNELTKVKYVTEGMRKPAFLSGEQKKAIVDLLFKTNRKVTVKQLKEDYFKKIECFDSVEISGVEDRFNASLGTYHDLLKIIKDKDFLDNEENEDILEDIVLTLTLFEDREMIEERLKTYAHLFDDKVMKQLKRRRYTGWGRLSRKLINGIRDKQSGKTILDFLKSDGFANRNFMQLIHDDSLTFKEDIQKAQVSGQGDSLHEHIANLAGSPAIKKGILQTVKVVDELVKVMGRHKPENIVIEMARENQTTQKGQKNSRERMKRIEEGIKELGSQILKEHPVENTQLQNEKLYLYYLQNGRDMYVDQELDINRLSDYDVDHIVPQSFLKDDSIDNKVLTRSDKARGKSDNVPSEEVVKKMKNYWRQLLNAKLITQRKFDNLTKAERGGLSELDKAGFIKRQLVETRQITKHVAQILDSRMNTKYDENDKLIREVKVITLKSKLVSDFRKDFQFYKVREINNYHHAHDAYLNAVVGTALIKKYPKLESEFVYGDYKVYDVRKMIAKSEQEIGKATAKYFFYSNIMNFFKTEITLANGEIRKRPLIETNGETGEIVWDKGRDFATVRKVLSMPQVNIVKKTEVQTGGFSKESILPKRNSDKLIARKKDWDPKKYGGFDSPTVAYSVLVVAKVEKGKSKKLKSVKELLGITIMERSSFEKNPIDFLEAKGYKEVKKDLIIKLPKYSLFELENGRKRMLASAGELQKGNELALPSKYVNFLYLASHYEKLKGSPEDNEQKQLFVEQHKHYLDEIIEQISEFSKRVILADANLDKVLSAYNKHRDKPIREQAENIIHLFTLTNLGAPAAFKYFDTTIDRKRYTSTKEVLDATLIHQSITGLYETRIDLSQLGGDKRTADGSEFESPKKKAKVE

SEQ ID NO: 16115 - protein, 2230 aa, synthetic construct
MPAAKRVKLDGGTLNIEDEHRLHETSKEPDVSLGSTWLSDFPQAWAETGGMGLAVRQAPLIIPLKATSTPVSIKQYPMSQEARLGIKPHIQRLLDQGILVPCQSPWNTPLLPVKKPGTNDYRPVQDLREVNKRVEDIHPTVPNPYNLLSGLPPSHQWYTVLDLKDAFFCLRLHPTSQPLFAFEWRDPEMGISGQLTWTRLPQGFKNSPTLFNEALHRDLADFRIQHPDLILLQYVDDLLLAATSELDCQQGTRALLQTLGNLGYRASAKKAQICQKQVKYLGYLLKEGQRWLTEARKETVMGQPTPKTPRQLREFLGKAGFCRLFIPGFAEMAAPLYPLTKPGTLFNWGPDQQKAYQEIKQALLTAPALGLPDLTKPFELFVDEKQGYAKGVLTQKLGPWRRPVAYLSKKLDPVAAGWPPCLRMVAAIAVLTKDAGKLTMGQPLVILAPHAVEALVKQPPDRWLSNARMTHYQALLLDTDRVQFGPVVALNPATLLPLPEEGLQHNCLDILAEAHGTRPDLTDQPLPDADHTWYTDGSSLLQEGQRKAGAAVTTETEVIWAKALPAGTSAQRAELIALTQALKMAEGKKLNVYTDSRYAFATAHIHGEIYRRRGWLTSEGKEIKNKDEILALLKALFLPKRLSIIHCPGHQKGHSAEARGNRMADQAARKAAITETPDTSTLLSGGSSGGSSGSETPGTSESATPESSGGSSGGSSMASNFTQFVLVDNGGTGDVTVAPSNFANGIAEWISSNSRSQAYKVTCSVRQSSAQNRKYTIKVEVPKGAWRSYLNMELTIPIFATNSDCELIVKAMQGLLKDGNPIPSAIAANSGIYGSSGGGEAAAKDKKYSIGLDIGTNSVGWAVITDEYKVPSKKFKVLGNTDRHSIKKNLIGALLFDSGETAEATRLKRTARRRYTRRKNRICYLQEIFSNEMAKVDDSFFHRLEESFLVEEDKKHERHPIFGNIVDEVAYHEKYPTIYHLRKKLVDSTDKADLRLIYLALAHMIKFRGHFLIEGDLNPDNSDVDKLFIQLVQTYNQLFEENPINASGVDAKAILSARLSKSRRLENLIAQLPGEKKNGLFGNLIALSLGLTPNFKSNFDLAEDAKLQLSKDTYDDDLDNLLAQIGDQYADLFLAAKNLSDAILLSDILRVNTEITKAPLSASMIKRYDEHHQDLTLLKALVRQQLPEKYKEIFFDQSKNGYAGYIDGGASQEEFYKFIKPILEKMDGTEELLVKLNREDLLRKQRTFDNGSIPHQIHLGELHAILRRQEDFYPFLKDNREKIEKILTFRIPYYVGPLARGNSRFAWMTRKSEETITPWNFEEVVDKGASAQSFIERMTNFDKNLPNEKVLPKHSLLYEYFTVYNELTKVKYVTEGMRKPAFLSGEQKKAIVDLLFKTNRKVTVKQLKEDYFKKIECFDSVEISGVEDRFNASLGTYHDLLKIIKDKDFLDNEENEDILEDIVLTLTLFEDREMIEERLKTYAHLFDDKVMKQLKRRRYTGWGRLSRKLINGIRDKQSGKTILDFLKSDGFANRNFMQLIHDDSLTFKEDIQKAQVSGQGDSLHEHIANLAGSPAIKKGILQTVKVVDELVKVMGRHKPENIVIEMARENQTTQKGQKNSRERMKRIEEGIKELGSQILKEHPVENTQLQNEKLYLYYLQNGRDMYVDQELDINRLSDYDVDHIVPQSFLKDDSIDNKVLTRSDKARGKSDNVPSEEVVKKMKNYWRQLLNAKLITQRKFDNLTKAERGGLSELDKAGFIKRQLVETRQITKHVAQILDSRMNTKYDENDKLIREVKVITLKSKLVSDFRKDFQFYKVREINNYHHAHDAYLNAVVGTALIKKYPKLESEFVYGDYKVYDVRKMIAKSEQEIGKATAKYFFYSNIMNFFKTEITLANGEIRKRPLIETNGETGEIVWDKGRDFATVRKVLSMPQVNIVKKTEVQTGGFSKESILPKRNSDKLIARKKDWDPKKYGGFDSPTVAYSVLVVAKVEKGKSKKLKSVKELLGITIMERSSFEKNPIDFLEAKGYKEVKKDLIIKLPKYSLFELENGRKRMLASAGELQKGNELALPSKYVNFLYLASHYEKLKGSPEDNEQKQLFVEQHKHYLDEIIEQISEFSKRVILADANLDKVLSAYNKHRDKPIREQAENIIHLFTLTNLGAPAAFKYFDTTIDRKRYTSTKEVLDATLIHQSITGLYETRIDLSQLGGDKRTADGSEFESPKKKAKVE

SEQ ID NO: 16116 - protein, 2388 aa, synthetic construct
MPAAKRVKLDGGTLNIEDEHRLHETSKEPDVSLGSTWLSDFPQAWAETGGMGLAVRQAPLIIPLKATSTPVSIKQYPMSQEARLGIKPHIQRLLDQGILVPCQSPWNTPLLPVKKPGTNDYRPVQDLREVNKRVEDIHPTVPNPYNLLSGLPPSHQWYTVLDLKDAFFCLRLHPTSQPLFAFEWRDPEMGISGQLTWTRLPQGFKNSPTLFNEALHRDLADFRIQHPDLILLQYVDDLLLAATSELDCQQGTRALLQTLGNLGYRASAKKAQICQKQVKYLGYLLKEGQRWLTEARKETVMGQPTPKTPRQLREFLGKAGFCRLFIPGFAEMAAPLYPLTKPGTLFNWGPDQQKAYQEIKQALLTAPALGLPDLTKPFELFVDEKQGYAKGVLTQKLGPWRRPVAYLSKKLDPVAAGWPPCLRMVAAIAVLTKDAGKLTMGQPLVILAPHAVEALVKQPPDRWLSNARMTHYQALLLDTDRVQFGPVVALNPATLLPLPEEGLQHNCLDILAEAHGTRPDLTDQPLPDADHTWYTDGSSLLQEGQRKAGAAVTTETEVIWAKALPAGTSAQRAELIALTQALKMAEGKKLNVYTDSRYAFATAHIHGEIYRRRGWLTSEGKEIKNKDEILALLKALFLPKRLSIIHCPGHQKGHSAEARGNRMADQAARKAAITETPDTSTLLSGGSSGGSSGSETPGTSESATPESSGGSSGGSSMASNFTQFVLVDNGGTGDVTVAPSNFANGIAEWISSNSRSQAYKVTCSVRQSSAQNRKYTIKVEVPKGAWRSYLNMELTIPIFATNSDCELIVKAMQGLLKDGNPIPSAIAANSGIYGGSGGSMASNFTQFVLVDNGGTGDVTVAPSNFANGIAEWISSNSRSQAYKVTCSVRQSSAQNRKYTIKVEVPKGAWRSYLNMELTIPIFATNSDCELIVKAMQGLLKDGNPIPSAIAANSGIYAEAAAKEAAAKEAAAKEAAAKALEAEAAAKEAAAKEAAAKEAAAKADKKYSIGLDIGTNSVGWAVITDEYKVPSKKFKVLGNTDRHSIKKNLIGALLFDSGETAEATRLKRTARRRYTRRKNRICYLQEIFSNEMAKVDDSFFHRLEESFLVEEDKKHERHPIFGNIVDEVAYHEKYPTIYHLRKKLVDSTDKADLRLIYLALAHMIKFRGHFLIEGDLNPDNSDVDKLFIQLVQTYNQLFEENPINASGVDAKAILSARLSKSRRLENLIAQLPGEKKNGLFGNLIALSLGLTPNFKSNFDLAEDAKLQLSKDTYDDDLDNLLAQIGDQYADLFLAAKNLSDAILLSDILRVNTEITKAPLSASMIKRYDEHHQDLTLLKALVRQQLPEKYKEIFFDQSKNGYAGYIDGGASQEEFYKFIKPILEKMDGTEELLVKLNREDLLRKQRTFDNGSIPHQIHLGELHAILRRQEDFYPFLKDNREKIEKILTFRIPYYVGPLARGNSRFAWMTRKSEETITPWNFEEVVDKGASAQSFIERMTNFDKNLPNEKVLPKHSLLYEYFTVYNELTKVKYVTEGMRKPAFLSGEQKKAIVDLLFKTNRKVTVKQLKEDYFKKIECFDSVEISGVEDRFNASLGTYHDLLKIIKDKDFLDNEENEDILEDIVLTLTLFEDREMIEERLKTYAHLFDDKVMKQLKRRRYTGWGRLSRKLINGIRDKQSGKTILDFLKSDGFANRNFMQLIHDDSLTFKEDIQKAQVSGQGDSLHEHIANLAGSPAIKKGILQTVKVVDELVKVMGRHKPENIVIEMARENQTTQKGQKNSRERMKRIEEGIKELGSQILKEHPVENTQLQNEKLYLYYLQNGRDMYVDQELDINRLSDYDVDHIVPQSFLKDDSIDNKVLTRSDKARGKSDNVPSEEVVKKMKNYWRQLLNAKLITQRKFDNLTKAERGGLSELDKAGFIKRQLVETRQITKHVAQILDSRMNTKYDENDKLIREVKVITLKSKLVSDFRKDFQFYKVREINNYHHAHDAYLNAVVGTALIKKYPKLESEFVYGDYKVYDVRKMIAKSEQEIGKATAKYFFYSNIMNFFKTEITLANGEIRKRPLIETNGETGEIVWDKGRDFATVRKVLSMPQVNIVKKTEVQTGGFSKESILPKRNSDKLIARKKDWDPKKYGGFDSPTVAYSVLVVAKVEKGKSKKLKSVKELLGITIMERSSFEKNPIDFLEAKGYKEVKKDLIIKLPKYSLFELENGRKRMLASAGELQKGNELALPSKYVNFLYLASHYEKLKGSPEDNEQKQLFVEQHKHYLDEIIEQISEFSKRVILADANLDKVLSAYNKHRDKPIREQAENIIHLFTLTNLGAPAAFKYFDTTIDRKRYTSTKEVLDATLIHQSITGLYETRIDLSQLGGDKRTADGSEFESPKKKAKVE

SEQ ID NO: 16117 - protein, 2375 aa, synthetic construct
MPAAKRVKLDGGTLNIEDEHRLHETSKEPDVSLGSTWLSDFPQAWAETGGMGLAVRQAPLIIPLKATSTPVSIKQYPMSQEARLGIKPHIQRLLDQGILVPCQSPWNTPLLPVKKPGTNDYRPVQDLREVNKRVEDIHPTVPNPYNLLSGLPPSHQWYTVLDLKDAFFCLRLHPTSQPLFAFEWRDPEMGISGQLTWTRLPQGFKNSPTLFNEALHRDLADFRIQHPDLILLQYVDDLLLAATSELDCQQGTRALLQTLGNLGYRASAKKAQICQKQVKYLGYLLKEGQRWLTEARKETVMGQPTPKTPRQLREFLGKAGFCRLFIPGFAEMAAPLYPLTKPGTLFNWGPDQQKAYQEIKQALLTAPALGLPDLTKPFELFVDEKQGYAKGVLTQKLGPWRRPVAYLSKKLDPVAAGWPPCLRMVAAIAVLTKDAGKLTMGQPLVILAPHAVEALVKQPPDRWLSNARMTHYQALLLDTDRVQFGPVVALNPATLLPLPEEGLQHNCLDILAEAHGTRPDLTDQPLPDADHTWYTDGSSLLQEGQRKAGAAVTTETEVIWAKALPAGTSAQRAELIALTQALKMAEGKKLNVYTDSRYAFATAHIHGEIYRRRGWLTSEGKEIKNKDEILALLKALFLPKRLSIIHCPGHQKGHSAEARGNRMADQAARKAAITETPDTSTLLSGGSSGGSSGSETPGTSESATPESSGGSSGGSSMASNFTQFVLVDNGGTGDVTVAPSNFANGIAEWISSNSRSQAYKVTCSVRQSSAQNRKYTIKVEVPKGAWRSYLNMELTIPIFATNSDCELIVKAMQGLLKDGNPIPSAIAANSGIYGGSGGSMASNFTQFVLVDNGGTGDVTVAPSNFANGIAEWISSNSRSQAYKVTCSVRQSSAQNRKYTIKVEVPKGAWRSYLNMELTIPIFATNSDCELIVKAMQGLLKDGNPIPSAIAANSGIYSGGSSGGSSGSETPGTSESATPESSGGSSGGSSDKKYSIGLDIGTNSVGWAVITDEYKVPSKKFKVLGNTDRHSIKKNLIGALLFDSGETAEATRLKRTARRRYTRRKNRICYLQEIFSNEMAKVDDSFFHRLEESFLVEEDKKHERHPIFGNIVDEVAYHEKYPTIYHLRKKLVDSTDKADLRLIYLALAHMIKFRGHFLIEGDLNPDNSDVDKLFIQLVQTYNQLFEENPINASGVDAKAILSARLSKSRRLENLIAQLPGEKKNGLFGNLIALSLGLTPNFKSNFDLAEDAKLQLSKDTYDDDLDNLLAQIGDQYADLFLAAKNLSDAILLSDILRVNTEITKAPLSASMIKRYDEHHQDLTLLKALVRQQLPEKYKEIFFDQSKNGYAGYIDGGASQEEFYKFIKPILEKMDGTEELLVKLNREDLLRKQRTFDNGSIPHQIHLGELHAILRRQEDFYPFLKDNREKIEKILTFRIPYYVGPLARGNSRFAWMTRKSEETITPWNFEEVVDKGASAQSFIERMTNFDKNLPNEKVLPKHSLLYEYFTVYNELTKVKYVTEGMRKPAFLSGEQKKAIVDLLFKTNRKVTVKQLKEDYFKKIECFDSVEISGVEDRFNASLGTYHDLLKIIKDKDFLDNEENEDILEDIVLTLTLFEDREMIEERLKTYAHLFDDKVMKQLKRRRYTGWGRLSRKLINGIRDKQSGKTILDFLKSDGFANRNFMQLIHDDSLTFKEDIQKAQVSGQGDSLHEHIANLAGSPAIKKGILQTVKVVDELVKVMGRHKPENIVIEMARENQTTQKGQKNSRERMKRIEEGIKELGSQILKEHPVENTQLQNEKLYLYYLQNGRDMYVDQELDINRLSDYDVDHIVPQSFLKDDSIDNKVLTRSDKARGKSDNVPSEEVVKKMKNYWRQLLNAKLITQRKFDNLTKAERGGLSELDKAGFIKRQLVETRQITKHVAQILDSRMNTKYDENDKLIREVKVITLKSKLVSDFRKDFQFYKVREINNYHHAHDAYLNAVVGTALIKKYPKLESEFVYGDYKVYDVRKMIAKSEQEIGKATAKYFFYSNIMNFFKTEITLANGEIRKRPLIETNGETGEIVWDKGRDFATVRKVLSMPQVNIVKKTEVQTGGFSKESILPKRNSDKLIARKKDWDPKKYGGFDSPTVAYSVLVVAKVEKGKSKKLKSVKELLGITIMERSSFEKNPIDFLEAKGYKEVKKDLIIKLPKYSLFELENGRKRMLASAGELQKGNELALPSKYVNFLYLASHYEKLKGSPEDNEQKQLFVEQHKHYLDEIIEQISEFSKRVILADANLDKVLSAYNKHRDKPIREQAENIIHLFTLTNLGAPAAFKYFDTTIDRKRYTSTKEVLDATLIHQSITGLYETRIDLSQLGGDKRTADGSEFESPKKKAKVE

SEQ ID NO: 16118 - protein, 2360 aa, synthetic construct
MPAAKRVKLDGGTLNIEDEHRLHETSKEPDVSLGSTWLSDFPQAWAETGGMGLAVRQAPLIIPLKATSTPVSIKQYPMSQEARLGIKPHIQRLLDQGILVPCQSPWNTPLLPVKKPGTNDYRPVQDLREVNKRVEDIHPTVPNPYNLLSGLPPSHQWYTVLDLKDAFFCLRLHPTSQPLFAFEWRDPEMGISGQLTWTRLPQGFKNSPTLFNEALHRDLADFRIQHPDLILLQYVDDLLLAATSELDCQQGTRALLQTLGNLGYRASAKKAQICQKQVKYLGYLLKEGQRWLTEARKETVMGQPTPKTPRQLREFLGKAGFCRLFIPGFAEMAAPLYPLTKPGTLFNWGPDQQKAYQEIKQALLTAPALGLPDLTKPFELFVDEKQGYAKGVLTQKLGPWRRPVAYLSKKLDPVAAGWPPCLRMVAAIAVLTKDAGKLTMGQPLVILAPHAVEALVKQPPDRWLSNARMTHYQALLLDTDRVQFGPVVALNPATLLPLPEEGLQHNCLDILAEAHGTRPDLTDQPLPDADHTWYTDGSSLLQEGQRKAGAAVTTETEVIWAKALPAGTSAQRAELIALTQALKMAEGKKLNVYTDSRYAFATAHIHGEIYRRRGWLTSEGKEIKNKDEILALLKALFLPKRLSIIHCPGHQKGHSAEARGNRMADQAARKAAITETPDTSTLLSGGSSGGSSGSETPGTSESATPESSGGSSGGSSMASNFTQFVLVDNGGTGDVTVAPSNFANGIAEWISSNSRSQAYKVTCSVRQSSAQNRKYTIKVEVPKGAWRSYLNMELTIPIFATNSDCELIVKAMQGLLKDGNPIPSAIAANSGIYGGSGGSMASNFTQFVLVDNGGTGDVTVAPSNFANGIAEWISSNSRSQAYKVTCSVRQSSAQNRKYTIKVEVPKGAWRSYLNMELTIPIFATNSDCELIVKAMQGLLKDGNPIPSAIAANSGIYGSSGSSGSSGSSGSSGSSDKKYSIGLDIGTNSVGWAVITDEYKVPSKKFKVLGNTDRHSIKKNLIGALLFDSGETAEATRLKRTARRRYTRRKNRICYLQEIFSNEMAKVDDSFFHRLEESFLVEEDKKHERHPIFGNIVDEVAYHEKYPTIYHLRKKLVDSTDKADLRLIYLALAHMIKFRGHFLIEGDLNPDNSDVDKLFIQLVQTYNQLFEENPINASGVDAKAILSARLSKSRRLENLIAQLPGEKKNGLFGNLIALSLGLTPNFKSNFDLAEDAKLQLSKDTYDDDLDNLLAQIGDQYADLFLAAKNLSDAILLSDILRVNTEITKAPLSASMIKRYDEHHQDLTLLKALVRQQLPEKYKEIFFDQSKNGYAGYIDGGASQEEFYKFIKPILEKMDGTEELLVKLNREDLLRKQRTFDNGSIPHQIHLGELHAILRRQEDFYPFLKDNREKIEKILTFRIPYYVGPLARGNSRFAWMTRKSEETITPWNFEEVVDKGASAQSFIERMTNFDKNLPNEKVLPKHSLLYEYFTVYNELTKVKYVTEGMRKPAFLSGEQKKAIVDLLFKTNRKVTVKQLKEDYFKKIECFDSVEISGVEDRFNASLGTYHDLLKIIKDKDFLDNEENEDILEDIVLTLTLFEDREMIEERLKTYAHLFDDKVMKQLKRRRYTGWGRLSRKLINGIRDKQSGKTILDFLKSDGFANRNFMQLIHDDSLTFKEDIQKAQVSGQGDSLHEHIANLAGSPAIKKGILQTVKVVDELVKVMGRHKPENIVIEMARENQTTQKGQKNSRERMKRIEEGIKELGSQILKEHPVENTQLQNEKLYLYYLQNGRDMYVDQELDINRLSDYDVDHIVPQSFLKDDSIDNKVLTRSDKARGKSDNVPSEEVVKKMKNYWRQLLNAKLITQRKFDNLTKAERGGLSELDKAGFIKRQLVETRQITKHVAQILDSRMNTKYDENDKLIREVKVITLKSKLVSDFRKDFQFYKVREINNYHHAHDAYLNAVVGTALIKKYPKLESEFVYGDYKVYDVRKMIAKSEQEIGKATAKYFFYSNIMNFFKTEITLANGEIRKRPLIETNGETGEIVWDKGRDFATVRKVLSMPQVNIVKKTEVQTGGFSKESILPKRNSDKLIARKKDWDPKKYGGFDSPTVAYSVLVVAKVEKGKSKKLKSVKELLGITIMERSSFEKNPIDFLEAKGYKEVKKDLIIKLPKYSLFELENGRKRMLASAGELQKGNELALPSKYVNFLYLASHYEKLKGSPEDNEQKQLFVEQHKHYLDEIIEQISEFSKRVILADANLDKVLSAYNKHRDKPIREQAENIIHLFTLTNLGAPAAFKYFDTTIDRKRYTSTKEVLDATLIHQSITGLYETRIDLSQLGGDKRTADGSEFESPKKKAKVE

SEQ ID NO: 16119 - protein, 2353 aa, synthetic construct
MPAAKRVKLDGGTLNIEDEHRLHETSKEPDVSLGSTWLSDFPQAWAETGGMGLAVRQAPLIIPLKATSTPVSIKQYPMSQEARLGIKPHIQRLLDQGILVPCQSPWNTPLLPVKKPGTNDYRPVQDLREVNKRVEDIHPTVPNPYNLLSGLPPSHQWYTVLDLKDAFFCLRLHPTSQPLFAFEWRDPEMGISGQLTWTRLPQGFKNSPTLFNEALHRDLADFRIQHPDLILLQYVDDLLLAATSELDCQQGTRALLQTLGNLGYRASAKKAQICQKQVKYLGYLLKEGQRWLTEARKETVMGQPTPKTPRQLREFLGKAGFCRLFIPGFAEMAAPLYPLTKPGTLFNWGPDQQKAYQEIKQALLTAPALGLPDLTKPFELFVDEKQGYAKGVLTQKLGPWRRPVAYLSKKLDPVAAGWPPCLRMVAAIAVLTKDAGKLTMGQPLVILAPHAVEALVKQPPDRWLSNARMTHYQALLLDTDRVQFGPVVALNPATLLPLPEEGLQHNCLDILAEAHGTRPDLTDQPLPDADHTWYTDGSSLLQEGQRKAGAAVTTETEVIWAKALPAGTSAQRAELIALTQALKMAEGKKLNVYTDSRYAFATAHIHGEIYRRRGWLTSEGKEIKNKDEILALLKALFLPKRLSIIHCPGHQKGHSAEARGNRMADQAARKAAITETPDTSTLLSGGSSGGSSGSETPGTSESATPESSGGSSGGSSMASNFTQFVLVDNGGTGDVTVAPSNFANGIAEWISSNSRSQAYKVTCSVRQSSAQNRKYTIKVEVPKGAWRSYLNMELTIPIFATNSDCELIVKAMQGLLKDGNPIPSAIAANSGIYGGSGGSMASNFTQFVLVDNGGTGDVTVAPSNFANGIAEWISSNSRSQAYKVTCSVRQSSAQNRKYTIKVEVPKGAWRSYLNMELTIPIFATNSDCELIVKAMQGLLKDGNPIPSAIAANSGIYGSSGGGEAAAKDKKYSIGLDIGTNSVGWAVITDEYKVPSKKFKVLGNTDRHSIKKNLIGALLFDSGETAEATRLKRTARRRYTRRKNRICYLQEIFSNEMAKVDDSFFHRLEESFLVEEDKKHERHPIFGNIVDEVAYHEKYPTIYHLRKKLVDSTDKADLRLIYLALAHMIKFRGHFLIEGDLNPDNSDVDKLFIQLVQTYNQLFEENPINASGVDAKAILSARLSKSRRLENLIAQLPGEKKNGLFGNLIALSLGLTPNFKSNFDLAEDAKLQLSKDTYDDDLDNLLAQIGDQYADLFLAAKNLSDAILLSDILRVNTEITKAPLSASMIKRYDEHHQDLTLLKALVRQQLPEKYKEIFFDQSKNGYAGYIDGGASQEEFYKFIKPILEKMDGTEELLVKLNREDLLRKQRTFDNGSIPHQIHLGELHAILRRQEDFYPFLKDNREKIEKILTFRIPYYVGPLARGNSRFAWMTRKSEETITPWNFEEVVDKGASAQSFIERMTNFDKNLPNEKVLPKHSLLYEYFTVYNELTKVKYVTEGMRKPAFLSGEQKKAIVDLLFKTNRKVTVKQLKEDYFKKIECFDSVEISGVEDRFNASLGTYHDLLKIIKDKDFLDNEENEDILEDIVLTLTLFEDREMIEERLKTYAHLFDDKVMKQLKRRRYTGWGRLSRKLINGIRDKQSGKTILDFLKSDGFANRNFMQLIHDDSLTFKEDIQKAQVSGQGDSLHEHIANLAGSPAIKKGILQTVKVVDELVKVMGRHKPENIVIEMARENQTTQKGQKNSRERMKRIEEGIKELGSQILKEHPVENTQLQNEKLYLYYLQNGRDMYVDQELDINRLSDYDVDHIVPQSFLKDDSIDNKVLTRSDKARGKSDNVPSEEVVKKMKNYWRQLLNAKLITQRKFDNLTKAERGGLSELDKAGFIKRQLVETRQITKHVAQILDSRMNTKYDENDKLIREVKVITLKSKLVSDFRKDFQFYKVREINNYHHAHDAYLNAVVGTALIKKYPKLESEFVYGDYKVYDVRKMIAKSEQEIGKATAKYFFYSNIMNFFKTEITLANGEIRKRPLIETNGETGEIVWDKGRDFATVRKVLSMPQVNIVKKTEVQTGGFSKESILPKRNSDKLIARKKDWDPKKYGGFDSPTVAYSVLVVAKVEKGKSKKLKSVKELLGITIMERSSFEKNPIDFLEAKGYKEVKKDLIIKLPKYSLFELENGRKRMLASAGELQKGNELALPSKYVNFLYLASHYEKLKGSPEDNEQKQLFVEQHKHYLDEIIEQISEFSKRVILADANLDKVLSAYNKHRDKPIREQAENIIHLFTLTNLGAPAAFKYFDTTIDRKRYTSTKEVLDATLIHQSITGLYETRIDLSQLGGDKRTADGSEFESPKKKAKVE

SEQ ID NO: 16120 - protein, 2644 aa, synthetic construct
MPAAKRVKLDGGTLNIEDEHRLHETSKEPDVSLGSTWLSDFPQAWAETGGMGLAVRQAPLIIPLKATSTPVSIKQYPMSQEARLGIKPHIQRLLDQGILVPCQSPWNTPLLPVKKPGTNDYRPVQDLREVNKRVEDIHPTVPNPYNLLSGLPPSHQWYTVLDLKDAFFCLRLHPTSQPLFAFEWRDPEMGISGQLTWTRLPQGFKNSPTLFNEALHRDLADFRIQHPDLILLQYVDDLLLAATSELDCQQGTRALLQTLGNLGYRASAKKAQICQKQVKYLGYLLKEGQRWLTEARKETVMGQPTPKTPRQLREFLGKAGFCRLFIPGFAEMAAPLYPLTKPGTLFNWGPDQQKAYQEIKQALLTAPALGLPDLTKPFELFVDEKQGYAKGVLTQKLGPWRRPVAYLSKKLDPVAAGWPPCLRMVAAIAVLTKDAGKLTMGQPLVILAPHAVEALVKQPPDRWLSNARMTHYQALLLDTDRVQFGPVVALNPATLLPLPEEGLQHNCLDILAEAHGTRPDLTDQPLPDADHTWYTDGSSLLQEGQRKAGAAVTTETEVIWAKALPAGTSAQRAELIALTQALKMAEGKKLNVYTDSRYAFATAHIHGEIYRRRGWLTSEGKEIKNKDEILALLKALFLPKRLSIIHCPGHQKGHSAEARGNRMADQAARKAAITETPDTSTLLSGGSSGGSSGSETPGTSESATPESSGGSSGGSSMASNFTQFVLVDNGGTGDVTVAPSNFANGIAEWISSNSRSQAYKVTCSVRQSSAQNRKYTIKVEVPKGAWRSYLNMELTIPIFATNSDCELIVKAMQGLLKDGNPIPSAIAANSGIYGGSGGSMASNFTQFVLVDNGGTGDVTVAPSNFANGIAEWISSNSRSQAYKVTCSVRQSSAQNRKYTIKVEVPKGAWRSYLNMELTIPIFATNSDCELIVKAMQGLLKDGNPIPSAIAANSGIYGGGSGGGSGGGSGGGSMASNFTQFVLVDNGGTGDVTVAPSNFANGIAEWISSNSRSQAYKVTCSVRQSSAQNRKYTIKVEVPKGAWRSYLNMELTIPIFATNSDCELIVKAMQGLLKDGNPIPSAIAANSGIYGGSGGSMASNFTQFVLVDNGGTGDVTVAPSNFANGIAEWISSNSRSQAYKVTCSVRQSSAQNRKYTIKVEVPKGAWRSYLNMELTIPIFATNSDCELIVKAMQGLLKDGNPIPSAIAANSGIYAEAAAKEAAAKEAAAKEAAAKALEAEAAAKEAAAKEAAAKEAAAKADKKYSIGLDIGTNSVGWAVITDEYKVPSKKFKVLGNTDRHSIKKNLIGALLFDSGETAEATRLKRTARRRYTRRKNRICYLQEIFSNEMAKVDDSFFHRLEESFLVEEDKKHERHPIFGNIVDEVAYHEKYPTIYHLRKKLVDSTDKADLRLIYLALAHMIKFRGHFLIEGDLNPDNSDVDKLFIQLVQTYNQLFEENPINASGVDAKAILSARLSKSRRLENLIAQLPGEKKNGLFGNLIALSLGLTPNFKSNFDLAEDAKLQLSKDTYDDDLDNLLAQIGDQYADLFLAAKNLSDAILLSDILRVNTEITKAPLSASMIKRYDEHHQDLTLLKALVRQQLPEKYKEIFFDQSKNGYAGYIDGGASQEEFYKFIKPILEKMDGTEELLVKLNREDLLRKQRTFDNGSIPHQIHLGELHAILRRQEDFYPFLKDNREKIEKILTFRIPYYVGPLARGNSRFAWMTRKSEETITPWNFEEVVDKGASAQSFIERMTNFDKNLPNEKVLPKHSLLYEYFTVYNELTKVKYVTEGMRKPAFLSGEQKKAIVDLLFKTNRKVTVKQLKEDYFKKIECFDSVEISGVEDRFNASLGTYHDLLKIIKDKDFLDNEENEDILEDIVLTLTLFEDREMIEERLKTYAHLFDDKVMKQLKRRRYTGWGRLSRKLINGIRDKQSGKTILDFLKSDGFANRNFMQLIHDDSLTFKEDIQKAQVSGQGDSLHEHIANLAGSPAIKKGILQTVKVVDELVKVMGRHKPENIVIEMARENQTTQKGQKNSRERMKRIEEGIKELGSQILKEHPVENTQLQNEKLYLYYLQNGRDMYVDQELDINRLSDYDVDHIVPQSFLKDDSIDNKVLTRSDKARGKSDNVPSEEVVKKMKNYWRQLLNAKLITQRKFDNLTKAERGGLSELDKAGFIKRQLVETRQITKHVAQILDSRMNTKYDENDKLIREVKVITLKSKLVSDFRKDFQFYKVREINNYHHAHDAYLNAVVGTALIKKYPKLESEFVYGDYKVYDVRKMIAKSEQEIGKATAKYFFYSNIMNFFKTEITLANGEIRKRPLIETNGETGEIVWDKGRDFATVRKVLSMPQVNIVKKTEVQTGGFSKESILPKRNSDKLIARKKDWDPKKYGGFDSPTVAYSVLVVAKVEKGKSKKLKSVKELLGITIMERSSFEKNPIDFLEAKGYKEVKKDLIIKLPKYSLFELENGRKRMLASAGELQKGNELALPSKYVNFLYLASHYEKLKGSPEDNEQKQLFVEQHKHYLDEIIEQISEFSKRVILADANLDKVLSAYNKHRDKPIREQAENIIHLFTLTNLGAPAAFKYFDTTIDRKRYTSTKEVLDATLIHQSITGLYETRIDLSQLGGDKRTADGSEFESPKKKAKVE

SEQ ID NO: 16121 - protein, 2631 aa, synthetic construct
MPAAKRVKLDGGTLNIEDEHRLHETSKEPDVSLGSTWLSDFPQAWAETGGMGLAVRQAPLIIPLKATSTPVSIKQYPMSQEARLGIKPHIQRLLDQGILVPCQSPWNTPLLPVKKPGTNDYRPVQDLREVNKRVEDIHPTVPNPYNLLSGLPPSHQWYTVLDLKDAFFCLRLHPTSQPLFAFEWRDPEMGISGQLTWTRLPQGFKNSPTLFNEALHRDLADFRIQHPDLILLQYVDDLLLAATSELDCQQGTRALLQTLGNLGYRASAKKAQICQKQVKYLGYLLKEGQRWLTEARKETVMGQPTPKTPRQLREFLGKAGFCRLFIPGFAEMAAPLYPLTKPGTLFNWGPDQQKAYQEIKQALLTAPALGLPDLTKPFELFVDEKQGYAKGVLTQKLGPWRRPVAYLSKKLDPVAAGWPPCLRMVAAIAVLTKDAGKLTMGQPLVILAPHAVEALVKQPPDRWLSNARMTHYQALLLDTDRVQFGPVVALNPATLLPLPEEGLQHNCLDILAEAHGTRPDLTDQPLPDADHTWYTDGSSLLQEGQRKAGAAVTTETEVIWAKALPAGTSAQRAELIALTQALKMAEGKKLNVYTDSRYAFATAHIHGEIYRRRGWLTSEGKEIKNKDEILALLKALFLPKRLSIIHCPGHQKGHSAEARGNRMADQAARKAAITETPDTSTLLSGGSSGGSSGSETPGTSESATPESSGGSSGGSSMASNFTQFVLVDNGGTGDVTVAPSNFANGIAEWISSNSRSQAYKVTCSVRQSSAQNRKYTIKVEVPKGAWRSYLNMELTIPIFATNSDCELIVKAMQGLLKDGNPIPSAIAANSGIYGGSGGSMASNFTQFVLVDNGGTGDVTVAPSNFANGIAEWISSNSRSQAYKVTCSVRQSSAQNRKYTIKVEVPKGAWRSYLNMELTIPIFATNSDCELIVKAMQGLLKDGNPIPSAIAANSGIYGGGSGGGSGGGSGGGSMASNFTQFVLVDNGGTGDVTVAPSNFANGIAEWISSNSRSQAYKVTCSVRQSSAQNRKYTIKVEVPKGAWRSYLNMELTIPIFATNSDCELIVKAMQGLLKDGNPIPSAIAANSGIYGGSGGSMASNFTQFVLVDNGGTGDVTVAPSNFANGIAEWISSNSRSQAYKVTCSVRQSSAQNRKYTIKVEVPKGAWRSYLNMELTIPIFATNSDCELIVKAMQGLLKDGNPIPSAIAANSGIYSGGSSGGSSGSETPGTSESATPESSGGSSGGSSDKKYSIGLDIGTNSVGWAVITDEYKVPSKKFKVLGNTDRHSIKKNLIGALLFDSGETAEATRLKRTARRRYTRRKNRICYLQEIFSNEMAKVDDSFFHRLEESFLVEEDKKHERHPIFGNIVDEVAYHEKYPTIYHLRKKLVDSTDKADLRLIYLALAHMIKFRGHFLIEGDLNPDNSDVDKLFIQLVQTYNQLFEENPINASGVDAKAILSARLSKSRRLENLIAQLPGEKKNGLFGNLIALSLGLTPNFKSNFDLAEDAKLQLSKDTYDDDLDNLLAQIGDQYADLFLAAKNLSDAILLSDILRVNTEITKAPLSASMIKRYDEHHQDLTLLKALVRQQLPEKYKEIFFDQSKNGYAGYIDGGASQEEFYKFIKPILEKMDGTEELLVKLNREDLLRKQRTFDNGSIPHQIHLGELHAILRRQEDFYPFLKDNREKIEKILTFRIPYYVGPLARGNSRFAWMTRKSEETITPWNFEEVVDKGASAQSFIERMTNFDKNLPNEKVLPKHSLLYEYFTVYNELTKVKYVTEGMRKPAFLSGEQKKAIVDLLFKTNRKVTVKQLKEDYFKKIECFDSVEISGVEDRFNASLGTYHDLLKIIKDKDFLDNEENEDILEDIVLTLTLFEDREMIEERLKTYAHLFDDKVMKQLKRRRYTGWGRLSRKLINGIRDKQSGKTILDFLKSDGFANRNFMQLIHDDSLTFKEDIQKAQVSGQGDSLHEHIANLAGSPAIKKGILQTVKVVDELVKVMGRHKPENIVIEMARENQTTQKGQKNSRERMKRIEEGIKELGSQILKEHPVENTQLQNEKLYLYYLQNGRDMYVDQELDINRLSDYDVDHIVPQSFLKDDSIDNKVLTRSDKARGKSDNVPSEEVVKKMKNYWRQLLNAKLITQRKFDNLTKAERGGLSELDKAGFIKRQLVETRQITKHVAQILDSRMNTKYDENDKLIREVKVITLKSKLVSDFRKDFQFYKVREINNYHHAHDAYLNAVVGTALIKKYPKLESEFVYGDYKVYDVRKMIAKSEQEIGKATAKYFFYSNIMNFFKTEITLANGEIRKRPLIETNGETGEIVWDKGRDFATVRKVLSMPQVNIVKKTEVQTGGFSKESILPKRNSDKLIARKKDWDPKKYGGFDSPTVAYSVLVVAKVEKGKSKKLKSVKELLGITIMERSSFEKNPIDFLEAKGYKEVKKDLIIKLPKYSLFELENGRKRMLASAGELQKGNELALPSKYVNFLYLASHYEKLKGSPEDNEQKQLFVEQHKHYLDEIIEQISEFSKRVILADANLDKVLSAYNKHRDKPIREQAENIIHLFTLTNLGAPAAFKYFDTTIDRKRYTSTKEVLDATLIHQSITGLYETRIDLSQLGGDKRTADGSEFESPKKKAKVE

SEQ ID NO: 16122 - protein, 2616 aa, synthetic construct
MPAAKRVKLDGGTLNIEDEHRLHETSKEPDVSLGSTWLSDFPQAWAETGGMGLAVRQAPLIIPLKATSTPVSIKQYPMSQEARLGIKPHIQRLLDQGILVPCQSPWNTPLLPVKKPGTNDYRPVQDLREVNKRVEDIHPTVPNPYNLLSGLPPSHQWYTVLDLKDAFFCLRLHPTSQPLFAFEWRDPEMGISGQLTWTRLPQGFKNSPTLFNEALHRDLADFRIQHPDLILLQYVDDLLLAATSELDCQQGTRALLQTLGNLGYRASAKKAQICQKQVKYLGYLLKEGQRWLTEARKETVMGQPTPKTPRQLREFLGKAGFCRLFIPGFAEMAAPLYPLTKPGTLFNWGPDQQKAYQEIKQALLTAPALGLPDLTKPFELFVDEKQGYAKGVLTQKLGPWRRPVAYLSKKLDPVAAGWPPCLRMVAAIAVLTKDAGKLTMGQPLVILAPHAVEALVKQPPDRWLSNARMTHYQALLLDTDRVQFGPVVALNPATLLPLPEEGLQHNCLDILAEAHGTRPDLTDQPLPDADHTWYTDGSSLLQEGQRKAGAAVTTETEVIWAKALPAGTSAQRAELIALTQALKMAEGKKLNVYTDSRYAFATAHIHGEIYRRRGWLTSEGKEIKNKDEILALLKALFLPKRLSIIHCPGHQKGHSAEARGNRMADQAARKAAITETPDTSTLLSGGSSGGSSGSETPGTSESATPESSGGSSGGSSMASNFTQFVLVDNGGTGDVTVAPSNFANGIAEWISSNSRSQAYKVTCSVRQSSAQNRKYTIKVEVPKGAWRSYLNMELTIPIFATNSDCELIVKAMQGLLKDGNPIPSAIAANSGIYGGSGGSMASNFTQFVLVDNGGTGDVTVAPSNFANGIAEWISSNSRSQAYKVTCSVRQSSAQNRKYTIKVEVPKGAWRSYLNMELTIPIFATNSDCELIVKAMQGLLKDGNPIPSAIAANSGIYGGGSGGGSGGGSGGGSMASNFTQFVLVDNGGTGDVTVAPSNFANGIAEWISSNSRSQAYKVTCSVRQSSAQNRKYTIKVEVPKGAWRSYLNMELTIPIFATNSDCELIVKAMQGLLKDGNPIPSAIAANSGIYGGSGGSMASNFTQFVLVDNGGTGDVTVAPSNFANGIAEWISSNSRSQAYKVTCSVRQSSAQNRKYTIKVEVPKGAWRSYLNMELTIPIFATNSDCELIVKAMQGLLKDGNPIPSAIAANSGIYGSSGSSGSSGSSGSSGSSDKKYSIGLDIGTNSVGWAVITDEYKVPSKKFKVLGNTDRHSIKKNLIGALLFDSGETAEATRLKRTARRRYTRRKNRICYLQEIFSNEMAKVDDSFFHRLEESFLVEEDKKHERHPIFGNIVDEVAYHEKYPTIYHLRKKLVDSTDKADLRLIYLALAHMIKFRGHFLIEGDLNPDNSDVDKLFIQLVQTYNQLFEENPINASGVDAKAILSARLSKSRRLENLIAQLPGEKKNGLFGNLIALSLGLTPNFKSNFDLAEDAKLQLSKDTYDDDLDNLLAQIGDQYADLFLAAKNLSDAILLSDILRVNTEITKAPLSASMIKRYDEHHQDLTLLKALVRQQLPEKYKEIFFDQSKNGYAGYIDGGASQEEFYKFIKPILEKMDGTEELLVKLNREDLLRKQRTFDNGSIPHQIHLGELHAILRRQEDFYPFLKDNREKIEKILTFRIPYYVGPLARGNSRFAWMTRKSEETITPWNFEEVVDKGASAQSFIERMTNFDKNLPNEKVLPKHSLLYEYFTVYNELTKVKYVTEGMRKPAFLSGEQKKAIVDLLFKTNRKVTVKQLKEDYFKKIECFDSVEISGVEDRFNASLGTYHDLLKIIKDKDFLDNEENEDILEDIVLTLTLFEDREMIEERLKTYAHLFDDKVMKQLKRRRYTGWGRLSRKLINGIRDKQSGKTILDFLKSDGFANRNFMQLIHDDSLTFKEDIQKAQVSGQGDSLHEHIANLAGSPAIKKGILQTVKVVDELVKVMGRHKPENIVIEMARENQTTQKGQKNSRERMKRIEEGIKELGSQILKEHPVENTQLQNEKLYLYYLQNGRDMYVDQELDINRLSDYDVDHIVPQSFLKDDSIDNKVLTRSDKARGKSDNVPSEEVVKKMKNYWRQLLNAKLITQRKFDNLTKAERGGLSELDKAGFIKRQLVETRQITKHVAQILDSRMNTKYDENDKLIREVKVITLKSKLVSDFRKDFQFYKVREINNYHHAHDAYLNAVVGTALIKKYPKLESEFVYGDYKVYDVRKMIAKSEQEIGKATAKYFFYSNIMNFFKTEITLANGEIRKRPLIETNGETGEIVWDKGRDFATVRKVLSMPQVNIVKKTEVQTGGFSKESILPKRNSDKLIARKKDWDPKKYGGFDSPTVAYSVLVVAKVEKGKSKKLKSVKELLGITIMERSSFEKNPIDFLEAKGYKEVKKDLIIKLPKYSLFELENGRKRMLASAGELQKGNELALPSKYVNFLYLASHYEKLKGSPEDNEQKQLFVEQHKHYLDEIIEQISEFSKRVILADANLDKVLSAYNKHRDKPIREQAENIIHLFTLTNLGAPAAFKYFDTTIDRKRYTSTKEVLDATLIHQSITGLYETRIDLSQLGGDKRTADGSEFESPKKKAKVE

SEQ ID NO: 16123 - protein, 2609 aa, synthetic construct
MPAAKRVKLDGGTLNIEDEHRLHETSKEPDVSLGSTWLSDFPQAWAETGGMGLAVRQAPLIIPLKATSTPVSIKQYPMSQEARLGIKPHIQRLLDQGILVPCQSPWNTPLLPVKKPGTNDYRPVQDLREVNKRVEDIHPTVPNPYNLLSGLPPSHQWYTVLDLKDAFFCLRLHPTSQPLFAFEWRDPEMGISGQLTWTRLPQGFKNSPTLFNEALHRDLADFRIQHPDLILLQYVDDLLLAATSELDCQQGTRALLQTLGNLGYRASAKKAQICQKQVKYLGYLLKEGQRWLTEARKETVMGQPTPKTPRQLREFLGKAGFCRLFIPGFAEMAAPLYPLTKPGTLFNWGPDQQKAYQEIKQALLTAPALGLPDLTKPFELFVDEKQGYAKGVLTQKLGPWRRPVAYLSKKLDPVAAGWPPCLRMVAAIAVLTKDAGKLTMGQPLVILAPHAVEALVKQPPDRWLSNARMTHYQALLLDTDRVQFGPVVALNPATLLPLPEEGLQHNCLDILAEAHGTRPDLTDQPLPDADHTWYTDGSSLLQEGQRKAGAAVTTETEVIWAKALPAGTSAQRAELIALTQALKMAEGKKLNVYTDSRYAFATAHIHGEIYRRRGWLTSEGKEIKNKDEILALLKALFLPKRLSIIHCPGHQKGHSAEARGNRMADQAARKAAITETPDTSTLLSGGSSGGSSGSETPGTSESATPESSGGSSGGSSMASNFTQFVLVDNGGTGDVTVAPSNFANGIAEWISSNSRSQAYKVTCSVRQSSAQNRKYTIKVEVPKGAWRSYLNMELTIPIFATNSDCELIVKAMQGLLKDGNPIPSAIAANSGIYGGSGGSMASNFTQFVLVDNGGTGDVTVAPSNFANGIAEWISSNSRSQAYKVTCSVRQSSAQNRKYTIKVEVPKGAWRSYLNMELTIPIFATNSDCELIVKAMQGLLKDGNPIPSAIAANSGIYGGGSGGGSGGGSGGGSMASNFTQFVLVDNGGTGDVTVAPSNFANGIAEWISSNSRSQAYKVTCSVRQSSAQNRKYTIKVEVPKGAWRSYLNMELTIPIFATNSDCELIVKAMQGLLKDGNPIPSAIAANSGIYGGSGGSMASNFTQFVLVDNGGTGDVTVAPSNFANGIAEWISSNSRSQAYKVTCSVRQSSAQNRKYTIKVEVPKGAWRSYLNMELTIPIFATNSDCELIVKAMQGLLKDGNPIPSAIAANSGIYGSSGGGEAAAKDKKYSIGLDIGTNSVGWAVITDEYKVPSKKFKVLGNTDRHSIKKNLIGALLFDSGETAEATRLKRTARRRYTRRKNRICYLQEIFSNEMAKVDDSFFHRLEESFLVEEDKKHERHPIFGNIVDEVAYHEKYPTIYHLRKKLVDSTDKADLRLIYLALAHMIKFRGHFLIEGDLNPDNSDVDKLFIQLVQTYNQLFEENPINASGVDAKAILSARLSKSRRLENLIAQLPGEKKNGLFGNLIALSLGLTPNFKSNFDLAEDAKLQLSKDTYDDDLDNLLAQIGDQYADLFLAAKNLSDAILLSDILRVNTEITKAPLSASMIKRYDEHHQDLTLLKALVRQQLPEKYKEIFFDQSKNGYAGYIDGGASQEEFYKFIKPILEKMDGTEELLVKLNREDLLRKQRTFDNGSIPHQIHLGELHAILRRQEDFYPFLKDNREKIEKILTFRIPYYVGPLARGNSRFAWMTRKSEETITPWNFEEVVDKGASAQSFIERMTNFDKNLPNEKVLPKHSLLYEYFTVYNELTKVKYVTEGMRKPAFLSGEQKKAIVDLLFKTNRKVTVKQLKEDYFKKIECFDSVEISGVEDRFNASLGTYHDLLKIIKDKDFLDNEENEDILEDIVLTLTLFEDREMIEERLKTYAHLFDDKVMKQLKRRRYTGWGRLSRKLINGIRDKQSGKTILDFLKSDGFANRNFMQLIHDDSLTFKEDIQKAQVSGQGDSLHEHIANLAGSPAIKKGILQTVKVVDELVKVMGRHKPENIVIEMARENQTTQKGQKNSRERMKRIEEGIKELGSQILKEHPVENTQLQNEKLYLYYLQNGRDMYVDQELDINRLSDYDVDHIVPQSFLKDDSIDNKVLTRSDKARGKSDNVPSEEVVKKMKNYWRQLLNAKLITQRKFDNLTKAERGGLSELDKAGFIKRQLVETRQITKHVAQILDSRMNTKYDENDKLIREVKVITLKSKLVSDFRKDFQFYKVREINNYHHAHDAYLNAVVGTALIKKYPKLESEFVYGDYKVYDVRKMIAKSEQEIGKATAKYFFYSNIMNFFKTEITLANGEIRKRPLIETNGETGEIVWDKGRDFATVRKVLSMPQVNIVKKTEVQTGGFSKESILPKRNSDKLIARKKDWDPKKYGGFDSPTVAYSVLVVAKVEKGKSKKLKSVKELLGITIMERSSFEKNPIDFLEAKGYKEVKKDLIIKLPKYSLFELENGRKRMLASAGELQKGNELALPSKYVNFLYLASHYEKLKGSPEDNEQKQLFVEQHKHYLDEIIEQISEFSKRVILADANLDKVLSAYNKHRDKPIREQAENIIHLFTLTNLGAPAAFKYFDTTIDRKRYTSTKEVLDATLIHQSITGLYETRIDLSQLGGDKRTADGSEFESPKKKAKVE

SEQ ID NO: 16124 - protein, 2250 aa, synthetic construct
MPAAKRVKLDGGTLNIEDEHRLHETSKEPDVSLGSTWLSDFPQAWAETGGMGLAVRQAPLIIPLKATSTPVSIKQYPMSQEARLGIKPHIQRLLDQGILVPCQSPWNTPLLPVKKPGTNDYRPVQDLREVNKRVEDIHPTVPNPYNLLSGLPPSHQWYTVLDLKDAFFCLRLHPTSQPLFAFEWRDPEMGISGQLTWTRLPQGFKNSPTLFNEALHRDLADFRIQHPDLILLQYVDDLLLAATSELDCQQGTRALLQTLGNLGYRASAKKAQICQKQVKYLGYLLKEGQRWLTEARKETVMGQPTPKTPRQLREFLGKAGFCRLFIPGFAEMAAPLYPLTKPGTLFNWGPDQQKAYQEIKQALLTAPALGLPDLTKPFELFVDEKQGYAKGVLTQKLGPWRRPVAYLSKKLDPVAAGWPPCLRMVAAIAVLTKDAGKLTMGQPLVILAPHAVEALVKQPPDRWLSNARMTHYQALLLDTDRVQFGPVVALNPATLLPLPEEGLQHNCLDILAEAHGTRPDLTDQPLPDADHTWYTDGSSLLQEGQRKAGAAVTTETEVIWAKALPAGTSAQRAELIALTQALKMAEGKKLNVYTDSRYAFATAHIHGEIYRRRGWLTSEGKEIKNKDEILALLKALFLPKRLSIIHCPGHQKGHSAEARGNRMADQAARKAAITETPDTSTLLGSSGSSGSSGSSGSSGSSMASNFTQFVLVDNGGTGDVTVAPSNFANGIAEWISSNSRSQAYKVTCSVRQSSAQNRKYTIKVEVPKGAWRSYLNMELTIPIFATNSDCELIVKAMQGLLKDGNPIPSAIAANSGIYAEAAAKEAAAKEAAAKEAAAKALEAEAAAKEAAAKEAAAKEAAAKADKKYSIGLDIGTNSVGWAVITDEYKVPSKKFKVLGNTDRHSIKKNLIGALLFDSGETAEATRLKRTARRRYTRRKNRICYLQEIFSNEMAKVDDSFFHRLEESFLVEEDKKHERHPIFGNIVDEVAYHEKYPTIYHLRKKLVDSTDKADLRLIYLALAHMIKFRGHFLIEGDLNPDNSDVDKLFIQLVQTYNQLFEENPINASGVDAKAILSARLSKSRRLENLIAQLPGEKKNGLFGNLIALSLGLTPNFKSNFDLAEDAKLQLSKDTYDDDLDNLLAQIGDQYADLFLAAKNLSDAILLSDILRVNTEITKAPLSASMIKRYDEHHQDLTLLKALVRQQLPEKYKEIFFDQSKNGYAGYIDGGASQEEFYKFIKPILEKMDGTEELLVKLNREDLLRKQRTFDNGSIPHQIHLGELHAILRRQEDFYPFLKDNREKIEKILTFRIPYYVGPLARGNSRFAWMTRKSEETITPWNFEEVVDKGASAQSFIERMTNFDKNLPNEKVLPKHSLLYEYFTVYNELTKVKYVTEGMRKPAFLSGEQKKAIVDLLFKTNRKVTVKQLKEDYFKKIECFDSVEISGVEDRFNASLGTYHDLLKIIKDKDFLDNEENEDILEDIVLTLTLFEDREMIEERLKTYAHLFDDKVMKQLKRRRYTGWGRLSRKLINGIRDKQSGKTILDFLKSDGFANRNFMQLIHDDSLTFKEDIQKAQVSGQGDSLHEHIANLAGSPAIKKGILQTVKVVDELVKVMGRHKPENIVIEMARENQTTQKGQKNSRERMKRIEEGIKELGSQILKEHPVENTQLQNEKLYLYYLQNGRDMYVDQELDINRLSDYDVDHIVPQSFLKDDSIDNKVLTRSDKARGKSDNVPSEEVVKKMKNYWRQLLNAKLITQRKFDNLTKAERGGLSELDKAGFIKRQLVETRQITKHVAQILDSRMNTKYDENDKLIREVKVITLKSKLVSDFRKDFQFYKVREINNYHHAHDAYLNAVVGTALIKKYPKLESEFVYGDYKVYDVRKMIAKSEQEIGKATAKYFFYSNIMNFFKTEITLANGEIRKRPLIETNGETGEIVWDKGRDFATVRKVLSMPQVNIVKKTEVQTGGFSKESILPKRNSDKLIARKKDWDPKKYGGFDSPTVAYSVLVVAKVEKGKSKKLKSVKELLGITIMERSSFEKNPIDFLEAKGYKEVKKDLIIKLPKYSLFELENGRKRMLASAGELQKGNELALPSKYVNFLYLASHYEKLKGSPEDNEQKQLFVEQHKHYLDEIIEQISEFSKRVILADANLDKVLSAYNKHRDKPIREQAENIIHLFTLTNLGAPAAFKYFDTTIDRKRYTSTKEVLDATLIHQSITGLYETRIDLSQLGGDKRTADGSEFESPKKKAKVE

SEQ ID NO: 16125 - protein, 2237 aa, synthetic construct
MPAAKRVKLDGGTLNIEDEHRLHETSKEPDVSLGSTWLSDFPQAWAETGGMGLAVRQAPLIIPLKATSTPVSIKQYPMSQEARLGIKPHIQRLLDQGILVPCQSPWNTPLLPVKKPGTNDYRPVQDLREVNKRVEDIHPTVPNPYNLLSGLPPSHQWYTVLDLKDAFFCLRLHPTSQPLFAFEWRDPEMGISGQLTWTRLPQGFKNSPTLFNEALHRDLADFRIQHPDLILLQYVDDLLLAATSELDCQQGTRALLQTLGNLGYRASAKKAQICQKQVKYLGYLLKEGQRWLTEARKETVMGQPTPKTPRQLREFLGKAGFCRLFIPGFAEMAAPLYPLTKPGTLFNWGPDQQKAYQEIKQALLTAPALGLPDLTKPFELFVDEKQGYAKGVLTQKLGPWRRPVAYLSKKLDPVAAGWPPCLRMVAAIAVLTKDAGKLTMGQPLVILAPHAVEALVKQPPDRWLSNARMTHYQALLLDTDRVQFGPVVALNPATLLPLPEEGLQHNCLDILAEAHGTRPDLTDQPLPDADHTWYTDGSSLLQEGQRKAGAAVTTETEVIWAKALPAGTSAQRAELIALTQALKMAEGKKLNVYTDSRYAFATAHIHGEIYRRRGWLTSEGKEIKNKDEILALLKALFLPKRLSIIHCPGHQKGHSAEARGNRMADQAARKAAITETPDTSTLLGSSGSSGSSGSSGSSGSSMASNFTQFVLVDNGGTGDVTVAPSNFANGIAEWISSNSRSQAYKVTCSVRQSSAQNRKYTIKVEVPKGAWRSYLNMELTIPIFATNSDCELIVKAMQGLLKDGNPIPSAIAANSGIYSGGSSGGSSGSETPGTSESATPESSGGSSGGSSDKKYSIGLDIGTNSVGWAVITDEYKVPSKKFKVLGNTDRHSIKKNLIGALLFDSGETAEATRLKRTARRRYTRRKNRICYLQEIFSNEMAKVDDSFFHRLEESFLVEEDKKHERHPIFGNIVDEVAYHEKYPTIYHLRKKLVDSTDKADLRLIYLALAHMIKFRGHFLIEGDLNPDNSDVDKLFIQLVQTYNQLFEENPINASGVDAKAILSARLSKSRRLENLIAQLPGEKKNGLFGNLIALSLGLTPNFKSNFDLAEDAKLQLSKDTYDDDLDNLLAQIGDQYADLFLAAKNLSDAILLSDILRVNTEITKAPLSASMIKRYDEHHQDLTLLKALVRQQLPEKYKEIFFDQSKNGYAGYIDGGASQEEFYKFIKPILEKMDGTEELLVKLNREDLLRKQRTFDNGSIPHQIHLGELHAILRRQEDFYPFLKDNREKIEKILTFRIPYYVGPLARGNSRFAWMTRKSEETITPWNFEEVVDKGASAQSFIERMTNFDKNLPNEKVLPKHSLLYEYFTVYNELTKVKYVTEGMRKPAFLSGEQKKAIVDLLFKTNRKVTVKQLKEDYFKKIECFDSVEISGVEDRFNASLGTYHDLLKIIKDKDFLDNEENEDILEDIVLTLTLFEDREMIEERLKTYAHLFDDKVMKQLKRRRYTGWGRLSRKLINGIRDKQSGKTILDFLKSDGFANRNFMQLIHDDSLTFKEDIQKAQVSGQGDSLHEHIANLAGSPAIKKGILQTVKVVDELVKVMGRHKPENIVIEMARENQTTQKGQKNSRERMKRIEEGIKELGSQILKEHPVENTQLQNEKLYLYYLQNGRDMYVDQELDINRLSDYDVDHIVPQSFLKDDSIDNKVLTRSDKARGKSDNVPSEEVVKKMKNYWRQLLNAKLITQRKFDNLTKAERGGLSELDKAGFIKRQLVETRQITKHVAQILDSRMNTKYDENDKLIREVKVITLKSKLVSDFRKDFQFYKVREINNYHHAHDAYLNAVVGTALIKKYPKLESEFVYGDYKVYDVRKMIAKSEQEIGKATAKYFFYSNIMNFFKTEITLANGEIRKRPLIETNGETGEIVWDKGRDFATVRKVLSMPQVNIVKKTEVQTGGFSKESILPKRNSDKLIARKKDWDPKKYGGFDSPTVAYSVLVVAKVEKGKSKKLKSVKELLGITIMERSSFEKNPIDFLEAKGYKEVKKDLIIKLPKYSLFELENGRKRMLASAGELQKGNELALPSKYVNFLYLASHYEKLKGSPEDNEQKQLFVEQHKHYLDEIIEQISEFSKRVILADANLDKVLSAYNKHRDKPIREQAENIIHLFTLTNLGAPAAFKYFDTTIDRKRYTSTKEVLDATLIHQSITGLYETRIDLSQLGGDKRTADGSEFESPKKKAKVE

SEQ ID NO: 16126 - protein, 2222 aa, synthetic construct
MPAAKRVKLDGGTLNIEDEHRLHETSKEPDVSLGSTWLSDFPQAWAETGGMGLAVRQAPLIIPLKATSTPVSIKQYPMSQEARLGIKPHIQRLLDQGILVPCQSPWNTPLLPVKKPGTNDYRPVQDLREVNKRVEDIHPTVPNPYNLLSGLPPSHQWYTVLDLKDAFFCLRLHPTSQPLFAFEWRDPEMGISGQLTWTRLPQGFKNSPTLFNEALHRDLADFRIQHPDLILLQYVDDLLLAATSELDCQQGTRALLQTLGNLGYRASAKKAQICQKQVKYLGYLLKEGQRWLTEARKETVMGQPTPKTPRQLREFLGKAGFCRLFIPGFAEMAAPLYPLTKPGTLFNWGPDQQKAYQEIKQALLTAPALGLPDLTKPFELFVDEKQGYAKGVLTQKLGPWRRPVAYLSKKLDPVAAGWPPCLRMVAAIAVLTKDAGKLTMGQPLVILAPHAVEALVKQPPDRWLSNARMTHYQALLLDTDRVQFGPVVALNPATLLPLPEEGLQHNCLDILAEAHGTRPDLTDQPLPDADHTWYTDGSSLLQEGQRKAGAAVTTETEVIWAKALPAGTSAQRAELIALTQALKMAEGKKLNVYTDSRYAFATAHIHGEIYRRRGWLTSEGKEIKNKDEILALLKALFLPKRLSIIHCPGHQKGHSAEARGNRMADQAARKAAITETPDTSTLLGSSGSSGSSGSSGSSGSSMASNFTQFVLVDNGGTGDVTVAPSNFANGIAEWISSNSRSQAYKVTCSVRQSSAQNRKYTIKVEVPKGAWRSYLNMELTIPIFATNSDCELIVKAMQGLLKDGNPIPSAIAANSGIYGSSGSSGSSGSSGSSGSSDKKYSIGLDIGTNSVGWAVITDEYKVPSKKFKVLGNTDRHSIKKNLIGALLFDSGETAEATRLKRTARRRYTRRKNRICYLQEIFSNEMAKVDDSFFHRLEESFLVEEDKKHERHPIFGNIVDEVAYHEKYPTIYHLRKKLVDSTDKADLRLIYLALAHMIKFRGHFLIEGDLNPDNSDVDKLFIQLVQTYNQLFEENPINASGVDAKAILSARLSKSRRLENLIAQLPGEKKNGLFGNLIALSLGLTPNFKSNFDLAEDAKLQLSKDTYDDDLDNLLAQIGDQYADLFLAAKNLSDAILLSDILRVNTEITKAPLSASMIKRYDEHHQDLTLLKALVRQQLPEKYKEIFFDQSKNGYAGYIDGGASQEEFYKFIKPILEKMDGTEELLVKLNREDLLRKQRTFDNGSIPHQIHLGELHAILRRQEDFYPFLKDNREKIEKILTFRIPYYVGPLARGNSRFAWMTRKSEETITPWNFEEVVDKGASAQSFIERMTNFDKNLPNEKVLPKHSLLYEYFTVYNELTKVKYVTEGMRKPAFLSGEQKKAIVDLLFKTNRKVTVKQLKEDYFKKIECFDSVEISGVEDRFNASLGTYHDLLKIIKDKDFLDNEENEDILEDIVLTLTLFEDREMIEERLKTYAHLFDDKVMKQLKRRRYTGWGRLSRKLINGIRDKQSGKTILDFLKSDGFANRNFMQLIHDDSLTFKEDIQKAQVSGQGDSLHEHIANLAGSPAIKKGILQTVKVVDELVKVMGRHKPENIVIEMARENQTTQKGQKNSRERMKRIEEGIKELGSQILKEHPVENTQLQNEKLYLYYLQNGRDMYVDQELDINRLSDYDVDHIVPQSFLKDDSIDNKVLTRSDKARGKSDNVPSEEVVKKMKNYWRQLLNAKLITQRKFDNLTKAERGGLSELDKAGFIKRQLVETRQITKHVAQILDSRMNTKYDENDKLIREVKVITLKSKLVSDFRKDFQFYKVREINNYHHAHDAYLNAVVGTALIKKYPKLESEFVYGDYKVYDVRKMIAKSEQEIGKATAKYFFYSNIMNFFKTEITLANGEIRKRPLIETNGETGEIVWDKGRDFATVRKVLSMPQVNIVKKTEVQTGGFSKESILPKRNSDKLIARKKDWDPKKYGGFDSPTVAYSVLVVAKVEKGKSKKLKSVKELLGITIMERSSFEKNPIDFLEAKGYKEVKKDLIIKLPKYSLFELENGRKRMLASAGELQKGNELALPSKYVNFLYLASHYEKLKGSPEDNEQKQLFVEQHKHYLDEIIEQISEFSKRVILADANLDKVLSAYNKHRDKPIREQAENIIHLFTLTNLGAPAAFKYFDTTIDRKRYTSTKEVLDATLIHQSITGLYETRIDLSQLGGDKRTADGSEFESPKKKAKVE

SEQ ID NO: 16127 - protein, 2215 aa, synthetic construct
MPAAKRVKLDGGTLNIEDEHRLHETSKEPDVSLGSTWLSDFPQAWAETGGMGLAVRQAPLIIPLKATSTPVSIKQYPMSQEARLGIKPHIQRLLDQGILVPCQSPWNTPLLPVKKPGTNDYRPVQDLREVNKRVEDIHPTVPNPYNLLSGLPPSHQWYTVLDLKDAFFCLRLHPTSQPLFAFEWRDPEMGISGQLTWTRLPQGFKNSPTLFNEALHRDLADFRIQHPDLILLQYVDDLLLAATSELDCQQGTRALLQTLGNLGYRASAKKAQICQKQVKYLGYLLKEGQRWLTEARKETVMGQPTPKTPRQLREFLGKAGFCRLFIPGFAEMAAPLYPLTKPGTLFNWGPDQQKAYQEIKQALLTAPALGLPDLTKPFELFVDEKQGYAKGVLTQKLGPWRRPVAYLSKKLDPVAAGWPPCLRMVAAIAVLTKDAGKLTMGQPLVILAPHAVEALVKQPPDRWLSNARMTHYQALLLDTDRVQFGPVVALNPATLLPLPEEGLQHNCLDILAEAHGTRPDLTDQPLPDADHTWYTDGSSLLQEGQRKAGAAVTTETEVIWAKALPAGTSAQRAELIALTQALKMAEGKKLNVYTDSRYAFATAHIHGEIYRRRGWLTSEGKEIKNKDEILALLKALFLPKRLSIIHCPGHQKGHSAEARGNRMADQAARKAAITETPDTSTLLGSSGSSGSSGSSGSSGSSMASNFTQFVLVDNGGTGDVTVAPSNFANGIAEWISSNSRSQAYKVTCSVRQSSAQNRKYTIKVEVPKGAWRSYLNMELTIPIFATNSDCELIVKAMQGLLKDGNPIPSAIAANSGIYGSSGGGEAAAKDKKYSIGLDIGTNSVGWAVITDEYKVPSKKFKVLGNTDRHSIKKNLIGALLFDSGETAEATRLKRTARRRYTRRKNRICYLQEIFSNEMAKVDDSFFHRLEESFLVEEDKKHERHPIFGNIVDEVAYHEKYPTIYHLRKKLVDSTDKADLRLIYLALAHMIKFRGHFLIEGDLNPDNSDVDKLFIQLVQTYNQLFEENPINASGVDAKAILSARLSKSRRLENLIAQLPGEKKNGLFGNLIALSLGLTPNFKSNFDLAEDAKLQLSKDTYDDDLDNLLAQIGDQYADLFLAAKNLSDAILLSDILRVNTEITKAPLSASMIKRYDEHHQDLTLLKALVRQQLPEKYKEIFFDQSKNGYAGYIDGGASQEEFYKFIKPILEKMDGTEELLVKLNREDLLRKQRTFDNGSIPHQIHLGELHAILRRQEDFYPFLKDNREKIEKILTFRIPYYVGPLARGNSRFAWMTRKSEETITPWNFEEVVDKGASAQSFIERMTNFDKNLPNEKVLPKHSLLYEYFTVYNELTKVKYVTEGMRKPAFLSGEQKKAIVDLLFKTNRKVTVKQLKEDYFKKIECFDSVEISGVEDRFNASLGTYHDLLKIIKDKDFLDNEENEDILEDIVLTLTLFEDREMIEERLKTYAHLFDDKVMKQLKRRRYTGWGRLSRKLINGIRDKQSGKTILDFLKSDGFANRNFMQLIHDDSLTFKEDIQKAQVSGQGDSLHEHIANLAGSPAIKKGILQTVKVVDELVKVMGRHKPENIVIEMARENQTTQKGQKNSRERMKRIEEGIKELGSQILKEHPVENTQLQNEKLYLYYLQNGRDMYVDQELDINRLSDYDVDHIVPQSFLKDDSIDNKVLTRSDKARGKSDNVPSEEVVKKMKNYWRQLLNAKLITQRKFDNLTKAERGGLSELDKAGFIKRQLVETRQITKHVAQILDSRMNTKYDENDKLIREVKVITLKSKLVSDFRKDFQFYKVREINNYHHAHDAYLNAVVGTALIKKYPKLESEFVYGDYKVYDVRKMIAKSEQEIGKATAKYFFYSNIMNFFKTEITLANGEIRKRPLIETNGETGEIVWDKGRDFATVRKVLSMPQVNIVKKTEVQTGGFSKESILPKRNSDKLIARKKDWDPKKYGGFDSPTVAYSVLVVAKVEKGKSKKLKSVKELLGITIMERSSFEKNPIDFLEAKGYKEVKKDLIIKLPKYSLFELENGRKRMLASAGELQKGNELALPSKYVNFLYLASHYEKLKGSPEDNEQKQLFVEQHKHYLDEIIEQISEFSKRVILADANLDKVLSAYNKHRDKPIREQAENIIHLFTLTNLGAPAAFKYFDTTIDRKRYTSTKEVLDATLIHQSITGLYETRIDLSQLGGDKRTADGSEFESPKKKAKVE

SEQ ID NO: 16128 - protein, 2373 aa, synthetic construct
MPAAKRVKLDGGTLNIEDEHRLHETSKEPDVSLGSTWLSDFPQAWAETGGMGLAVRQAPLIIPLKATSTPVSIKQYPMSQEARLGIKPHIQRLLDQGILVPCQSPWNTPLLPVKKPGTNDYRPVQDLREVNKRVEDIHPTVPNPYNLLSGLPPSHQWYTVLDLKDAFFCLRLHPTSQPLFAFEWRDPEMGISGQLTWTRLPQGFKNSPTLFNEALHRDLADFRIQHPDLILLQYVDDLLLAATSELDCQQGTRALLQTLGNLGYRASAKKAQICQKQVKYLGYLLKEGQRWLTEARKETVMGQPTPKTPRQLREFLGKAGFCRLFIPGFAEMAAPLYPLTKPGTLFNWGPDQQKAYQEIKQALLTAPALGLPDLTKPFELFVDEKQGYAKGVLTQKLGPWRRPVAYLSKKLDPVAAGWPPCLRMVAAIAVLTKDAGKLTMGQPLVILAPHAVEALVKQPPDRWLSNARMTHYQALLLDTDRVQFGPVVALNPATLLPLPEEGLQHNCLDILAEAHGTRPDLTDQPLPDADHTWYTDGSSLLQEGQRKAGAAVTTETEVIWAKALPAGTSAQRAELIALTQALKMAEGKKLNVYTDSRYAFATAHIHGEIYRRRGWLTSEGKEIKNKDEILALLKALFLPKRLSIIHCPGHQKGHSAEARGNRMADQAARKAAITETPDTSTLLGSSGSSGSSGSSGSSGSSMASNFTQFVLVDNGGTGDVTVAPSNFANGIAEWISSNSRSQAYKVTCSVRQSSAQNRKYTIKVEVPKGAWRSYLNMELTIPIFATNSDCELIVKAMQGLLKDGNPIPSAIAANSGIYGGSGGSMASNFTQFVLVDNGGTGDVTVAPSNFANGIAEWISSNSRSQAYKVTCSVRQSSAQNRKYTIKVEVPKGAWRSYLNMELTIPIFATNSDCELIVKAMQGLLKDGNPIPSAIAANSGIYAEAAAKEAAAKEAAAKEAAAKALEAEAAAKEAAAKEAAAKEAAAKADKKYSIGLDIGTNSVGWAVITDEYKVPSKKFKVLGNTDRHSIKKNLIGALLFDSGETAEATRLKRTARRRYTRRKNRICYLQEIFSNEMAKVDDSFFHRLEESFLVEEDKKHERHPIFGNIVDEVAYHEKYPTIYHLRKKLVDSTDKADLRLIYLALAHMIKFRGHFLIEGDLNPDNSDVDKLFIQLVQTYNQLFEENPINASGVDAKAILSARLSKSRRLENLIAQLPGEKKNGLFGNLIALSLGLTPNFKSNFDLAEDAKLQLSKDTYDDDLDNLLAQIGDQYADLFLAAKNLSDAILLSDILRVNTEITKAPLSASMIKRYDEHHQDLTLLKALVRQQLPEKYKEIFFDQSKNGYAGYIDGGASQEEFYKFIKPILEKMDGTEELLVKLNREDLLRKQRTFDNGSIPHQIHLGELHAILRRQEDFYPFLKDNREKIEKILTFRIPYYVGPLARGNSRFAWMTRKSEETITPWNFEEVVDKGASAQSFIERMTNFDKNLPNEKVLPKHSLLYEYFTVYNELTKVKYVTEGMRKPAFLSGEQKKAIVDLLFKTNRKVTVKQLKEDYFKKIECFDSVEISGVEDRFNASLGTYHDLLKIIKDKDFLDNEENEDILEDIVLTLTLFEDREMIEERLKTYAHLFDDKVMKQLKRRRYTGWGRLSRKLINGIRDKQSGKTILDFLKSDGFANRNFMQLIHDDSLTFKEDIQKAQVSGQGDSLHEHIANLAGSPAIKKGILQTVKVVDELVKVMGRHKPENIVIEMARENQTTQKGQKNSRERMKRIEEGIKELGSQILKEHPVENTQLQNEKLYLYYLQNGRDMYVDQELDINRLSDYDVDHIVPQSFLKDDSIDNKVLTRSDKARGKSDNVPSEEVVKKMKNYWRQLLNAKLITQRKFDNLTKAERGGLSELDKAGFIKRQLVETRQITKHVAQILDSRMNTKYDENDKLIREVKVITLKSKLVSDFRKDFQFYKVREINNYHHAHDAYLNAVVGTALIKKYPKLESEFVYGDYKVYDVRKMIAKSEQEIGKATAKYFFYSNIMNFFKTEITLANGEIRKRPLIETNGETGEIVWDKGRDFATVRKVLSMPQVNIVKKTEVQTGGFSKESILPKRNSDKLIARKKDWDPKKYGGFDSPTVAYSVLVVAKVEKGKSKKLKSVKELLGITIMERSSFEKNPIDFLEAKGYKEVKKDLIIKLPKYSLFELENGRKRMLASAGELQKGNELALPSKYVNFLYLASHYEKLKGSPEDNEQKQLFVEQHKHYLDEIIEQISEFSKRVILADANLDKVLSAYNKHRDKPIREQAENIIHLFTLTNLGAPAAFKYFDTTIDRKRYTSTKEVLDATLIHQSITGLYETRIDLSQLGGDKRTADGSEFESPKKKAKVE

SEQ ID NO: 16129 - skipped

SEQ ID NO: 16130 - protein, 2345 aa, synthetic construct
MPAAKRVKLDGGTLNIEDEHRLHETSKEPDVSLGSTWLSDFPQAWAETGGMGLAVRQAPLIIPLKATSTPVSIKQYPMSQEARLGIKPHIQRLLDQGILVPCQSPWNTPLLPVKKPGTNDYRPVQDLREVNKRVEDIHPTVPNPYNLLSGLPPSHQWYTVLDLKDAFFCLRLHPTSQPLFAFEWRDPEMGISGQLTWTRLPQGFKNSPTLFNEALHRDLADFRIQHPDLILLQYVDDLLLAATSELDCQQGTRALLQTLGNLGYRASAKKAQICQKQVKYLGYLLKEGQRWLTEARKETVMGQPTPKTPRQLREFLGKAGFCRLFIPGFAEMAAPLYPLTKPGTLFNWGPDQQKAYQEIKQALLTAPALGLPDLTKPFELFVDEKQGYAKGVLTQKLGPWRRPVAYLSKKLDPVAAGWPPCLRMVAAIAVLTKDAGKLTMGQPLVILAPHAVEALVKQPPDRWLSNARMTHYQALLLDTDRVQFGPVVALNPATLLPLPEEGLQHNCLDILAEAHGTRPDLTDQPLPDADHTWYTDGSSLLQEGQRKAGAAVTTETEVIWAKALPAGTSAQRAELIALTQALKMAEGKKLNVYTDSRYAFATAHIHGEIYRRRGWLTSEGKEIKNKDEILALLKALFLPKRLSIIHCPGHQKGHSAEARGNRMADQAARKAAITETPDTSTLLGSSGSSGSSGSSGSSGSSMASNFTQFVLVDNGGTGDVTVAPSNFANGIAEWISSNSRSQAYKVTCSVRQSSAQNRKYTIKVEVPKGAWRSYLNMELTIPIFATNSDCELIVKAMQGLLKDGNPIPSAIAANSGIYGGSGGSMASNFTQFVLVDNGGTGDVTVAPSNFANGIAEWISSNSRSQAYKVTCSVRQSSAQNRKYTIKVEVPKGAWRSYLNMELTIPIFATNSDCELIVKAMQGLLKDGNPIPSAIAANSGIYGSSGSSGSSGSSGSSGSSDKKYSIGLDIGTNSVGWAVITDEYKVPSKKFKVLGNTDRHSIKKNLIGALLFDSGETAEATRLKRTARRRYTRRKNRICYLQEIFSNEMAKVDDSFFHRLEESFLVEEDKKHERHPIFGNIVDEVAYHEKYPTIYHLRKKLVDSTDKADLRLIYLALAHMIKFRGHFLIEGDLNPDNSDVDKLFIQLVQTYNQLFEENPINASGVDAKAILSARLSKSRRLENLIAQLPGEKKNGLFGNLIALSLGLTPNFKSNFDLAEDAKLQLSKDTYDDDLDNLLAQIGDQYADLFLAAKNLSDAILLSDILRVNTEITKAPLSASMIKRYDEHHQDLTLLKALVRQQLPEKYKEIFFDQSKNGYAGYIDGGASQEEFYKFIKPILEKMDGTEELLVKLNREDLLRKQRTFDNGSIPHQIHLGELHAILRRQEDFYPFLKDNREKIEKILTFRIPYYVGPLARGNSRFAWMTRKSEETITPWNFEEVVDKGASAQSFIERMTNFDKNLPNEKVLPKHSLLYEYFTVYNELTKVKYVTEGMRKPAFLSGEQKKAIVDLLFKTNRKVTVKQLKEDYFKKIECFDSVEISGVEDRFNASLGTYHDLLKIIKDKDFLDNEENEDILEDIVLTLTLFEDREMIEERLKTYAHLFDDKVMKQLKRRRYTGWGRLSRKLINGIRDKQSGKTILDFLKSDGFANRNFMQLIHDDSLTFKEDIQKAQVSGQGDSLHEHIANLAGSPAIKKGILQTVKVVDELVKVMGRHKPENIVIEMARENQTTQKGQKNSRERMKRIEEGIKELGSQILKEHPVENTQLQNEKLYLYYLQNGRDMYVDQELDINRLSDYDVDHIVPQSFLKDDSIDNKVLTRSDKARGKSDNVPSEEVVKKMKNYWRQLLNAKLITQRKFDNLTKAERGGLSELDKAGFIKRQLVETRQITKHVAQILDSRMNTKYDENDKLIREVKVITLKSKLVSDFRKDFQFYKVREINNYHHAHDAYLNAVVGTALIKKYPKLESEFVYGDYKVYDVRKMIAKSEQEIGKATAKYFFYSNIMNFFKTEITLANGEIRKRPLIETNGETGEIVWDKGRDFATVRKVLSMPQVNIVKKTEVQTGGFSKESILPKRNSDKLIARKKDWDPKKYGGFDSPTVAYSVLVVAKVEKGKSKKLKSVKELLGITIMERSSFEKNPIDFLEAKGYKEVKKDLIIKLPKYSLFELENGRKRMLASAGELQKGNELALPSKYVNFLYLASHYEKLKGSPEDNEQKQLFVEQHKHYLDEIIEQISEFSKRVILADANLDKVLSAYNKHRDKPIREQAENIIHLFTLTNLGAPAAFKYFDTTIDRKRYTSTKEVLDATLIHQSITGLYETRIDLSQLGGDKRTADGSEFESPKKKAKVE

SEQ ID NO: 16131 - protein, 2338 aa, synthetic construct
MPAAKRVKLDGGTLNIEDEHRLHETSKEPDVSLGSTWLSDFPQAWAETGGMGLAVRQAPLIIPLKATSTPVSIKQYPMSQEARLGIKPHIQRLLDQGILVPCQSPWNTPLLPVKKPGTNDYRPVQDLREVNKRVEDIHPTVPNPYNLLSGLPPSHQWYTVLDLKDAFFCLRLHPTSQPLFAFEWRDPEMGISGQLTWTRLPQGFKNSPTLFNEALHRDLADFRIQHPDLILLQYVDDLLLAATSELDCQQGTRALLQTLGNLGYRASAKKAQICQKQVKYLGYLLKEGQRWLTEARKETVMGQPTPKTPRQLREFLGKAGFCRLFIPGFAEMAAPLYPLTKPGTLFNWGPDQQKAYQEIKQALLTAPALGLPDLTKPFELFVDEKQGYAKGVLTQKLGPWRRPVAYLSKKLDPVAAGWPPCLRMVAAIAVLTKDAGKLTMGQPLVILAPHAVEALVKQPPDRWLSNARMTHYQALLLDTDRVQFGPVVALNPATLLPLPEEGLQHNCLDILAEAHGTRPDLTDQPLPDADHTWYTDGSSLLQEGQRKAGAAVTTETEVIWAKALPAGTSAQRAELIALTQALKMAEGKKLNVYTDSRYAFATAHIHGEIYRRRGWLTSEGKEIKNKDEILALLKALFLPKRLSIIHCPGHQKGHSAEARGNRMADQAARKAAITETPDTSTLLGSSGSSGSSGSSGSSGSSMASNFTQFVLVDNGGTGDVTVAPSNFANGIAEWISSNSRSQAYKVTCSVRQSSAQNRKYTIKVEVPKGAWRSYLNMELTIPIFATNSDCELIVKAMQGLLKDGNPIPSAIAANSGIYGGSGGSMASNFTQFVLVDNGGTGDVTVAPSNFANGIAEWISSNSRSQAYKVTCSVRQSSAQNRKYTIKVEVPKGAWRSYLNMELTIPIFATNSDCELIVKAMQGLLKDGNPIPSAIAANSGIYGSSGGGEAAAKDKKYSIGLDIGTNSVGWAVITDEYKVPSKKFKVLGNTDRHSIKKNLIGALLFDSGETAEATRLKRTARRRYTRRKNRICYLQEIFSNEMAKVDDSFFHRLEESFLVEEDKKHERHPIFGNIVDEVAYHEKYPTIYHLRKKLVDSTDKADLRLIYLALAHMIKFRGHFLIEGDLNPDNSDVDKLFIQLVQTYNQLFEENPINASGVDAKAILSARLSKSRRLENLIAQLPGEKKNGLFGNLIALSLGLTPNFKSNFDLAEDAKLQLSKDTYDDDLDNLLAQIGDQYADLFLAAKNLSDAILLSDILRVNTEITKAPLSASMIKRYDEHHQDLTLLKALVRQQLPEKYKEIFFDQSKNGYAGYIDGGASQEEFYKFIKPILEKMDGTEELLVKLNREDLLRKQRTFDNGSIPHQIHLGELHAILRRQEDFYPFLKDNREKIEKILTFRIPYYVGPLARGNSRFAWMTRKSEETITPWNFEEVVDKGASAQSFIERMTNFDKNLPNEKVLPKHSLLYEYFTVYNELTKVKYVTEGMRKPAFLSGEQKKAIVDLLFKTNRKVTVKQLKEDYFKKIECFDSVEISGVEDRFNASLGTYHDLLKIIKDKDFLDNEENEDILEDIVLTLTLFEDREMIEERLKTYAHLFDDKVMKQLKRRRYTGWGRLSRKLINGIRDKQSGKTILDFLKSDGFANRNFMQLIHDDSLTFKEDIQKAQVSGQGDSLHEHIANLAGSPAIKKGILQTVKVVDELVKVMGRHKPENIVIEMARENQTTQKGQKNSRERMKRIEEGIKELGSQILKEHPVENTQLQNEKLYLYYLQNGRDMYVDQELDINRLSDYDVDHIVPQSFLKDDSIDNKVLTRSDKARGKSDNVPSEEVVKKMKNYWRQLLNAKLITQRKFDNLTKAERGGLSELDKAGFIKRQLVETRQITKHVAQILDSRMNTKYDENDKLIREVKVITLKSKLVSDFRKDFQFYKVREINNYHHAHDAYLNAVVGTALIKKYPKLESEFVYGDYKVYDVRKMIAKSEQEIGKATAKYFFYSNIMNFFKTEITLANGEIRKRPLIETNGETGEIVWDKGRDFATVRKVLSMPQVNIVKKTEVQTGGFSKESILPKRNSDKLIARKKDWDPKKYGGFDSPTVAYSVLVVAKVEKGKSKKLKSVKELLGITIMERSSFEKNPIDFLEAKGYKEVKKDLIIKLPKYSLFELENGRKRMLASAGELQKGNELALPSKYVNFLYLASHYEKLKGSPEDNEQKQLFVEQHKHYLDEIIEQISEFSKRVILADANLDKVLSAYNKHRDKPIREQAENIIHLFTLTNLGAPAAFKYFDTTIDRKRYTSTKEVLDATLIHQSITGLYETRIDLSQLGGDKRTADGSEFESPKKKAKVE

SEQ ID NO: 16132 - protein, 2629 aa, synthetic construct
MPAAKRVKLDGGTLNIEDEHRLHETSKEPDVSLGSTWLSDFPQAWAETGGMGLAVRQAPLIIPLKATSTPVSIKQYPMSQEARLGIKPHIQRLLDQGILVPCQSPWNTPLLPVKKPGTNDYRPVQDLREVNKRVEDIHPTVPNPYNLLSGLPPSHQWYTVLDLKDAFFCLRLHPTSQPLFAFEWRDPEMGISGQLTWTRLPQGFKNSPTLFNEALHRDLADFRIQHPDLILLQYVDDLLLAATSELDCQQGTRALLQTLGNLGYRASAKKAQICQKQVKYLGYLLKEGQRWLTEARKETVMGQPTPKTPRQLREFLGKAGFCRLFIPGFAEMAAPLYPLTKPGTLFNWGPDQQKAYQEIKQALLTAPALGLPDLTKPFELFVDEKQGYAKGVLTQKLGPWRRPVAYLSKKLDPVAAGWPPCLRMVAAIAVLTKDAGKLTMGQPLVILAPHAVEALVKQPPDRWLSNARMTHYQALLLDTDRVQFGPVVALNPATLLPLPEEGLQHNCLDILAEAHGTRPDLTDQPLPDADHTWYTDGSSLLQEGQRKAGAAVTTETEVIWAKALPAGTSAQRAELIALTQALKMAEGKKLNVYTDSRYAFATAHIHGEIYRRRGWLTSEGKEIKNKDEILALLKALFLPKRLSIIHCPGHQKGHSAEARGNRMADQAARKAAITETPDTSTLLGSSGSSGSSGSSGSSGSSMASNFTQFVLVDNGGTGDVTVAPSNFANGIAEWISSNSRSQAYKVTCSVRQSSAQNRKYTIKVEVPKGAWRSYLNMELTIPIFATNSDCELIVKAMQGLLKDGNPIPSAIAANSGIYGGSGGSMASNFTQFVLVDNGGTGDVTVAPSNFANGIAEWISSNSRSQAYKVTCSVRQSSAQNRKYTIKVEVPKGAWRSYLNMELTIPIFATNSDCELIVKAMQGLLKDGNPIPSAIAANSGIYGGGSGGGSGGGSGGGSMASNFTQFVLVDNGGTGDVTVAPSNFANGIAEWISSNSRSQAYKVTCSVRQSSAQNRKYTIKVEVPKGAWRSYLNMELTIPIFATNSDCELIVKAMQGLLKDGNPIPSAIAANSGIYGGSGGSMASNFTQFVLVDNGGTGDVTVAPSNFANGIAEWISSNSRSQAYKVTCSVRQSSAQNRKYTIKVEVPKGAWRSYLNMELTIPIFATNSDCELIVKAMQGLLKDGNPIPSAIAANSGIYAEAAAKEAAAKEAAAKEAAAKALEAEAAAKEAAAKEAAAKEAAAKADKKYSIGLDIGTNSVGWAVITDEYKVPSKKFKVLGNTDRHSIKKNLIGALLFDSGETAEATRLKRTARRRYTRRKNRICYLQEIFSNEMAKVDDSFFHRLEESFLVEEDKKHERHPIFGNIVDEVAYHEKYPTIYHLRKKLVDSTDKADLRLIYLALAHMIKFRGHFLIEGDLNPDNSDVDKLFIQLVQTYNQLFEENPINASGVDAKAILSARLSKSRRLENLIAQLPGEKKNGLFGNLIALSLGLTPNFKSNFDLAEDAKLQLSKDTYDDDLDNLLAQIGDQYADLFLAAKNLSDAILLSDILRVNTEITKAPLSASMIKRYDEHHQDLTLLKALVRQQLPEKYKEIFFDQSKNGYAGYIDGGASQEEFYKFIKPILEKMDGTEELLVKLNREDLLRKQRTFDNGSIPHQIHLGELHAILRRQEDFYPFLKDNREKIEKILTFRIPYYVGPLARGNSRFAWMTRKSEETITPWNFEEVVDKGASAQSFIERMTNFDKNLPNEKVLPKHSLLYEYFTVYNELTKVKYVTEGMRKPAFLSGEQKKAIVDLLFKTNRKVTVKQLKEDYFKKIECFDSVEISGVEDRFNASLGTYHDLLKIIKDKDFLDNEENEDILEDIVLTLTLFEDREMIEERLKTYAHLFDDKVMKQLKRRRYTGWGRLSRKLINGIRDKQSGKTILDFLKSDGFANRNFMQLIHDDSLTFKEDIQKAQVSGQGDSLHEHIANLAGSPAIKKGILQTVKVVDELVKVMGRHKPENIVIEMARENQTTQKGQKNSRERMKRIEEGIKELGSQILKEHPVENTQLQNEKLYLYYLQNGRDMYVDQELDINRLSDYDVDHIVPQSFLKDDSIDNKVLTRSDKARGKSDNVPSEEVVKKMKNYWRQLLNAKLITQRKFDNLTKAERGGLSELDKAGFIKRQLVETRQITKHVAQILDSRMNTKYDENDKLIREVKVITLKSKLVSDFRKDFQFYKVREINNYHHAHDAYLNAVVGTALIKKYPKLESEFVYGDYKVYDVRKMIAKSEQEIGKATAKYFFYSNIMNFFKTEITLANGEIRKRPLIETNGETGEIVWDKGRDFATVRKVLSMPQVNIVKKTEVQTGGFSKESILPKRNSDKLIARKKDWDPKKYGGFDSPTVAYSVLVVAKVEKGKSKKLKSVKELLGITIMERSSFEKNPIDFLEAKGYKEVKKDLIIKLPKYSLFELENGRKRMLASAGELQKGNELALPSKYVNFLYLASHYEKLKGSPEDNEQKQLFVEQHKHYLDEIIEQISEFSKRVILADANLDKVLSAYNKHRDKPIREQAENIIHLFTLTNLGAPAAFKYFDTTIDRKRYTSTKEVLDATLIHQSITGLYETRIDLSQLGGDKRTADGSEFESPKKKAKVE

SEQ ID NO: 16133 - protein, 2616 aa, synthetic construct
MPAAKRVKLDGGTLNIEDEHRLHETSKEPDVSLGSTWLSDFPQAWAETGGMGLAVRQAPLIIPLKATSTPVSIKQYPMSQEARLGIKPHIQRLLDQGILVPCQSPWNTPLLPVKKPGTNDYRPVQDLREVNKRVEDIHPTVPNPYNLLSGLPPSHQWYTVLDLKDAFFCLRLHPTSQPLFAFEWRDPEMGISGQLTWTRLPQGFKNSPTLFNEALHRDLADFRIQHPDLILLQYVDDLLLAATSELDCQQGTRALLQTLGNLGYRASAKKAQICQKQVKYLGYLLKEGQRWLTEARKETVMGQPTPKTPRQLREFLGKAGFCRLFIPGFAEMAAPLYPLTKPGTLFNWGPDQQKAYQEIKQALLTAPALGLPDLTKPFELFVDEKQGYAKGVLTQKLGPWRRPVAYLSKKLDPVAAGWPPCLRMVAAIAVLTKDAGKLTMGQPLVILAPHAVEALVKQPPDRWLSNARMTHYQALLLDTDRVQFGPVVALNPATLLPLPEEGLQHNCLDILAEAHGTRPDLTDQPLPDADHTWYTDGSSLLQEGQRKAGAAVTTETEVIWAKALPAGTSAQRAELIALTQALKMAEGKKLNVYTDSRYAFATAHIHGEIYRRRGWLTSEGKEIKNKDEILALLKALFLPKRLSIIHCPGHQKGHSAEARGNRMADQAARKAAITETPDTSTLLGSSGSSGSSGSSGSSGSSMASNFTQFVLVDNGGTGDVTVAPSNFANGIAEWISSNSRSQAYKVTCSVRQSSAQNRKYTIKVEVPKGAWRSYLNMELTIPIFATNSDCELIVKAMQGLLKDGNPIPSAIAANSGIYGGSGGSMASNFTQFVLVDNGGTGDVTVAPSNFANGIAEWISSNSRSQAYKVTCSVRQSSAQNRKYTIKVEVPKGAWRSYLNMELTIPIFATNSDCELIVKAMQGLLKDGNPIPSAIAANSGIYGGGSGGGSGGGSGGGSMASNFTQFVLVDNGGTGDVTVAPSNFANGIAEWISSNSRSQAYKVTCSVRQSSAQNRKYTIKVEVPKGAWRSYLNMELTIPIFATNSDCELIVKAMQGLLKDGNPIPSAIAANSGIYGGSGGSMASNFTQFVLVDNGGTGDVTVAPSNFANGIAEWISSNSRSQAYKVTCSVRQSSAQNRKYTIKVEVPKGAWRSYLNMELTIPIFATNSDCELIVKAMQGLLKDGNPIPSAIAANSGIYSGGSSGGSSGSETPGTSESATPESSGGSSGGSSDKKYSIGLDIGTNSVGWAVITDEYKVPSKKFKVLGNTDRHSIKKNLIGALLFDSGETAEATRLKRTARRRYTRRKNRICYLQEIFSNEMAKVDDSFFHRLEESFLVEEDKKHERHPIFGNIVDEVAYHEKYPTIYHLRKKLVDSTDKADLRLIYLALAHMIKFRGHFLIEGDLNPDNSDVDKLFIQLVQTYNQLFEENPINASGVDAKAILSARLSKSRRLENLIAQLPGEKKNGLFGNLIALSLGLTPNFKSNFDLAEDAKLQLSKDTYDDDLDNLLAQIGDQYADLFLAAKNLSDAILLSDILRVNTEITKAPLSASMIKRYDEHHQDLTLLKALVRQQLPEKYKEIFFDQSKNGYAGYIDGGASQEEFYKFIKPILEKMDGTEELLVKLNREDLLRKQRTFDNGSIPHQIHLGELHAILRRQEDFYPFLKDNREKIEKILTFRIPYYVGPLARGNSRFAWMTRKSEETITPWNFEEVVDKGASAQSFIERMTNFDKNLPNEKVLPKHSLLYEYFTVYNELTKVKYVTEGMRKPAFLSGEQKKAIVDLLFKTNRKVTVKQLKEDYFKKIECFDSVEISGVEDRFNASLGTYHDLLKIIKDKDFLDNEENEDILEDIVLTLTLFEDREMIEERLKTYAHLFDDKVMKQLKRRRYTGWGRLSRKLINGIRDKQSGKTILDFLKSDGFANRNFMQLIHDDSLTFKEDIQKAQVSGQGDSLHEHIANLAGSPAIKKGILQTVKVVDELVKVMGRHKPENIVIEMARENQTTQKGQKNSRERMKRIEEGIKELGSQILKEHPVENTQLQNEKLYLYYLQNGRDMYVDQELDINRLSDYDVDHIVPQSFLKDDSIDNKVLTRSDKARGKSDNVPSEEVVKKMKNYWRQLLNAKLITQRKFDNLTKAERGGLSELDKAGFIKRQLVETRQITKHVAQILDSRMNTKYDENDKLIREVKVITLKSKLVSDFRKDFQFYKVREINNYHHAHDAYLNAVVGTALIKKYPKLESEFVYGDYKVYDVRKMIAKSEQEIGKATAKYFFYSNIMNFFKTEITLANGEIRKRPLIETNGETGEIVWDKGRDFATVRKVLSMPQVNIVKKTEVQTGGFSKESILPKRNSDKLIARKKDWDPKKYGGFDSPTVAYSVLVVAKVEKGKSKKLKSVKELLGITIMERSSFEKNPIDFLEAKGYKEVKKDLIIKLPKYSLFELENGRKRMLASAGELQKGNELALPSKYVNFLYLASHYEKLKGSPEDNEQKQLFVEQHKHYLDEIIEQISEFSKRVILADANLDKVLSAYNKHRDKPIREQAENIIHLFTLTNLGAPAAFKYFDTTIDRKRYTSTKEVLDATLIHQSITGLYETRIDLSQLGGDKRTADGSEFESPKKKAKVE

SEQ ID NO: 16134 - protein, 2601 aa, synthetic construct
MPAAKRVKLDGGTLNIEDEHRLHETSKEPDVSLGSTWLSDFPQAWAETGGMGLAVRQAPLIIPLKATSTPVSIKQYPMSQEARLGIKPHIQRLLDQGILVPCQSPWNTPLLPVKKPGTNDYRPVQDLREVNKRVEDIHPTVPNPYNLLSGLPPSHQWYTVLDLKDAFFCLRLHPTSQPLFAFEWRDPEMGISGQLTWTRLPQGFKNSPTLFNEALHRDLADFRIQHPDLILLQYVDDLLLAATSELDCQQGTRALLQTLGNLGYRASAKKAQICQKQVKYLGYLLKEGQRWLTEARKETVMGQPTPKTPRQLREFLGKAGFCRLFIPGFAEMAAPLYPLTKPGTLFNWGPDQQKAYQEIKQALLTAPALGLPDLTKPFELFVDEKQGYAKGVLTQKLGPWRRPVAYLSKKLDPVAAGWPPCLRMVAAIAVLTKDAGKLTMGQPLVILAPHAVEALVKQPPDRWLSNARMTHYQALLLDTDRVQFGPVVALNPATLLPLPEEGLQHNCLDILAEAHGTRPDLTDQPLPDADHTWYTDGSSLLQEGQRKAGAAVTTETEVIWAKALPAGTSAQRAELIALTQALKMAEGKKLNVYTDSRYAFATAHIHGEIYRRRGWLTSEGKEIKNKDEILALLKALFLPKRLSIIHCPGHQKGHSAEARGNRMADQAARKAAITETPDTSTLLGSSGSSGSSGSSGSSGSSMASNFTQFVLVDNGGTGDVTVAPSNFANGIAEWISSNSRSQAYKVTCSVRQSSAQNRKYTIKVEVPKGAWRSYLNMELTIPIFATNSDCELIVKAMQGLLKDGNPIPSAIAANSGIYGGSGGSMASNFTQFVLVDNGGTGDVTVAPSNFANGIAEWISSNSRSQAYKVTCSVRQSSAQNRKYTIKVEVPKGAWRSYLNMELTIPIFATNSDCELIVKAMQGLLKDGNPIPSAIAANSGIYGGGSGGGSGGGSGGGSMASNFTQFVLVDNGGTGDVTVAPSNFANGIAEWISSNSRSQAYKVTCSVRQSSAQNRKYTIKVEVPKGAWRSYLNMELTIPIFATNSDCELIVKAMQGLLKDGNPIPSAIAANSGIYGGSGGSMASNFTQFVLVDNGGTGDVTVAPSNFANGIAEWISSNSRSQAYKVTCSVRQSSAQNRKYTIKVEVPKGAWRSYLNMELTIPIFATNSDCELIVKAMQGLLKDGNPIPSAIAANSGIYGSSGSSGSSGSSGSSGSSDKKYSIGLDIGTNSVGWAVITDEYKVPSKKFKVLGNTDRHSIKKNLIGALLFDSGETAEATRLKRTARRRYTRRKNRICYLQEIFSNEMAKVDDSFFHRLEESFLVEEDKKHERHPIFGNIVDEVAYHEKYPTIYHLRKKLVDSTDKADLRLIYLALAHMIKFRGHFLIEGDLNPDNSDVDKLFIQLVQTYNQLFEENPINASGVDAKAILSARLSKSRRLENLIAQLPGEKKNGLFGNLIALSLGLTPNFKSNFDLAEDAKLQLSKDTYDDDLDNLLAQIGDQYADLFLAAKNLSDAILLSDILRVNTEITKAPLSASMIKRYDEHHQDLTLLKALVRQQLPEKYKEIFFDQSKNGYAGYIDGGASQEEFYKFIKPILEKMDGTEELLVKLNREDLLRKQRTFDNGSIPHQIHLGELHAILRRQEDFYPFLKDNREKIEKILTFRIPYYVGPLARGNSRFAWMTRKSEETITPWNFEEVVDKGASAQSFIERMTNFDKNLPNEKVLPKHSLLYEYFTVYNELTKVKYVTEGMRKPAFLSGEQKKAIVDLLFKTNRKVTVKQLKEDYFKKIECFDSVEISGVEDRFNASLGTYHDLLKIIKDKDFLDNEENEDILEDIVLTLTLFEDREMIEERLKTYAHLFDDKVMKQLKRRRYTGWGRLSRKLINGIRDKQSGKTILDFLKSDGFANRNFMQLIHDDSLTFKEDIQKAQVSGQGDSLHEHIANLAGSPAIKKGILQTVKVVDELVKVMGRHKPENIVIEMARENQTTQKGQKNSRERMKRIEEGIKELGSQILKEHPVENTQLQNEKLYLYYLQNGRDMYVDQELDINRLSDYDVDHIVPQSFLKDDSIDNKVLTRSDKARGKSDNVPSEEVVKKMKNYWRQLLNAKLITQRKFDNLTKAERGGLSELDKAGFIKRQLVETRQITKHVAQILDSRMNTKYDENDKLIREVKVITLKSKLVSDFRKDFQFYKVREINNYHHAHDAYLNAVVGTALIKKYPKLESEFVYGDYKVYDVRKMIAKSEQEIGKATAKYFFYSNIMNFFKTEITLANGEIRKRPLIETNGETGEIVWDKGRDFATVRKVLSMPQVNIVKKTEVQTGGFSKESILPKRNSDKLIARKKDWDPKKYGGFDSPTVAYSVLVVAKVEKGKSKKLKSVKELLGITIMERSSFEKNPIDFLEAKGYKEVKKDLIIKLPKYSLFELENGRKRMLASAGELQKGNELALPSKYVNFLYLASHYEKLKGSPEDNEQKQLFVEQHKHYLDEIIEQISEFSKRVILADANLDKVLSAYNKHRDKPIREQAENIIHLFTLTNLGAPAAFKYFDTTIDRKRYTSTKEVLDATLIHQSITGLYETRIDLSQLGGDKRTADGSEFESPKKKAKVE

SEQ ID NO: 16135 - protein, 2594 aa, synthetic construct
MPAAKRVKLDGGTLNIEDEHRLHETSKEPDVSLGSTWLSDFPQAWAETGGMGLAVRQAPLIIPLKATSTPVSIKQYPMSQEARLGIKPHIQRLLDQGILVPCQSPWNTPLLPVKKPGTNDYRPVQDLREVNKRVEDIHPTVPNPYNLLSGLPPSHQWYTVLDLKDAFFCLRLHPTSQPLFAFEWRDPEMGISGQLTWTRLPQGFKNSPTLFNEALHRDLADFRIQHPDLILLQYVDDLLLAATSELDCQQGTRALLQTLGNLGYRASAKKAQICQKQVKYLGYLLKEGQRWLTEARKETVMGQPTPKTPRQLREFLGKAGFCRLFIPGFAEMAAPLYPLTKPGTLFNWGPDQQKAYQEIKQALLTAPALGLPDLTKPFELFVDEKQGYAKGVLTQKLGPWRRPVAYLSKKLDPVAAGWPPCLRMVAAIAVLTKDAGKLTMGQPLVILAPHAVEALVKQPPDRWLSNARMTHYQALLLDTDRVQFGPVVALNPATLLPLPEEGLQHNCLDILAEAHGTRPDLTDQPLPDADHTWYTDGSSLLQEGQRKAGAAVTTETEVIWAKALPAGTSAQRAELIALTQALKMAEGKKLNVYTDSRYAFATAHIHGEIYRRRGWLTSEGKEIKNKDEILALLKALFLPKRLSIIHCPGHQKGHSAEARGNRMADQAARKAAITETPDTSTLLGSSGSSGSSGSSGSSGSSMASNFTQFVLVDNGGTGDVTVAPSNFANGIAEWISSNSRSQAYKVTCSVRQSSAQNRKYTIKVEVPKGAWRSYLNMELTIPIFATNSDCELIVKAMQGLLKDGNPIPSAIAANSGIYGGSGGSMASNFTQFVLVDNGGTGDVTVAPSNFANGIAEWISSNSRSQAYKVTCSVRQSSAQNRKYTIKVEVPKGAWRSYLNMELTIPIFATNSDCELIVKAMQGLLKDGNPIPSAIAANSGIYGGGSGGGSGGGSGGGSMASNFTQFVLVDNGGTGDVTVAPSNFANGIAEWISSNSRSQAYKVTCSVRQSSAQNRKYTIKVEVPKGAWRSYLNMELTIPIFATNSDCELIVKAMQGLLKDGNPIPSAIAANSGIYGGSGGSMASNFTQFVLVDNGGTGDVTVAPSNFANGIAEWISSNSRSQAYKVTCSVRQSSAQNRKYTIKVEVPKGAWRSYLNMELTIPIFATNSDCELIVKAMQGLLKDGNPIPSAIAANSGIYGSSGGGEAAAKDKKYSIGLDIGTNSVGWAVITDEYKVPSKKFKVLGNTDRHSIKKNLIGALLFDSGETAEATRLKRTARRRYTRRKNRICYLQEIFSNEMAKVDDSFFHRLEESFLVEEDKKHERHPIFGNIVDEVAYHEKYPTIYHLRKKLVDSTDKADLRLIYLALAHMIKFRGHFLIEGDLNPDNSDVDKLFIQLVQTYNQLFEENPINASGVDAKAILSARLSKSRRLENLIAQLPGEKKNGLFGNLIALSLGLTPNFKSNFDLAEDAKLQLSKDTYDDDLDNLLAQIGDQYADLFLAAKNLSDAILLSDILRVNTEITKAPLSASMIKRYDEHHQDLTLLKALVRQQLPEKYKEIFFDQSKNGYAGYIDGGASQEEFYKFIKPILEKMDGTEELLVKLNREDLLRKQRTFDNGSIPHQIHLGELHAILRRQEDFYPFLKDNREKIEKILTFRIPYYVGPLARGNSRFAWMTRKSEETITPWNFEEVVDKGASAQSFIERMTNFDKNLPNEKVLPKHSLLYEYFTVYNELTKVKYVTEGMRKPAFLSGEQKKAIVDLLFKTNRKVTVKQLKEDYFKKIECFDSVEISGVEDRFNASLGTYHDLLKIIKDKDFLDNEENEDILEDIVLTLTLFEDREMIEERLKTYAHLFDDKVMKQLKRRRYTGWGRLSRKLINGIRDKQSGKTILDFLKSDGFANRNFMQLIHDDSLTFKEDIQKAQVSGQGDSLHEHIANLAGSPAIKKGILQTVKVVDELVKVMGRHKPENIVIEMARENQTTQKGQKNSRERMKRIEEGIKELGSQILKEHPVENTQLQNEKLYLYYLQNGRDMYVDQELDINRLSDYDVDHIVPQSFLKDDSIDNKVLTRSDKARGKSDNVPSEEVVKKMKNYWRQLLNAKLITQRKFDNLTKAERGGLSELDKAGFIKRQLVETRQITKHVAQILDSRMNTKYDENDKLIREVKVITLKSKLVSDFRKDFQFYKVREINNYHHAHDAYLNAVVGTALIKKYPKLESEFVYGDYKVYDVRKMIAKSEQEIGKATAKYFFYSNIMNFFKTEITLANGEIRKRPLIETNGETGEIVWDKGRDFATVRKVLSMPQVNIVKKTEVQTGGFSKESILPKRNSDKLIARKKDWDPKKYGGFDSPTVAYSVLVVAKVEKGKSKKLKSVKELLGITIMERSSFEKNPIDFLEAKGYKEVKKDLIIKLPKYSLFELENGRKRMLASAGELQKGNELALPSKYVNFLYLASHYEKLKGSPEDNEQKQLFVEQHKHYLDEIIEQISEFSKRVILADANLDKVLSAYNKHRDKPIREQAENIIHLFTLTNLGAPAAFKYFDTTIDRKRYTSTKEVLDATLIHQSITGLYETRIDLSQLGGDKRTADGSEFESPKKKAKVE

SEQ ID NO: 16136 - protein, 2243 aa, synthetic construct
MPAAKRVKLDGGTLNIEDEHRLHETSKEPDVSLGSTWLSDFPQAWAETGGMGLAVRQAPLIIPLKATSTPVSIKQYPMSQEARLGIKPHIQRLLDQGILVPCQSPWNTPLLPVKKPGTNDYRPVQDLREVNKRVEDIHPTVPNPYNLLSGLPPSHQWYTVLDLKDAFFCLRLHPTSQPLFAFEWRDPEMGISGQLTWTRLPQGFKNSPTLFNEALHRDLADFRIQHPDLILLQYVDDLLLAATSELDCQQGTRALLQTLGNLGYRASAKKAQICQKQVKYLGYLLKEGQRWLTEARKETVMGQPTPKTPRQLREFLGKAGFCRLFIPGFAEMAAPLYPLTKPGTLFNWGPDQQKAYQEIKQALLTAPALGLPDLTKPFELFVDEKQGYAKGVLTQKLGPWRRPVAYLSKKLDPVAAGWPPCLRMVAAIAVLTKDAGKLTMGQPLVILAPHAVEALVKQPPDRWLSNARMTHYQALLLDTDRVQFGPVVALNPATLLPLPEEGLQHNCLDILAEAHGTRPDLTDQPLPDADHTWYTDGSSLLQEGQRKAGAAVTTETEVIWAKALPAGTSAQRAELIALTQALKMAEGKKLNVYTDSRYAFATAHIHGEIYRRRGWLTSEGKEIKNKDEILALLKALFLPKRLSIIHCPGHQKGHSAEARGNRMADQAARKAAITETPDTSTLLGSSGGGEAAAKMASNFTQFVLVDNGGTGDVTVAPSNFANGIAEWISSNSRSQAYKVTCSVRQSSAQNRKYTIKVEVPKGAWRSYLNMELTIPIFATNSDCELIVKAMQGLLKDGNPIPSAIAANSGIYAEAAAKEAAAKEAAAKEAAAKALEAEAAAKEAAAKEAAAKEAAAKADKKYSIGLDIGTNSVGWAVITDEYKVPSKKFKVLGNTDRHSIKKNLIGALLFDSGETAEATRLKRTARRRYTRRKNRICYLQEIFSNEMAKVDDSFFHRLEESFLVEEDKKHERHPIFGNIVDEVAYHEKYPTIYHLRKKLVDSTDKADLRLIYLALAHMIKFRGHFLIEGDLNPDNSDVDKLFIQLVQTYNQLFEENPINASGVDAKAILSARLSKSRRLENLIAQLPGEKKNGLFGNLIALSLGLTPNFKSNFDLAEDAKLQLSKDTYDDDLDNLLAQIGDQYADLFLAAKNLSDAILLSDILRVNTEITKAPLSASMIKRYDEHHQDLTLLKALVRQQLPEKYKEIFFDQSKNGYAGYIDGGASQEEFYKFIKPILEKMDGTEELLVKLNREDLLRKQRTFDNGSIPHQIHLGELHAILRRQEDFYPFLKDNREKIEKILTFRIPYYVGPLARGNSRFAWMTRKSEETITPWNFEEVVDKGASAQSFIERMTNFDKNLPNEKVLPKHSLLYEYFTVYNELTKVKYVTEGMRKPAFLSGEQKKAIVDLLFKTNRKVTVKQLKEDYFKKIECFDSVEISGVEDRFNASLGTYHDLLKIIKDKDFLDNEENEDILEDIVLTLTLFEDREMIEERLKTYAHLFDDKVMKQLKRRRYTGWGRLSRKLINGIRDKQSGKTILDFLKSDGFANRNFMQLIHDDSLTFKEDIQKAQVSGQGDSLHEHIANLAGSPAIKKGILQTVKVVDELVKVMGRHKPENIVIEMARENQTTQKGQKNSRERMKRIEEGIKELGSQILKEHPVENTQLQNEKLYLYYLQNGRDMYVDQELDINRLSDYDVDHIVPQSFLKDDSIDNKVLTRSDKARGKSDNVPSEEVVKKMKNYWRQLLNAKLITQRKFDNLTKAERGGLSELDKAGFIKRQLVETRQITKHVAQILDSRMNTKYDENDKLIREVKVITLKSKLVSDFRKDFQFYKVREINNYHHAHDAYLNAVVGTALIKKYPKLESEFVYGDYKVYDVRKMIAKSEQEIGKATAKYFFYSNIMNFFKTEITLANGEIRKRPLIETNGETGEIVWDKGRDFATVRKVLSMPQVNIVKKTEVQTGGFSKESILPKRNSDKLIARKKDWDPKKYGGFDSPTVAYSVLVVAKVEKGKSKKLKSVKELLGITIMERSSFEKNPIDFLEAKGYKEVKKDLIIKLPKYSLFELENGRKRMLASAGELQKGNELALPSKYVNFLYLASHYEKLKGSPEDNEQKQLFVEQHKHYLDEIIEQISEFSKRVILADANLDKVLSAYNKHRDKPIREQAENIIHLFTLTNLGAPAAFKYFDTTIDRKRYTSTKEVLDATLIHQSITGLYETRIDLSQLGGDKRTADGSEFESPKKKAKVE

SEQ ID NO: 16137 - protein, 2230 aa, synthetic construct
MPAAKRVKLDGGTLNIEDEHRLHETSKEPDVSLGSTWLSDFPQAWAETGGMGLAVRQAPLIIPLKATSTPVSIKQYPMSQEARLGIKPHIQRLLDQGILVPCQSPWNTPLLPVKKPGTNDYRPVQDLREVNKRVEDIHPTVPNPYNLLSGLPPSHQWYTVLDLKDAFFCLRLHPTSQPLFAFEWRDPEMGISGQLTWTRLPQGFKNSPTLFNEALHRDLADFRIQHPDLILLQYVDDLLLAATSELDCQQGTRALLQTLGNLGYRASAKKAQICQKQVKYLGYLLKEGQRWLTEARKETVMGQPTPKTPRQLREFLGKAGFCRLFIPGFAEMAAPLYPLTKPGTLFNWGPDQQKAYQEIKQALLTAPALGLPDLTKPFELFVDEKQGYAKGVLTQKLGPWRRPVAYLSKKLDPVAAGWPPCLRMVAAIAVLTKDAGKLTMGQPLVILAPHAVEALVKQPPDRWLSNARMTHYQALLLDTDRVQFGPVVALNPATLLPLPEEGLQHNCLDILAEAHGTRPDLTDQPLPDADHTWYTDGSSLLQEGQRKAGAAVTTETEVIWAKALPAGTSAQRAELIALTQALKMAEGKKLNVYTDSRYAFATAHIHGEIYRRRGWLTSEGKEIKNKDEILALLKALFLPKRLSIIHCPGHQKGHSAEARGNRMADQAARKAAITETPDTSTLLGSSGGGEAAAKMASNFTQFVLVDNGGTGDVTVAPSNFANGIAEWISSNSRSQAYKVTCSVRQSSAQNRKYTIKVEVPKGAWRSYLNMELTIPIFATNSDCELIVKAMQGLLKDGNPIPSAIAANSGIYSGGSSGGSSGSETPGTSESATPESSGGSSGGSSDKKYSIGLDIGTNSVGWAVITDEYKVPSKKFKVLGNTDRHSIKKNLIGALLFDSGETAEATRLKRTARRRYTRRKNRICYLQEIFSNEMAKVDDSFFHRLEESFLVEEDKKHERHPIFGNIVDEVAYHEKYPTIYHLRKKLVDSTDKADLRLIYLALAHMIKFRGHFLIEGDLNPDNSDVDKLFIQLVQTYNQLFEENPINASGVDAKAILSARLSKSRRLENLIAQLPGEKKNGLFGNLIALSLGLTPNFKSNFDLAEDAKLQLSKDTYDDDLDNLLAQIGDQYADLFLAAKNLSDAILLSDILRVNTEITKAPLSASMIKRYDEHHQDLTLLKALVRQQLPEKYKEIFFDQSKNGYAGYIDGGASQEEFYKFIKPILEKMDGTEELLVKLNREDLLRKQRTFDNGSIPHQIHLGELHAILRRQEDFYPFLKDNREKIEKILTFRIPYYVGPLARGNSRFAWMTRKSEETITPWNFEEVVDKGASAQSFIERMTNFDKNLPNEKVLPKHSLLYEYFTVYNELTKVKYVTEGMRKPAFLSGEQKKAIVDLLFKTNRKVTVKQLKEDYFKKIECFDSVEISGVEDRFNASLGTYHDLLKIIKDKDFLDNEENEDILEDIVLTLTLFEDREMIEERLKTYAHLFDDKVMKQLKRRRYTGWGRLSRKLINGIRDKQSGKTILDFLKSDGFANRNFMQLIHDDSLTFKEDIQKAQVSGQGDSLHEHIANLAGSPAIKKGILQTVKVVDELVKVMGRHKPENIVIEMARENQTTQKGQKNSRERMKRIEEGIKELGSQILKEHPVENTQLQNEKLYLYYLQNGRDMYVDQELDINRLSDYDVDHIVPQSFLKDDSIDNKVLTRSDKARGKSDNVPSEEVVKKMKNYWRQLLNAKLITQRKFDNLTKAERGGLSELDKAGFIKRQLVETRQITKHVAQILDSRMNTKYDENDKLIREVKVITLKSKLVSDFRKDFQFYKVREINNYHHAHDAYLNAVVGTALIKKYPKLESEFVYGDYKVYDVRKMIAKSEQEIGKATAKYFFYSNIMNFFKTEITLANGEIRKRPLIETNGETGEIVWDKGRDFATVRKVLSMPQVNIVKKTEVQTGGFSKESILPKRNSDKLIARKKDWDPKKYGGFDSPTVAYSVLVVAKVEKGKSKKLKSVKELLGITIMERSSFEKNPIDFLEAKGYKEVKKDLIIKLPKYSLFELENGRKRMLASAGELQKGNELALPSKYVNFLYLASHYEKLKGSPEDNEQKQLFVEQHKHYLDEIIEQISEFSKRVILADANLDKVLSAYNKHRDKPIREQAENIIHLFTLTNLGAPAAFKYFDTTIDRKRYTSTKEVLDATLIHQSITGLYETRIDLSQLGGDKRTADGSEFESPKKKAKVE

SEQ ID NO: 16138 - protein, 2215 aa, synthetic construct
MPAAKRVKLDGGTLNIEDEHRLHETSKEPDVSLGSTWLSDFPQAWAETGGMGLAVRQAPLIIPLKATSTPVSIKQYPMSQEARLGIKPHIQRLLDQGILVPCQSPWNTPLLPVKKPGTNDYRPVQDLREVNKRVEDIHPTVPNPYNLLSGLPPSHQWYTVLDLKDAFFCLRLHPTSQPLFAFEWRDPEMGISGQLTWTRLPQGFKNSPTLFNEALHRDLADFRIQHPDLILLQYVDDLLLAATSELDCQQGTRALLQTLGNLGYRASAKKAQICQKQVKYLGYLLKEGQRWLTEARKETVMGQPTPKTPRQLREFLGKAGFCRLFIPGFAEMAAPLYPLTKPGTLFNWGPDQQKAYQEIKQALLTAPALGLPDLTKPFELFVDEKQGYAKGVLTQKLGPWRRPVAYLSKKLDPVAAGWPPCLRMVAAIAVLTKDAGKLTMGQPLVILAPHAVEALVKQPPDRWLSNARMTHYQALLLDTDRVQFGPVVALNPATLLPLPEEGLQHNCLDILAEAHGTRPDLTDQPLPDADHTWYTDGSSLLQEGQRKAGAAVTTETEVIWAKALPAGTSAQRAELIALTQALKMAEGKKLNVYTDSRYAFATAHIHGEIYRRRGWLTSEGKEIKNKDEILALLKALFLPKRLSIIHCPGHQKGHSAEARGNRMADQAARKAAITETPDTSTLLGSSGGGEAAAKMASNFTQFVLVDNGGTGDVTVAPSNFANGIAEWISSNSRSQAYKVTCSVRQSSAQNRKYTIKVEVPKGAWRSYLNMELTIPIFATNSDCELIVKAMQGLLKDGNPIPSAIAANSGIYGSSGSSGSSGSSGSSGSSDKKYSIGLDIGTNSVGWAVITDEYKVPSKKFKVLGNTDRHSIKKNLIGALLFDSGETAEATRLKRTARRRYTRRKNRICYLQEIFSNEMAKVDDSFFHRLEESFLVEEDKKHERHPIFGNIVDEVAYHEKYPTIYHLRKKLVDSTDKADLRLIYLALAHMIKFRGHFLIEGDLNPDNSDVDKLFIQLVQTYNQLFEENPINASGVDAKAILSARLSKSRRLENLIAQLPGEKKNGLFGNLIALSLGLTPNFKSNFDLAEDAKLQLSKDTYDDDLDNLLAQIGDQYADLFLAAKNLSDAILLSDILRVNTEITKAPLSASMIKRYDEHHQDLTLLKALVRQQLPEKYKEIFFDQSKNGYAGYIDGGASQEEFYKFIKPILEKMDGTEELLVKLNREDLLRKQRTFDNGSIPHQIHLGELHAILRRQEDFYPFLKDNREKIEKILTFRIPYYVGPLARGNSRFAWMTRKSEETITPWNFEEVVDKGASAQSFIERMTNFDKNLPNEKVLPKHSLLYEYFTVYNELTKVKYVTEGMRKPAFLSGEQKKAIVDLLFKTNRKVTVKQLKEDYFKKIECFDSVEISGVEDRFNASLGTYHDLLKIIKDKDFLDNEENEDILEDIVLTLTLFEDREMIEERLKTYAHLFDDKVMKQLKRRRYTGWGRLSRKLINGIRDKQSGKTILDFLKSDGFANRNFMQLIHDDSLTFKEDIQKAQVSGQGDSLHEHIANLAGSPAIKKGILQTVKVVDELVKVMGRHKPENIVIEMARENQTTQKGQKNSRERMKRIEEGIKELGSQILKEHPVENTQLQNEKLYLYYLQNGRDMYVDQELDINRLSDYDVDHIVPQSFLKDDSIDNKVLTRSDKARGKSDNVPSEEVVKKMKNYWRQLLNAKLITQRKFDNLTKAERGGLSELDKAGFIKRQLVETRQITKHVAQILDSRMNTKYDENDKLIREVKVITLKSKLVSDFRKDFQFYKVREINNYHHAHDAYLNAVVGTALIKKYPKLESEFVYGDYKVYDVRKMIAKSEQEIGKATAKYFFYSNIMNFFKTEITLANGEIRKRPLIETNGETGEIVWDKGRDFATVRKVLSMPQVNIVKKTEVQTGGFSKESILPKRNSDKLIARKKDWDPKKYGGFDSPTVAYSVLVVAKVEKGKSKKLKSVKELLGITIMERSSFEKNPIDFLEAKGYKEVKKDLIIKLPKYSLFELENGRKRMLASAGELQKGNELALPSKYVNFLYLASHYEKLKGSPEDNEQKQLFVEQHKHYLDEIIEQISEFSKRVILADANLDKVLSAYNKHRDKPIREQAENIIHLFTLTNLGAPAAFKYFDTTIDRKRYTSTKEVLDATLIHQSITGLYETRIDLSQLGGDKRTADGSEFESPKKKAKVE

SEQ ID NO: 16139 - protein, 2208 aa, synthetic construct
MPAAKRVKLDGGTLNIEDEHRLHETSKEPDVSLGSTWLSDFPQAWAETGGMGLAVRQAPLIIPLKATSTPVSIKQYPMSQEARLGIKPHIQRLLDQGILVPCQSPWNTPLLPVKKPGTNDYRPVQDLREVNKRVEDIHPTVPNPYNLLSGLPPSHQWYTVLDLKDAFFCLRLHPTSQPLFAFEWRDPEMGISGQLTWTRLPQGFKNSPTLFNEALHRDLADFRIQHPDLILLQYVDDLLLAATSELDCQQGTRALLQTLGNLGYRASAKKAQICQKQVKYLGYLLKEGQRWLTEARKETVMGQPTPKTPRQLREFLGKAGFCRLFIPGFAEMAAPLYPLTKPGTLFNWGPDQQKAYQEIKQALLTAPALGLPDLTKPFELFVDEKQGYAKGVLTQKLGPWRRPVAYLSKKLDPVAAGWPPCLRMVAAIAVLTKDAGKLTMGQPLVILAPHAVEALVKQPPDRWLSNARMTHYQALLLDTDRVQFGPVVALNPATLLPLPEEGLQHNCLDILAEAHGTRPDLTDQPLPDADHTWYTDGSSLLQEGQRKAGAAVTTETEVIWAKALPAGTSAQRAELIALTQALKMAEGKKLNVYTDSRYAFATAHIHGEIYRRRGWLTSEGKEIKNKDEILALLKALFLPKRLSIIHCPGHQKGHSAEARGNRMADQAARKAAITETPDTSTLLGSSGGGEAAAKMASNFTQFVLVDNGGTGDVTVAPSNFANGIAEWISSNSRSQAYKVTCSVRQSSAQNRKYTIKVEVPKGAWRSYLNMELTIPIFATNSDCELIVKAMQGLLKDGNPIPSAIAANSGIYGSSGGGEAAAKDKKYSIGLDIGTNSVGWAVITDEYKVPSKKFKVLGNTDRHSIKKNLIGALLFDSGETAEATRLKRTARRRYTRRKNRICYLQEIFSNEMAKVDDSFFHRLEESFLVEEDKKHERHPIFGNIVDEVAYHEKYPTIYHLRKKLVDSTDKADLRLIYLALAHMIKFRGHFLIEGDLNPDNSDVDKLFIQLVQTYNQLFEENPINASGVDAKAILSARLSKSRRLENLIAQLPGEKKNGLFGNLIALSLGLTPNFKSNFDLAEDAKLQLSKDTYDDDLDNLLAQIGDQYADLFLAAKNLSDAILLSDILRVNTEITKAPLSASMIKRYDEHHQDLTLLKALVRQQLPEKYKEIFFDQSKNGYAGYIDGGASQEEFYKFIKPILEKMDGTEELLVKLNREDLLRKQRTFDNGSIPHQIHLGELHAILRRQEDFYPFLKDNREKIEKILTFRIPYYVGPLARGNSRFAWMTRKSEETITPWNFEEVVDKGASAQSFIERMTNFDKNLPNEKVLPKHSLLYEYFTVYNELTKVKYVTEGMRKPAFLSGEQKKAIVDLLFKTNRKVTVKQLKEDYFKKIECFDSVEISGVEDRFNASLGTYHDLLKIIKDKDFLDNEENEDILEDIVLTLTLFEDREMIEERLKTYAHLFDDKVMKQLKRRRYTGWGRLSRKLINGIRDKQSGKTILDFLKSDGFANRNFMQLIHDDSLTFKEDIQKAQVSGQGDSLHEHIANLAGSPAIKKGILQTVKVVDELVKVMGRHKPENIVIEMARENQTTQKGQKNSRERMKRIEEGIKELGSQILKEHPVENTQLQNEKLYLYYLQNGRDMYVDQELDINRLSDYDVDHIVPQSFLKDDSIDNKVLTRSDKARGKSDNVPSEEVVKKMKNYWRQLLNAKLITQRKFDNLTKAERGGLSELDKAGFIKRQLVETRQITKHVAQILDSRMNTKYDENDKLIREVKVITLKSKLVSDFRKDFQFYKVREINNYHHAHDAYLNAVVGTALIKKYPKLESEFVYGDYKVYDVRKMIAKSEQEIGKATAKYFFYSNIMNFFKTEITLANGEIRKRPLIETNGETGEIVWDKGRDFATVRKVLSMPQVNIVKKTEVQTGGFSKESILPKRNSDKLIARKKDWDPKKYGGFDSPTVAYSVLVVAKVEKGKSKKLKSVKELLGITIMERSSFEKNPIDFLEAKGYKEVKKDLIIKLPKYSLFELENGRKRMLASAGELQKGNELALPSKYVNFLYLASHYEKLKGSPEDNEQKQLFVEQHKHYLDEIIEQISEFSKRVILADANLDKVLSAYNKHRDKPIREQAENIIHLFTLTNLGAPAAFKYFDTTIDRKRYTSTKEVLDATLIHQSITGLYETRIDLSQLGGDKRTADGSEFESPKKKAKVE

SEQ ID NO: 16140 - protein, 2366 aa, synthetic construct
MPAAKRVKLDGGTLNIEDEHRLHETSKEPDVSLGSTWLSDFPQAWAETGGMGLAVRQAPLIIPLKATSTPVSIKQYPMSQEARLGIKPHIQRLLDQGILVPCQSPWNTPLLPVKKPGTNDYRPVQDLREVNKRVEDIHPTVPNPYNLLSGLPPSHQWYTVLDLKDAFFCLRLHPTSQPLFAFEWRDPEMGISGQLTWTRLPQGFKNSPTLFNEALHRDLADFRIQHPDLILLQYVDDLLLAATSELDCQQGTRALLQTLGNLGYRASAKKAQICQKQVKYLGYLLKEGQRWLTEARKETVMGQPTPKTPRQLREFLGKAGFCRLFIPGFAEMAAPLYPLTKPGTLFNWGPDQQKAYQEIKQALLTAPALGLPDLTKPFELFVDEKQGYAKGVLTQKLGPWRRPVAYLSKKLDPVAAGWPPCLRMVAAIAVLTKDAGKLTMGQPLVILAPHAVEALVKQPPDRWLSNARMTHYQALLLDTDRVQFGPVVALNPATLLPLPEEGLQHNCLDILAEAHGTRPDLTDQPLPDADHTWYTDGSSLLQEGQRKAGAAVTTETEVIWAKALPAGTSAQRAELIALTQALKMAEGKKLNVYTDSRYAFATAHIHGEIYRRRGWLTSEGKEIKNKDEILALLKALFLPKRLSIIHCPGHQKGHSAEARGNRMADQAARKAAITETPDTSTLLGSSGGGEAAAKMASNFTQFVLVDNGGTGDVTVAPSNFANGIAEWISSNSRSQAYKVTCSVRQSSAQNRKYTIKVEVPKGAWRSYLNMELTIPIFATNSDCELIVKAMQGLLKDGNPIPSAIAANSGIYGGSGGSMASNFTQFVLVDNGGTGDVTVAPSNFANGIAEWISSNSRSQAYKVTCSVRQSSAQNRKYTIKVEVPKGAWRSYLNMELTIPIFATNSDCELIVKAMQGLLKDGNPIPSAIAANSGIYAEAAAKEAAAKEAAAKEAAAKALEAEAAAKEAAAKEAAAKEAAAKADKKYSIGLDIGTNSVGWAVITDEYKVPSKKFKVLGNTDRHSIKKNLIGALLFDSGETAEATRLKRTARRRYTRRKNRICYLQEIFSNEMAKVDDSFFHRLEESFLVEEDKKHERHPIFGNIVDEVAYHEKYPTIYHLRKKLVDSTDKADLRLIYLALAHMIKFRGHFLIEGDLNPDNSDVDKLFIQLVQTYNQLFEENPINASGVDAKAILSARLSKSRRLENLIAQLPGEKKNGLFGNLIALSLGLTPNFKSNFDLAEDAKLQLSKDTYDDDLDNLLAQIGDQYADLFLAAKNLSDAILLSDILRVNTEITKAPLSASMIKRYDEHHQDLTLLKALVRQQLPEKYKEIFFDQSKNGYAGYIDGGASQEEFYKFIKPILEKMDGTEELLVKLNREDLLRKQRTFDNGSIPHQIHLGELHAILRRQEDFYPFLKDNREKIEKILTFRIPYYVGPLARGNSRFAWMTRKSEETITPWNFEEVVDKGASAQSFIERMTNFDKNLPNEKVLPKHSLLYEYFTVYNELTKVKYVTEGMRKPAFLSGEQKKAIVDLLFKTNRKVTVKQLKEDYFKKIECFDSVEISGVEDRFNASLGTYHDLLKIIKDKDFLDNEENEDILEDIVLTLTLFEDREMIEERLKTYAHLFDDKVMKQLKRRRYTGWGRLSRKLINGIRDKQSGKTILDFLKSDGFANRNFMQLIHDDSLTFKEDIQKAQVSGQGDSLHEHIANLAGSPAIKKGILQTVKVVDELVKVMGRHKPENIVIEMARENQTTQKGQKNSRERMKRIEEGIKELGSQILKEHPVENTQLQNEKLYLYYLQNGRDMYVDQELDINRLSDYDVDHIVPQSFLKDDSIDNKVLTRSDKARGKSDNVPSEEVVKKMKNYWRQLLNAKLITQRKFDNLTKAERGGLSELDKAGFIKRQLVETRQITKHVAQILDSRMNTKYDENDKLIREVKVITLKSKLVSDFRKDFQFYKVREINNYHHAHDAYLNAVVGTALIKKYPKLESEFVYGDYKVYDVRKMIAKSEQEIGKATAKYFFYSNIMNFFKTEITLANGEIRKRPLIETNGETGEIVWDKGRDFATVRKVLSMPQVNIVKKTEVQTGGFSKESILPKRNSDKLIARKKDWDPKKYGGFDSPTVAYSVLVVAKVEKGKSKKLKSVKELLGITIMERSSFEKNPIDFLEAKGYKEVKKDLIIKLPKYSLFELENGRKRMLASAGELQKGNELALPSKYVNFLYLASHYEKLKGSPEDNEQKQLFVEQHKHYLDEIIEQISEFSKRVILADANLDKVLSAYNKHRDKPIREQAENIIHLFTLTNLGAPAAFKYFDTTIDRKRYTSTKEVLDATLIHQSITGLYETRIDLSQLGGDKRTADGSEFESPKKKAKVE

SEQ ID NO: 16141 - protein, 2353 aa, synthetic construct
MPAAKRVKLDGGTLNIEDEHRLHETSKEPDVSLGSTWLSDFPQAWAETGGMGLAVRQAPLIIPLKATSTPVSIKQYPMSQEARLGIKPHIQRLLDQGILVPCQSPWNTPLLPVKKPGTNDYRPVQDLREVNKRVEDIHPTVPNPYNLLSGLPPSHQWYTVLDLKDAFFCLRLHPTSQPLFAFEWRDPEMGISGQLTWTRLPQGFKNSPTLFNEALHRDLADFRIQHPDLILLQYVDDLLLAATSELDCQQGTRALLQTLGNLGYRASAKKAQICQKQVKYLGYLLKEGQRWLTEARKETVMGQPTPKTPRQLREFLGKAGFCRLFIPGFAEMAAPLYPLTKPGTLFNWGPDQQKAYQEIKQALLTAPALGLPDLTKPFELFVDEKQGYAKGVLTQKLGPWRRPVAYLSKKLDPVAAGWPPCLRMVAAIAVLTKDAGKLTMGQPLVILAPHAVEALVKQPPDRWLSNARMTHYQALLLDTDRVQFGPVVALNPATLLPLPEEGLQHNCLDILAEAHGTRPDLTDQPLPDADHTWYTDGSSLLQEGQRKAGAAVTTETEVIWAKALPAGTSAQRAELIALTQALKMAEGKKLNVYTDSRYAFATAHIHGEIYRRRGWLTSEGKEIKNKDEILALLKALFLPKRLSIIHCPGHQKGHSAEARGNRMADQAARKAAITETPDTSTLLGSSGGGEAAAKMASNFTQFVLVDNGGTGDVTVAPSNFANGIAEWISSNSRSQAYKVTCSVRQSSAQNRKYTIKVEVPKGAWRSYLNMELTIPIFATNSDCELIVKAMQGLLKDGNPIPSAIAANSGIYGGSGGSMASNFTQFVLVDNGGTGDVTVAPSNFANGIAEWISSNSRSQAYKVTCSVRQSSAQNRKYTIKVEVPKGAWRSYLNMELTIPIFATNSDCELIVKAMQGLLKDGNPIPSAIAANSGIYSGGSSGGSSGSETPGTSESATPESSGGSSGGSSDKKYSIGLDIGTNSVGWAVITDEYKVPSKKFKVLGNTDRHSIKKNLIGALLFDSGETAEATRLKRTARRRYTRRKNRICYLQEIFSNEMAKVDDSFFHRLEESFLVEEDKKHERHPIFGNIVDEVAYHEKYPTIYHLRKKLVDSTDKADLRLIYLALAHMIKFRGHFLIEGDLNPDNSDVDKLFIQLVQTYNQLFEENPINASGVDAKAILSARLSKSRRLENLIAQLPGEKKNGLFGNLIALSLGLTPNFKSNFDLAEDAKLQLSKDTYDDDLDNLLAQIGDQYADLFLAAKNLSDAILLSDILRVNTEITKAPLSASMIKRYDEHHQDLTLLKALVRQQLPEKYKEIFFDQSKNGYAGYIDGGASQEEFYKFIKPILEKMDGTEELLVKLNREDLLRKQRTFDNGSIPHQIHLGELHAILRRQEDFYPFLKDNREKIEKILTFRIPYYVGPLARGNSRFAWMTRKSEETITPWNFEEVVDKGASAQSFIERMTNFDKNLPNEKVLPKHSLLYEYFTVYNELTKVKYVTEGMRKPAFLSGEQKKAIVDLLFKTNRKVTVKQLKEDYFKKIECFDSVEISGVEDRFNASLGTYHDLLKIIKDKDFLDNEENEDILEDIVLTLTLFEDREMIEERLKTYAHLFDDKVMKQLKRRRYTGWGRLSRKLINGIRDKQSGKTILDFLKSDGFANRNFMQLIHDDSLTFKEDIQKAQVSGQGDSLHEHIANLAGSPAIKKGILQTVKVVDELVKVMGRHKPENIVIEMARENQTTQKGQKNSRERMKRIEEGIKELGSQILKEHPVENTQLQNEKLYLYYLQNGRDMYVDQELDINRLSDYDVDHIVPQSFLKDDSIDNKVLTRSDKARGKSDNVPSEEVVKKMKNYWRQLLNAKLITQRKFDNLTKAERGGLSELDKAGFIKRQLVETRQITKHVAQILDSRMNTKYDENDKLIREVKVITLKSKLVSDFRKDFQFYKVREINNYHHAHDAYLNAVVGTALIKKYPKLESEFVYGDYKVYDVRKMIAKSEQEIGKATAKYFFYSNIMNFFKTEITLANGEIRKRPLIETNGETGEIVWDKGRDFATVRKVLSMPQVNIVKKTEVQTGGFSKESILPKRNSDKLIARKKDWDPKKYGGFDSPTVAYSVLVVAKVEKGKSKKLKSVKELLGITIMERSSFEKNPIDFLEAKGYKEVKKDLIIKLPKYSLFELENGRKRMLASAGELQKGNELALPSKYVNFLYLASHYEKLKGSPEDNEQKQLFVEQHKHYLDEIIEQISEFSKRVILADANLDKVLSAYNKHRDKPIREQAENIIHLFTLTNLGAPAAFKYFDTTIDRKRYTSTKEVLDATLIHQSITGLYETRIDLSQLGGDKRTADGSEFESPKKKAKVE

SEQ ID NO: 16142 - protein, 2338 aa, synthetic construct
MPAAKRVKLDGGTLNIEDEHRLHETSKEPDVSLGSTWLSDFPQAWAETGGMGLAVRQAPLIIPLKATSTPVSIKQYPMSQEARLGIKPHIQRLLDQGILVPCQSPWNTPLLPVKKPGTNDYRPVQDLREVNKRVEDIHPTVPNPYNLLSGLPPSHQWYTVLDLKDAFFCLRLHPTSQPLFAFEWRDPEMGISGQLTWTRLPQGFKNSPTLFNEALHRDLADFRIQHPDLILLQYVDDLLLAATSELDCQQGTRALLQTLGNLGYRASAKKAQICQKQVKYLGYLLKEGQRWLTEARKETVMGQPTPKTPRQLREFLGKAGFCRLFIPGFAEMAAPLYPLTKPGTLFNWGPDQQKAYQEIKQALLTAPALGLPDLTKPFELFVDEKQGYAKGVLTQKLGPWRRPVAYLSKKLDPVAAGWPPCLRMVAAIAVLTKDAGKLTMGQPLVILAPHAVEALVKQPPDRWLSNARMTHYQALLLDTDRVQFGPVVALNPATLLPLPEEGLQHNCLDILAEAHGTRPDLTDQPLPDADHTWYTDGSSLLQEGQRKAGAAVTTETEVIWAKALPAGTSAQRAELIALTQALKMAEGKKLNVYTDSRYAFATAHIHGEIYRRRGWLTSEGKEIKNKDEILALLKALFLPKRLSIIHCPGHQKGHSAEARGNRMADQAARKAAITETPDTSTLLGSSGGGEAAAKMASNFTQFVLVDNGGTGDVTVAPSNFANGIAEWISSNSRSQAYKVTCSVRQSSAQNRKYTIKVEVPKGAWRSYLNMELTIPIFATNSDCELIVKAMQGLLKDGNPIPSAIAANSGIYGGSGGSMASNFTQFVLVDNGGTGDVTVAPSNFANGIAEWISSNSRSQAYKVTCSVRQSSAQNRKYTIKVEVPKGAWRSYLNMELTIPIFATNSDCELIVKAMQGLLKDGNPIPSAIAANSGIYGSSGSSGSSGSSGSSGSSDKKYSIGLDIGTNSVGWAVITDEYKVPSKKFKVLGNTDRHSIKKNLIGALLFDSGETAEATRLKRTARRRYTRRKNRICYLQEIFSNEMAKVDDSFFHRLEESFLVEEDKKHERHPIFGNIVDEVAYHEKYPTIYHLRKKLVDSTDKADLRLIYLALAHMIKFRGHFLIEGDLNPDNSDVDKLFIQLVQTYNQLFEENPINASGVDAKAILSARLSKSRRLENLIAQLPGEKKNGLFGNLIALSLGLTPNFKSNFDLAEDAKLQLSKDTYDDDLDNLLAQIGDQYADLFLAAKNLSDAILLSDILRVNTEITKAPLSASMIKRYDEHHQDLTLLKALVRQQLPEKYKEIFFDQSKNGYAGYIDGGASQEEFYKFIKPILEKMDGTEELLVKLNREDLLRKQRTFDNGSIPHQIHLGELHAILRRQEDFYPFLKDNREKIEKILTFRIPYYVGPLARGNSRFAWMTRKSEETITPWNFEEVVDKGASAQSFIERMTNFDKNLPNEKVLPKHSLLYEYFTVYNELTKVKYVTEGMRKPAFLSGEQKKAIVDLLFKTNRKVTVKQLKEDYFKKIECFDSVEISGVEDRFNASLGTYHDLLKIIKDKDFLDNEENEDILEDIVLTLTLFEDREMIEERLKTYAHLFDDKVMKQLKRRRYTGWGRLSRKLINGIRDKQSGKTILDFLKSDGFANRNFMQLIHDDSLTFKEDIQKAQVSGQGDSLHEHIANLAGSPAIKKGILQTVKVVDELVKVMGRHKPENIVIEMARENQTTQKGQKNSRERMKRIEEGIKELGSQILKEHPVENTQLQNEKLYLYYLQNGRDMYVDQELDINRLSDYDVDHIVPQSFLKDDSIDNKVLTRSDKARGKSDNVPSEEVVKKMKNYWRQLLNAKLITQRKFDNLTKAERGGLSELDKAGFIKRQLVETRQITKHVAQILDSRMNTKYDENDKLIREVKVITLKSKLVSDFRKDFQFYKVREINNYHHAHDAYLNAVVGTALIKKYPKLESEFVYGDYKVYDVRKMIAKSEQEIGKATAKYFFYSNIMNFFKTEITLANGEIRKRPLIETNGETGEIVWDKGRDFATVRKVLSMPQVNIVKKTEVQTGGFSKESILPKRNSDKLIARKKDWDPKKYGGFDSPTVAYSVLVVAKVEKGKSKKLKSVKELLGITIMERSSFEKNPIDFLEAKGYKEVKKDLIIKLPKYSLFELENGRKRMLASAGELQKGNELALPSKYVNFLYLASHYEKLKGSPEDNEQKQLFVEQHKHYLDEIIEQISEFSKRVILADANLDKVLSAYNKHRDKPIREQAENIIHLFTLTNLGAPAAFKYFDTTIDRKRYTSTKEVLDATLIHQSITGLYETRIDLSQLGGDKRTADGSEFESPKKKAKVE

SEQ ID NO: 16143 - protein, 2331 aa, synthetic construct
MPAAKRVKLDGGTLNIEDEHRLHETSKEPDVSLGSTWLSDFPQAWAETGGMGLAVRQAPLIIPLKATSTPVSIKQYPMSQEARLGIKPHIQRLLDQGILVPCQSPWNTPLLPVKKPGTNDYRPVQDLREVNKRVEDIHPTVPNPYNLLSGLPPSHQWYTVLDLKDAFFCLRLHPTSQPLFAFEWRDPEMGISGQLTWTRLPQGFKNSPTLFNEALHRDLADFRIQHPDLILLQYVDDLLLAATSELDCQQGTRALLQTLGNLGYRASAKKAQICQKQVKYLGYLLKEGQRWLTEARKETVMGQPTPKTPRQLREFLGKAGFCRLFIPGFAEMAAPLYPLTKPGTLFNWGPDQQKAYQEIKQALLTAPALGLPDLTKPFELFVDEKQGYAKGVLTQKLGPWRRPVAYLSKKLDPVAAGWPPCLRMVAAIAVLTKDAGKLTMGQPLVILAPHAVEALVKQPPDRWLSNARMTHYQALLLDTDRVQFGPVVALNPATLLPLPEEGLQHNCLDILAEAHGTRPDLTDQPLPDADHTWYTDGSSLLQEGQRKAGAAVTTETEVIWAKALPAGTSAQRAELIALTQALKMAEGKKLNVYTDSRYAFATAHIHGEIYRRRGWLTSEGKEIKNKDEILALLKALFLPKRLSIIHCPGHQKGHSAEARGNRMADQAARKAAITETPDTSTLLGSSGGGEAAAKMASNFTQFVLVDNGGTGDVTVAPSNFANGIAEWISSNSRSQAYKVTCSVRQSSAQNRKYTIKVEVPKGAWRSYLNMELTIPIFATNSDCELIVKAMQGLLKDGNPIPSAIAANSGIYGGSGGSMASNFTQFVLVDNGGTGDVTVAPSNFANGIAEWISSNSRSQAYKVTCSVRQSSAQNRKYTIKVEVPKGAWRSYLNMELTIPIFATNSDCELIVKAMQGLLKDGNPIPSAIAANSGIYGSSGGGEAAAKDKKYSIGLDIGTNSVGWAVITDEYKVPSKKFKVLGNTDRHSIKKNLIGALLFDSGETAEATRLKRTARRRYTRRKNRICYLQEIFSNEMAKVDDSFFHRLEESFLVEEDKKHERHPIFGNIVDEVAYHEKYPTIYHLRKKLVDSTDKADLRLIYLALAHMIKFRGHFLIEGDLNPDNSDVDKLFIQLVQTYNQLFEENPINASGVDAKAILSARLSKSRRLENLIAQLPGEKKNGLFGNLIALSLGLTPNFKSNFDLAEDAKLQLSKDTYDDDLDNLLAQIGDQYADLFLAAKNLSDAILLSDILRVNTEITKAPLSASMIKRYDEHHQDLTLLKALVRQQLPEKYKEIFFDQSKNGYAGYIDGGASQEEFYKFIKPILEKMDGTEELLVKLNREDLLRKQRTFDNGSIPHQIHLGELHAILRRQEDFYPFLKDNREKIEKILTFRIPYYVGPLARGNSRFAWMTRKSEETITPWNFEEVVDKGASAQSFIERMTNFDKNLPNEKVLPKHSLLYEYFTVYNELTKVKYVTEGMRKPAFLSGEQKKAIVDLLFKTNRKVTVKQLKEDYFKKIECFDSVEISGVEDRFNASLGTYHDLLKIIKDKDFLDNEENEDILEDIVLTLTLFEDREMIEERLKTYAHLFDDKVMKQLKRRRYTGWGRLSRKLINGIRDKQSGKTILDFLKSDGFANRNFMQLIHDDSLTFKEDIQKAQVSGQGDSLHEHIANLAGSPAIKKGILQTVKVVDELVKVMGRHKPENIVIEMARENQTTQKGQKNSRERMKRIEEGIKELGSQILKEHPVENTQLQNEKLYLYYLQNGRDMYVDQELDINRLSDYDVDHIVPQSFLKDDSIDNKVLTRSDKARGKSDNVPSEEVVKKMKNYWRQLLNAKLITQRKFDNLTKAERGGLSELDKAGFIKRQLVETRQITKHVAQILDSRMNTKYDENDKLIREVKVITLKSKLVSDFRKDFQFYKVREINNYHHAHDAYLNAVVGTALIKKYPKLESEFVYGDYKVYDVRKMIAKSEQEIGKATAKYFFYSNIMNFFKTEITLANGEIRKRPLIETNGETGEIVWDKGRDFATVRKVLSMPQVNIVKKTEVQTGGFSKESILPKRNSDKLIARKKDWDPKKYGGFDSPTVAYSVLVVAKVEKGKSKKLKSVKELLGITIMERSSFEKNPIDFLEAKGYKEVKKDLIIKLPKYSLFELENGRKRMLASAGELQKGNELALPSKYVNFLYLASHYEKLKGSPEDNEQKQLFVEQHKHYLDEIIEQISEFSKRVILADANLDKVLSAYNKHRDKPIREQAENIIHLFTLTNLGAPAAFKYFDTTIDRKRYTSTKEVLDATLIHQSITGLYETRIDLSQLGGDKRTADGSEFESPKKKAKVE

SEQ ID NO: 16144 - protein, 2622 aa, synthetic construct
MPAAKRVKLDGGTLNIEDEHRLHETSKEPDVSLGSTWLSDFPQAWAETGGMGLAVRQAPLIIPLKATSTPVSIKQYPMSQEARLGIKPHIQRLLDQGILVPCQSPWNTPLLPVKKPGTNDYRPVQDLREVNKRVEDIHPTVPNPYNLLSGLPPSHQWYTVLDLKDAFFCLRLHPTSQPLFAFEWRDPEMGISGQLTWTRLPQGFKNSPTLFNEALHRDLADFRIQHPDLILLQYVDDLLLAATSELDCQQGTRALLQTLGNLGYRASAKKAQICQKQVKYLGYLLKEGQRWLTEARKETVMGQPTPKTPRQLREFLGKAGFCRLFIPGFAEMAAPLYPLTKPGTLFNWGPDQQKAYQEIKQALLTAPALGLPDLTKPFELFVDEKQGYAKGVLTQKLGPWRRPVAYLSKKLDPVAAGWPPCLRMVAAIAVLTKDAGKLTMGQPLVILAPHAVEALVKQPPDRWLSNARMTHYQALLLDTDRVQFGPVVALNPATLLPLPEEGLQHNCLDILAEAHGTRPDLTDQPLPDADHTWYTDGSSLLQEGQRKAGAAVTTETEVIWAKALPAGTSAQRAELIALTQALKMAEGKKLNVYTDSRYAFATAHIHGEIYRRRGWLTSEGKEIKNKDEILALLKALFLPKRLSIIHCPGHQKGHSAEARGNRMADQAARKAAITETPDTSTLLGSSGGGEAAAKMASNFTQFVLVDNGGTGDVTVAPSNFANGIAEWISSNSRSQAYKVTCSVRQSSAQNRKYTIKVEVPKGAWRSYLNMELTIPIFATNSDCELIVKAMQGLLKDGNPIPSAIAANSGIYGGSGGSMASNFTQFVLVDNGGTGDVTVAPSNFANGIAEWISSNSRSQAYKVTCSVRQSSAQNRKYTIKVEVPKGAWRSYLNMELTIPIFATNSDCELIVKAMQGLLKDGNPIPSAIAANSGIYGGGSGGGSGGGSGGGSMASNFTQFVLVDNGGTGDVTVAPSNFANGIAEWISSNSRSQAYKVTCSVRQSSAQNRKYTIKVEVPKGAWRSYLNMELTIPIFATNSDCELIVKAMQGLLKDGNPIPSAIAANSGIYGGSGGSMASNFTQFVLVDNGGTGDVTVAPSNFANGIAEWISSNSRSQAYKVTCSVRQSSAQNRKYTIKVEVPKGAWRSYLNMELTIPIFATNSDCELIVKAMQGLLKDGNPIPSAIAANSGIYAEAAAKEAAAKEAAAKEAAAKALEAEAAAKEAAAKEAAAKEAAAKADKKYSIGLDIGTNSVGWAVITDEYKVPSKKFKVLGNTDRHSIKKNLIGALLFDSGETAEATRLKRTARRRYTRRKNRICYLQEIFSNEMAKVDDSFFHRLEESFLVEEDKKHERHPIFGNIVDEVAYHEKYPTIYHLRKKLVDSTDKADLRLIYLALAHMIKFRGHFLIEGDLNPDNSDVDKLFIQLVQTYNQLFEENPINASGVDAKAILSARLSKSRRLENLIAQLPGEKKNGLFGNLIALSLGLTPNFKSNFDLAEDAKLQLSKDTYDDDLDNLLAQIGDQYADLFLAAKNLSDAILLSDILRVNTEITKAPLSASMIKRYDEHHQDLTLLKALVRQQLPEKYKEIFFDQSKNGYAGYIDGGASQEEFYKFIKPILEKMDGTEELLVKLNREDLLRKQRTFDNGSIPHQIHLGELHAILRRQEDFYPFLKDNREKIEKILTFRIPYYVGPLARGNSRFAWMTRKSEETITPWNFEEVVDKGASAQSFIERMTNFDKNLPNEKVLPKHSLLYEYFTVYNELTKVKYVTEGMRKPAFLSGEQKKAIVDLLFKTNRKVTVKQLKEDYFKKIECFDSVEISGVEDRFNASLGTYHDLLKIIKDKDFLDNEENEDILEDIVLTLTLFEDREMIEERLKTYAHLFDDKVMKQLKRRRYTGWGRLSRKLINGIRDKQSGKTILDFLKSDGFANRNFMQLIHDDSLTFKEDIQKAQVSGQGDSLHEHIANLAGSPAIKKGILQTVKVVDELVKVMGRHKPENIVIEMARENQTTQKGQKNSRERMKRIEEGIKELGSQILKEHPVENTQLQNEKLYLYYLQNGRDMYVDQELDINRLSDYDVDHIVPQSFLKDDSIDNKVLTRSDKARGKSDNVPSEEVVKKMKNYWRQLLNAKLITQRKFDNLTKAERGGLSELDKAGFIKRQLVETRQITKHVAQILDSRMNTKYDENDKLIREVKVITLKSKLVSDFRKDFQFYKVREINNYHHAHDAYLNAVVGTALIKKYPKLESEFVYGDYKVYDVRKMIAKSEQEIGKATAKYFFYSNIMNFFKTEITLANGEIRKRPLIETNGETGEIVWDKGRDFATVRKVLSMPQVNIVKKTEVQTGGFSKESILPKRNSDKLIARKKDWDPKKYGGFDSPTVAYSVLVVAKVEKGKSKKLKSVKELLGITIMERSSFEKNPIDFLEAKGYKEVKKDLIIKLPKYSLFELENGRKRMLASAGELQKGNELALPSKYVNFLYLASHYEKLKGSPEDNEQKQLFVEQHKHYLDEIIEQISEFSKRVILADANLDKVLSAYNKHRDKPIREQAENIIHLFTLTNLGAPAAFKYFDTTIDRKRYTSTKEVLDATLIHQSITGLYETRIDLSQLGGDKRTADGSEFESPKKKAKVE

SEQ ID NO: 16145 - protein, 2609 aa, synthetic construct
MPAAKRVKLDGGTLNIEDEHRLHETSKEPDVSLGSTWLSDFPQAWAETGGMGLAVRQAPLIIPLKATSTPVSIKQYPMSQEARLGIKPHIQRLLDQGILVPCQSPWNTPLLPVKKPGTNDYRPVQDLREVNKRVEDIHPTVPNPYNLLSGLPPSHQWYTVLDLKDAFFCLRLHPTSQPLFAFEWRDPEMGISGQLTWTRLPQGFKNSPTLFNEALHRDLADFRIQHPDLILLQYVDDLLLAATSELDCQQGTRALLQTLGNLGYRASAKKAQICQKQVKYLGYLLKEGQRWLTEARKETVMGQPTPKTPRQLREFLGKAGFCRLFIPGFAEMAAPLYPLTKPGTLFNWGPDQQKAYQEIKQALLTAPALGLPDLTKPFELFVDEKQGYAKGVLTQKLGPWRRPVAYLSKKLDPVAAGWPPCLRMVAAIAVLTKDAGKLTMGQPLVILAPHAVEALVKQPPDRWLSNARMTHYQALLLDTDRVQFGPVVALNPATLLPLPEEGLQHNCLDILAEAHGTRPDLTDQPLPDADHTWYTDGSSLLQEGQRKAGAAVTTETEVIWAKALPAGTSAQRAELIALTQALKMAEGKKLNVYTDSRYAFATAHIHGEIYRRRGWLTSEGKEIKNKDEILALLKALFLPKRLSIIHCPGHQKGHSAEARGNRMADQAARKAAITETPDTSTLLGSSGGGEAAAKMASNFTQFVLVDNGGTGDVTVAPSNFANGIAEWISSNSRSQAYKVTCSVRQSSAQNRKYTIKVEVPKGAWRSYLNMELTIPIFATNSDCELIVKAMQGLLKDGNPIPSAIAANSGIYGGSGGSMASNFTQFVLVDNGGTGDVTVAPSNFANGIAEWISSNSRSQAYKVTCSVRQSSAQNRKYTIKVEVPKGAWRSYLNMELTIPIFATNSDCELIVKAMQGLLKDGNPIPSAIAANSGIYGGGSGGGSGGGSGGGSMASNFTQFVLVDNGGTGDVTVAPSNFANGIAEWISSNSRSQAYKVTCSVRQSSAQNRKYTIKVEVPKGAWRSYLNMELTIPIFATNSDCELIVKAMQGLLKDGNPIPSAIAANSGIYGGSGGSMASNFTQFVLVDNGGTGDVTVAPSNFANGIAEWISSNSRSQAYKVTCSVRQSSAQNRKYTIKVEVPKGAWRSYLNMELTIPIFATNSDCELIVKAMQGLLKDGNPIPSAIAANSGIYSGGSSGGSSGSETPGTSESATPESSGGSSGGSSDKKYSIGLDIGTNSVGWAVITDEYKVPSKKFKVLGNTDRHSIKKNLIGALLFDSGETAEATRLKRTARRRYTRRKNRICYLQEIFSNEMAKVDDSFFHRLEESFLVEEDKKHERHPIFGNIVDEVAYHEKYPTIYHLRKKLVDSTDKADLRLIYLALAHMIKFRGHFLIEGDLNPDNSDVDKLFIQLVQTYNQLFEENPINASGVDAKAILSARLSKSRRLENLIAQLPGEKKNGLFGNLIALSLGLTPNFKSNFDLAEDAKLQLSKDTYDDDLDNLLAQIGDQYADLFLAAKNLSDAILLSDILRVNTEITKAPLSASMIKRYDEHHQDLTLLKALVRQQLPEKYKEIFFDQSKNGYAGYIDGGASQEEFYKFIKPILEKMDGTEELLVKLNREDLLRKQRTFDNGSIPHQIHLGELHAILRRQEDFYPFLKDNREKIEKILTFRIPYYVGPLARGNSRFAWMTRKSEETITPWNFEEVVDKGASAQSFIERMTNFDKNLPNEKVLPKHSLLYEYFTVYNELTKVKYVTEGMRKPAFLSGEQKKAIVDLLFKTNRKVTVKQLKEDYFKKIECFDSVEISGVEDRFNASLGTYHDLLKIIKDKDFLDNEENEDILEDIVLTLTLFEDREMIEERLKTYAHLFDDKVMKQLKRRRYTGWGRLSRKLINGIRDKQSGKTILDFLKSDGFANRNFMQLIHDDSLTFKEDIQKAQVSGQGDSLHEHIANLAGSPAIKKGILQTVKVVDELVKVMGRHKPENIVIEMARENQTTQKGQKNSRERMKRIEEGIKELGSQILKEHPVENTQLQNEKLYLYYLQNGRDMYVDQELDINRLSDYDVDHIVPQSFLKDDSIDNKVLTRSDKARGKSDNVPSEEVVKKMKNYWRQLLNAKLITQRKFDNLTKAERGGLSELDKAGFIKRQLVETRQITKHVAQILDSRMNTKYDENDKLIREVKVITLKSKLVSDFRKDFQFYKVREINNYHHAHDAYLNAVVGTALIKKYPKLESEFVYGDYKVYDVRKMIAKSEQEIGKATAKYFFYSNIMNFFKTEITLANGEIRKRPLIETNGETGEIVWDKGRDFATVRKVLSMPQVNIVKKTEVQTGGFSKESILPKRNSDKLIARKKDWDPKKYGGFDSPTVAYSVLVVAKVEKGKSKKLKSVKELLGITIMERSSFEKNPIDFLEAKGYKEVKKDLIIKLPKYSLFELENGRKRMLASAGELQKGNELALPSKYVNFLYLASHYEKLKGSPEDNEQKQLFVEQHKHYLDEIIEQISEFSKRVILADANLDKVLSAYNKHRDKPIREQAENIIHLFTLTNLGAPAAFKYFDTTIDRKRYTSTKEVLDATLIHQSITGLYETRIDLSQLGGDKRTADGSEFESPKKKAKVE

SEQ ID NO: 16146 - protein, 2594 aa, synthetic construct
MPAAKRVKLDGGTLNIEDEHRLHETSKEPDVSLGSTWLSDFPQAWAETGGMGLAVRQAPLIIPLKATSTPVSIKQYPMSQEARLGIKPHIQRLLDQGILVPCQSPWNTPLLPVKKPGTNDYRPVQDLREVNKRVEDIHPTVPNPYNLLSGLPPSHQWYTVLDLKDAFFCLRLHPTSQPLFAFEWRDPEMGISGQLTWTRLPQGFKNSPTLFNEALHRDLADFRIQHPDLILLQYVDDLLLAATSELDCQQGTRALLQTLGNLGYRASAKKAQICQKQVKYLGYLLKEGQRWLTEARKETVMGQPTPKTPRQLREFLGKAGFCRLFIPGFAEMAAPLYPLTKPGTLFNWGPDQQKAYQEIKQALLTAPALGLPDLTKPFELFVDEKQGYAKGVLTQKLGPWRRPVAYLSKKLDPVAAGWPPCLRMVAAIAVLTKDAGKLTMGQPLVILAPHAVEALVKQPPDRWLSNARMTHYQALLLDTDRVQFGPVVALNPATLLPLPEEGLQHNCLDILAEAHGTRPDLTDQPLPDADHTWYTDGSSLLQEGQRKAGAAVTTETEVIWAKALPAGTSAQRAELIALTQALKMAEGKKLNVYTDSRYAFATAHIHGEIYRRRGWLTSEGKEIKNKDEILALLKALFLPKRLSIIHCPGHQKGHSAEARGNRMADQAARKAAITETPDTSTLLGSSGGGEAAAKMASNFTQFVLVDNGGTGDVTVAPSNFANGIAEWISSNSRSQAYKVTCSVRQSSAQNRKYTIKVEVPKGAWRSYLNMELTIPIFATNSDCELIVKAMQGLLKDGNPIPSAIAANSGIYGGSGGSMASNFTQFVLVDNGGTGDVTVAPSNFANGIAEWISSNSRSQAYKVTCSVRQSSAQNRKYTIKVEVPKGAWRSYLNMELTIPIFATNSDCELIVKAMQGLLKDGNPIPSAIAANSGIYGGGSGGGSGGGSGGGSMASNFTQFVLVDNGGTGDVTVAPSNFANGIAEWISSNSRSQAYKVTCSVRQSSAQNRKYTIKVEVPKGAWRSYLNMELTIPIFATNSDCELIVKAMQGLLKDGNPIPSAIAANSGIYGGSGGSMASNFTQFVLVDNGGTGDVTVAPSNFANGIAEWISSNSRSQAYKVTCSVRQSSAQNRKYTIKVEVPKGAWRSYLNMELTIPIFATNSDCELIVKAMQGLLKDGNPIPSAIAANSGIYGSSGSSGSSGSSGSSGSSDKKYSIGLDIGTNSVGWAVITDEYKVPSKKFKVLGNTDRHSIKKNLIGALLFDSGETAEATRLKRTARRRYTRRKNRICYLQEIFSNEMAKVDDSFFHRLEESFLVEEDKKHERHPIFGNIVDEVAYHEKYPTIYHLRKKLVDSTDKADLRLIYLALAHMIKFRGHFLIEGDLNPDNSDVDKLFIQLVQTYNQLFEENPINASGVDAKAILSARLSKSRRLENLIAQLPGEKKNGLFGNLIALSLGLTPNFKSNFDLAEDAKLQLSKDTYDDDLDNLLAQIGDQYADLFLAAKNLSDAILLSDILRVNTEITKAPLSASMIKRYDEHHQDLTLLKALVRQQLPEKYKEIFFDQSKNGYAGYIDGGASQEEFYKFIKPILEKMDGTEELLVKLNREDLLRKQRTFDNGSIPHQIHLGELHAILRRQEDFYPFLKDNREKIEKILTFRIPYYVGPLARGNSRFAWMTRKSEETITPWNFEEVVDKGASAQSFIERMTNFDKNLPNEKVLPKHSLLYEYFTVYNELTKVKYVTEGMRKPAFLSGEQKKAIVDLLFKTNRKVTVKQLKEDYFKKIECFDSVEISGVEDRFNASLGTYHDLLKIIKDKDFLDNEENEDILEDIVLTLTLFEDREMIEERLKTYAHLFDDKVMKQLKRRRYTGWGRLSRKLINGIRDKQSGKTILDFLKSDGFANRNFMQLIHDDSLTFKEDIQKAQVSGQGDSLHEHIANLAGSPAIKKGILQTVKVVDELVKVMGRHKPENIVIEMARENQTTQKGQKNSRERMKRIEEGIKELGSQILKEHPVENTQLQNEKLYLYYLQNGRDMYVDQELDINRLSDYDVDHIVPQSFLKDDSIDNKVLTRSDKARGKSDNVPSEEVVKKMKNYWRQLLNAKLITQRKFDNLTKAERGGLSELDKAGFIKRQLVETRQITKHVAQILDSRMNTKYDENDKLIREVKVITLKSKLVSDFRKDFQFYKVREINNYHHAHDAYLNAVVGTALIKKYPKLESEFVYGDYKVYDVRKMIAKSEQEIGKATAKYFFYSNIMNFFKTEITLANGEIRKRPLIETNGETGEIVWDKGRDFATVRKVLSMPQVNIVKKTEVQTGGFSKESILPKRNSDKLIARKKDWDPKKYGGFDSPTVAYSVLVVAKVEKGKSKKLKSVKELLGITIMERSSFEKNPIDFLEAKGYKEVKKDLIIKLPKYSLFELENGRKRMLASAGELQKGNELALPSKYVNFLYLASHYEKLKGSPEDNEQKQLFVEQHKHYLDEIIEQISEFSKRVILADANLDKVLSAYNKHRDKPIREQAENIIHLFTLTNLGAPAAFKYFDTTIDRKRYTSTKEVLDATLIHQSITGLYETRIDLSQLGGDKRTADGSEFESPKKKAKVE

SEQ ID NO: 16147 - protein, 2587 aa, synthetic construct
MPAAKRVKLDGGTLNIEDEHRLHETSKEPDVSLGSTWLSDFPQAWAETGGMGLAVRQAPLIIPLKATSTPVSIKQYPMSQEARLGIKPHIQRLLDQGILVPCQSPWNTPLLPVKKPGTNDYRPVQDLREVNKRVEDIHPTVPNPYNLLSGLPPSHQWYTVLDLKDAFFCLRLHPTSQPLFAFEWRDPEMGISGQLTWTRLPQGFKNSPTLFNEALHRDLADFRIQHPDLILLQYVDDLLLAATSELDCQQGTRALLQTLGNLGYRASAKKAQICQKQVKYLGYLLKEGQRWLTEARKETVMGQPTPKTPRQLREFLGKAGFCRLFIPGFAEMAAPLYPLTKPGTLFNWGPDQQKAYQEIKQALLTAPALGLPDLTKPFELFVDEKQGYAKGVLTQKLGPWRRPVAYLSKKLDPVAAGWPPCLRMVAAIAVLTKDAGKLTMGQPLVILAPHAVEALVKQPPDRWLSNARMTHYQALLLDTDRVQFGPVVALNPATLLPLPEEGLQHNCLDILAEAHGTRPDLTDQPLPDADHTWYTDGSSLLQEGQRKAGAAVTTETEVIWAKALPAGTSAQRAELIALTQALKMAEGKKLNVYTDSRYAFATAHIHGEIYRRRGWLTSEGKEIKNKDEILALLKALFLPKRLSIIHCPGHQKGHSAEARGNRMADQAARKAAITETPDTSTLLGSSGGGEAAAKMASNFTQFVLVDNGGTGDVTVAPSNFANGIAEWISSNSRSQAYKVTCSVRQSSAQNRKYTIKVEVPKGAWRSYLNMELTIPIFATNSDCELIVKAMQGLLKDGNPIPSAIAANSGIYGGSGGSMASNFTQFVLVDNGGTGDVTVAPSNFANGIAEWISSNSRSQAYKVTCSVRQSSAQNRKYTIKVEVPKGAWRSYLNMELTIPIFATNSDCELIVKAMQGLLKDGNPIPSAIAANSGIYGGGSGGGSGGGSGGGSMASNFTQFVLVDNGGTGDVTVAPSNFANGIAEWISSNSRSQAYKVTCSVRQSSAQNRKYTIKVEVPKGAWRSYLNMELTIPIFATNSDCELIVKAMQGLLKDGNPIPSAIAANSGIYGGSGGSMASNFTQFVLVDNGGTGDVTVAPSNFANGIAEWISSNSRSQAYKVTCSVRQSSAQNRKYTIKVEVPKGAWRSYLNMELTIPIFATNSDCELIVKAMQGLLKDGNPIPSAIAANSGIYGSSGGGEAAAKDKKYSIGLDIGTNSVGWAVITDEYKVPSKKFKVLGNTDRHSIKKNLIGALLFDSGETAEATRLKRTARRRYTRRKNRICYLQEIFSNEMAKVDDSFFHRLEESFLVEEDKKHERHPIFGNIVDEVAYHEKYPTIYHLRKKLVDSTDKADLRLIYLALAHMIKFRGHFLIEGDLNPDNSDVDKLFIQLVQTYNQLFEENPINASGVDAKAILSARLSKSRRLENLIAQLPGEKKNGLFGNLIALSLGLTPNFKSNFDLAEDAKLQLSKDTYDDDLDNLLAQIGDQYADLFLAAKNLSDAILLSDILRVNTEITKAPLSASMIKRYDEHHQDLTLLKALVRQQLPEKYKEIFFDQSKNGYAGYIDGGASQEEFYKFIKPILEKMDGTEELLVKLNREDLLRKQRTFDNGSIPHQIHLGELHAILRRQEDFYPFLKDNREKIEKILTFRIPYYVGPLARGNSRFAWMTRKSEETITPWNFEEVVDKGASAQSFIERMTNFDKNLPNEKVLPKHSLLYEYFTVYNELTKVKYVTEGMRKPAFLSGEQKKAIVDLLFKTNRKVTVKQLKEDYFKKIECFDSVEISGVEDRFNASLGTYHDLLKIIKDKDFLDNEENEDILEDIVLTLTLFEDREMIEERLKTYAHLFDDKVMKQLKRRRYTGWGRLSRKLINGIRDKQSGKTILDFLKSDGFANRNFMQLIHDDSLTFKEDIQKAQVSGQGDSLHEHIANLAGSPAIKKGILQTVKVVDELVKVMGRHKPENIVIEMARENQTTQKGQKNSRERMKRIEEGIKELGSQILKEHPVENTQLQNEKLYLYYLQNGRDMYVDQELDINRLSDYDVDHIVPQSFLKDDSIDNKVLTRSDKARGKSDNVPSEEVVKKMKNYWRQLLNAKLITQRKFDNLTKAERGGLSELDKAGFIKRQLVETRQITKHVAQILDSRMNTKYDENDKLIREVKVITLKSKLVSDFRKDFQFYKVREINNYHHAHDAYLNAVVGTALIKKYPKLESEFVYGDYKVYDVRKMIAKSEQEIGKATAKYFFYSNIMNFFKTEITLANGEIRKRPLIETNGETGEIVWDKGRDFATVRKVLSMPQVNIVKKTEVQTGGFSKESILPKRNSDKLIARKKDWDPKKYGGFDSPTVAYSVLVVAKVEKGKSKKLKSVKELLGITIMERSSFEKNPIDFLEAKGYKEVKKDLIIKLPKYSLFELENGRKRMLASAGELQKGNELALPSKYVNFLYLASHYEKLKGSPEDNEQKQLFVEQHKHYLDEIIEQISEFSKRVILADANLDKVLSAYNKHRDKPIREQAENIIHLFTLTNLGAPAAFKYFDTTIDRKRYTSTKEVLDATLIHQSITGLYETRIDLSQLGGDKRTADGSEFESPKKKAKVE

SEQ ID NO: 16148 - protein, 2280 aa, synthetic construct
MPAAKRVKLDGGTAPLEEEYRLFLEAPIQNVTLLEQWKREIPKVWAEINPPGLASTQAPIHVQLLSTALPVRVRQYPITLEAKRSLRETIRKFRAAGILRPVHSPWNTPLLPVRKSGTSEYRMVQDLREVNKRVETIHPTVPNPYTLLSLLPPDRIWYSVLDLKDAFFCIPLAPESQLIFAFEWADAEEGESGQLTWTRLPQGFKNSPTLFNEALNRDLQGFRLDHPSVSLLQYVDDLLIAADTQAACLSATRDLLMTLAELGYRVSGKKAQLCQEEVTYLGFKIHKGSRSLSNSRTQAILQIPVPKTKRQVREFLGKIGYCRLFIPGFAELAQPLYAATRPGNDPLVWGEKEEEAFQSLKLALTQPPALALPSLDKPFQLFVEETSGAAKGVLTQALGPWKRPVAYLSKRLDPVAAGWPRCLRAIAAAALLTREASKLTFGQDIEITSSHNLESLLRSPPDKWLTNARITQYQVLLLDPPRVRFKQTAALNPATLLPETDDTLPIHHCLDTLDSLTSTRPDLTDQPLAQAEATLFTDGSSYIRDGKRYAGAAVVTLDSVIWAEPLPIGTSAQKAELIALTKALEWSKDKSVNIYTDSRYAFATLHVHGMIYRERGWLTAGGKAIKNAPEILALLTAVWLPKRVAVMHCKGHQKDDAPTSTGNRRADEVAREVAIRPLSTQATISAEAAAKEAAAKEAAAKEAAAKALEAEAAAKEAAAKEAAAKEAAAKAMASNFTQFVLVDNGGTGDVTVAPSNFANGIAEWISSNSRSQAYKVTCSVRQSSAQNRKYTIKVEVPKGAWRSYLNMELTIPIFATNSDCELIVKAMQGLLKDGNPIPSAIAANSGIYAEAAAKEAAAKEAAAKEAAAKALEAEAAAKEAAAKEAAAKEAAAKADKKYSIGLDIGTNSVGWAVITDEYKVPSKKFKVLGNTDRHSIKKNLIGALLFDSGETAEATRLKRTARRRYTRRKNRICYLQEIFSNEMAKVDDSFFHRLEESFLVEEDKKHERHPIFGNIVDEVAYHEKYPTIYHLRKKLVDSTDKADLRLIYLALAHMIKFRGHFLIEGDLNPDNSDVDKLFIQLVQTYNQLFEENPINASGVDAKAILSARLSKSRRLENLIAQLPGEKKNGLFGNLIALSLGLTPNFKSNFDLAEDAKLQLSKDTYDDDLDNLLAQIGDQYADLFLAAKNLSDAILLSDILRVNTEITKAPLSASMIKRYDEHHQDLTLLKALVRQQLPEKYKEIFFDQSKNGYAGYIDGGASQEEFYKFIKPILEKMDGTEELLVKLNREDLLRKQRTFDNGSIPHQIHLGELHAILRRQEDFYPFLKDNREKIEKILTFRIPYYVGPLARGNSRFAWMTRKSEETITPWNFEEVVDKGASAQSFIERMTNFDKNLPNEKVLPKHSLLYEYFTVYNELTKVKYVTEGMRKPAFLSGEQKKAIVDLLFKTNRKVTVKQLKEDYFKKIECFDSVEISGVEDRFNASLGTYHDLLKIIKDKDFLDNEENEDILEDIVLTLTLFEDREMIEERLKTYAHLFDDKVMKQLKRRRYTGWGRLSRKLINGIRDKQSGKTILDFLKSDGFANRNFMQLIHDDSLTFKEDIQKAQVSGQGDSLHEHIANLAGSPAIKKGILQTVKVVDELVKVMGRHKPENIVIEMARENQTTQKGQKNSRERMKRIEEGIKELGSQILKEHPVENTQLQNEKLYLYYLQNGRDMYVDQELDINRLSDYDVDHIVPQSFLKDDSIDNKVLTRSDKARGKSDNVPSEEVVKKMKNYWRQLLNAKLITQRKFDNLTKAERGGLSELDKAGFIKRQLVETRQITKHVAQILDSRMNTKYDENDKLIREVKVITLKSKLVSDFRKDFQFYKVREINNYHHAHDAYLNAVVGTALIKKYPKLESEFVYGDYKVYDVRKMIAKSEQEIGKATAKYFFYSNIMNFFKTEITLANGEIRKRPLIETNGETGEIVWDKGRDFATVRKVLSMPQVNIVKKTEVQTGGFSKESILPKRNSDKLIARKKDWDPKKYGGFDSPTVAYSVLVVAKVEKGKSKKLKSVKELLGITIMERSSFEKNPIDFLEAKGYKEVKKDLIIKLPKYSLFELENGRKRMLASAGELQKGNELALPSKYVNFLYLASHYEKLKGSPEDNEQKQLFVEQHKHYLDEIIEQISEFSKRVILADANLDKVLSAYNKHRDKPIREQAENIIHLFTLTNLGAPAAFKYFDTTIDRKRYTSTKEVLDATLIHQSITGLYETRIDLSQLGGDKRTADGSEFESPKKKAKVE

SEQ ID NO: 16149 - protein, 2267 aa, synthetic construct
MPAAKRVKLDGGTAPLEEEYRLFLEAPIQNVTLLEQWKREIPKVWAEINPPGLASTQAPIHVQLLSTALPVRVRQYPITLEAKRSLRETIRKFRAAGILRPVHSPWNTPLLPVRKSGTSEYRMVQDLREVNKRVETIHPTVPNPYTLLSLLPPDRIWYSVLDLKDAFFCIPLAPESQLIFAFEWADAEEGESGQLTWTRLPQGFKNSPTLFNEALNRDLQGFRLDHPSVSLLQYVDDLLIAADTQAACLSATRDLLMTLAELGYRVSGKKAQLCQEEVTYLGFKIHKGSRSLSNSRTQAILQIPVPKTKRQVREFLGKIGYCRLFIPGFAELAQPLYAATRPGNDPLVWGEKEEEAFQSLKLALTQPPALALPSLDKPFQLFVEETSGAAKGVLTQALGPWKRPVAYLSKRLDPVAAGWPRCLRAIAAAALLTREASKLTFGQDIEITSSHNLESLLRSPPDKWLTNARITQYQVLLLDPPRVRFKQTAALNPATLLPETDDTLPIHHCLDTLDSLTSTRPDLTDQPLAQAEATLFTDGSSYIRDGKRYAGAAVVTLDSVIWAEPLPIGTSAQKAELIALTKALEWSKDKSVNIYTDSRYAFATLHVHGMIYRERGWLTAGGKAIKNAPEILALLTAVWLPKRVAVMHCKGHQKDDAPTSTGNRRADEVAREVAIRPLSTQATISAEAAAKEAAAKEAAAKEAAAKALEAEAAAKEAAAKEAAAKEAAAKAMASNFTQFVLVDNGGTGDVTVAPSNFANGIAEWISSNSRSQAYKVTCSVRQSSAQNRKYTIKVEVPKGAWRSYLNMELTIPIFATNSDCELIVKAMQGLLKDGNPIPSAIAANSGIYSGGSSGGSSGSETPGTSESATPESSGGSSGGSSDKKYSIGLDIGTNSVGWAVITDEYKVPSKKFKVLGNTDRHSIKKNLIGALLFDSGETAEATRLKRTARRRYTRRKNRICYLQEIFSNEMAKVDDSFFHRLEESFLVEEDKKHERHPIFGNIVDEVAYHEKYPTIYHLRKKLVDSTDKADLRLIYLALAHMIKFRGHFLIEGDLNPDNSDVDKLFIQLVQTYNQLFEENPINASGVDAKAILSARLSKSRRLENLIAQLPGEKKNGLFGNLIALSLGLTPNFKSNFDLAEDAKLQLSKDTYDDDLDNLLAQIGDQYADLFLAAKNLSDAILLSDILRVNTEITKAPLSASMIKRYDEHHQDLTLLKALVRQQLPEKYKEIFFDQSKNGYAGYIDGGASQEEFYKFIKPILEKMDGTEELLVKLNREDLLRKQRTFDNGSIPHQIHLGELHAILRRQEDFYPFLKDNREKIEKILTFRIPYYVGPLARGNSRFAWMTRKSEETITPWNFEEVVDKGASAQSFIERMTNFDKNLPNEKVLPKHSLLYEYFTVYNELTKVKYVTEGMRKPAFLSGEQKKAIVDLLFKTNRKVTVKQLKEDYFKKIECFDSVEISGVEDRFNASLGTYHDLLKIIKDKDFLDNEENEDILEDIVLTLTLFEDREMIEERLKTYAHLFDDKVMKQLKRRRYTGWGRLSRKLINGIRDKQSGKTILDFLKSDGFANRNFMQLIHDDSLTFKEDIQKAQVSGQGDSLHEHIANLAGSPAIKKGILQTVKVVDELVKVMGRHKPENIVIEMARENQTTQKGQKNSRERMKRIEEGIKELGSQILKEHPVENTQLQNEKLYLYYLQNGRDMYVDQELDINRLSDYDVDHIVPQSFLKDDSIDNKVLTRSDKARGKSDNVPSEEVVKKMKNYWRQLLNAKLITQRKFDNLTKAERGGLSELDKAGFIKRQLVETRQITKHVAQILDSRMNTKYDENDKLIREVKVITLKSKLVSDFRKDFQFYKVREINNYHHAHDAYLNAVVGTALIKKYPKLESEFVYGDYKVYDVRKMIAKSEQEIGKATAKYFFYSNIMNFFKTEITLANGEIRKRPLIETNGETGEIVWDKGRDFATVRKVLSMPQVNIVKKTEVQTGGFSKESILPKRNSDKLIARKKDWDPKKYGGFDSPTVAYSVLVVAKVEKGKSKKLKSVKELLGITIMERSSFEKNPIDFLEAKGYKEVKKDLIIKLPKYSLFELENGRKRMLASAGELQKGNELALPSKYVNFLYLASHYEKLKGSPEDNEQKQLFVEQHKHYLDEIIEQISEFSKRVILADANLDKVLSAYNKHRDKPIREQAENIIHLFTLTNLGAPAAFKYFDTTIDRKRYTSTKEVLDATLIHQSITGLYETRIDLSQLGGDKRTADGSEFESPKKKAKVE

SEQ ID NO: 16150 - protein, 2252 aa, synthetic construct
MPAAKRVKLDGGTAPLEEEYRLFLEAPIQNVTLLEQWKREIPKVWAEINPPGLASTQAPIHVQLLSTALPVRVRQYPITLEAKRSLRETIRKFRAAGILRPVHSPWNTPLLPVRKSGTSEYRMVQDLREVNKRVETIHPTVPNPYTLLSLLPPDRIWYSVLDLKDAFFCIPLAPESQLIFAFEWADAEEGESGQLTWTRLPQGFKNSPTLFNEALNRDLQGFRLDHPSVSLLQYVDDLLIAADTQAACLSATRDLLMTLAELGYRVSGKKAQLCQEEVTYLGFKIHKGSRSLSNSRTQAILQIPVPKTKRQVREFLGKIGYCRLFIPGFAELAQPLYAATRPGNDPLVWGEKEEEAFQSLKLALTQPPALALPSLDKPFQLFVEETSGAAKGVLTQALGPWKRPVAYLSKRLDPVAAGWPRCLRAIAAAALLTREASKLTFGQDIEITSSHNLESLLRSPPDKWLTNARITQYQVLLLDPPRVRFKQTAALNPATLLPETDDTLPIHHCLDTLDSLTSTRPDLTDQPLAQAEATLFTDGSSYIRDGKRYAGAAVVTLDSVIWAEPLPIGTSAQKAELIALTKALEWSKDKSVNIYTDSRYAFATLHVHGMIYRERGWLTAGGKAIKNAPEILALLTAVWLPKRVAVMHCKGHQKDDAPTSTGNRRADEVAREVAIRPLSTQATISAEAAAKEAAAKEAAAKEAAAKALEAEAAAKEAAAKEAAAKEAAAKAMASNFTQFVLVDNGGTGDVTVAPSNFANGIAEWISSNSRSQAYKVTCSVRQSSAQNRKYTIKVEVPKGAWRSYLNMELTIPIFATNSDCELIVKAMQGLLKDGNPIPSAIAANSGIYGSSGSSGSSGSSGSSGSSDKKYSIGLDIGTNSVGWAVITDEYKVPSKKFKVLGNTDRHSIKKNLIGALLFDSGETAEATRLKRTARRRYTRRKNRICYLQEIFSNEMAKVDDSFFHRLEESFLVEEDKKHERHPIFGNIVDEVAYHEKYPTIYHLRKKLVDSTDKADLRLIYLALAHMIKFRGHFLIEGDLNPDNSDVDKLFIQLVQTYNQLFEENPINASGVDAKAILSARLSKSRRLENLIAQLPGEKKNGLFGNLIALSLGLTPNFKSNFDLAEDAKLQLSKDTYDDDLDNLLAQIGDQYADLFLAAKNLSDAILLSDILRVNTEITKAPLSASMIKRYDEHHQDLTLLKALVRQQLPEKYKEIFFDQSKNGYAGYIDGGASQEEFYKFIKPILEKMDGTEELLVKLNREDLLRKQRTFDNGSIPHQIHLGELHAILRRQEDFYPFLKDNREKIEKILTFRIPYYVGPLARGNSRFAWMTRKSEETITPWNFEEVVDKGASAQSFIERMTNFDKNLPNEKVLPKHSLLYEYFTVYNELTKVKYVTEGMRKPAFLSGEQKKAIVDLLFKTNRKVTVKQLKEDYFKKIECFDSVEISGVEDRFNASLGTYHDLLKIIKDKDFLDNEENEDILEDIVLTLTLFEDREMIEERLKTYAHLFDDKVMKQLKRRRYTGWGRLSRKLINGIRDKQSGKTILDFLKSDGFANRNFMQLIHDDSLTFKEDIQKAQVSGQGDSLHEHIANLAGSPAIKKGILQTVKVVDELVKVMGRHKPENIVIEMARENQTTQKGQKNSRERMKRIEEGIKELGSQILKEHPVENTQLQNEKLYLYYLQNGRDMYVDQELDINRLSDYDVDHIVPQSFLKDDSIDNKVLTRSDKARGKSDNVPSEEVVKKMKNYWRQLLNAKLITQRKFDNLTKAERGGLSELDKAGFIKRQLVETRQITKHVAQILDSRMNTKYDENDKLIREVKVITLKSKLVSDFRKDFQFYKVREINNYHHAHDAYLNAVVGTALIKKYPKLESEFVYGDYKVYDVRKMIAKSEQEIGKATAKYFFYSNIMNFFKTEITLANGEIRKRPLIETNGETGEIVWDKGRDFATVRKVLSMPQVNIVKKTEVQTGGFSKESILPKRNSDKLIARKKDWDPKKYGGFDSPTVAYSVLVVAKVEKGKSKKLKSVKELLGITIMERSSFEKNPIDFLEAKGYKEVKKDLIIKLPKYSLFELENGRKRMLASAGELQKGNELALPSKYVNFLYLASHYEKLKGSPEDNEQKQLFVEQHKHYLDEIIEQISEFSKRVILADANLDKVLSAYNKHRDKPIREQAENIIHLFTLTNLGAPAAFKYFDTTIDRKRYTSTKEVLDATLIHQSITGLYETRIDLSQLGGDKRTADGSEFESPKKKAKVE

SEQ ID NO: 16151 - protein, 2245 aa, synthetic construct
MPAAKRVKLDGGTAPLEEEYRLFLEAPIQNVTLLEQWKREIPKVWAEINPPGLASTQAPIHVQLLSTALPVRVRQYPITLEAKRSLRETIRKFRAAGILRPVHSPWNTPLLPVRKSGTSEYRMVQDLREVNKRVETIHPTVPNPYTLLSLLPPDRIWYSVLDLKDAFFCIPLAPESQLIFAFEWADAEEGESGQLTWTRLPQGFKNSPTLFNEALNRDLQGFRLDHPSVSLLQYVDDLLIAADTQAACLSATRDLLMTLAELGYRVSGKKAQLCQEEVTYLGFKIHKGSRSLSNSRTQAILQIPVPKTKRQVREFLGKIGYCRLFIPGFAELAQPLYAATRPGNDPLVWGEKEEEAFQSLKLALTQPPALALPSLDKPFQLFVEETSGAAKGVLTQALGPWKRPVAYLSKRLDPVAAGWPRCLRAIAAAALLTREASKLTFGQDIEITSSHNLESLLRSPPDKWLTNARITQYQVLLLDPPRVRFKQTAALNPATLLPETDDTLPIHHCLDTLDSLTSTRPDLTDQPLAQAEATLFTDGSSYIRDGKRYAGAAVVTLDSVIWAEPLPIGTSAQKAELIALTKALEWSKDKSVNIYTDSRYAFATLHVHGMIYRERGWLTAGGKAIKNAPEILALLTAVWLPKRVAVMHCKGHQKDDAPTSTGNRRADEVAREVAIRPLSTQATISAEAAAKEAAAKEAAAKEAAAKALEAEAAAKEAAAKEAAAKEAAAKAMASNFTQFVLVDNGGTGDVTVAPSNFANGIAEWISSNSRSQAYKVTCSVRQSSAQNRKYTIKVEVPKGAWRSYLNMELTIPIFATNSDCELIVKAMQGLLKDGNPIPSAIAANSGIYGSSGGGEAAAKDKKYSIGLDIGTNSVGWAVITDEYKVPSKKFKVLGNTDRHSIKKNLIGALLFDSGETAEATRLKRTARRRYTRRKNRICYLQEIFSNEMAKVDDSFFHRLEESFLVEEDKKHERHPIFGNIVDEVAYHEKYPTIYHLRKKLVDSTDKADLRLIYLALAHMIKFRGHFLIEGDLNPDNSDVDKLFIQLVQTYNQLFEENPINASGVDAKAILSARLSKSRRLENLIAQLPGEKKNGLFGNLIALSLGLTPNFKSNFDLAEDAKLQLSKDTYDDDLDNLLAQIGDQYADLFLAAKNLSDAILLSDILRVNTEITKAPLSASMIKRYDEHHQDLTLLKALVRQQLPEKYKEIFFDQSKNGYAGYIDGGASQEEFYKFIKPILEKMDGTEELLVKLNREDLLRKQRTFDNGSIPHQIHLGELHAILRRQEDFYPFLKDNREKIEKILTFRIPYYVGPLARGNSRFAWMTRKSEETITPWNFEEVVDKGASAQSFIERMTNFDKNLPNEKVLPKHSLLYEYFTVYNELTKVKYVTEGMRKPAFLSGEQKKAIVDLLFKTNRKVTVKQLKEDYFKKIECFDSVEISGVEDRFNASLGTYHDLLKIIKDKDFLDNEENEDILEDIVLTLTLFEDREMIEERLKTYAHLFDDKVMKQLKRRRYTGWGRLSRKLINGIRDKQSGKTILDFLKSDGFANRNFMQLIHDDSLTFKEDIQKAQVSGQGDSLHEHIANLAGSPAIKKGILQTVKVVDELVKVMGRHKPENIVIEMARENQTTQKGQKNSRERMKRIEEGIKELGSQILKEHPVENTQLQNEKLYLYYLQNGRDMYVDQELDINRLSDYDVDHIVPQSFLKDDSIDNKVLTRSDKARGKSDNVPSEEVVKKMKNYWRQLLNAKLITQRKFDNLTKAERGGLSELDKAGFIKRQLVETRQITKHVAQILDSRMNTKYDENDKLIREVKVITLKSKLVSDFRKDFQFYKVREINNYHHAHDAYLNAVVGTALIKKYPKLESEFVYGDYKVYDVRKMIAKSEQEIGKATAKYFFYSNIMNFFKTEITLANGEIRKRPLIETNGETGEIVWDKGRDFATVRKVLSMPQVNIVKKTEVQTGGFSKESILPKRNSDKLIARKKDWDPKKYGGFDSPTVAYSVLVVAKVEKGKSKKLKSVKELLGITIMERSSFEKNPIDFLEAKGYKEVKKDLIIKLPKYSLFELENGRKRMLASAGELQKGNELALPSKYVNFLYLASHYEKLKGSPEDNEQKQLFVEQHKHYLDEIIEQISEFSKRVILADANLDKVLSAYNKHRDKPIREQAENIIHLFTLTNLGAPAAFKYFDTTIDRKRYTSTKEVLDATLIHQSITGLYETRIDLSQLGGDKRTADGSEFESPKKKAKVE

SEQ ID NO: 16152 - protein, 2403 aa, synthetic construct
MPAAKRVKLDGGTAPLEEEYRLFLEAPIQNVTLLEQWKREIPKVWAEINPPGLASTQAPIHVQLLSTALPVRVRQYPITLEAKRSLRETIRKFRAAGILRPVHSPWNTPLLPVRKSGTSEYRMVQDLREVNKRVETIHPTVPNPYTLLSLLPPDRIWYSVLDLKDAFFCIPLAPESQLIFAFEWADAEEGESGQLTWTRLPQGFKNSPTLFNEALNRDLQGFRLDHPSVSLLQYVDDLLIAADTQAACLSATRDLLMTLAELGYRVSGKKAQLCQEEVTYLGFKIHKGSRSLSNSRTQAILQIPVPKTKRQVREFLGKIGYCRLFIPGFAELAQPLYAATRPGNDPLVWGEKEEEAFQSLKLALTQPPALALPSLDKPFQLFVEETSGAAKGVLTQALGPWKRPVAYLSKRLDPVAAGWPRCLRAIAAAALLTREASKLTFGQDIEITSSHNLESLLRSPPDKWLTNARITQYQVLLLDPPRVRFKQTAALNPATLLPETDDTLPIHHCLDTLDSLTSTRPDLTDQPLAQAEATLFTDGSSYIRDGKRYAGAAVVTLDSVIWAEPLPIGTSAQKAELIALTKALEWSKDKSVNIYTDSRYAFATLHVHGMIYRERGWLTAGGKAIKNAPEILALLTAVWLPKRVAVMHCKGHQKDDAPTSTGNRRADEVAREVAIRPLSTQATISAEAAAKEAAAKEAAAKEAAAKALEAEAAAKEAAAKEAAAKEAAAKAMASNFTQFVLVDNGGTGDVTVAPSNFANGIAEWISSNSRSQAYKVTCSVRQSSAQNRKYTIKVEVPKGAWRSYLNMELTIPIFATNSDCELIVKAMQGLLKDGNPIPSAIAANSGIYGGSGGSMASNFTQFVLVDNGGTGDVTVAPSNFANGIAEWISSNSRSQAYKVTCSVRQSSAQNRKYTIKVEVPKGAWRSYLNMELTIPIFATNSDCELIVKAMQGLLKDGNPIPSAIAANSGIYAEAAAKEAAAKEAAAKEAAAKALEAEAAAKEAAAKEAAAKEAAAKADKKYSIGLDIGTNSVGWAVITDEYKVPSKKFKVLGNTDRHSIKKNLIGALLFDSGETAEATRLKRTARRRYTRRKNRICYLQEIFSNEMAKVDDSFFHRLEESFLVEEDKKHERHPIFGNIVDEVAYHEKYPTIYHLRKKLVDSTDKADLRLIYLALAHMIKFRGHFLIEGDLNPDNSDVDKLFIQLVQTYNQLFEENPINASGVDAKAILSARLSKSRRLENLIAQLPGEKKNGLFGNLIALSLGLTPNFKSNFDLAEDAKLQLSKDTYDDDLDNLLAQIGDQYADLFLAAKNLSDAILLSDILRVNTEITKAPLSASMIKRYDEHHQDLTLLKALVRQQLPEKYKEIFFDQSKNGYAGYIDGGASQEEFYKFIKPILEKMDGTEELLVKLNREDLLRKQRTFDNGSIPHQIHLGELHAILRRQEDFYPFLKDNREKIEKILTFRIPYYVGPLARGNSRFAWMTRKSEETITPWNFEEVVDKGASAQSFIERMTNFDKNLPNEKVLPKHSLLYEYFTVYNELTKVKYVTEGMRKPAFLSGEQKKAIVDLLFKTNRKVTVKQLKEDYFKKIECFDSVEISGVEDRFNASLGTYHDLLKIIKDKDFLDNEENEDILEDIVLTLTLFEDREMIEERLKTYAHLFDDKVMKQLKRRRYTGWGRLSRKLINGIRDKQSGKTILDFLKSDGFANRNFMQLIHDDSLTFKEDIQKAQVSGQGDSLHEHIANLAGSPAIKKGILQTVKVVDELVKVMGRHKPENIVIEMARENQTTQKGQKNSRERMKRIEEGIKELGSQILKEHPVENTQLQNEKLYLYYLQNGRDMYVDQELDINRLSDYDVDHIVPQSFLKDDSIDNKVLTRSDKARGKSDNVPSEEVVKKMKNYWRQLLNAKLITQRKFDNLTKAERGGLSELDKAGFIKRQLVETRQITKHVAQILDSRMNTKYDENDKLIREVKVITLKSKLVSDFRKDFQFYKVREINNYHHAHDAYLNAVVGTALIKKYPKLESEFVYGDYKVYDVRKMIAKSEQEIGKATAKYFFYSNIMNFFKTEITLANGEIRKRPLIETNGETGEIVWDKGRDFATVRKVLSMPQVNIVKKTEVQTGGFSKESILPKRNSDKLIARKKDWDPKKYGGFDSPTVAYSVLVVAKVEKGKSKKLKSVKELLGITIMERSSFEKNPIDFLEAKGYKEVKKDLIIKLPKYSLFELENGRKRMLASAGELQKGNELALPSKYVNFLYLASHYEKLKGSPEDNEQKQLFVEQHKHYLDEIIEQISEFSKRVILADANLDKVLSAYNKHRDKPIREQAENIIHLFTLTNLGAPAAFKYFDTTIDRKRYTSTKEVLDATLIHQSITGLYETRIDLSQLGGDKRTADGSEFESPKKKAKVE

SEQ ID NO: 16153 - protein, 2390 aa, synthetic construct
MPAAKRVKLDGGTAPLEEEYRLFLEAPIQNVTLLEQWKREIPKVWAEINPPGLASTQAPIHVQLLSTALPVRVRQYPITLEAKRSLRETIRKFRAAGILRPVHSPWNTPLLPVRKSGTSEYRMVQDLREVNKRVETIHPTVPNPYTLLSLLPPDRIWYSVLDLKDAFFCIPLAPESQLIFAFEWADAEEGESGQLTWTRLPQGFKNSPTLFNEALNRDLQGFRLDHPSVSLLQYVDDLLIAADTQAACLSATRDLLMTLAELGYRVSGKKAQLCQEEVTYLGFKIHKGSRSLSNSRTQAILQIPVPKTKRQVREFLGKIGYCRLFIPGFAELAQPLYAATRPGNDPLVWGEKEEEAFQSLKLALTQPPALALPSLDKPFQLFVEETSGAAKGVLTQALGPWKRPVAYLSKRLDPVAAGWPRCLRAIAAAALLTREASKLTFGQDIEITSSHNLESLLRSPPDKWLTNARITQYQVLLLDPPRVRFKQTAALNPATLLPETDDTLPIHHCLDTLDSLTSTRPDLTDQPLAQAEATLFTDGSSYIRDGKRYAGAAVVTLDSVIWAEPLPIGTSAQKAELIALTKALEWSKDKSVNIYTDSRYAFATLHVHGMIYRERGWLTAGGKAIKNAPEILALLTAVWLPKRVAVMHCKGHQKDDAPTSTGNRRADEVAREVAIRPLSTQATISAEAAAKEAAAKEAAAKEAAAKALEAEAAAKEAAAKEAAAKEAAAKAMASNFTQFVLVDNGGTGDVTVAPSNFANGIAEWISSNSRSQAYKVTCSVRQSSAQNRKYTIKVEVPKGAWRSYLNMELTIPIFATNSDCELIVKAMQGLLKDGNPIPSAIAANSGIYGGSGGSMASNFTQFVLVDNGGTGDVTVAPSNFANGIAEWISSNSRSQAYKVTCSVRQSSAQNRKYTIKVEVPKGAWRSYLNMELTIPIFATNSDCELIVKAMQGLLKDGNPIPSAIAANSGIYSGGSSGGSSGSETPGTSESATPESSGGSSGGSSDKKYSIGLDIGTNSVGWAVITDEYKVPSKKFKVLGNTDRHSIKKNLIGALLFDSGETAEATRLKRTARRRYTRRKNRICYLQEIFSNEMAKVDDSFFHRLEESFLVEEDKKHERHPIFGNIVDEVAYHEKYPTIYHLRKKLVDSTDKADLRLIYLALAHMIKFRGHFLIEGDLNPDNSDVDKLFIQLVQTYNQLFEENPINASGVDAKAILSARLSKSRRLENLIAQLPGEKKNGLFGNLIALSLGLTPNFKSNFDLAEDAKLQLSKDTYDDDLDNLLAQIGDQYADLFLAAKNLSDAILLSDILRVNTEITKAPLSASMIKRYDEHHQDLTLLKALVRQQLPEKYKEIFFDQSKNGYAGYIDGGASQEEFYKFIKPILEKMDGTEELLVKLNREDLLRKQRTFDNGSIPHQIHLGELHAILRRQEDFYPFLKDNREKIEKILTFRIPYYVGPLARGNSRFAWMTRKSEETITPWNFEEVVDKGASAQSFIERMTNFDKNLPNEKVLPKHSLLYEYFTVYNELTKVKYVTEGMRKPAFLSGEQKKAIVDLLFKTNRKVTVKQLKEDYFKKIECFDSVEISGVEDRFNASLGTYHDLLKIIKDKDFLDNEENEDILEDIVLTLTLFEDREMIEERLKTYAHLFDDKVMKQLKRRRYTGWGRLSRKLINGIRDKQSGKTILDFLKSDGFANRNFMQLIHDDSLTFKEDIQKAQVSGQGDSLHEHIANLAGSPAIKKGILQTVKVVDELVKVMGRHKPENIVIEMARENQTTQKGQKNSRERMKRIEEGIKELGSQILKEHPVENTQLQNEKLYLYYLQNGRDMYVDQELDINRLSDYDVDHIVPQSFLKDDSIDNKVLTRSDKARGKSDNVPSEEVVKKMKNYWRQLLNAKLITQRKFDNLTKAERGGLSELDKAGFIKRQLVETRQITKHVAQILDSRMNTKYDENDKLIREVKVITLKSKLVSDFRKDFQFYKVREINNYHHAHDAYLNAVVGTALIKKYPKLESEFVYGDYKVYDVRKMIAKSEQEIGKATAKYFFYSNIMNFFKTEITLANGEIRKRPLIETNGETGEIVWDKGRDFATVRKVLSMPQVNIVKKTEVQTGGFSKESILPKRNSDKLIARKKDWDPKKYGGFDSPTVAYSVLVVAKVEKGKSKKLKSVKELLGITIMERSSFEKNPIDFLEAKGYKEVKKDLIIKLPKYSLFELENGRKRMLASAGELQKGNELALPSKYVNFLYLASHYEKLKGSPEDNEQKQLFVEQHKHYLDEIIEQISEFSKRVILADANLDKVLSAYNKHRDKPIREQAENIIHLFTLTNLGAPAAFKYFDTTIDRKRYTSTKEVLDATLIHQSITGLYETRIDLSQLGGDKRTADGSEFESPKKKAKVE

SEQ ID NO: 16154 - protein, 2375 aa, synthetic construct
MPAAKRVKLDGGTAPLEEEYRLFLEAPIQNVTLLEQWKREIPKVWAEINPPGLASTQAPIHVQLLSTALPVRVRQYPITLEAKRSLRETIRKFRAAGILRPVHSPWNTPLLPVRKSGTSEYRMVQDLREVNKRVETIHPTVPNPYTLLSLLPPDRIWYSVLDLKDAFFCIPLAPESQLIFAFEWADAEEGESGQLTWTRLPQGFKNSPTLFNEALNRDLQGFRLDHPSVSLLQYVDDLLIAADTQAACLSATRDLLMTLAELGYRVSGKKAQLCQEEVTYLGFKIHKGSRSLSNSRTQAILQIPVPKTKRQVREFLGKIGYCRLFIPGFAELAQPLYAATRPGNDPLVWGEKEEEAFQSLKLALTQPPALALPSLDKPFQLFVEETSGAAKGVLTQALGPWKRPVAYLSKRLDPVAAGWPRCLRAIAAAALLTREASKLTFGQDIEITSSHNLESLLRSPPDKWLTNARITQYQVLLLDPPRVRFKQTAALNPATLLPETDDTLPIHHCLDTLDSLTSTRPDLTDQPLAQAEATLFTDGSSYIRDGKRYAGAAVVTLDSVIWAEPLPIGTSAQKAELIALTKALEWSKDKSVNIYTDSRYAFATLHVHGMIYRERGWLTAGGKAIKNAPEILALLTAVWLPKRVAVMHCKGHQKDDAPTSTGNRRADEVAREVAIRPLSTQATISAEAAAKEAAAKEAAAKEAAAKALEAEAAAKEAAAKEAAAKEAAAKAMASNFTQFVLVDNGGTGDVTVAPSNFANGIAEWISSNSRSQAYKVTCSVRQSSAQNRKYTIKVEVPKGAWRSYLNMELTIPIFATNSDCELIVKAMQGLLKDGNPIPSAIAANSGIYGGSGGSMASNFTQFVLVDNGGTGDVTVAPSNFANGIAEWISSNSRSQAYKVTCSVRQSSAQNRKYTIKVEVPKGAWRSYLNMELTIPIFATNSDCELIVKAMQGLLKDGNPIPSAIAANSGIYGSSGSSGSSGSSGSSGSSDKKYSIGLDIGTNSVGWAVITDEYKVPSKKFKVLGNTDRHSIKKNLIGALLFDSGETAEATRLKRTARRRYTRRKNRICYLQEIFSNEMAKVDDSFFHRLEESFLVEEDKKHERHPIFGNIVDEVAYHEKYPTIYHLRKKLVDSTDKADLRLIYLALAHMIKFRGHFLIEGDLNPDNSDVDKLFIQLVQTYNQLFEENPINASGVDAKAILSARLSKSRRLENLIAQLPGEKKNGLFGNLIALSLGLTPNFKSNFDLAEDAKLQLSKDTYDDDLDNLLAQIGDQYADLFLAAKNLSDAILLSDILRVNTEITKAPLSASMIKRYDEHHQDLTLLKALVRQQLPEKYKEIFFDQSKNGYAGYIDGGASQEEFYKFIKPILEKMDGTEELLVKLNREDLLRKQRTFDNGSIPHQIHLGELHAILRRQEDFYPFLKDNREKIEKILTFRIPYYVGPLARGNSRFAWMTRKSEETITPWNFEEVVDKGASAQSFIERMTNFDKNLPNEKVLPKHSLLYEYFTVYNELTKVKYVTEGMRKPAFLSGEQKKAIVDLLFKTNRKVTVKQLKEDYFKKIECFDSVEISGVEDRFNASLGTYHDLLKIIKDKDFLDNEENEDILEDIVLTLTLFEDREMIEERLKTYAHLFDDKVMKQLKRRRYTGWGRLSRKLINGIRDKQSGKTILDFLKSDGFANRNFMQLIHDDSLTFKEDIQKAQVSGQGDSLHEHIANLAGSPAIKKGILQTVKVVDELVKVMGRHKPENIVIEMARENQTTQKGQKNSRERMKRIEEGIKELGSQILKEHPVENTQLQNEKLYLYYLQNGRDMYVDQELDINRLSDYDVDHIVPQSFLKDDSIDNKVLTRSDKARGKSDNVPSEEVVKKMKNYWRQLLNAKLITQRKFDNLTKAERGGLSELDKAGFIKRQLVETRQITKHVAQILDSRMNTKYDENDKLIREVKVITLKSKLVSDFRKDFQFYKVREINNYHHAHDAYLNAVVGTALIKKYPKLESEFVYGDYKVYDVRKMIAKSEQEIGKATAKYFFYSNIMNFFKTEITLANGEIRKRPLIETNGETGEIVWDKGRDFATVRKVLSMPQVNIVKKTEVQTGGFSKESILPKRNSDKLIARKKDWDPKKYGGFDSPTVAYSVLVVAKVEKGKSKKLKSVKELLGITIMERSSFEKNPIDFLEAKGYKEVKKDLIIKLPKYSLFELENGRKRMLASAGELQKGNELALPSKYVNFLYLASHYEKLKGSPEDNEQKQLFVEQHKHYLDEIIEQISEFSKRVILADANLDKVLSAYNKHRDKPIREQAENIIHLFTLTNLGAPAAFKYFDTTIDRKRYTSTKEVLDATLIHQSITGLYETRIDLSQLGGDKRTADGSEFESPKKKAKVE

SEQ ID NO: 16155 - protein, 2368 aa, synthetic construct
MPAAKRVKLDGGTAPLEEEYRLFLEAPIQNVTLLEQWKREIPKVWAEINPPGLASTQAPIHVQLLSTALPVRVRQYPITLEAKRSLRETIRKFRAAGILRPVHSPWNTPLLPVRKSGTSEYRMVQDLREVNKRVETIHPTVPNPYTLLSLLPPDRIWYSVLDLKDAFFCIPLAPESQLIFAFEWADAEEGESGQLTWTRLPQGFKNSPTLFNEALNRDLQGFRLDHPSVSLLQYVDDLLIAADTQAACLSATRDLLMTLAELGYRVSGKKAQLCQEEVTYLGFKIHKGSRSLSNSRTQAILQIPVPKTKRQVREFLGKIGYCRLFIPGFAELAQPLYAATRPGNDPLVWGEKEEEAFQSLKLALTQPPALALPSLDKPFQLFVEETSGAAKGVLTQALGPWKRPVAYLSKRLDPVAAGWPRCLRAIAAAALLTREASKLTFGQDIEITSSHNLESLLRSPPDKWLTNARITQYQVLLLDPPRVRFKQTAALNPATLLPETDDTLPIHHCLDTLDSLTSTRPDLTDQPLAQAEATLFTDGSSYIRDGKRYAGAAVVTLDSVIWAEPLPIGTSAQKAELIALTKALEWSKDKSVNIYTDSRYAFATLHVHGMIYRERGWLTAGGKAIKNAPEILALLTAVWLPKRVAVMHCKGHQKDDAPTSTGNRRADEVAREVAIRPLSTQATISAEAAAKEAAAKEAAAKEAAAKALEAEAAAKEAAAKEAAAKEAAAKAMASNFTQFVLVDNGGTGDVTVAPSNFANGIAEWISSNSRSQAYKVTCSVRQSSAQNRKYTIKVEVPKGAWRSYLNMELTIPIFATNSDCELIVKAMQGLLKDGNPIPSAIAANSGIYGGSGGSMASNFTQFVLVDNGGTGDVTVAPSNFANGIAEWISSNSRSQAYKVTCSVRQSSAQNRKYTIKVEVPKGAWRSYLNMELTIPIFATNSDCELIVKAMQGLLKDGNPIPSAIAANSGIYGSSGGGEAAAKDKKYSIGLDIGTNSVGWAVITDEYKVPSKKFKVLGNTDRHSIKKNLIGALLFDSGETAEATRLKRTARRRYTRRKNRICYLQEIFSNEMAKVDDSFFHRLEESFLVEEDKKHERHPIFGNIVDEVAYHEKYPTIYHLRKKLVDSTDKADLRLIYLALAHMIKFRGHFLIEGDLNPDNSDVDKLFIQLVQTYNQLFEENPINASGVDAKAILSARLSKSRRLENLIAQLPGEKKNGLFGNLIALSLGLTPNFKSNFDLAEDAKLQLSKDTYDDDLDNLLAQIGDQYADLFLAAKNLSDAILLSDILRVNTEITKAPLSASMIKRYDEHHQDLTLLKALVRQQLPEKYKEIFFDQSKNGYAGYIDGGASQEEFYKFIKPILEKMDGTEELLVKLNREDLLRKQRTFDNGSIPHQIHLGELHAILRRQEDFYPFLKDNREKIEKILTFRIPYYVGPLARGNSRFAWMTRKSEETITPWNFEEVVDKGASAQSFIERMTNFDKNLPNEKVLPKHSLLYEYFTVYNELTKVKYVTEGMRKPAFLSGEQKKAIVDLLFKTNRKVTVKQLKEDYFKKIECFDSVEISGVEDRFNASLGTYHDLLKIIKDKDFLDNEENEDILEDIVLTLTLFEDREMIEERLKTYAHLFDDKVMKQLKRRRYTGWGRLSRKLINGIRDKQSGKTILDFLKSDGFANRNFMQLIHDDSLTFKEDIQKAQVSGQGDSLHEHIANLAGSPAIKKGILQTVKVVDELVKVMGRHKPENIVIEMARENQTTQKGQKNSRERMKRIEEGIKELGSQILKEHPVENTQLQNEKLYLYYLQNGRDMYVDQELDINRLSDYDVDHIVPQSFLKDDSIDNKVLTRSDKARGKSDNVPSEEVVKKMKNYWRQLLNAKLITQRKFDNLTKAERGGLSELDKAGFIKRQLVETRQITKHVAQILDSRMNTKYDENDKLIREVKVITLKSKLVSDFRKDFQFYKVREINNYHHAHDAYLNAVVGTALIKKYPKLESEFVYGDYKVYDVRKMIAKSEQEIGKATAKYFFYSNIMNFFKTEITLANGEIRKRPLIETNGETGEIVWDKGRDFATVRKVLSMPQVNIVKKTEVQTGGFSKESILPKRNSDKLIARKKDWDPKKYGGFDSPTVAYSVLVVAKVEKGKSKKLKSVKELLGITIMERSSFEKNPIDFLEAKGYKEVKKDLIIKLPKYSLFELENGRKRMLASAGELQKGNELALPSKYVNFLYLASHYEKLKGSPEDNEQKQLFVEQHKHYLDEIIEQISEFSKRVILADANLDKVLSAYNKHRDKPIREQAENIIHLFTLTNLGAPAAFKYFDTTIDRKRYTSTKEVLDATLIHQSITGLYETRIDLSQLGGDKRTADGSEFESPKKKAKVE

SEQ ID NO: 16156 - protein, 2659 aa, synthetic construct
MPAAKRVKLDGGTAPLEEEYRLFLEAPIQNVTLLEQWKREIPKVWAEINPPGLASTQAPIHVQLLSTALPVRVRQYPITLEAKRSLRETIRKFRAAGILRPVHSPWNTPLLPVRKSGTSEYRMVQDLREVNKRVETIHPTVPNPYTLLSLLPPDRIWYSVLDLKDAFFCIPLAPESQLIFAFEWADAEEGESGQLTWTRLPQGFKNSPTLFNEALNRDLQGFRLDHPSVSLLQYVDDLLIAADTQAACLSATRDLLMTLAELGYRVSGKKAQLCQEEVTYLGFKIHKGSRSLSNSRTQAILQIPVPKTKRQVREFLGKIGYCRLFIPGFAELAQPLYAATRPGNDPLVWGEKEEEAFQSLKLALTQPPALALPSLDKPFQLFVEETSGAAKGVLTQALGPWKRPVAYLSKRLDPVAAGWPRCLRAIAAAALLTREASKLTFGQDIEITSSHNLESLLRSPPDKWLTNARITQYQVLLLDPPRVRFKQTAALNPATLLPETDDTLPIHHCLDTLDSLTSTRPDLTDQPLAQAEATLFTDGSSYIRDGKRYAGAAVVTLDSVIWAEPLPIGTSAQKAELIALTKALEWSKDKSVNIYTDSRYAFATLHVHGMIYRERGWLTAGGKAIKNAPEILALLTAVWLPKRVAVMHCKGHQKDDAPTSTGNRRADEVAREVAIRPLSTQATISAEAAAKEAAAKEAAAKEAAAKALEAEAAAKEAAAKEAAAKEAAAKAMASNFTQFVLVDNGGTGDVTVAPSNFANGIAEWISSNSRSQAYKVTCSVRQSSAQNRKYTIKVEVPKGAWRSYLNMELTIPIFATNSDCELIVKAMQGLLKDGNPIPSAIAANSGIYGGSGGSMASNFTQFVLVDNGGTGDVTVAPSNFANGIAEWISSNSRSQAYKVTCSVRQSSAQNRKYTIKVEVPKGAWRSYLNMELTIPIFATNSDCELIVKAMQGLLKDGNPIPSAIAANSGIYGGGSGGGSGGGSGGGSMASNFTQFVLVDNGGTGDVTVAPSNFANGIAEWISSNSRSQAYKVTCSVRQSSAQNRKYTIKVEVPKGAWRSYLNMELTIPIFATNSDCELIVKAMQGLLKDGNPIPSAIAANSGIYGGSGGSMASNFTQFVLVDNGGTGDVTVAPSNFANGIAEWISSNSRSQAYKVTCSVRQSSAQNRKYTIKVEVPKGAWRSYLNMELTIPIFATNSDCELIVKAMQGLLKDGNPIPSAIAANSGIYAEAAAKEAAAKEAAAKEAAAKALEAEAAAKEAAAKEAAAKEAAAKADKKYSIGLDIGTNSVGWAVITDEYKVPSKKFKVLGNTDRHSIKKNLIGALLFDSGETAEATRLKRTARRRYTRRKNRICYLQEIFSNEMAKVDDSFFHRLEESFLVEEDKKHERHPIFGNIVDEVAYHEKYPTIYHLRKKLVDSTDKADLRLIYLALAHMIKFRGHFLIEGDLNPDNSDVDKLFIQLVQTYNQLFEENPINASGVDAKAILSARLSKSRRLENLIAQLPGEKKNGLFGNLIALSLGLTPNFKSNFDLAEDAKLQLSKDTYDDDLDNLLAQIGDQYADLFLAAKNLSDAILLSDILRVNTEITKAPLSASMIKRYDEHHQDLTLLKALVRQQLPEKYKEIFFDQSKNGYAGYIDGGASQEEFYKFIKPILEKMDGTEELLVKLNREDLLRKQRTFDNGSIPHQIHLGELHAILRRQEDFYPFLKDNREKIEKILTFRIPYYVGPLARGNSRFAWMTRKSEETITPWNFEEVVDKGASAQSFIERMTNFDKNLPNEKVLPKHSLLYEYFTVYNELTKVKYVTEGMRKPAFLSGEQKKAIVDLLFKTNRKVTVKQLKEDYFKKIECFDSVEISGVEDRFNASLGTYHDLLKIIKDKDFLDNEENEDILEDIVLTLTLFEDREMIEERLKTYAHLFDDKVMKQLKRRRYTGWGRLSRKLINGIRDKQSGKTILDFLKSDGFANRNFMQLIHDDSLTFKEDIQKAQVSGQGDSLHEHIANLAGSPAIKKGILQTVKVVDELVKVMGRHKPENIVIEMARENQTTQKGQKNSRERMKRIEEGIKELGSQILKEHPVENTQLQNEKLYLYYLQNGRDMYVDQELDINRLSDYDVDHIVPQSFLKDDSIDNKVLTRSDKARGKSDNVPSEEVVKKMKNYWRQLLNAKLITQRKFDNLTKAERGGLSELDKAGFIKRQLVETRQITKHVAQILDSRMNTKYDENDKLIREVKVITLKSKLVSDFRKDFQFYKVREINNYHHAHDAYLNAVVGTALIKKYPKLESEFVYGDYKVYDVRKMIAKSEQEIGKATAKYFFYSNIMNFFKTEITLANGEIRKRPLIETNGETGEIVWDKGRDFATVRKVLSMPQVNIVKKTEVQTGGFSKESILPKRNSDKLIARKKDWDPKKYGGFDSPTVAYSVLVVAKVEKGKSKKLKSVKELLGITIMERSSFEKNPIDFLEAKGYKEVKKDLIIKLPKYSLFELENGRKRMLASAGELQKGNELALPSKYVNFLYLASHYEKLKGSPEDNEQKQLFVEQHKHYLDEIIEQISEFSKRVILADANLDKVLSAYNKHRDKPIREQAENIIHLFTLTNLGAPAAFKYFDTTIDRKRYTSTKEVLDATLIHQSITGLYETRIDLSQLGGDKRTADGSEFESPKKKAKVE

SEQ ID NO: 16157 - protein, 2646 aa, synthetic construct
MPAAKRVKLDGGTAPLEEEYRLFLEAPIQNVTLLEQWKREIPKVWAEINPPGLASTQAPIHVQLLSTALPVRVRQYPITLEAKRSLRETIRKFRAAGILRPVHSPWNTPLLPVRKSGTSEYRMVQDLREVNKRVETIHPTVPNPYTLLSLLPPDRIWYSVLDLKDAFFCIPLAPESQLIFAFEWADAEEGESGQLTWTRLPQGFKNSPTLFNEALNRDLQGFRLDHPSVSLLQYVDDLLIAADTQAACLSATRDLLMTLAELGYRVSGKKAQLCQEEVTYLGFKIHKGSRSLSNSRTQAILQIPVPKTKRQVREFLGKIGYCRLFIPGFAELAQPLYAATRPGNDPLVWGEKEEEAFQSLKLALTQPPALALPSLDKPFQLFVEETSGAAKGVLTQALGPWKRPVAYLSKRLDPVAAGWPRCLRAIAAAALLTREASKLTFGQDIEITSSHNLESLLRSPPDKWLTNARITQYQVLLLDPPRVRFKQTAALNPATLLPETDDTLPIHHCLDTLDSLTSTRPDLTDQPLAQAEATLFTDGSSYIRDGKRYAGAAVVTLDSVIWAEPLPIGTSAQKAELIALTKALEWSKDKSVNIYTDSRYAFATLHVHGMIYRERGWLTAGGKAIKNAPEILALLTAVWLPKRVAVMHCKGHQKDDAPTSTGNRRADEVAREVAIRPLSTQATISAEAAAKEAAAKEAAAKEAAAKALEAEAAAKEAAAKEAAAKEAAAKAMASNFTQFVLVDNGGTGDVTVAPSNFANGIAEWISSNSRSQAYKVTCSVRQSSAQNRKYTIKVEVPKGAWRSYLNMELTIPIFATNSDCELIVKAMQGLLKDGNPIPSAIAANSGIYGGSGGSMASNFTQFVLVDNGGTGDVTVAPSNFANGIAEWISSNSRSQAYKVTCSVRQSSAQNRKYTIKVEVPKGAWRSYLNMELTIPIFATNSDCELIVKAMQGLLKDGNPIPSAIAANSGIYGGGSGGGSGGGSGGGSMASNFTQFVLVDNGGTGDVTVAPSNFANGIAEWISSNSRSQAYKVTCSVRQSSAQNRKYTIKVEVPKGAWRSYLNMELTIPIFATNSDCELIVKAMQGLLKDGNPIPSAIAANSGIYGGSGGSMASNFTQFVLVDNGGTGDVTVAPSNFANGIAEWISSNSRSQAYKVTCSVRQSSAQNRKYTIKVEVPKGAWRSYLNMELTIPIFATNSDCELIVKAMQGLLKDGNPIPSAIAANSGIYSGGSSGGSSGSETPGTSESATPESSGGSSGGSSDKKYSIGLDIGTNSVGWAVITDEYKVPSKKFKVLGNTDRHSIKKNLIGALLFDSGETAEATRLKRTARRRYTRRKNRICYLQEIFSNEMAKVDDSFFHRLEESFLVEEDKKHERHPIFGNIVDEVAYHEKYPTIYHLRKKLVDSTDKADLRLIYLALAHMIKFRGHFLIEGDLNPDNSDVDKLFIQLVQTYNQLFEENPINASGVDAKAILSARLSKSRRLENLIAQLPGEKKNGLFGNLIALSLGLTPNFKSNFDLAEDAKLQLSKDTYDDDLDNLLAQIGDQYADLFLAAKNLSDAILLSDILRVNTEITKAPLSASMIKRYDEHHQDLTLLKALVRQQLPEKYKEIFFDQSKNGYAGYIDGGASQEEFYKFIKPILEKMDGTEELLVKLNREDLLRKQRTFDNGSIPHQIHLGELHAILRRQEDFYPFLKDNREKIEKILTFRIPYYVGPLARGNSRFAWMTRKSEETITPWNFEEVVDKGASAQSFIERMTNFDKNLPNEKVLPKHSLLYEYFTVYNELTKVKYVTEGMRKPAFLSGEQKKAIVDLLFKTNRKVTVKQLKEDYFKKIECFDSVEISGVEDRFNASLGTYHDLLKIIKDKDFLDNEENEDILEDIVLTLTLFEDREMIEERLKTYAHLFDDKVMKQLKRRRYTGWGRLSRKLINGIRDKQSGKTILDFLKSDGFANRNFMQLIHDDSLTFKEDIQKAQVSGQGDSLHEHIANLAGSPAIKKGILQTVKVVDELVKVMGRHKPENIVIEMARENQTTQKGQKNSRERMKRIEEGIKELGSQILKEHPVENTQLQNEKLYLYYLQNGRDMYVDQELDINRLSDYDVDHIVPQSFLKDDSIDNKVLTRSDKARGKSDNVPSEEVVKKMKNYWRQLLNAKLITQRKFDNLTKAERGGLSELDKAGFIKRQLVETRQITKHVAQILDSRMNTKYDENDKLIREVKVITLKSKLVSDFRKDFQFYKVREINNYHHAHDAYLNAVVGTALIKKYPKLESEFVYGDYKVYDVRKMIAKSEQEIGKATAKYFFYSNIMNFFKTEITLANGEIRKRPLIETNGETGEIVWDKGRDFATVRKVLSMPQVNIVKKTEVQTGGFSKESILPKRNSDKLIARKKDWDPKKYGGFDSPTVAYSVLVVAKVEKGKSKKLKSVKELLGITIMERSSFEKNPIDFLEAKGYKEVKKDLIIKLPKYSLFELENGRKRMLASAGELQKGNELALPSKYVNFLYLASHYEKLKGSPEDNEQKQLFVEQHKHYLDEIIEQISEFSKRVILADANLDKVLSAYNKHRDKPIREQAENIIHLFTLTNLGAPAAFKYFDTTIDRKRYTSTKEVLDATLIHQSITGLYETRIDLSQLGGDKRTADGSEFESPKKKAKVE

SEQ ID NO: 16158 - protein, 2631 aa, synthetic construct
MPAAKRVKLDGGTAPLEEEYRLFLEAPIQNVTLLEQWKREIPKVWAEINPPGLASTQAPIHVQLLSTALPVRVRQYPITLEAKRSLRETIRKFRAAGILRPVHSPWNTPLLPVRKSGTSEYRMVQDLREVNKRVETIHPTVPNPYTLLSLLPPDRIWYSVLDLKDAFFCIPLAPESQLIFAFEWADAEEGESGQLTWTRLPQGFKNSPTLFNEALNRDLQGFRLDHPSVSLLQYVDDLLIAADTQAACLSATRDLLMTLAELGYRVSGKKAQLCQEEVTYLGFKIHKGSRSLSNSRTQAILQIPVPKTKRQVREFLGKIGYCRLFIPGFAELAQPLYAATRPGNDPLVWGEKEEEAFQSLKLALTQPPALALPSLDKPFQLFVEETSGAAKGVLTQALGPWKRPVAYLSKRLDPVAAGWPRCLRAIAAAALLTREASKLTFGQDIEITSSHNLESLLRSPPDKWLTNARITQYQVLLLDPPRVRFKQTAALNPATLLPETDDTLPIHHCLDTLDSLTSTRPDLTDQPLAQAEATLFTDGSSYIRDGKRYAGAAVVTLDSVIWAEPLPIGTSAQKAELIALTKALEWSKDKSVNIYTDSRYAFATLHVHGMIYRERGWLTAGGKAIKNAPEILALLTAVWLPKRVAVMHCKGHQKDDAPTSTGNRRADEVAREVAIRPLSTQATISAEAAAKEAAAKEAAAKEAAAKALEAEAAAKEAAAKEAAAKEAAAKAMASNFTQFVLVDNGGTGDVTVAPSNFANGIAEWISSNSRSQAYKVTCSVRQSSAQNRKYTIKVEVPKGAWRSYLNMELTIPIFATNSDCELIVKAMQGLLKDGNPIPSAIAANSGIYGGSGGSMASNFTQFVLVDNGGTGDVTVAPSNFANGIAEWISSNSRSQAYKVTCSVRQSSAQNRKYTIKVEVPKGAWRSYLNMELTIPIFATNSDCELIVKAMQGLLKDGNPIPSAIAANSGIYGGGSGGGSGGGSGGGSMASNFTQFVLVDNGGTGDVTVAPSNFANGIAEWISSNSRSQAYKVTCSVRQSSAQNRKYTIKVEVPKGAWRSYLNMELTIPIFATNSDCELIVKAMQGLLKDGNPIPSAIAANSGIYGGSGGSMASNFTQFVLVDNGGTGDVTVAPSNFANGIAEWISSNSRSQAYKVTCSVRQSSAQNRKYTIKVEVPKGAWRSYLNMELTIPIFATNSDCELIVKAMQGLLKDGNPIPSAIAANSGIYGSSGSSGSSGSSGSSGSSDKKYSIGLDIGTNSVGWAVITDEYKVPSKKFKVLGNTDRHSIKKNLIGALLFDSGETAEATRLKRTARRRYTRRKNRICYLQEIFSNEMAKVDDSFFHRLEESFLVEEDKKHERHPIFGNIVDEVAYHEKYPTIYHLRKKLVDSTDKADLRLIYLALAHMIKFRGHFLIEGDLNPDNSDVDKLFIQLVQTYNQLFEENPINASGVDAKAILSARLSKSRRLENLIAQLPGEKKNGLFGNLIALSLGLTPNFKSNFDLAEDAKLQLSKDTYDDDLDNLLAQIGDQYADLFLAAKNLSDAILLSDILRVNTEITKAPLSASMIKRYDEHHQDLTLLKALVRQQLPEKYKEIFFDQSKNGYAGYIDGGASQEEFYKFIKPILEKMDGTEELLVKLNREDLLRKQRTFDNGSIPHQIHLGELHAILRRQEDFYPFLKDNREKIEKILTFRIPYYVGPLARGNSRFAWMTRKSEETITPWNFEEVVDKGASAQSFIERMTNFDKNLPNEKVLPKHSLLYEYFTVYNELTKVKYVTEGMRKPAFLSGEQKKAIVDLLFKTNRKVTVKQLKEDYFKKIECFDSVEISGVEDRFNASLGTYHDLLKIIKDKDFLDNEENEDILEDIVLTLTLFEDREMIEERLKTYAHLFDDKVMKQLKRRRYTGWGRLSRKLINGIRDKQSGKTILDFLKSDGFANRNFMQLIHDDSLTFKEDIQKAQVSGQGDSLHEHIANLAGSPAIKKGILQTVKVVDELVKVMGRHKPENIVIEMARENQTTQKGQKNSRERMKRIEEGIKELGSQILKEHPVENTQLQNEKLYLYYLQNGRDMYVDQELDINRLSDYDVDHIVPQSFLKDDSIDNKVLTRSDKARGKSDNVPSEEVVKKMKNYWRQLLNAKLITQRKFDNLTKAERGGLSELDKAGFIKRQLVETRQITKHVAQILDSRMNTKYDENDKLIREVKVITLKSKLVSDFRKDFQFYKVREINNYHHAHDAYLNAVVGTALIKKYPKLESEFVYGDYKVYDVRKMIAKSEQEIGKATAKYFFYSNIMNFFKTEITLANGEIRKRPLIETNGETGEIVWDKGRDFATVRKVLSMPQVNIVKKTEVQTGGFSKESILPKRNSDKLIARKKDWDPKKYGGFDSPTVAYSVLVVAKVEKGKSKKLKSVKELLGITIMERSSFEKNPIDFLEAKGYKEVKKDLIIKLPKYSLFELENGRKRMLASAGELQKGNELALPSKYVNFLYLASHYEKLKGSPEDNEQKQLFVEQHKHYLDEIIEQISEFSKRVILADANLDKVLSAYNKHRDKPIREQAENIIHLFTLTNLGAPAAFKYFDTTIDRKRYTSTKEVLDATLIHQSITGLYETRIDLSQLGGDKRTADGSEFESPKKKAKVE

SEQ ID NO: 16159 - protein, 2624 aa, synthetic construct
MPAAKRVKLDGGTAPLEEEYRLFLEAPIQNVTLLEQWKREIPKVWAEINPPGLASTQAPIHVQLLSTALPVRVRQYPITLEAKRSLRETIRKFRAAGILRPVHSPWNTPLLPVRKSGTSEYRMVQDLREVNKRVETIHPTVPNPYTLLSLLPPDRIWYSVLDLKDAFFCIPLAPESQLIFAFEWADAEEGESGQLTWTRLPQGFKNSPTLFNEALNRDLQGFRLDHPSVSLLQYVDDLLIAADTQAACLSATRDLLMTLAELGYRVSGKKAQLCQEEVTYLGFKIHKGSRSLSNSRTQAILQIPVPKTKRQVREFLGKIGYCRLFIPGFAELAQPLYAATRPGNDPLVWGEKEEEAFQSLKLALTQPPALALPSLDKPFQLFVEETSGAAKGVLTQALGPWKRPVAYLSKRLDPVAAGWPRCLRAIAAAALLTREASKLTFGQDIEITSSHNLESLLRSPPDKWLTNARITQYQVLLLDPPRVRFKQTAALNPATLLPETDDTLPIHHCLDTLDSLTSTRPDLTDQPLAQAEATLFTDGSSYIRDGKRYAGAAVVTLDSVIWAEPLPIGTSAQKAELIALTKALEWSKDKSVNIYTDSRYAFATLHVHGMIYRERGWLTAGGKAIKNAPEILALLTAVWLPKRVAVMHCKGHQKDDAPTSTGNRRADEVAREVAIRPLSTQATISAEAAAKEAAAKEAAAKEAAAKALEAEAAAKEAAAKEAAAKEAAAKAMASNFTQFVLVDNGGTGDVTVAPSNFANGIAEWISSNSRSQAYKVTCSVRQSSAQNRKYTIKVEVPKGAWRSYLNMELTIPIFATNSDCELIVKAMQGLLKDGNPIPSAIAANSGIYGGSGGSMASNFTQFVLVDNGGTGDVTVAPSNFANGIAEWISSNSRSQAYKVTCSVRQSSAQNRKYTIKVEVPKGAWRSYLNMELTIPIFATNSDCELIVKAMQGLLKDGNPIPSAIAANSGIYGGGSGGGSGGGSGGGSMASNFTQFVLVDNGGTGDVTVAPSNFANGIAEWISSNSRSQAYKVTCSVRQSSAQNRKYTIKVEVPKGAWRSYLNMELTIPIFATNSDCELIVKAMQGLLKDGNPIPSAIAANSGIYGGSGGSMASNFTQFVLVDNGGTGDVTVAPSNFANGIAEWISSNSRSQAYKVTCSVRQSSAQNRKYTIKVEVPKGAWRSYLNMELTIPIFATNSDCELIVKAMQGLLKDGNPIPSAIAANSGIYGSSGGGEAAAKDKKYSIGLDIGTNSVGWAVITDEYKVPSKKFKVLGNTDRHSIKKNLIGALLFDSGETAEATRLKRTARRRYTRRKNRICYLQEIFSNEMAKVDDSFFHRLEESFLVEEDKKHERHPIFGNIVDEVAYHEKYPTIYHLRKKLVDSTDKADLRLIYLALAHMIKFRGHFLIEGDLNPDNSDVDKLFIQLVQTYNQLFEENPINASGVDAKAILSARLSKSRRLENLIAQLPGEKKNGLFGNLIALSLGLTPNFKSNFDLAEDAKLQLSKDTYDDDLDNLLAQIGDQYADLFLAAKNLSDAILLSDILRVNTEITKAPLSASMIKRYDEHHQDLTLLKALVRQQLPEKYKEIFFDQSKNGYAGYIDGGASQEEFYKFIKPILEKMDGTEELLVKLNREDLLRKQRTFDNGSIPHQIHLGELHAILRRQEDFYPFLKDNREKIEKILTFRIPYYVGPLARGNSRFAWMTRKSEETITPWNFEEVVDKGASAQSFIERMTNFDKNLPNEKVLPKHSLLYEYFTVYNELTKVKYVTEGMRKPAFLSGEQKKAIVDLLFKTNRKVTVKQLKEDYFKKIECFDSVEISGVEDRFNASLGTYHDLLKIIKDKDFLDNEENEDILEDIVLTLTLFEDREMIEERLKTYAHLFDDKVMKQLKRRRYTGWGRLSRKLINGIRDKQSGKTILDFLKSDGFANRNFMQLIHDDSLTFKEDIQKAQVSGQGDSLHEHIANLAGSPAIKKGILQTVKVVDELVKVMGRHKPENIVIEMARENQTTQKGQKNSRERMKRIEEGIKELGSQILKEHPVENTQLQNEKLYLYYLQNGRDMYVDQELDINRLSDYDVDHIVPQSFLKDDSIDNKVLTRSDKARGKSDNVPSEEVVKKMKNYWRQLLNAKLITQRKFDNLTKAERGGLSELDKAGFIKRQLVETRQITKHVAQILDSRMNTKYDENDKLIREVKVITLKSKLVSDFRKDFQFYKVREINNYHHAHDAYLNAVVGTALIKKYPKLESEFVYGDYKVYDVRKMIAKSEQEIGKATAKYFFYSNIMNFFKTEITLANGEIRKRPLIETNGETGEIVWDKGRDFATVRKVLSMPQVNIVKKTEVQTGGFSKESILPKRNSDKLIARKKDWDPKKYGGFDSPTVAYSVLVVAKVEKGKSKKLKSVKELLGITIMERSSFEKNPIDFLEAKGYKEVKKDLIIKLPKYSLFELENGRKRMLASAGELQKGNELALPSKYVNFLYLASHYEKLKGSPEDNEQKQLFVEQHKHYLDEIIEQISEFSKRVILADANLDKVLSAYNKHRDKPIREQAENIIHLFTLTNLGAPAAFKYFDTTIDRKRYTSTKEVLDATLIHQSITGLYETRIDLSQLGGDKRTADGSEFESPKKKAKVE

SEQ ID NO: 16160 - protein, 2267 aa, synthetic construct
MPAAKRVKLDGGTAPLEEEYRLFLEAPIQNVTLLEQWKREIPKVWAEINPPGLASTQAPIHVQLLSTALPVRVRQYPITLEAKRSLRETIRKFRAAGILRPVHSPWNTPLLPVRKSGTSEYRMVQDLREVNKRVETIHPTVPNPYTLLSLLPPDRIWYSVLDLKDAFFCIPLAPESQLIFAFEWADAEEGESGQLTWTRLPQGFKNSPTLFNEALNRDLQGFRLDHPSVSLLQYVDDLLIAADTQAACLSATRDLLMTLAELGYRVSGKKAQLCQEEVTYLGFKIHKGSRSLSNSRTQAILQIPVPKTKRQVREFLGKIGYCRLFIPGFAELAQPLYAATRPGNDPLVWGEKEEEAFQSLKLALTQPPALALPSLDKPFQLFVEETSGAAKGVLTQALGPWKRPVAYLSKRLDPVAAGWPRCLRAIAAAALLTREASKLTFGQDIEITSSHNLESLLRSPPDKWLTNARITQYQVLLLDPPRVRFKQTAALNPATLLPETDDTLPIHHCLDTLDSLTSTRPDLTDQPLAQAEATLFTDGSSYIRDGKRYAGAAVVTLDSVIWAEPLPIGTSAQKAELIALTKALEWSKDKSVNIYTDSRYAFATLHVHGMIYRERGWLTAGGKAIKNAPEILALLTAVWLPKRVAVMHCKGHQKDDAPTSTGNRRADEVAREVAIRPLSTQATISSGGSSGGSSGSETPGTSESATPESSGGSSGGSSMASNFTQFVLVDNGGTGDVTVAPSNFANGIAEWISSNSRSQAYKVTCSVRQSSAQNRKYTIKVEVPKGAWRSYLNMELTIPIFATNSDCELIVKAMQGLLKDGNPIPSAIAANSGIYAEAAAKEAAAKEAAAKEAAAKALEAEAAAKEAAAKEAAAKEAAAKADKKYSIGLDIGTNSVGWAVITDEYKVPSKKFKVLGNTDRHSIKKNLIGALLFDSGETAEATRLKRTARRRYTRRKNRICYLQEIFSNEMAKVDDSFFHRLEESFLVEEDKKHERHPIFGNIVDEVAYHEKYPTIYHLRKKLVDSTDKADLRLIYLALAHMIKFRGHFLIEGDLNPDNSDVDKLFIQLVQTYNQLFEENPINASGVDAKAILSARLSKSRRLENLIAQLPGEKKNGLFGNLIALSLGLTPNFKSNFDLAEDAKLQLSKDTYDDDLDNLLAQIGDQYADLFLAAKNLSDAILLSDILRVNTEITKAPLSASMIKRYDEHHQDLTLLKALVRQQLPEKYKEIFFDQSKNGYAGYIDGGASQEEFYKFIKPILEKMDGTEELLVKLNREDLLRKQRTFDNGSIPHQIHLGELHAILRRQEDFYPFLKDNREKIEKILTFRIPYYVGPLARGNSRFAWMTRKSEETITPWNFEEVVDKGASAQSFIERMTNFDKNLPNEKVLPKHSLLYEYFTVYNELTKVKYVTEGMRKPAFLSGEQKKAIVDLLFKTNRKVTVKQLKEDYFKKIECFDSVEISGVEDRFNASLGTYHDLLKIIKDKDFLDNEENEDILEDIVLTLTLFEDREMIEERLKTYAHLFDDKVMKQLKRRRYTGWGRLSRKLINGIRDKQSGKTILDFLKSDGFANRNFMQLIHDDSLTFKEDIQKAQVSGQGDSLHEHIANLAGSPAIKKGILQTVKVVDELVKVMGRHKPENIVIEMARENQTTQKGQKNSRERMKRIEEGIKELGSQILKEHPVENTQLQNEKLYLYYLQNGRDMYVDQELDINRLSDYDVDHIVPQSFLKDDSIDNKVLTRSDKARGKSDNVPSEEVVKKMKNYWRQLLNAKLITQRKFDNLTKAERGGLSELDKAGFIKRQLVETRQITKHVAQILDSRMNTKYDENDKLIREVKVITLKSKLVSDFRKDFQFYKVREINNYHHAHDAYLNAVVGTALIKKYPKLESEFVYGDYKVYDVRKMIAKSEQEIGKATAKYFFYSNIMNFFKTEITLANGEIRKRPLIETNGETGEIVWDKGRDFATVRKVLSMPQVNIVKKTEVQTGGFSKESILPKRNSDKLIARKKDWDPKKYGGFDSPTVAYSVLVVAKVEKGKSKKLKSVKELLGITIMERSSFEKNPIDFLEAKGYKEVKKDLIIKLPKYSLFELENGRKRMLASAGELQKGNELALPSKYVNFLYLASHYEKLKGSPEDNEQKQLFVEQHKHYLDEIIEQISEFSKRVILADANLDKVLSAYNKHRDKPIREQAENIIHLFTLTNLGAPAAFKYFDTTIDRKRYTSTKEVLDATLIHQSITGLYETRIDLSQLGGDKRTADGSEFESPKKKAKVE

SEQ ID NO: 16161 - protein, 2254 aa, synthetic construct
MPAAKRVKLDGGTAPLEEEYRLFLEAPIQNVTLLEQWKREIPKVWAEINPPGLASTQAPIHVQLLSTALPVRVRQYPITLEAKRSLRETIRKFRAAGILRPVHSPWNTPLLPVRKSGTSEYRMVQDLREVNKRVETIHPTVPNPYTLLSLLPPDRIWYSVLDLKDAFFCIPLAPESQLIFAFEWADAEEGESGQLTWTRLPQGFKNSPTLFNEALNRDLQGFRLDHPSVSLLQYVDDLLIAADTQAACLSATRDLLMTLAELGYRVSGKKAQLCQEEVTYLGFKIHKGSRSLSNSRTQAILQIPVPKTKRQVREFLGKIGYCRLFIPGFAELAQPLYAATRPGNDPLVWGEKEEEAFQSLKLALTQPPALALPSLDKPFQLFVEETSGAAKGVLTQALGPWKRPVAYLSKRLDPVAAGWPRCLRAIAAAALLTREASKLTFGQDIEITSSHNLESLLRSPPDKWLTNARITQYQVLLLDPPRVRFKQTAALNPATLLPETDDTLPIHHCLDTLDSLTSTRPDLTDQPLAQAEATLFTDGSSYIRDGKRYAGAAVVTLDSVIWAEPLPIGTSAQKAELIALTKALEWSKDKSVNIYTDSRYAFATLHVHGMIYRERGWLTAGGKAIKNAPEILALLTAVWLPKRVAVMHCKGHQKDDAPTSTGNRRADEVAREVAIRPLSTQATISSGGSSGGSSGSETPGTSESATPESSGGSSGGSSMASNFTQFVLVDNGGTGDVTVAPSNFANGIAEWISSNSRSQAYKVTCSVRQSSAQNRKYTIKVEVPKGAWRSYLNMELTIPIFATNSDCELIVKAMQGLLKDGNPIPSAIAANSGIYSGGSSGGSSGSETPGTSESATPESSGGSSGGSSDKKYSIGLDIGTNSVGWAVITDEYKVPSKKFKVLGNTDRHSIKKNLIGALLFDSGETAEATRLKRTARRRYTRRKNRICYLQEIFSNEMAKVDDSFFHRLEESFLVEEDKKHERHPIFGNIVDEVAYHEKYPTIYHLRKKLVDSTDKADLRLIYLALAHMIKFRGHFLIEGDLNPDNSDVDKLFIQLVQTYNQLFEENPINASGVDAKAILSARLSKSRRLENLIAQLPGEKKNGLFGNLIALSLGLTPNFKSNFDLAEDAKLQLSKDTYDDDLDNLLAQIGDQYADLFLAAKNLSDAILLSDILRVNTEITKAPLSASMIKRYDEHHQDLTLLKALVRQQLPEKYKEIFFDQSKNGYAGYIDGGASQEEFYKFIKPILEKMDGTEELLVKLNREDLLRKQRTFDNGSIPHQIHLGELHAILRRQEDFYPFLKDNREKIEKILTFRIPYYVGPLARGNSRFAWMTRKSEETITPWNFEEVVDKGASAQSFIERMTNFDKNLPNEKVLPKHSLLYEYFTVYNELTKVKYVTEGMRKPAFLSGEQKKAIVDLLFKTNRKVTVKQLKEDYFKKIECFDSVEISGVEDRFNASLGTYHDLLKIIKDKDFLDNEENEDILEDIVLTLTLFEDREMIEERLKTYAHLFDDKVMKQLKRRRYTGWGRLSRKLINGIRDKQSGKTILDFLKSDGFANRNFMQLIHDDSLTFKEDIQKAQVSGQGDSLHEHIANLAGSPAIKKGILQTVKVVDELVKVMGRHKPENIVIEMARENQTTQKGQKNSRERMKRIEEGIKELGSQILKEHPVENTQLQNEKLYLYYLQNGRDMYVDQELDINRLSDYDVDHIVPQSFLKDDSIDNKVLTRSDKARGKSDNVPSEEVVKKMKNYWRQLLNAKLITQRKFDNLTKAERGGLSELDKAGFIKRQLVETRQITKHVAQILDSRMNTKYDENDKLIREVKVITLKSKLVSDFRKDFQFYKVREINNYHHAHDAYLNAVVGTALIKKYPKLESEFVYGDYKVYDVRKMIAKSEQEIGKATAKYFFYSNIMNFFKTEITLANGEIRKRPLIETNGETGEIVWDKGRDFATVRKVLSMPQVNIVKKTEVQTGGFSKESILPKRNSDKLIARKKDWDPKKYGGFDSPTVAYSVLVVAKVEKGKSKKLKSVKELLGITIMERSSFEKNPIDFLEAKGYKEVKKDLIIKLPKYSLFELENGRKRMLASAGELQKGNELALPSKYVNFLYLASHYEKLKGSPEDNEQKQLFVEQHKHYLDEIIEQISEFSKRVILADANLDKVLSAYNKHRDKPIREQAENIIHLFTLTNLGAPAAFKYFDTTIDRKRYTSTKEVLDATLIHQSITGLYETRIDLSQLGGDKRTADGSEFESPKKKAKVE

SEQ ID NO: 16162 - protein, 2239 aa, synthetic construct
MPAAKRVKLDGGTAPLEEEYRLFLEAPIQNVTLLEQWKREIPKVWAEINPPGLASTQAPIHVQLLSTALPVRVRQYPITLEAKRSLRETIRKFRAAGILRPVHSPWNTPLLPVRKSGTSEYRMVQDLREVNKRVETIHPTVPNPYTLLSLLPPDRIWYSVLDLKDAFFCIPLAPESQLIFAFEWADAEEGESGQLTWTRLPQGFKNSPTLFNEALNRDLQGFRLDHPSVSLLQYVDDLLIAADTQAACLSATRDLLMTLAELGYRVSGKKAQLCQEEVTYLGFKIHKGSRSLSNSRTQAILQIPVPKTKRQVREFLGKIGYCRLFIPGFAELAQPLYAATRPGNDPLVWGEKEEEAFQSLKLALTQPPALALPSLDKPFQLFVEETSGAAKGVLTQALGPWKRPVAYLSKRLDPVAAGWPRCLRAIAAAALLTREASKLTFGQDIEITSSHNLESLLRSPPDKWLTNARITQYQVLLLDPPRVRFKQTAALNPATLLPETDDTLPIHHCLDTLDSLTSTRPDLTDQPLAQAEATLFTDGSSYIRDGKRYAGAAVVTLDSVIWAEPLPIGTSAQKAELIALTKALEWSKDKSVNIYTDSRYAFATLHVHGMIYRERGWLTAGGKAIKNAPEILALLTAVWLPKRVAVMHCKGHQKDDAPTSTGNRRADEVAREVAIRPLSTQATISSGGSSGGSSGSETPGTSESATPESSGGSSGGSSMASNFTQFVLVDNGGTGDVTVAPSNFANGIAEWISSNSRSQAYKVTCSVRQSSAQNRKYTIKVEVPKGAWRSYLNMELTIPIFATNSDCELIVKAMQGLLKDGNPIPSAIAANSGIYGSSGSSGSSGSSGSSGSSDKKYSIGLDIGTNSVGWAVITDEYKVPSKKFKVLGNTDRHSIKKNLIGALLFDSGETAEATRLKRTARRRYTRRKNRICYLQEIFSNEMAKVDDSFFHRLEESFLVEEDKKHERHPIFGNIVDEVAYHEKYPTIYHLRKKLVDSTDKADLRLIYLALAHMIKFRGHFLIEGDLNPDNSDVDKLFIQLVQTYNQLFEENPINASGVDAKAILSARLSKSRRLENLIAQLPGEKKNGLFGNLIALSLGLTPNFKSNFDLAEDAKLQLSKDTYDDDLDNLLAQIGDQYADLFLAAKNLSDAILLSDILRVNTEITKAPLSASMIKRYDEHHQDLTLLKALVRQQLPEKYKEIFFDQSKNGYAGYIDGGASQEEFYKFIKPILEKMDGTEELLVKLNREDLLRKQRTFDNGSIPHQIHLGELHAILRRQEDFYPFLKDNREKIEKILTFRIPYYVGPLARGNSRFAWMTRKSEETITPWNFEEVVDKGASAQSFIERMTNFDKNLPNEKVLPKHSLLYEYFTVYNELTKVKYVTEGMRKPAFLSGEQKKAIVDLLFKTNRKVTVKQLKEDYFKKIECFDSVEISGVEDRFNASLGTYHDLLKIIKDKDFLDNEENEDILEDIVLTLTLFEDREMIEERLKTYAHLFDDKVMKQLKRRRYTGWGRLSRKLINGIRDKQSGKTILDFLKSDGFANRNFMQLIHDDSLTFKEDIQKAQVSGQGDSLHEHIANLAGSPAIKKGILQTVKVVDELVKVMGRHKPENIVIEMARENQTTQKGQKNSRERMKRIEEGIKELGSQILKEHPVENTQLQNEKLYLYYLQNGRDMYVDQELDINRLSDYDVDHIVPQSFLKDDSIDNKVLTRSDKARGKSDNVPSEEVVKKMKNYWRQLLNAKLITQRKFDNLTKAERGGLSELDKAGFIKRQLVETRQITKHVAQILDSRMNTKYDENDKLIREVKVITLKSKLVSDFRKDFQFYKVREINNYHHAHDAYLNAVVGTALIKKYPKLESEFVYGDYKVYDVRKMIAKSEQEIGKATAKYFFYSNIMNFFKTEITLANGEIRKRPLIETNGETGEIVWDKGRDFATVRKVLSMPQVNIVKKTEVQTGGFSKESILPKRNSDKLIARKKDWDPKKYGGFDSPTVAYSVLVVAKVEKGKSKKLKSVKELLGITIMERSSFEKNPIDFLEAKGYKEVKKDLIIKLPKYSLFELENGRKRMLASAGELQKGNELALPSKYVNFLYLASHYEKLKGSPEDNEQKQLFVEQHKHYLDEIIEQISEFSKRVILADANLDKVLSAYNKHRDKPIREQAENIIHLFTLTNLGAPAAFKYFDTTIDRKRYTSTKEVLDATLIHQSITGLYETRIDLSQLGGDKRTADGSEFESPKKKAKVE

SEQ ID NO: 16163 - protein, 2232 aa, synthetic construct
MPAAKRVKLDGGTAPLEEEYRLFLEAPIQNVTLLEQWKREIPKVWAEINPPGLASTQAPIHVQLLSTALPVRVRQYPITLEAKRSLRETIRKFRAAGILRPVHSPWNTPLLPVRKSGTSEYRMVQDLREVNKRVETIHPTVPNPYTLLSLLPPDRIWYSVLDLKDAFFCIPLAPESQLIFAFEWADAEEGESGQLTWTRLPQGFKNSPTLFNEALNRDLQGFRLDHPSVSLLQYVDDLLIAADTQAACLSATRDLLMTLAELGYRVSGKKAQLCQEEVTYLGFKIHKGSRSLSNSRTQAILQIPVPKTKRQVREFLGKIGYCRLFIPGFAELAQPLYAATRPGNDPLVWGEKEEEAFQSLKLALTQPPALALPSLDKPFQLFVEETSGAAKGVLTQALGPWKRPVAYLSKRLDPVAAGWPRCLRAIAAAALLTREASKLTFGQDIEITSSHNLESLLRSPPDKWLTNARITQYQVLLLDPPRVRFKQTAALNPATLLPETDDTLPIHHCLDTLDSLTSTRPDLTDQPLAQAEATLFTDGSSYIRDGKRYAGAAVVTLDSVIWAEPLPIGTSAQKAELIALTKALEWSKDKSVNIYTDSRYAFATLHVHGMIYRERGWLTAGGKAIKNAPEILALLTAVWLPKRVAVMHCKGHQKDDAPTSTGNRRADEVAREVAIRPLSTQATISSGGSSGGSSGSETPGTSESATPESSGGSSGGSSMASNFTQFVLVDNGGTGDVTVAPSNFANGIAEWISSNSRSQAYKVTCSVRQSSAQNRKYTIKVEVPKGAWRSYLNMELTIPIFATNSDCELIVKAMQGLLKDGNPIPSAIAANSGIYGSSGGGEAAAKDKKYSIGLDIGTNSVGWAVITDEYKVPSKKFKVLGNTDRHSIKKNLIGALLFDSGETAEATRLKRTARRRYTRRKNRICYLQEIFSNEMAKVDDSFFHRLEESFLVEEDKKHERHPIFGNIVDEVAYHEKYPTIYHLRKKLVDSTDKADLRLIYLALAHMIKFRGHFLIEGDLNPDNSDVDKLFIQLVQTYNQLFEENPINASGVDAKAILSARLSKSRRLENLIAQLPGEKKNGLFGNLIALSLGLTPNFKSNFDLAEDAKLQLSKDTYDDDLDNLLAQIGDQYADLFLAAKNLSDAILLSDILRVNTEITKAPLSASMIKRYDEHHQDLTLLKALVRQQLPEKYKEIFFDQSKNGYAGYIDGGASQEEFYKFIKPILEKMDGTEELLVKLNREDLLRKQRTFDNGSIPHQIHLGELHAILRRQEDFYPFLKDNREKIEKILTFRIPYYVGPLARGNSRFAWMTRKSEETITPWNFEEVVDKGASAQSFIERMTNFDKNLPNEKVLPKHSLLYEYFTVYNELTKVKYVTEGMRKPAFLSGEQKKAIVDLLFKTNRKVTVKQLKEDYFKKIECFDSVEISGVEDRFNASLGTYHDLLKIIKDKDFLDNEENEDILEDIVLTLTLFEDREMIEERLKTYAHLFDDKVMKQLKRRRYTGWGRLSRKLINGIRDKQSGKTILDFLKSDGFANRNFMQLIHDDSLTFKEDIQKAQVSGQGDSLHEHIANLAGSPAIKKGILQTVKVVDELVKVMGRHKPENIVIEMARENQTTQKGQKNSRERMKRIEEGIKELGSQILKEHPVENTQLQNEKLYLYYLQNGRDMYVDQELDINRLSDYDVDHIVPQSFLKDDSIDNKVLTRSDKARGKSDNVPSEEVVKKMKNYWRQLLNAKLITQRKFDNLTKAERGGLSELDKAGFIKRQLVETRQITKHVAQILDSRMNTKYDENDKLIREVKVITLKSKLVSDFRKDFQFYKVREINNYHHAHDAYLNAVVGTALIKKYPKLESEFVYGDYKVYDVRKMIAKSEQEIGKATAKYFFYSNIMNFFKTEITLANGEIRKRPLIETNGETGEIVWDKGRDFATVRKVLSMPQVNIVKKTEVQTGGFSKESILPKRNSDKLIARKKDWDPKKYGGFDSPTVAYSVLVVAKVEKGKSKKLKSVKELLGITIMERSSFEKNPIDFLEAKGYKEVKKDLIIKLPKYSLFELENGRKRMLASAGELQKGNELALPSKYVNFLYLASHYEKLKGSPEDNEQKQLFVEQHKHYLDEIIEQISEFSKRVILADANLDKVLSAYNKHRDKPIREQAENIIHLFTLTNLGAPAAFKYFDTTIDRKRYTSTKEVLDATLIHQSITGLYETRIDLSQLGGDKRTADGSEFESPKKKAKVE

SEQ ID NO: 16164 - protein, 2390 aa, synthetic construct
MPAAKRVKLDGGTAPLEEEYRLFLEAPIQNVTLLEQWKREIPKVWAEINPPGLASTQAPIHVQLLSTALPVRVRQYPITLEAKRSLRETIRKFRAAGILRPVHSPWNTPLLPVRKSGTSEYRMVQDLREVNKRVETIHPTVPNPYTLLSLLPPDRIWYSVLDLKDAFFCIPLAPESQLIFAFEWADAEEGESGQLTWTRLPQGFKNSPTLFNEALNRDLQGFRLDHPSVSLLQYVDDLLIAADTQAACLSATRDLLMTLAELGYRVSGKKAQLCQEEVTYLGFKIHKGSRSLSNSRTQAILQIPVPKTKRQVREFLGKIGYCRLFIPGFAELAQPLYAATRPGNDPLVWGEKEEEAFQSLKLALTQPPALALPSLDKPFQLFVEETSGAAKGVLTQALGPWKRPVAYLSKRLDPVAAGWPRCLRAIAAAALLTREASKLTFGQDIEITSSHNLESLLRSPPDKWLTNARITQYQVLLLDPPRVRFKQTAALNPATLLPETDDTLPIHHCLDTLDSLTSTRPDLTDQPLAQAEATLFTDGSSYIRDGKRYAGAAVVTLDSVIWAEPLPIGTSAQKAELIALTKALEWSKDKSVNIYTDSRYAFATLHVHGMIYRERGWLTAGGKAIKNAPEILALLTAVWLPKRVAVMHCKGHQKDDAPTSTGNRRADEVAREVAIRPLSTQATISSGGSSGGSSGSETPGTSESATPESSGGSSGGSSMASNFTQFVLVDNGGTGDVTVAPSNFANGIAEWISSNSRSQAYKVTCSVRQSSAQNRKYTIKVEVPKGAWRSYLNMELTIPIFATNSDCELIVKAMQGLLKDGNPIPSAIAANSGIYGGSGGSMASNFTQFVLVDNGGTGDVTVAPSNFANGIAEWISSNSRSQAYKVTCSVRQSSAQNRKYTIKVEVPKGAWRSYLNMELTIPIFATNSDCELIVKAMQGLLKDGNPIPSAIAANSGIYAEAAAKEAAAKEAAAKEAAAKALEAEAAAKEAAAKEAAAKEAAAKADKKYSIGLDIGTNSVGWAVITDEYKVPSKKFKVLGNTDRHSIKKNLIGALLFDSGETAEATRLKRTARRRYTRRKNRICYLQEIFSNEMAKVDDSFFHRLEESFLVEEDKKHERHPIFGNIVDEVAYHEKYPTIYHLRKKLVDSTDKADLRLIYLALAHMIKFRGHFLIEGDLNPDNSDVDKLFIQLVQTYNQLFEENPINASGVDAKAILSARLSKSRRLENLIAQLPGEKKNGLFGNLIALSLGLTPNFKSNFDLAEDAKLQLSKDTYDDDLDNLLAQIGDQYADLFLAAKNLSDAILLSDILRVNTEITKAPLSASMIKRYDEHHQDLTLLKALVRQQLPEKYKEIFFDQSKNGYAGYIDGGASQEEFYKFIKPILEKMDGTEELLVKLNREDLLRKQRTFDNGSIPHQIHLGELHAILRRQEDFYPFLKDNREKIEKILTFRIPYYVGPLARGNSRFAWMTRKSEETITPWNFEEVVDKGASAQSFIERMTNFDKNLPNEKVLPKHSLLYEYFTVYNELTKVKYVTEGMRKPAFLSGEQKKAIVDLLFKTNRKVTVKQLKEDYFKKIECFDSVEISGVEDRFNASLGTYHDLLKIIKDKDFLDNEENEDILEDIVLTLTLFEDREMIEERLKTYAHLFDDKVMKQLKRRRYTGWGRLSRKLINGIRDKQSGKTILDFLKSDGFANRNFMQLIHDDSLTFKEDIQKAQVSGQGDSLHEHIANLAGSPAIKKGILQTVKVVDELVKVMGRHKPENIVIEMARENQTTQKGQKNSRERMKRIEEGIKELGSQILKEHPVENTQLQNEKLYLYYLQNGRDMYVDQELDINRLSDYDVDHIVPQSFLKDDSIDNKVLTRSDKARGKSDNVPSEEVVKKMKNYWRQLLNAKLITQRKFDNLTKAERGGLSELDKAGFIKRQLVETRQITKHVAQILDSRMNTKYDENDKLIREVKVITLKSKLVSDFRKDFQFYKVREINNYHHAHDAYLNAVVGTALIKKYPKLESEFVYGDYKVYDVRKMIAKSEQEIGKATAKYFFYSNIMNFFKTEITLANGEIRKRPLIETNGETGEIVWDKGRDFATVRKVLSMPQVNIVKKTEVQTGGFSKESILPKRNSDKLIARKKDWDPKKYGGFDSPTVAYSVLVVAKVEKGKSKKLKSVKELLGITIMERSSFEKNPIDFLEAKGYKEVKKDLIIKLPKYSLFELENGRKRMLASAGELQKGNELALPSKYVNFLYLASHYEKLKGSPEDNEQKQLFVEQHKHYLDEIIEQISEFSKRVILADANLDKVLSAYNKHRDKPIREQAENIIHLFTLTNLGAPAAFKYFDTTIDRKRYTSTKEVLDATLIHQSITGLYETRIDLSQLGGDKRTADGSEFESPKKKAKVE

SEQ ID NO: 16165 - protein, 2377 aa, synthetic construct
MPAAKRVKLDGGTAPLEEEYRLFLEAPIQNVTLLEQWKREIPKVWAEINPPGLASTQAPIHVQLLSTALPVRVRQYPITLEAKRSLRETIRKFRAAGILRPVHSPWNTPLLPVRKSGTSEYRMVQDLREVNKRVETIHPTVPNPYTLLSLLPPDRIWYSVLDLKDAFFCIPLAPESQLIFAFEWADAEEGESGQLTWTRLPQGFKNSPTLFNEALNRDLQGFRLDHPSVSLLQYVDDLLIAADTQAACLSATRDLLMTLAELGYRVSGKKAQLCQEEVTYLGFKIHKGSRSLSNSRTQAILQIPVPKTKRQVREFLGKIGYCRLFIPGFAELAQPLYAATRPGNDPLVWGEKEEEAFQSLKLALTQPPALALPSLDKPFQLFVEETSGAAKGVLTQALGPWKRPVAYLSKRLDPVAAGWPRCLRAIAAAALLTREASKLTFGQDIEITSSHNLESLLRSPPDKWLTNARITQYQVLLLDPPRVRFKQTAALNPATLLPETDDTLPIHHCLDTLDSLTSTRPDLTDQPLAQAEATLFTDGSSYIRDGKRYAGAAVVTLDSVIWAEPLPIGTSAQKAELIALTKALEWSKDKSVNIYTDSRYAFATLHVHGMIYRERGWLTAGGKAIKNAPEILALLTAVWLPKRVAVMHCKGHQKDDAPTSTGNRRADEVAREVAIRPLSTQATISSGGSSGGSSGSETPGTSESATPESSGGSSGGSSMASNFTQFVLVDNGGTGDVTVAPSNFANGIAEWISSNSRSQAYKVTCSVRQSSAQNRKYTIKVEVPKGAWRSYLNMELTIPIFATNSDCELIVKAMQGLLKDGNPIPSAIAANSGIYGGSGGSMASNFTQFVLVDNGGTGDVTVAPSNFANGIAEWISSNSRSQAYKVTCSVRQSSAQNRKYTIKVEVPKGAWRSYLNMELTIPIFATNSDCELIVKAMQGLLKDGNPIPSAIAANSGIYSGGSSGGSSGSETPGTSESATPESSGGSSGGSSDKKYSIGLDIGTNSVGWAVITDEYKVPSKKFKVLGNTDRHSIKKNLIGALLFDSGETAEATRLKRTARRRYTRRKNRICYLQEIFSNEMAKVDDSFFHRLEESFLVEEDKKHERHPIFGNIVDEVAYHEKYPTIYHLRKKLVDSTDKADLRLIYLALAHMIKFRGHFLIEGDLNPDNSDVDKLFIQLVQTYNQLFEENPINASGVDAKAILSARLSKSRRLENLIAQLPGEKKNGLFGNLIALSLGLTPNFKSNFDLAEDAKLQLSKDTYDDDLDNLLAQIGDQYADLFLAAKNLSDAILLSDILRVNTEITKAPLSASMIKRYDEHHQDLTLLKALVRQQLPEKYKEIFFDQSKNGYAGYIDGGASQEEFYKFIKPILEKMDGTEELLVKLNREDLLRKQRTFDNGSIPHQIHLGELHAILRRQEDFYPFLKDNREKIEKILTFRIPYYVGPLARGNSRFAWMTRKSEETITPWNFEEVVDKGASAQSFIERMTNFDKNLPNEKVLPKHSLLYEYFTVYNELTKVKYVTEGMRKPAFLSGEQKKAIVDLLFKTNRKVTVKQLKEDYFKKIECFDSVEISGVEDRFNASLGTYHDLLKIIKDKDFLDNEENEDILEDIVLTLTLFEDREMIEERLKTYAHLFDDKVMKQLKRRRYTGWGRLSRKLINGIRDKQSGKTILDFLKSDGFANRNFMQLIHDDSLTFKEDIQKAQVSGQGDSLHEHIANLAGSPAIKKGILQTVKVVDELVKVMGRHKPENIVIEMARENQTTQKGQKNSRERMKRIEEGIKELGSQILKEHPVENTQLQNEKLYLYYLQNGRDMYVDQELDINRLSDYDVDHIVPQSFLKDDSIDNKVLTRSDKARGKSDNVPSEEVVKKMKNYWRQLLNAKLITQRKFDNLTKAERGGLSELDKAGFIKRQLVETRQITKHVAQILDSRMNTKYDENDKLIREVKVITLKSKLVSDFRKDFQFYKVREINNYHHAHDAYLNAVVGTALIKKYPKLESEFVYGDYKVYDVRKMIAKSEQEIGKATAKYFFYSNIMNFFKTEITLANGEIRKRPLIETNGETGEIVWDKGRDFATVRKVLSMPQVNIVKKTEVQTGGFSKESILPKRNSDKLIARKKDWDPKKYGGFDSPTVAYSVLVVAKVEKGKSKKLKSVKELLGITIMERSSFEKNPIDFLEAKGYKEVKKDLIIKLPKYSLFELENGRKRMLASAGELQKGNELALPSKYVNFLYLASHYEKLKGSPEDNEQKQLFVEQHKHYLDEIIEQISEFSKRVILADANLDKVLSAYNKHRDKPIREQAENIIHLFTLTNLGAPAAFKYFDTTIDRKRYTSTKEVLDATLIHQSITGLYETRIDLSQLGGDKRTADGSEFESPKKKAKVE

SEQ ID NO: 16166 - protein, 2362 aa, synthetic construct
MPAAKRVKLDGGTAPLEEEYRLFLEAPIQNVTLLEQWKREIPKVWAEINPPGLASTQAPIHVQLLSTALPVRVRQYPITLEAKRSLRETIRKFRAAGILRPVHSPWNTPLLPVRKSGTSEYRMVQDLREVNKRVETIHPTVPNPYTLLSLLPPDRIWYSVLDLKDAFFCIPLAPESQLIFAFEWADAEEGESGQLTWTRLPQGFKNSPTLFNEALNRDLQGFRLDHPSVSLLQYVDDLLIAADTQAACLSATRDLLMTLAELGYRVSGKKAQLCQEEVTYLGFKIHKGSRSLSNSRTQAILQIPVPKTKRQVREFLGKIGYCRLFIPGFAELAQPLYAATRPGNDPLVWGEKEEEAFQSLKLALTQPPALALPSLDKPFQLFVEETSGAAKGVLTQALGPWKRPVAYLSKRLDPVAAGWPRCLRAIAAAALLTREASKLTFGQDIEITSSHNLESLLRSPPDKWLTNARITQYQVLLLDPPRVRFKQTAALNPATLLPETDDTLPIHHCLDTLDSLTSTRPDLTDQPLAQAEATLFTDGSSYIRDGKRYAGAAVVTLDSVIWAEPLPIGTSAQKAELIALTKALEWSKDKSVNIYTDSRYAFATLHVHGMIYRERGWLTAGGKAIKNAPEILALLTAVWLPKRVAVMHCKGHQKDDAPTSTGNRRADEVAREVAIRPLSTQATISSGGSSGGSSGSETPGTSESATPESSGGSSGGSSMASNFTQFVLVDNGGTGDVTVAPSNFANGIAEWISSNSRSQAYKVTCSVRQSSAQNRKYTIKVEVPKGAWRSYLNMELTIPIFATNSDCELIVKAMQGLLKDGNPIPSAIAANSGIYGGSGGSMASNFTQFVLVDNGGTGDVTVAPSNFANGIAEWISSNSRSQAYKVTCSVRQSSAQNRKYTIKVEVPKGAWRSYLNMELTIPIFATNSDCELIVKAMQGLLKDGNPIPSAIAANSGIYGSSGSSGSSGSSGSSGSSDKKYSIGLDIGTNSVGWAVITDEYKVPSKKFKVLGNTDRHSIKKNLIGALLFDSGETAEATRLKRTARRRYTRRKNRICYLQEIFSNEMAKVDDSFFHRLEESFLVEEDKKHERHPIFGNIVDEVAYHEKYPTIYHLRKKLVDSTDKADLRLIYLALAHMIKFRGHFLIEGDLNPDNSDVDKLFIQLVQTYNQLFEENPINASGVDAKAILSARLSKSRRLENLIAQLPGEKKNGLFGNLIALSLGLTPNFKSNFDLAEDAKLQLSKDTYDDDLDNLLAQIGDQYADLFLAAKNLSDAILLSDILRVNTEITKAPLSASMIKRYDEHHQDLTLLKALVRQQLPEKYKEIFFDQSKNGYAGYIDGGASQEEFYKFIKPILEKMDGTEELLVKLNREDLLRKQRTFDNGSIPHQIHLGELHAILRRQEDFYPFLKDNREKIEKILTFRIPYYVGPLARGNSRFAWMTRKSEETITPWNFEEVVDKGASAQSFIERMTNFDKNLPNEKVLPKHSLLYEYFTVYNELTKVKYVTEGMRKPAFLSGEQKKAIVDLLFKTNRKVTVKQLKEDYFKKIECFDSVEISGVEDRFNASLGTYHDLLKIIKDKDFLDNEENEDILEDIVLTLTLFEDREMIEERLKTYAHLFDDKVMKQLKRRRYTGWGRLSRKLINGIRDKQSGKTILDFLKSDGFANRNFMQLIHDDSLTFKEDIQKAQVSGQGDSLHEHIANLAGSPAIKKGILQTVKVVDELVKVMGRHKPENIVIEMARENQTTQKGQKNSRERMKRIEEGIKELGSQILKEHPVENTQLQNEKLYLYYLQNGRDMYVDQELDINRLSDYDVDHIVPQSFLKDDSIDNKVLTRSDKARGKSDNVPSEEVVKKMKNYWRQLLNAKLITQRKFDNLTKAERGGLSELDKAGFIKRQLVETRQITKHVAQILDSRMNTKYDENDKLIREVKVITLKSKLVSDFRKDFQFYKVREINNYHHAHDAYLNAVVGTALIKKYPKLESEFVYGDYKVYDVRKMIAKSEQEIGKATAKYFFYSNIMNFFKTEITLANGEIRKRPLIETNGETGEIVWDKGRDFATVRKVLSMPQVNIVKKTEVQTGGFSKESILPKRNSDKLIARKKDWDPKKYGGFDSPTVAYSVLVVAKVEKGKSKKLKSVKELLGITIMERSSFEKNPIDFLEAKGYKEVKKDLIIKLPKYSLFELENGRKRMLASAGELQKGNELALPSKYVNFLYLASHYEKLKGSPEDNEQKQLFVEQHKHYLDEIIEQISEFSKRVILADANLDKVLSAYNKHRDKPIREQAENIIHLFTLTNLGAPAAFKYFDTTIDRKRYTSTKEVLDATLIHQSITGLYETRIDLSQLGGDKRTADGSEFESPKKKAKVE

SEQ ID NO: 16167 - protein, 2355 aa, synthetic construct
MPAAKRVKLDGGTAPLEEEYRLFLEAPIQNVTLLEQWKREIPKVWAEINPPGLASTQAPIHVQLLSTALPVRVRQYPITLEAKRSLRETIRKFRAAGILRPVHSPWNTPLLPVRKSGTSEYRMVQDLREVNKRVETIHPTVPNPYTLLSLLPPDRIWYSVLDLKDAFFCIPLAPESQLIFAFEWADAEEGESGQLTWTRLPQGFKNSPTLFNEALNRDLQGFRLDHPSVSLLQYVDDLLIAADTQAACLSATRDLLMTLAELGYRVSGKKAQLCQEEVTYLGFKIHKGSRSLSNSRTQAILQIPVPKTKRQVREFLGKIGYCRLFIPGFAELAQPLYAATRPGNDPLVWGEKEEEAFQSLKLALTQPPALALPSLDKPFQLFVEETSGAAKGVLTQALGPWKRPVAYLSKRLDPVAAGWPRCLRAIAAAALLTREASKLTFGQDIEITSSHNLESLLRSPPDKWLTNARITQYQVLLLDPPRVRFKQTAALNPATLLPETDDTLPIHHCLDTLDSLTSTRPDLTDQPLAQAEATLFTDGSSYIRDGKRYAGAAVVTLDSVIWAEPLPIGTSAQKAELIALTKALEWSKDKSVNIYTDSRYAFATLHVHGMIYRERGWLTAGGKAIKNAPEILALLTAVWLPKRVAVMHCKGHQKDDAPTSTGNRRADEVAREVAIRPLSTQATISSGGSSGGSSGSETPGTSESATPESSGGSSGGSSMASNFTQFVLVDNGGTGDVTVAPSNFANGIAEWISSNSRSQAYKVTCSVRQSSAQNRKYTIKVEVPKGAWRSYLNMELTIPIFATNSDCELIVKAMQGLLKDGNPIPSAIAANSGIYGGSGGSMASNFTQFVLVDNGGTGDVTVAPSNFANGIAEWISSNSRSQAYKVTCSVRQSSAQNRKYTIKVEVPKGAWRSYLNMELTIPIFATNSDCELIVKAMQGLLKDGNPIPSAIAANSGIYGSSGGGEAAAKDKKYSIGLDIGTNSVGWAVITDEYKVPSKKFKVLGNTDRHSIKKNLIGALLFDSGETAEATRLKRTARRRYTRRKNRICYLQEIFSNEMAKVDDSFFHRLEESFLVEEDKKHERHPIFGNIVDEVAYHEKYPTIYHLRKKLVDSTDKADLRLIYLALAHMIKFRGHFLIEGDLNPDNSDVDKLFIQLVQTYNQLFEENPINASGVDAKAILSARLSKSRRLENLIAQLPGEKKNGLFGNLIALSLGLTPNFKSNFDLAEDAKLQLSKDTYDDDLDNLLAQIGDQYADLFLAAKNLSDAILLSDILRVNTEITKAPLSASMIKRYDEHHQDLTLLKALVRQQLPEKYKEIFFDQSKNGYAGYIDGGASQEEFYKFIKPILEKMDGTEELLVKLNREDLLRKQRTFDNGSIPHQIHLGELHAILRRQEDFYPFLKDNREKIEKILTFRIPYYVGPLARGNSRFAWMTRKSEETITPWNFEEVVDKGASAQSFIERMTNFDKNLPNEKVLPKHSLLYEYFTVYNELTKVKYVTEGMRKPAFLSGEQKKAIVDLLFKTNRKVTVKQLKEDYFKKIECFDSVEISGVEDRFNASLGTYHDLLKIIKDKDFLDNEENEDILEDIVLTLTLFEDREMIEERLKTYAHLFDDKVMKQLKRRRYTGWGRLSRKLINGIRDKQSGKTILDFLKSDGFANRNFMQLIHDDSLTFKEDIQKAQVSGQGDSLHEHIANLAGSPAIKKGILQTVKVVDELVKVMGRHKPENIVIEMARENQTTQKGQKNSRERMKRIEEGIKELGSQILKEHPVENTQLQNEKLYLYYLQNGRDMYVDQELDINRLSDYDVDHIVPQSFLKDDSIDNKVLTRSDKARGKSDNVPSEEVVKKMKNYWRQLLNAKLITQRKFDNLTKAERGGLSELDKAGFIKRQLVETRQITKHVAQILDSRMNTKYDENDKLIREVKVITLKSKLVSDFRKDFQFYKVREINNYHHAHDAYLNAVVGTALIKKYPKLESEFVYGDYKVYDVRKMIAKSEQEIGKATAKYFFYSNIMNFFKTEITLANGEIRKRPLIETNGETGEIVWDKGRDFATVRKVLSMPQVNIVKKTEVQTGGFSKESILPKRNSDKLIARKKDWDPKKYGGFDSPTVAYSVLVVAKVEKGKSKKLKSVKELLGITIMERSSFEKNPIDFLEAKGYKEVKKDLIIKLPKYSLFELENGRKRMLASAGELQKGNELALPSKYVNFLYLASHYEKLKGSPEDNEQKQLFVEQHKHYLDEIIEQISEFSKRVILADANLDKVLSAYNKHRDKPIREQAENIIHLFTLTNLGAPAAFKYFDTTIDRKRYTSTKEVLDATLIHQSITGLYETRIDLSQLGGDKRTADGSEFESPKKKAKVE

SEQ ID NO: 16168 - protein, 2646 aa, synthetic construct
MPAAKRVKLDGGTAPLEEEYRLFLEAPIQNVTLLEQWKREIPKVWAEINPPGLASTQAPIHVQLLSTALPVRVRQYPITLEAKRSLRETIRKFRAAGILRPVHSPWNTPLLPVRKSGTSEYRMVQDLREVNKRVETIHPTVPNPYTLLSLLPPDRIWYSVLDLKDAFFCIPLAPESQLIFAFEWADAEEGESGQLTWTRLPQGFKNSPTLFNEALNRDLQGFRLDHPSVSLLQYVDDLLIAADTQAACLSATRDLLMTLAELGYRVSGKKAQLCQEEVTYLGFKIHKGSRSLSNSRTQAILQIPVPKTKRQVREFLGKIGYCRLFIPGFAELAQPLYAATRPGNDPLVWGEKEEEAFQSLKLALTQPPALALPSLDKPFQLFVEETSGAAKGVLTQALGPWKRPVAYLSKRLDPVAAGWPRCLRAIAAAALLTREASKLTFGQDIEITSSHNLESLLRSPPDKWLTNARITQYQVLLLDPPRVRFKQTAALNPATLLPETDDTLPIHHCLDTLDSLTSTRPDLTDQPLAQAEATLFTDGSSYIRDGKRYAGAAVVTLDSVIWAEPLPIGTSAQKAELIALTKALEWSKDKSVNIYTDSRYAFATLHVHGMIYRERGWLTAGGKAIKNAPEILALLTAVWLPKRVAVMHCKGHQKDDAPTSTGNRRADEVAREVAIRPLSTQATISSGGSSGGSSGSETPGTSESATPESSGGSSGGSSMASNFTQFVLVDNGGTGDVTVAPSNFANGIAEWISSNSRSQAYKVTCSVRQSSAQNRKYTIKVEVPKGAWRSYLNMELTIPIFATNSDCELIVKAMQGLLKDGNPIPSAIAANSGIYGGSGGSMASNFTQFVLVDNGGTGDVTVAPSNFANGIAEWISSNSRSQAYKVTCSVRQSSAQNRKYTIKVEVPKGAWRSYLNMELTIPIFATNSDCELIVKAMQGLLKDGNPIPSAIAANSGIYGGGSGGGSGGGSGGGSMASNFTQFVLVDNGGTGDVTVAPSNFANGIAEWISSNSRSQAYKVTCSVRQSSAQNRKYTIKVEVPKGAWRSYLNMELTIPIFATNSDCELIVKAMQGLLKDGNPIPSAIAANSGIYGGSGGSMASNFTQFVLVDNGGTGDVTVAPSNFANGIAEWISSNSRSQAYKVTCSVRQSSAQNRKYTIKVEVPKGAWRSYLNMELTIPIFATNSDCELIVKAMQGLLKDGNPIPSAIAANSGIYAEAAAKEAAAKEAAAKEAAAKALEAEAAAKEAAAKEAAAKEAAAKADKKYSIGLDIGTNSVGWAVITDEYKVPSKKFKVLGNTDRHSIKKNLIGALLFDSGETAEATRLKRTARRRYTRRKNRICYLQEIFSNEMAKVDDSFFHRLEESFLVEEDKKHERHPIFGNIVDEVAYHEKYPTIYHLRKKLVDSTDKADLRLIYLALAHMIKFRGHFLIEGDLNPDNSDVDKLFIQLVQTYNQLFEENPINASGVDAKAILSARLSKSRRLENLIAQLPGEKKNGLFGNLIALSLGLTPNFKSNFDLAEDAKLQLSKDTYDDDLDNLLAQIGDQYADLFLAAKNLSDAILLSDILRVNTEITKAPLSASMIKRYDEHHQDLTLLKALVRQQLPEKYKEIFFDQSKNGYAGYIDGGASQEEFYKFIKPILEKMDGTEELLVKLNREDLLRKQRTFDNGSIPHQIHLGELHAILRRQEDFYPFLKDNREKIEKILTFRIPYYVGPLARGNSRFAWMTRKSEETITPWNFEEVVDKGASAQSFIERMTNFDKNLPNEKVLPKHSLLYEYFTVYNELTKVKYVTEGMRKPAFLSGEQKKAIVDLLFKTNRKVTVKQLKEDYFKKIECFDSVEISGVEDRFNASLGTYHDLLKIIKDKDFLDNEENEDILEDIVLTLTLFEDREMIEERLKTYAHLFDDKVMKQLKRRRYTGWGRLSRKLINGIRDKQSGKTILDFLKSDGFANRNFMQLIHDDSLTFKEDIQKAQVSGQGDSLHEHIANLAGSPAIKKGILQTVKVVDELVKVMGRHKPENIVIEMARENQTTQKGQKNSRERMKRIEEGIKELGSQILKEHPVENTQLQNEKLYLYYLQNGRDMYVDQELDINRLSDYDVDHIVPQSFLKDDSIDNKVLTRSDKARGKSDNVPSEEVVKKMKNYWRQLLNAKLITQRKFDNLTKAERGGLSELDKAGFIKRQLVETRQITKHVAQILDSRMNTKYDENDKLIREVKVITLKSKLVSDFRKDFQFYKVREINNYHHAHDAYLNAVVGTALIKKYPKLESEFVYGDYKVYDVRKMIAKSEQEIGKATAKYFFYSNIMNFFKTEITLANGEIRKRPLIETNGETGEIVWDKGRDFATVRKVLSMPQVNIVKKTEVQTGGFSKESILPKRNSDKLIARKKDWDPKKYGGFDSPTVAYSVLVVAKVEKGKSKKLKSVKELLGITIMERSSFEKNPIDFLEAKGYKEVKKDLIIKLPKYSLFELENGRKRMLASAGELQKGNELALPSKYVNFLYLASHYEKLKGSPEDNEQKQLFVEQHKHYLDEIIEQISEFSKRVILADANLDKVLSAYNKHRDKPIREQAENIIHLFTLTNLGAPAAFKYFDTTIDRKRYTSTKEVLDATLIHQSITGLYETRIDLSQLGGDKRTADGSEFESPKKKAKVE

SEQ ID NO: 16169 - protein, 2633 aa, synthetic construct
MPAAKRVKLDGGTAPLEEEYRLFLEAPIQNVTLLEQWKREIPKVWAEINPPGLASTQAPIHVQLLSTALPVRVRQYPITLEAKRSLRETIRKFRAAGILRPVHSPWNTPLLPVRKSGTSEYRMVQDLREVNKRVETIHPTVPNPYTLLSLLPPDRIWYSVLDLKDAFFCIPLAPESQLIFAFEWADAEEGESGQLTWTRLPQGFKNSPTLFNEALNRDLQGFRLDHPSVSLLQYVDDLLIAADTQAACLSATRDLLMTLAELGYRVSGKKAQLCQEEVTYLGFKIHKGSRSLSNSRTQAILQIPVPKTKRQVREFLGKIGYCRLFIPGFAELAQPLYAATRPGNDPLVWGEKEEEAFQSLKLALTQPPALALPSLDKPFQLFVEETSGAAKGVLTQALGPWKRPVAYLSKRLDPVAAGWPRCLRAIAAAALLTREASKLTFGQDIEITSSHNLESLLRSPPDKWLTNARITQYQVLLLDPPRVRFKQTAALNPATLLPETDDTLPIHHCLDTLDSLTSTRPDLTDQPLAQAEATLFTDGSSYIRDGKRYAGAAVVTLDSVIWAEPLPIGTSAQKAELIALTKALEWSKDKSVNIYTDSRYAFATLHVHGMIYRERGWLTAGGKAIKNAPEILALLTAVWLPKRVAVMHCKGHQKDDAPTSTGNRRADEVAREVAIRPLSTQATISSGGSSGGSSGSETPGTSESATPESSGGSSGGSSMASNFTQFVLVDNGGTGDVTVAPSNFANGIAEWISSNSRSQAYKVTCSVRQSSAQNRKYTIKVEVPKGAWRSYLNMELTIPIFATNSDCELIVKAMQGLLKDGNPIPSAIAANSGIYGGSGGSMASNFTQFVLVDNGGTGDVTVAPSNFANGIAEWISSNSRSQAYKVTCSVRQSSAQNRKYTIKVEVPKGAWRSYLNMELTIPIFATNSDCELIVKAMQGLLKDGNPIPSAIAANSGIYGGGSGGGSGGGSGGGSMASNFTQFVLVDNGGTGDVTVAPSNFANGIAEWISSNSRSQAYKVTCSVRQSSAQNRKYTIKVEVPKGAWRSYLNMELTIPIFATNSDCELIVKAMQGLLKDGNPIPSAIAANSGIYGGSGGSMASNFTQFVLVDNGGTGDVTVAPSNFANGIAEWISSNSRSQAYKVTCSVRQSSAQNRKYTIKVEVPKGAWRSYLNMELTIPIFATNSDCELIVKAMQGLLKDGNPIPSAIAANSGIYSGGSSGGSSGSETPGTSESATPESSGGSSGGSSDKKYSIGLDIGTNSVGWAVITDEYKVPSKKFKVLGNTDRHSIKKNLIGALLFDSGETAEATRLKRTARRRYTRRKNRICYLQEIFSNEMAKVDDSFFHRLEESFLVEEDKKHERHPIFGNIVDEVAYHEKYPTIYHLRKKLVDSTDKADLRLIYLALAHMIKFRGHFLIEGDLNPDNSDVDKLFIQLVQTYNQLFEENPINASGVDAKAILSARLSKSRRLENLIAQLPGEKKNGLFGNLIALSLGLTPNFKSNFDLAEDAKLQLSKDTYDDDLDNLLAQIGDQYADLFLAAKNLSDAILLSDILRVNTEITKAPLSASMIKRYDEHHQDLTLLKALVRQQLPEKYKEIFFDQSKNGYAGYIDGGASQEEFYKFIKPILEKMDGTEELLVKLNREDLLRKQRTFDNGSIPHQIHLGELHAILRRQEDFYPFLKDNREKIEKILTFRIPYYVGPLARGNSRFAWMTRKSEETITPWNFEEVVDKGASAQSFIERMTNFDKNLPNEKVLPKHSLLYEYFTVYNELTKVKYVTEGMRKPAFLSGEQKKAIVDLLFKTNRKVTVKQLKEDYFKKIECFDSVEISGVEDRFNASLGTYHDLLKIIKDKDFLDNEENEDILEDIVLTLTLFEDREMIEERLKTYAHLFDDKVMKQLKRRRYTGWGRLSRKLINGIRDKQSGKTILDFLKSDGFANRNFMQLIHDDSLTFKEDIQKAQVSGQGDSLHEHIANLAGSPAIKKGILQTVKVVDELVKVMGRHKPENIVIEMARENQTTQKGQKNSRERMKRIEEGIKELGSQILKEHPVENTQLQNEKLYLYYLQNGRDMYVDQELDINRLSDYDVDHIVPQSFLKDDSIDNKVLTRSDKARGKSDNVPSEEVVKKMKNYWRQLLNAKLITQRKFDNLTKAERGGLSELDKAGFIKRQLVETRQITKHVAQILDSRMNTKYDENDKLIREVKVITLKSKLVSDFRKDFQFYKVREINNYHHAHDAYLNAVVGTALIKKYPKLESEFVYGDYKVYDVRKMIAKSEQEIGKATAKYFFYSNIMNFFKTEITLANGEIRKRPLIETNGETGEIVWDKGRDFATVRKVLSMPQVNIVKKTEVQTGGFSKESILPKRNSDKLIARKKDWDPKKYGGFDSPTVAYSVLVVAKVEKGKSKKLKSVKELLGITIMERSSFEKNPIDFLEAKGYKEVKKDLIIKLPKYSLFELENGRKRMLASAGELQKGNELALPSKYVNFLYLASHYEKLKGSPEDNEQKQLFVEQHKHYLDEIIEQISEFSKRVILADANLDKVLSAYNKHRDKPIREQAENIIHLFTLTNLGAPAAFKYFDTTIDRKRYTSTKEVLDATLIHQSITGLYETRIDLSQLGGDKRTADGSEFESPKKKAKVE

SEQ ID NO: 16170 - protein, 2618 aa, synthetic construct
MPAAKRVKLDGGTAPLEEEYRLFLEAPIQNVTLLEQWKREIPKVWAEINPPGLASTQAPIHVQLLSTALPVRVRQYPITLEAKRSLRETIRKFRAAGILRPVHSPWNTPLLPVRKSGTSEYRMVQDLREVNKRVETIHPTVPNPYTLLSLLPPDRIWYSVLDLKDAFFCIPLAPESQLIFAFEWADAEEGESGQLTWTRLPQGFKNSPTLFNEALNRDLQGFRLDHPSVSLLQYVDDLLIAADTQAACLSATRDLLMTLAELGYRVSGKKAQLCQEEVTYLGFKIHKGSRSLSNSRTQAILQIPVPKTKRQVREFLGKIGYCRLFIPGFAELAQPLYAATRPGNDPLVWGEKEEEAFQSLKLALTQPPALALPSLDKPFQLFVEETSGAAKGVLTQALGPWKRPVAYLSKRLDPVAAGWPRCLRAIAAAALLTREASKLTFGQDIEITSSHNLESLLRSPPDKWLTNARITQYQVLLLDPPRVRFKQTAALNPATLLPETDDTLPIHHCLDTLDSLTSTRPDLTDQPLAQAEATLFTDGSSYIRDGKRYAGAAVVTLDSVIWAEPLPIGTSAQKAELIALTKALEWSKDKSVNIYTDSRYAFATLHVHGMIYRERGWLTAGGKAIKNAPEILALLTAVWLPKRVAVMHCKGHQKDDAPTSTGNRRADEVAREVAIRPLSTQATISSGGSSGGSSGSETPGTSESATPESSGGSSGGSSMASNFTQFVLVDNGGTGDVTVAPSNFANGIAEWISSNSRSQAYKVTCSVRQSSAQNRKYTIKVEVPKGAWRSYLNMELTIPIFATNSDCELIVKAMQGLLKDGNPIPSAIAANSGIYGGSGGSMASNFTQFVLVDNGGTGDVTVAPSNFANGIAEWISSNSRSQAYKVTCSVRQSSAQNRKYTIKVEVPKGAWRSYLNMELTIPIFATNSDCELIVKAMQGLLKDGNPIPSAIAANSGIYGGGSGGGSGGGSGGGSMASNFTQFVLVDNGGTGDVTVAPSNFANGIAEWISSNSRSQAYKVTCSVRQSSAQNRKYTIKVEVPKGAWRSYLNMELTIPIFATNSDCELIVKAMQGLLKDGNPIPSAIAANSGIYGGSGGSMASNFTQFVLVDNGGTGDVTVAPSNFANGIAEWISSNSRSQAYKVTCSVRQSSAQNRKYTIKVEVPKGAWRSYLNMELTIPIFATNSDCELIVKAMQGLLKDGNPIPSAIAANSGIYGSSGSSGSSGSSGSSGSSDKKYSIGLDIGTNSVGWAVITDEYKVPSKKFKVLGNTDRHSIKKNLIGALLFDSGETAEATRLKRTARRRYTRRKNRICYLQEIFSNEMAKVDDSFFHRLEESFLVEEDKKHERHPIFGNIVDEVAYHEKYPTIYHLRKKLVDSTDKADLRLIYLALAHMIKFRGHFLIEGDLNPDNSDVDKLFIQLVQTYNQLFEENPINASGVDAKAILSARLSKSRRLENLIAQLPGEKKNGLFGNLIALSLGLTPNFKSNFDLAEDAKLQLSKDTYDDDLDNLLAQIGDQYADLFLAAKNLSDAILLSDILRVNTEITKAPLSASMIKRYDEHHQDLTLLKALVRQQLPEKYKEIFFDQSKNGYAGYIDGGASQEEFYKFIKPILEKMDGTEELLVKLNREDLLRKQRTFDNGSIPHQIHLGELHAILRRQEDFYPFLKDNREKIEKILTFRIPYYVGPLARGNSRFAWMTRKSEETITPWNFEEVVDKGASAQSFIERMTNFDKNLPNEKVLPKHSLLYEYFTVYNELTKVKYVTEGMRKPAFLSGEQKKAIVDLLFKTNRKVTVKQLKEDYFKKIECFDSVEISGVEDRFNASLGTYHDLLKIIKDKDFLDNEENEDILEDIVLTLTLFEDREMIEERLKTYAHLFDDKVMKQLKRRRYTGWGRLSRKLINGIRDKQSGKTILDFLKSDGFANRNFMQLIHDDSLTFKEDIQKAQVSGQGDSLHEHIANLAGSPAIKKGILQTVKVVDELVKVMGRHKPENIVIEMARENQTTQKGQKNSRERMKRIEEGIKELGSQILKEHPVENTQLQNEKLYLYYLQNGRDMYVDQELDINRLSDYDVDHIVPQSFLKDDSIDNKVLTRSDKARGKSDNVPSEEVVKKMKNYWRQLLNAKLITQRKFDNLTKAERGGLSELDKAGFIKRQLVETRQITKHVAQILDSRMNTKYDENDKLIREVKVITLKSKLVSDFRKDFQFYKVREINNYHHAHDAYLNAVVGTALIKKYPKLESEFVYGDYKVYDVRKMIAKSEQEIGKATAKYFFYSNIMNFFKTEITLANGEIRKRPLIETNGETGEIVWDKGRDFATVRKVLSMPQVNIVKKTEVQTGGFSKESILPKRNSDKLIARKKDWDPKKYGGFDSPTVAYSVLVVAKVEKGKSKKLKSVKELLGITIMERSSFEKNPIDFLEAKGYKEVKKDLIIKLPKYSLFELENGRKRMLASAGELQKGNELALPSKYVNFLYLASHYEKLKGSPEDNEQKQLFVEQHKHYLDEIIEQISEFSKRVILADANLDKVLSAYNKHRDKPIREQAENIIHLFTLTNLGAPAAFKYFDTTIDRKRYTSTKEVLDATLIHQSITGLYETRIDLSQLGGDKRTADGSEFESPKKKAKVE

SEQ ID NO: 16171 - protein, 2611 aa, synthetic construct
MPAAKRVKLDGGTAPLEEEYRLFLEAPIQNVTLLEQWKREIPKVWAEINPPGLASTQAPIHVQLLSTALPVRVRQYPITLEAKRSLRETIRKFRAAGILRPVHSPWNTPLLPVRKSGTSEYRMVQDLREVNKRVETIHPTVPNPYTLLSLLPPDRIWYSVLDLKDAFFCIPLAPESQLIFAFEWADAEEGESGQLTWTRLPQGFKNSPTLFNEALNRDLQGFRLDHPSVSLLQYVDDLLIAADTQAACLSATRDLLMTLAELGYRVSGKKAQLCQEEVTYLGFKIHKGSRSLSNSRTQAILQIPVPKTKRQVREFLGKIGYCRLFIPGFAELAQPLYAATRPGNDPLVWGEKEEEAFQSLKLALTQPPALALPSLDKPFQLFVEETSGAAKGVLTQALGPWKRPVAYLSKRLDPVAAGWPRCLRAIAAAALLTREASKLTFGQDIEITSSHNLESLLRSPPDKWLTNARITQYQVLLLDPPRVRFKQTAALNPATLLPETDDTLPIHHCLDTLDSLTSTRPDLTDQPLAQAEATLFTDGSSYIRDGKRYAGAAVVTLDSVIWAEPLPIGTSAQKAELIALTKALEWSKDKSVNIYTDSRYAFATLHVHGMIYRERGWLTAGGKAIKNAPEILALLTAVWLPKRVAVMHCKGHQKDDAPTSTGNRRADEVAREVAIRPLSTQATISSGGSSGGSSGSETPGTSESATPESSGGSSGGSSMASNFTQFVLVDNGGTGDVTVAPSNFANGIAEWISSNSRSQAYKVTCSVRQSSAQNRKYTIKVEVPKGAWRSYLNMELTIPIFATNSDCELIVKAMQGLLKDGNPIPSAIAANSGIYGGSGGSMASNFTQFVLVDNGGTGDVTVAPSNFANGIAEWISSNSRSQAYKVTCSVRQSSAQNRKYTIKVEVPKGAWRSYLNMELTIPIFATNSDCELIVKAMQGLLKDGNPIPSAIAANSGIYGGGSGGGSGGGSGGGSMASNFTQFVLVDNGGTGDVTVAPSNFANGIAEWISSNSRSQAYKVTCSVRQSSAQNRKYTIKVEVPKGAWRSYLNMELTIPIFATNSDCELIVKAMQGLLKDGNPIPSAIAANSGIYGGSGGSMASNFTQFVLVDNGGTGDVTVAPSNFANGIAEWISSNSRSQAYKVTCSVRQSSAQNRKYTIKVEVPKGAWRSYLNMELTIPIFATNSDCELIVKAMQGLLKDGNPIPSAIAANSGIYGSSGGGEAAAKDKKYSIGLDIGTNSVGWAVITDEYKVPSKKFKVLGNTDRHSIKKNLIGALLFDSGETAEATRLKRTARRRYTRRKNRICYLQEIFSNEMAKVDDSFFHRLEESFLVEEDKKHERHPIFGNIVDEVAYHEKYPTIYHLRKKLVDSTDKADLRLIYLALAHMIKFRGHFLIEGDLNPDNSDVDKLFIQLVQTYNQLFEENPINASGVDAKAILSARLSKSRRLENLIAQLPGEKKNGLFGNLIALSLGLTPNFKSNFDLAEDAKLQLSKDTYDDDLDNLLAQIGDQYADLFLAAKNLSDAILLSDILRVNTEITKAPLSASMIKRYDEHHQDLTLLKALVRQQLPEKYKEIFFDQSKNGYAGYIDGGASQEEFYKFIKPILEKMDGTEELLVKLNREDLLRKQRTFDNGSIPHQIHLGELHAILRRQEDFYPFLKDNREKIEKILTFRIPYYVGPLARGNSRFAWMTRKSEETITPWNFEEVVDKGASAQSFIERMTNFDKNLPNEKVLPKHSLLYEYFTVYNELTKVKYVTEGMRKPAFLSGEQKKAIVDLLFKTNRKVTVKQLKEDYFKKIECFDSVEISGVEDRFNASLGTYHDLLKIIKDKDFLDNEENEDILEDIVLTLTLFEDREMIEERLKTYAHLFDDKVMKQLKRRRYTGWGRLSRKLINGIRDKQSGKTILDFLKSDGFANRNFMQLIHDDSLTFKEDIQKAQVSGQGDSLHEHIANLAGSPAIKKGILQTVKVVDELVKVMGRHKPENIVIEMARENQTTQKGQKNSRERMKRIEEGIKELGSQILKEHPVENTQLQNEKLYLYYLQNGRDMYVDQELDINRLSDYDVDHIVPQSFLKDDSIDNKVLTRSDKARGKSDNVPSEEVVKKMKNYWRQLLNAKLITQRKFDNLTKAERGGLSELDKAGFIKRQLVETRQITKHVAQILDSRMNTKYDENDKLIREVKVITLKSKLVSDFRKDFQFYKVREINNYHHAHDAYLNAVVGTALIKKYPKLESEFVYGDYKVYDVRKMIAKSEQEIGKATAKYFFYSNIMNFFKTEITLANGEIRKRPLIETNGETGEIVWDKGRDFATVRKVLSMPQVNIVKKTEVQTGGFSKESILPKRNSDKLIARKKDWDPKKYGGFDSPTVAYSVLVVAKVEKGKSKKLKSVKELLGITIMERSSFEKNPIDFLEAKGYKEVKKDLIIKLPKYSLFELENGRKRMLASAGELQKGNELALPSKYVNFLYLASHYEKLKGSPEDNEQKQLFVEQHKHYLDEIIEQISEFSKRVILADANLDKVLSAYNKHRDKPIREQAENIIHLFTLTNLGAPAAFKYFDTTIDRKRYTSTKEVLDATLIHQSITGLYETRIDLSQLGGDKRTADGSEFESPKKKAKVE

SEQ ID NO: 16172 - protein, 2252 aa, synthetic construct
MPAAKRVKLDGGTAPLEEEYRLFLEAPIQNVTLLEQWKREIPKVWAEINPPGLASTQAPIHVQLLSTALPVRVRQYPITLEAKRSLRETIRKFRAAGILRPVHSPWNTPLLPVRKSGTSEYRMVQDLREVNKRVETIHPTVPNPYTLLSLLPPDRIWYSVLDLKDAFFCIPLAPESQLIFAFEWADAEEGESGQLTWTRLPQGFKNSPTLFNEALNRDLQGFRLDHPSVSLLQYVDDLLIAADTQAACLSATRDLLMTLAELGYRVSGKKAQLCQEEVTYLGFKIHKGSRSLSNSRTQAILQIPVPKTKRQVREFLGKIGYCRLFIPGFAELAQPLYAATRPGNDPLVWGEKEEEAFQSLKLALTQPPALALPSLDKPFQLFVEETSGAAKGVLTQALGPWKRPVAYLSKRLDPVAAGWPRCLRAIAAAALLTREASKLTFGQDIEITSSHNLESLLRSPPDKWLTNARITQYQVLLLDPPRVRFKQTAALNPATLLPETDDTLPIHHCLDTLDSLTSTRPDLTDQPLAQAEATLFTDGSSYIRDGKRYAGAAVVTLDSVIWAEPLPIGTSAQKAELIALTKALEWSKDKSVNIYTDSRYAFATLHVHGMIYRERGWLTAGGKAIKNAPEILALLTAVWLPKRVAVMHCKGHQKDDAPTSTGNRRADEVAREVAIRPLSTQATISGSSGSSGSSGSSGSSGSSMASNFTQFVLVDNGGTGDVTVAPSNFANGIAEWISSNSRSQAYKVTCSVRQSSAQNRKYTIKVEVPKGAWRSYLNMELTIPIFATNSDCELIVKAMQGLLKDGNPIPSAIAANSGIYAEAAAKEAAAKEAAAKEAAAKALEAEAAAKEAAAKEAAAKEAAAKADKKYSIGLDIGTNSVGWAVITDEYKVPSKKFKVLGNTDRHSIKKNLIGALLFDSGETAEATRLKRTARRRYTRRKNRICYLQEIFSNEMAKVDDSFFHRLEESFLVEEDKKHERHPIFGNIVDEVAYHEKYPTIYHLRKKLVDSTDKADLRLIYLALAHMIKFRGHFLIEGDLNPDNSDVDKLFIQLVQTYNQLFEENPINASGVDAKAILSARLSKSRRLENLIAQLPGEKKNGLFGNLIALSLGLTPNFKSNFDLAEDAKLQLSKDTYDDDLDNLLAQIGDQYADLFLAAKNLSDAILLSDILRVNTEITKAPLSASMIKRYDEHHQDLTLLKALVRQQLPEKYKEIFFDQSKNGYAGYIDGGASQEEFYKFIKPILEKMDGTEELLVKLNREDLLRKQRTFDNGSIPHQIHLGELHAILRRQEDFYPFLKDNREKIEKILTFRIPYYVGPLARGNSRFAWMTRKSEETITPWNFEEVVDKGASAQSFIERMTNFDKNLPNEKVLPKHSLLYEYFTVYNELTKVKYVTEGMRKPAFLSGEQKKAIVDLLFKTNRKVTVKQLKEDYFKKIECFDSVEISGVEDRFNASLGTYHDLLKIIKDKDFLDNEENEDILEDIVLTLTLFEDREMIEERLKTYAHLFDDKVMKQLKRRRYTGWGRLSRKLINGIRDKQSGKTILDFLKSDGFANRNFMQLIHDDSLTFKEDIQKAQVSGQGDSLHEHIANLAGSPAIKKGILQTVKVVDELVKVMGRHKPENIVIEMARENQTTQKGQKNSRERMKRIEEGIKELGSQILKEHPVENTQLQNEKLYLYYLQNGRDMYVDQELDINRLSDYDVDHIVPQSFLKDDSIDNKVLTRSDKARGKSDNVPSEEVVKKMKNYWRQLLNAKLITQRKFDNLTKAERGGLSELDKAGFIKRQLVETRQITKHVAQILDSRMNTKYDENDKLIREVKVITLKSKLVSDFRKDFQFYKVREINNYHHAHDAYLNAVVGTALIKKYPKLESEFVYGDYKVYDVRKMIAKSEQEIGKATAKYFFYSNIMNFFKTEITLANGEIRKRPLIETNGETGEIVWDKGRDFATVRKVLSMPQVNIVKKTEVQTGGFSKESILPKRNSDKLIARKKDWDPKKYGGFDSPTVAYSVLVVAKVEKGKSKKLKSVKELLGITIMERSSFEKNPIDFLEAKGYKEVKKDLIIKLPKYSLFELENGRKRMLASAGELQKGNELALPSKYVNFLYLASHYEKLKGSPEDNEQKQLFVEQHKHYLDEIIEQISEFSKRVILADANLDKVLSAYNKHRDKPIREQAENIIHLFTLTNLGAPAAFKYFDTTIDRKRYTSTKEVLDATLIHQSITGLYETRIDLSQLGGDKRTADGSEFESPKKKAKVE

SEQ ID NO: 16173 - protein, 2239 aa, synthetic construct
MPAAKRVKLDGGTAPLEEEYRLFLEAPIQNVTLLEQWKREIPKVWAEINPPGLASTQAPIHVQLLSTALPVRVRQYPITLEAKRSLRETIRKFRAAGILRPVHSPWNTPLLPVRKSGTSEYRMVQDLREVNKRVETIHPTVPNPYTLLSLLPPDRIWYSVLDLKDAFFCIPLAPESQLIFAFEWADAEEGESGQLTWTRLPQGFKNSPTLFNEALNRDLQGFRLDHPSVSLLQYVDDLLIAADTQAACLSATRDLLMTLAELGYRVSGKKAQLCQEEVTYLGFKIHKGSRSLSNSRTQAILQIPVPKTKRQVREFLGKIGYCRLFIPGFAELAQPLYAATRPGNDPLVWGEKEEEAFQSLKLALTQPPALALPSLDKPFQLFVEETSGAAKGVLTQALGPWKRPVAYLSKRLDPVAAGWPRCLRAIAAAALLTREASKLTFGQDIEITSSHNLESLLRSPPDKWLTNARITQYQVLLLDPPRVRFKQTAALNPATLLPETDDTLPIHHCLDTLDSLTSTRPDLTDQPLAQAEATLFTDGSSYIRDGKRYAGAAVVTLDSVIWAEPLPIGTSAQKAELIALTKALEWSKDKSVNIYTDSRYAFATLHVHGMIYRERGWLTAGGKAIKNAPEILALLTAVWLPKRVAVMHCKGHQKDDAPTSTGNRRADEVAREVAIRPLSTQATISGSSGSSGSSGSSGSSGSSMASNFTQFVLVDNGGTGDVTVAPSNFANGIAEWISSNSRSQAYKVTCSVRQSSAQNRKYTIKVEVPKGAWRSYLNMELTIPIFATNSDCELIVKAMQGLLKDGNPIPSAIAANSGIYSGGSSGGSSGSETPGTSESATPESSGGSSGGSSDKKYSIGLDIGTNSVGWAVITDEYKVPSKKFKVLGNTDRHSIKKNLIGALLFDSGETAEATRLKRTARRRYTRRKNRICYLQEIFSNEMAKVDDSFFHRLEESFLVEEDKKHERHPIFGNIVDEVAYHEKYPTIYHLRKKLVDSTDKADLRLIYLALAHMIKFRGHFLIEGDLNPDNSDVDKLFIQLVQTYNQLFEENPINASGVDAKAILSARLSKSRRLENLIAQLPGEKKNGLFGNLIALSLGLTPNFKSNFDLAEDAKLQLSKDTYDDDLDNLLAQIGDQYADLFLAAKNLSDAILLSDILRVNTEITKAPLSASMIKRYDEHHQDLTLLKALVRQQLPEKYKEIFFDQSKNGYAGYIDGGASQEEFYKFIKPILEKMDGTEELLVKLNREDLLRKQRTFDNGSIPHQIHLGELHAILRRQEDFYPFLKDNREKIEKILTFRIPYYVGPLARGNSRFAWMTRKSEETITPWNFEEVVDKGASAQSFIERMTNFDKNLPNEKVLPKHSLLYEYFTVYNELTKVKYVTEGMRKPAFLSGEQKKAIVDLLFKTNRKVTVKQLKEDYFKKIECFDSVEISGVEDRFNASLGTYHDLLKIIKDKDFLDNEENEDILEDIVLTLTLFEDREMIEERLKTYAHLFDDKVMKQLKRRRYTGWGRLSRKLINGIRDKQSGKTILDFLKSDGFANRNFMQLIHDDSLTFKEDIQKAQVSGQGDSLHEHIANLAGSPAIKKGILQTVKVVDELVKVMGRHKPENIVIEMARENQTTQKGQKNSRERMKRIEEGIKELGSQILKEHPVENTQLQNEKLYLYYLQNGRDMYVDQELDINRLSDYDVDHIVPQSFLKDDSIDNKVLTRSDKARGKSDNVPSEEVVKKMKNYWRQLLNAKLITQRKFDNLTKAERGGLSELDKAGFIKRQLVETRQITKHVAQILDSRMNTKYDENDKLIREVKVITLKSKLVSDFRKDFQFYKVREINNYHHAHDAYLNAVVGTALIKKYPKLESEFVYGDYKVYDVRKMIAKSEQEIGKATAKYFFYSNIMNFFKTEITLANGEIRKRPLIETNGETGEIVWDKGRDFATVRKVLSMPQVNIVKKTEVQTGGFSKESILPKRNSDKLIARKKDWDPKKYGGFDSPTVAYSVLVVAKVEKGKSKKLKSVKELLGITIMERSSFEKNPIDFLEAKGYKEVKKDLIIKLPKYSLFELENGRKRMLASAGELQKGNELALPSKYVNFLYLASHYEKLKGSPEDNEQKQLFVEQHKHYLDEIIEQISEFSKRVILADANLDKVLSAYNKHRDKPIREQAENIIHLFTLTNLGAPAAFKYFDTTIDRKRYTSTKEVLDATLIHQSITGLYETRIDLSQLGGDKRTADGSEFESPKKKAKVE

SEQ ID NO: 16174 - protein, 2224 aa, synthetic construct
MPAAKRVKLDGGTAPLEEEYRLFLEAPIQNVTLLEQWKREIPKVWAEINPPGLASTQAPIHVQLLSTALPVRVRQYPITLEAKRSLRETIRKFRAAGILRPVHSPWNTPLLPVRKSGTSEYRMVQDLREVNKRVETIHPTVPNPYTLLSLLPPDRIWYSVLDLKDAFFCIPLAPESQLIFAFEWADAEEGESGQLTWTRLPQGFKNSPTLFNEALNRDLQGFRLDHPSVSLLQYVDDLLIAADTQAACLSATRDLLMTLAELGYRVSGKKAQLCQEEVTYLGFKIHKGSRSLSNSRTQAILQIPVPKTKRQVREFLGKIGYCRLFIPGFAELAQPLYAATRPGNDPLVWGEKEEEAFQSLKLALTQPPALALPSLDKPFQLFVEETSGAAKGVLTQALGPWKRPVAYLSKRLDPVAAGWPRCLRAIAAAALLTREASKLTFGQDIEITSSHNLESLLRSPPDKWLTNARITQYQVLLLDPPRVRFKQTAALNPATLLPETDDTLPIHHCLDTLDSLTSTRPDLTDQPLAQAEATLFTDGSSYIRDGKRYAGAAVVTLDSVIWAEPLPIGTSAQKAELIALTKALEWSKDKSVNIYTDSRYAFATLHVHGMIYRERGWLTAGGKAIKNAPEILALLTAVWLPKRVAVMHCKGHQKDDAPTSTGNRRADEVAREVAIRPLSTQATISGSSGSSGSSGSSGSSGSSMASNFTQFVLVDNGGTGDVTVAPSNFANGIAEWISSNSRSQAYKVTCSVRQSSAQNRKYTIKVEVPKGAWRSYLNMELTIPIFATNSDCELIVKAMQGLLKDGNPIPSAIAANSGIYGSSGSSGSSGSSGSSGSSDKKYSIGLDIGTNSVGWAVITDEYKVPSKKFKVLGNTDRHSIKKNLIGALLFDSGETAEATRLKRTARRRYTRRKNRICYLQEIFSNEMAKVDDSFFHRLEESFLVEEDKKHERHPIFGNIVDEVAYHEKYPTIYHLRKKLVDSTDKADLRLIYLALAHMIKFRGHFLIEGDLNPDNSDVDKLFIQLVQTYNQLFEENPINASGVDAKAILSARLSKSRRLENLIAQLPGEKKNGLFGNLIALSLGLTPNFKSNFDLAEDAKLQLSKDTYDDDLDNLLAQIGDQYADLFLAAKNLSDAILLSDILRVNTEITKAPLSASMIKRYDEHHQDLTLLKALVRQQLPEKYKEIFFDQSKNGYAGYIDGGASQEEFYKFIKPILEKMDGTEELLVKLNREDLLRKQRTFDNGSIPHQIHLGELHAILRRQEDFYPFLKDNREKIEKILTFRIPYYVGPLARGNSRFAWMTRKSEETITPWNFEEVVDKGASAQSFIERMTNFDKNLPNEKVLPKHSLLYEYFTVYNELTKVKYVTEGMRKPAFLSGEQKKAIVDLLFKTNRKVTVKQLKEDYFKKIECFDSVEISGVEDRFNASLGTYHDLLKIIKDKDFLDNEENEDILEDIVLTLTLFEDREMIEERLKTYAHLFDDKVMKQLKRRRYTGWGRLSRKLINGIRDKQSGKTILDFLKSDGFANRNFMQLIHDDSLTFKEDIQKAQVSGQGDSLHEHIANLAGSPAIKKGILQTVKVVDELVKVMGRHKPENIVIEMARENQTTQKGQKNSRERMKRIEEGIKELGSQILKEHPVENTQLQNEKLYLYYLQNGRDMYVDQELDINRLSDYDVDHIVPQSFLKDDSIDNKVLTRSDKARGKSDNVPSEEVVKKMKNYWRQLLNAKLITQRKFDNLTKAERGGLSELDKAGFIKRQLVETRQITKHVAQILDSRMNTKYDENDKLIREVKVITLKSKLVSDFRKDFQFYKVREINNYHHAHDAYLNAVVGTALIKKYPKLESEFVYGDYKVYDVRKMIAKSEQEIGKATAKYFFYSNIMNFFKTEITLANGEIRKRPLIETNGETGEIVWDKGRDFATVRKVLSMPQVNIVKKTEVQTGGFSKESILPKRNSDKLIARKKDWDPKKYGGFDSPTVAYSVLVVAKVEKGKSKKLKSVKELLGITIMERSSFEKNPIDFLEAKGYKEVKKDLIIKLPKYSLFELENGRKRMLASAGELQKGNELALPSKYVNFLYLASHYEKLKGSPEDNEQKQLFVEQHKHYLDEIIEQISEFSKRVILADANLDKVLSAYNKHRDKPIREQAENIIHLFTLTNLGAPAAFKYFDTTIDRKRYTSTKEVLDATLIHQSITGLYETRIDLSQLGGDKRTADGSEFESPKKKAKVE

SEQ ID NO: 16175 - protein, 2217 aa, synthetic construct
MPAAKRVKLDGGTAPLEEEYRLFLEAPIQNVTLLEQWKREIPKVWAEINPPGLASTQAPIHVQLLSTALPVRVRQYPITLEAKRSLRETIRKFRAAGILRPVHSPWNTPLLPVRKSGTSEYRMVQDLREVNKRVETIHPTVPNPYTLLSLLPPDRIWYSVLDLKDAFFCIPLAPESQLIFAFEWADAEEGESGQLTWTRLPQGFKNSPTLFNEALNRDLQGFRLDHPSVSLLQYVDDLLIAADTQAACLSATRDLLMTLAELGYRVSGKKAQLCQEEVTYLGFKIHKGSRSLSNSRTQAILQIPVPKTKRQVREFLGKIGYCRLFIPGFAELAQPLYAATRPGNDPLVWGEKEEEAFQSLKLALTQPPALALPSLDKPFQLFVEETSGAAKGVLTQALGPWKRPVAYLSKRLDPVAAGWPRCLRAIAAAALLTREASKLTFGQDIEITSSHNLESLLRSPPDKWLTNARITQYQVLLLDPPRVRFKQTAALNPATLLPETDDTLPIHHCLDTLDSLTSTRPDLTDQPLAQAEATLFTDGSSYIRDGKRYAGAAVVTLDSVIWAEPLPIGTSAQKAELIALTKALEWSKDKSVNIYTDSRYAFATLHVHGMIYRERGWLTAGGKAIKNAPEILALLTAVWLPKRVAVMHCKGHQKDDAPTSTGNRRADEVAREVAIRPLSTQATISGSSGSSGSSGSSGSSGSSMASNFTQFVLVDNGGTGDVTVAPSNFANGIAEWISSNSRSQAYKVTCSVRQSSAQNRKYTIKVEVPKGAWRSYLNMELTIPIFATNSDCELIVKAMQGLLKDGNPIPSAIAANSGIYGSSGGGEAAAKDKKYSIGLDIGTNSVGWAVITDEYKVPSKKFKVLGNTDRHSIKKNLIGALLFDSGETAEATRLKRTARRRYTRRKNRICYLQEIFSNEMAKVDDSFFHRLEESFLVEEDKKHERHPIFGNIVDEVAYHEKYPTIYHLRKKLVDSTDKADLRLIYLALAHMIKFRGHFLIEGDLNPDNSDVDKLFIQLVQTYNQLFEENPINASGVDAKAILSARLSKSRRLENLIAQLPGEKKNGLFGNLIALSLGLTPNFKSNFDLAEDAKLQLSKDTYDDDLDNLLAQIGDQYADLFLAAKNLSDAILLSDILRVNTEITKAPLSASMIKRYDEHHQDLTLLKALVRQQLPEKYKEIFFDQSKNGYAGYIDGGASQEEFYKFIKPILEKMDGTEELLVKLNREDLLRKQRTFDNGSIPHQIHLGELHAILRRQEDFYPFLKDNREKIEKILTFRIPYYVGPLARGNSRFAWMTRKSEETITPWNFEEVVDKGASAQSFIERMTNFDKNLPNEKVLPKHSLLYEYFTVYNELTKVKYVTEGMRKPAFLSGEQKKAIVDLLFKTNRKVTVKQLKEDYFKKIECFDSVEISGVEDRFNASLGTYHDLLKIIKDKDFLDNEENEDILEDIVLTLTLFEDREMIEERLKTYAHLFDDKVMKQLKRRRYTGWGRLSRKLINGIRDKQSGKTILDFLKSDGFANRNFMQLIHDDSLTFKEDIQKAQVSGQGDSLHEHIANLAGSPAIKKGILQTVKVVDELVKVMGRHKPENIVIEMARENQTTQKGQKNSRERMKRIEEGIKELGSQILKEHPVENTQLQNEKLYLYYLQNGRDMYVDQELDINRLSDYDVDHIVPQSFLKDDSIDNKVLTRSDKARGKSDNVPSEEVVKKMKNYWRQLLNAKLITQRKFDNLTKAERGGLSELDKAGFIKRQLVETRQITKHVAQILDSRMNTKYDENDKLIREVKVITLKSKLVSDFRKDFQFYKVREINNYHHAHDAYLNAVVGTALIKKYPKLESEFVYGDYKVYDVRKMIAKSEQEIGKATAKYFFYSNIMNFFKTEITLANGEIRKRPLIETNGETGEIVWDKGRDFATVRKVLSMPQVNIVKKTEVQTGGFSKESILPKRNSDKLIARKKDWDPKKYGGFDSPTVAYSVLVVAKVEKGKSKKLKSVKELLGITIMERSSFEKNPIDFLEAKGYKEVKKDLIIKLPKYSLFELENGRKRMLASAGELQKGNELALPSKYVNFLYLASHYEKLKGSPEDNEQKQLFVEQHKHYLDEIIEQISEFSKRVILADANLDKVLSAYNKHRDKPIREQAENIIHLFTLTNLGAPAAFKYFDTTIDRKRYTSTKEVLDATLIHQSITGLYETRIDLSQLGGDKRTADGSEFESPKKKAKVE

SEQ ID NO: 16176 - protein, 2375 aa, synthetic construct
MPAAKRVKLDGGTAPLEEEYRLFLEAPIQNVTLLEQWKREIPKVWAEINPPGLASTQAPIHVQLLSTALPVRVRQYPITLEAKRSLRETIRKFRAAGILRPVHSPWNTPLLPVRKSGTSEYRMVQDLREVNKRVETIHPTVPNPYTLLSLLPPDRIWYSVLDLKDAFFCIPLAPESQLIFAFEWADAEEGESGQLTWTRLPQGFKNSPTLFNEALNRDLQGFRLDHPSVSLLQYVDDLLIAADTQAACLSATRDLLMTLAELGYRVSGKKAQLCQEEVTYLGFKIHKGSRSLSNSRTQAILQIPVPKTKRQVREFLGKIGYCRLFIPGFAELAQPLYAATRPGNDPLVWGEKEEEAFQSLKLALTQPPALALPSLDKPFQLFVEETSGAAKGVLTQALGPWKRPVAYLSKRLDPVAAGWPRCLRAIAAAALLTREASKLTFGQDIEITSSHNLESLLRSPPDKWLTNARITQYQVLLLDPPRVRFKQTAALNPATLLPETDDTLPIHHCLDTLDSLTSTRPDLTDQPLAQAEATLFTDGSSYIRDGKRYAGAAVVTLDSVIWAEPLPIGTSAQKAELIALTKALEWSKDKSVNIYTDSRYAFATLHVHGMIYRERGWLTAGGKAIKNAPEILALLTAVWLPKRVAVMHCKGHQKDDAPTSTGNRRADEVAREVAIRPLSTQATISGSSGSSGSSGSSGSSGSSMASNFTQFVLVDNGGTGDVTVAPSNFANGIAEWISSNSRSQAYKVTCSVRQSSAQNRKYTIKVEVPKGAWRSYLNMELTIPIFATNSDCELIVKAMQGLLKDGNPIPSAIAANSGIYGGSGGSMASNFTQFVLVDNGGTGDVTVAPSNFANGIAEWISSNSRSQAYKVTCSVRQSSAQNRKYTIKVEVPKGAWRSYLNMELTIPIFATNSDCELIVKAMQGLLKDGNPIPSAIAANSGIYAEAAAKEAAAKEAAAKEAAAKALEAEAAAKEAAAKEAAAKEAAAKADKKYSIGLDIGTNSVGWAVITDEYKVPSKKFKVLGNTDRHSIKKNLIGALLFDSGETAEATRLKRTARRRYTRRKNRICYLQEIFSNEMAKVDDSFFHRLEESFLVEEDKKHERHPIFGNIVDEVAYHEKYPTIYHLRKKLVDSTDKADLRLIYLALAHMIKFRGHFLIEGDLNPDNSDVDKLFIQLVQTYNQLFEENPINASGVDAKAILSARLSKSRRLENLIAQLPGEKKNGLFGNLIALSLGLTPNFKSNFDLAEDAKLQLSKDTYDDDLDNLLAQIGDQYADLFLAAKNLSDAILLSDILRVNTEITKAPLSASMIKRYDEHHQDLTLLKALVRQQLPEKYKEIFFDQSKNGYAGYIDGGASQEEFYKFIKPILEKMDGTEELLVKLNREDLLRKQRTFDNGSIPHQIHLGELHAILRRQEDFYPFLKDNREKIEKILTFRIPYYVGPLARGNSRFAWMTRKSEETITPWNFEEVVDKGASAQSFIERMTNFDKNLPNEKVLPKHSLLYEYFTVYNELTKVKYVTEGMRKPAFLSGEQKKAIVDLLFKTNRKVTVKQLKEDYFKKIECFDSVEISGVEDRFNASLGTYHDLLKIIKDKDFLDNEENEDILEDIVLTLTLFEDREMIEERLKTYAHLFDDKVMKQLKRRRYTGWGRLSRKLINGIRDKQSGKTILDFLKSDGFANRNFMQLIHDDSLTFKEDIQKAQVSGQGDSLHEHIANLAGSPAIKKGILQTVKVVDELVKVMGRHKPENIVIEMARENQTTQKGQKNSRERMKRIEEGIKELGSQILKEHPVENTQLQNEKLYLYYLQNGRDMYVDQELDINRLSDYDVDHIVPQSFLKDDSIDNKVLTRSDKARGKSDNVPSEEVVKKMKNYWRQLLNAKLITQRKFDNLTKAERGGLSELDKAGFIKRQLVETRQITKHVAQILDSRMNTKYDENDKLIREVKVITLKSKLVSDFRKDFQFYKVREINNYHHAHDAYLNAVVGTALIKKYPKLESEFVYGDYKVYDVRKMIAKSEQEIGKATAKYFFYSNIMNFFKTEITLANGEIRKRPLIETNGETGEIVWDKGRDFATVRKVLSMPQVNIVKKTEVQTGGFSKESILPKRNSDKLIARKKDWDPKKYGGFDSPTVAYSVLVVAKVEKGKSKKLKSVKELLGITIMERSSFEKNPIDFLEAKGYKEVKKDLIIKLPKYSLFELENGRKRMLASAGELQKGNELALPSKYVNFLYLASHYEKLKGSPEDNEQKQLFVEQHKHYLDEIIEQISEFSKRVILADANLDKVLSAYNKHRDKPIREQAENIIHLFTLTNLGAPAAFKYFDTTIDRKRYTSTKEVLDATLIHQSITGLYETRIDLSQLGGDKRTADGSEFESPKKKAKVE

SEQ ID NO: 16177 - protein, 2362 aa, synthetic construct
MPAAKRVKLDGGTAPLEEEYRLFLEAPIQNVTLLEQWKREIPKVWAEINPPGLASTQAPIHVQLLSTALPVRVRQYPITLEAKRSLRETIRKFRAAGILRPVHSPWNTPLLPVRKSGTSEYRMVQDLREVNKRVETIHPTVPNPYTLLSLLPPDRIWYSVLDLKDAFFCIPLAPESQLIFAFEWADAEEGESGQLTWTRLPQGFKNSPTLFNEALNRDLQGFRLDHPSVSLLQYVDDLLIAADTQAACLSATRDLLMTLAELGYRVSGKKAQLCQEEVTYLGFKIHKGSRSLSNSRTQAILQIPVPKTKRQVREFLGKIGYCRLFIPGFAELAQPLYAATRPGNDPLVWGEKEEEAFQSLKLALTQPPALALPSLDKPFQLFVEETSGAAKGVLTQALGPWKRPVAYLSKRLDPVAAGWPRCLRAIAAAALLTREASKLTFGQDIEITSSHNLESLLRSPPDKWLTNARITQYQVLLLDPPRVRFKQTAALNPATLLPETDDTLPIHHCLDTLDSLTSTRPDLTDQPLAQAEATLFTDGSSYIRDGKRYAGAAVVTLDSVIWAEPLPIGTSAQKAELIALTKALEWSKDKSVNIYTDSRYAFATLHVHGMIYRERGWLTAGGKAIKNAPEILALLTAVWLPKRVAVMHCKGHQKDDAPTSTGNRRADEVAREVAIRPLSTQATISGSSGSSGSSGSSGSSGSSMASNFTQFVLVDNGGTGDVTVAPSNFANGIAEWISSNSRSQAYKVTCSVRQSSAQNRKYTIKVEVPKGAWRSYLNMELTIPIFATNSDCELIVKAMQGLLKDGNPIPSAIAANSGIYGGSGGSMASNFTQFVLVDNGGTGDVTVAPSNFANGIAEWISSNSRSQAYKVTCSVRQSSAQNRKYTIKVEVPKGAWRSYLNMELTIPIFATNSDCELIVKAMQGLLKDGNPIPSAIAANSGIYSGGSSGGSSGSETPGTSESATPESSGGSSGGSSDKKYSIGLDIGTNSVGWAVITDEYKVPSKKFKVLGNTDRHSIKKNLIGALLFDSGETAEATRLKRTARRRYTRRKNRICYLQEIFSNEMAKVDDSFFHRLEESFLVEEDKKHERHPIFGNIVDEVAYHEKYPTIYHLRKKLVDSTDKADLRLIYLALAHMIKFRGHFLIEGDLNPDNSDVDKLFIQLVQTYNQLFEENPINASGVDAKAILSARLSKSRRLENLIAQLPGEKKNGLFGNLIALSLGLTPNFKSNFDLAEDAKLQLSKDTYDDDLDNLLAQIGDQYADLFLAAKNLSDAILLSDILRVNTEITKAPLSASMIKRYDEHHQDLTLLKALVRQQLPEKYKEIFFDQSKNGYAGYIDGGASQEEFYKFIKPILEKMDGTEELLVKLNREDLLRKQRTFDNGSIPHQIHLGELHAILRRQEDFYPFLKDNREKIEKILTFRIPYYVGPLARGNSRFAWMTRKSEETITPWNFEEVVDKGASAQSFIERMTNFDKNLPNEKVLPKHSLLYEYFTVYNELTKVKYVTEGMRKPAFLSGEQKKAIVDLLFKTNRKVTVKQLKEDYFKKIECFDSVEISGVEDRFNASLGTYHDLLKIIKDKDFLDNEENEDILEDIVLTLTLFEDREMIEERLKTYAHLFDDKVMKQLKRRRYTGWGRLSRKLINGIRDKQSGKTILDFLKSDGFANRNFMQLIHDDSLTFKEDIQKAQVSGQGDSLHEHIANLAGSPAIKKGILQTVKVVDELVKVMGRHKPENIVIEMARENQTTQKGQKNSRERMKRIEEGIKELGSQILKEHPVENTQLQNEKLYLYYLQNGRDMYVDQELDINRLSDYDVDHIVPQSFLKDDSIDNKVLTRSDKARGKSDNVPSEEVVKKMKNYWRQLLNAKLITQRKFDNLTKAERGGLSELDKAGFIKRQLVETRQITKHVAQILDSRMNTKYDENDKLIREVKVITLKSKLVSDFRKDFQFYKVREINNYHHAHDAYLNAVVGTALIKKYPKLESEFVYGDYKVYDVRKMIAKSEQEIGKATAKYFFYSNIMNFFKTEITLANGEIRKRPLIETNGETGEIVWDKGRDFATVRKVLSMPQVNIVKKTEVQTGGFSKESILPKRNSDKLIARKKDWDPKKYGGFDSPTVAYSVLVVAKVEKGKSKKLKSVKELLGITIMERSSFEKNPIDFLEAKGYKEVKKDLIIKLPKYSLFELENGRKRMLASAGELQKGNELALPSKYVNFLYLASHYEKLKGSPEDNEQKQLFVEQHKHYLDEIIEQISEFSKRVILADANLDKVLSAYNKHRDKPIREQAENIIHLFTLTNLGAPAAFKYFDTTIDRKRYTSTKEVLDATLIHQSITGLYETRIDLSQLGGDKRTADGSEFESPKKKAKVE

SEQ ID NO: 16178 - protein, 2347 aa, synthetic construct
MPAAKRVKLDGGTAPLEEEYRLFLEAPIQNVTLLEQWKREIPKVWAEINPPGLASTQAPIHVQLLSTALPVRVRQYPITLEAKRSLRETIRKFRAAGILRPVHSPWNTPLLPVRKSGTSEYRMVQDLREVNKRVETIHPTVPNPYTLLSLLPPDRIWYSVLDLKDAFFCIPLAPESQLIFAFEWADAEEGESGQLTWTRLPQGFKNSPTLFNEALNRDLQGFRLDHPSVSLLQYVDDLLIAADTQAACLSATRDLLMTLAELGYRVSGKKAQLCQEEVTYLGFKIHKGSRSLSNSRTQAILQIPVPKTKRQVREFLGKIGYCRLFIPGFAELAQPLYAATRPGNDPLVWGEKEEEAFQSLKLALTQPPALALPSLDKPFQLFVEETSGAAKGVLTQALGPWKRPVAYLSKRLDPVAAGWPRCLRAIAAAALLTREASKLTFGQDIEITSSHNLESLLRSPPDKWLTNARITQYQVLLLDPPRVRFKQTAALNPATLLPETDDTLPIHHCLDTLDSLTSTRPDLTDQPLAQAEATLFTDGSSYIRDGKRYAGAAVVTLDSVIWAEPLPIGTSAQKAELIALTKALEWSKDKSVNIYTDSRYAFATLHVHGMIYRERGWLTAGGKAIKNAPEILALLTAVWLPKRVAVMHCKGHQKDDAPTSTGNRRADEVAREVAIRPLSTQATISGSSGSSGSSGSSGSSGSSMASNFTQFVLVDNGGTGDVTVAPSNFANGIAEWISSNSRSQAYKVTCSVRQSSAQNRKYTIKVEVPKGAWRSYLNMELTIPIFATNSDCELIVKAMQGLLKDGNPIPSAIAANSGIYGGSGGSMASNFTQFVLVDNGGTGDVTVAPSNFANGIAEWISSNSRSQAYKVTCSVRQSSAQNRKYTIKVEVPKGAWRSYLNMELTIPIFATNSDCELIVKAMQGLLKDGNPIPSAIAANSGIYGSSGSSGSSGSSGSSGSSDKKYSIGLDIGTNSVGWAVITDEYKVPSKKFKVLGNTDRHSIKKNLIGALLFDSGETAEATRLKRTARRRYTRRKNRICYLQEIFSNEMAKVDDSFFHRLEESFLVEEDKKHERHPIFGNIVDEVAYHEKYPTIYHLRKKLVDSTDKADLRLIYLALAHMIKFRGHFLIEGDLNPDNSDVDKLFIQLVQTYNQLFEENPINASGVDAKAILSARLSKSRRLENLIAQLPGEKKNGLFGNLIALSLGLTPNFKSNFDLAEDAKLQLSKDTYDDDLDNLLAQIGDQYADLFLAAKNLSDAILLSDILRVNTEITKAPLSASMIKRYDEHHQDLTLLKALVRQQLPEKYKEIFFDQSKNGYAGYIDGGASQEEFYKFIKPILEKMDGTEELLVKLNREDLLRKQRTFDNGSIPHQIHLGELHAILRRQEDFYPFLKDNREKIEKILTFRIPYYVGPLARGNSRFAWMTRKSEETITPWNFEEVVDKGASAQSFIERMTNFDKNLPNEKVLPKHSLLYEYFTVYNELTKVKYVTEGMRKPAFLSGEQKKAIVDLLFKTNRKVTVKQLKEDYFKKIECFDSVEISGVEDRFNASLGTYHDLLKIIKDKDFLDNEENEDILEDIVLTLTLFEDREMIEERLKTYAHLFDDKVMKQLKRRRYTGWGRLSRKLINGIRDKQSGKTILDFLKSDGFANRNFMQLIHDDSLTFKEDIQKAQVSGQGDSLHEHIANLAGSPAIKKGILQTVKVVDELVKVMGRHKPENIVIEMARENQTTQKGQKNSRERMKRIEEGIKELGSQILKEHPVENTQLQNEKLYLYYLQNGRDMYVDQELDINRLSDYDVDHIVPQSFLKDDSIDNKVLTRSDKARGKSDNVPSEEVVKKMKNYWRQLLNAKLITQRKFDNLTKAERGGLSELDKAGFIKRQLVETRQITKHVAQILDSRMNTKYDENDKLIREVKVITLKSKLVSDFRKDFQFYKVREINNYHHAHDAYLNAVVGTALIKKYPKLESEFVYGDYKVYDVRKMIAKSEQEIGKATAKYFFYSNIMNFFKTEITLANGEIRKRPLIETNGETGEIVWDKGRDFATVRKVLSMPQVNIVKKTEVQTGGFSKESILPKRNSDKLIARKKDWDPKKYGGFDSPTVAYSVLVVAKVEKGKSKKLKSVKELLGITIMERSSFEKNPIDFLEAKGYKEVKKDLIIKLPKYSLFELENGRKRMLASAGELQKGNELALPSKYVNFLYLASHYEKLKGSPEDNEQKQLFVEQHKHYLDEIIEQISEFSKRVILADANLDKVLSAYNKHRDKPIREQAENIIHLFTLTNLGAPAAFKYFDTTIDRKRYTSTKEVLDATLIHQSITGLYETRIDLSQLGGDKRTADGSEFESPKKKAKVE

SEQ ID NO: 16179 - protein, 2340 aa, synthetic construct
MPAAKRVKLDGGTAPLEEEYRLFLEAPIQNVTLLEQWKREIPKVWAEINPPGLASTQAPIHVQLLSTALPVRVRQYPITLEAKRSLRETIRKFRAAGILRPVHSPWNTPLLPVRKSGTSEYRMVQDLREVNKRVETIHPTVPNPYTLLSLLPPDRIWYSVLDLKDAFFCIPLAPESQLIFAFEWADAEEGESGQLTWTRLPQGFKNSPTLFNEALNRDLQGFRLDHPSVSLLQYVDDLLIAADTQAACLSATRDLLMTLAELGYRVSGKKAQLCQEEVTYLGFKIHKGSRSLSNSRTQAILQIPVPKTKRQVREFLGKIGYCRLFIPGFAELAQPLYAATRPGNDPLVWGEKEEEAFQSLKLALTQPPALALPSLDKPFQLFVEETSGAAKGVLTQALGPWKRPVAYLSKRLDPVAAGWPRCLRAIAAAALLTREASKLTFGQDIEITSSHNLESLLRSPPDKWLTNARITQYQVLLLDPPRVRFKQTAALNPATLLPETDDTLPIHHCLDTLDSLTSTRPDLTDQPLAQAEATLFTDGSSYIRDGKRYAGAAVVTLDSVIWAEPLPIGTSAQKAELIALTKALEWSKDKSVNIYTDSRYAFATLHVHGMIYRERGWLTAGGKAIKNAPEILALLTAVWLPKRVAVMHCKGHQKDDAPTSTGNRRADEVAREVAIRPLSTQATISGSSGSSGSSGSSGSSGSSMASNFTQFVLVDNGGTGDVTVAPSNFANGIAEWISSNSRSQAYKVTCSVRQSSAQNRKYTIKVEVPKGAWRSYLNMELTIPIFATNSDCELIVKAMQGLLKDGNPIPSAIAANSGIYGGSGGSMASNFTQFVLVDNGGTGDVTVAPSNFANGIAEWISSNSRSQAYKVTCSVRQSSAQNRKYTIKVEVPKGAWRSYLNMELTIPIFATNSDCELIVKAMQGLLKDGNPIPSAIAANSGIYGSSGGGEAAAKDKKYSIGLDIGTNSVGWAVITDEYKVPSKKFKVLGNTDRHSIKKNLIGALLFDSGETAEATRLKRTARRRYTRRKNRICYLQEIFSNEMAKVDDSFFHRLEESFLVEEDKKHERHPIFGNIVDEVAYHEKYPTIYHLRKKLVDSTDKADLRLIYLALAHMIKFRGHFLIEGDLNPDNSDVDKLFIQLVQTYNQLFEENPINASGVDAKAILSARLSKSRRLENLIAQLPGEKKNGLFGNLIALSLGLTPNFKSNFDLAEDAKLQLSKDTYDDDLDNLLAQIGDQYADLFLAAKNLSDAILLSDILRVNTEITKAPLSASMIKRYDEHHQDLTLLKALVRQQLPEKYKEIFFDQSKNGYAGYIDGGASQEEFYKFIKPILEKMDGTEELLVKLNREDLLRKQRTFDNGSIPHQIHLGELHAILRRQEDFYPFLKDNREKIEKILTFRIPYYVGPLARGNSRFAWMTRKSEETITPWNFEEVVDKGASAQSFIERMTNFDKNLPNEKVLPKHSLLYEYFTVYNELTKVKYVTEGMRKPAFLSGEQKKAIVDLLFKTNRKVTVKQLKEDYFKKIECFDSVEISGVEDRFNASLGTYHDLLKIIKDKDFLDNEENEDILEDIVLTLTLFEDREMIEERLKTYAHLFDDKVMKQLKRRRYTGWGRLSRKLINGIRDKQSGKTILDFLKSDGFANRNFMQLIHDDSLTFKEDIQKAQVSGQGDSLHEHIANLAGSPAIKKGILQTVKVVDELVKVMGRHKPENIVIEMARENQTTQKGQKNSRERMKRIEEGIKELGSQILKEHPVENTQLQNEKLYLYYLQNGRDMYVDQELDINRLSDYDVDHIVPQSFLKDDSIDNKVLTRSDKARGKSDNVPSEEVVKKMKNYWRQLLNAKLITQRKFDNLTKAERGGLSELDKAGFIKRQLVETRQITKHVAQILDSRMNTKYDENDKLIREVKVITLKSKLVSDFRKDFQFYKVREINNYHHAHDAYLNAVVGTALIKKYPKLESEFVYGDYKVYDVRKMIAKSEQEIGKATAKYFFYSNIMNFFKTEITLANGEIRKRPLIETNGETGEIVWDKGRDFATVRKVLSMPQVNIVKKTEVQTGGFSKESILPKRNSDKLIARKKDWDPKKYGGFDSPTVAYSVLVVAKVEKGKSKKLKSVKELLGITIMERSSFEKNPIDFLEAKGYKEVKKDLIIKLPKYSLFELENGRKRMLASAGELQKGNELALPSKYVNFLYLASHYEKLKGSPEDNEQKQLFVEQHKHYLDEIIEQISEFSKRVILADANLDKVLSAYNKHRDKPIREQAENIIHLFTLTNLGAPAAFKYFDTTIDRKRYTSTKEVLDATLIHQSITGLYETRIDLSQLGGDKRTADGSEFESPKKKAKVE

SEQ ID NO: 16180 - protein, 2631 aa, synthetic construct
MPAAKRVKLDGGTAPLEEEYRLFLEAPIQNVTLLEQWKREIPKVWAEINPPGLASTQAPIHVQLLSTALPVRVRQYPITLEAKRSLRETIRKFRAAGILRPVHSPWNTPLLPVRKSGTSEYRMVQDLREVNKRVETIHPTVPNPYTLLSLLPPDRIWYSVLDLKDAFFCIPLAPESQLIFAFEWADAEEGESGQLTWTRLPQGFKNSPTLFNEALNRDLQGFRLDHPSVSLLQYVDDLLIAADTQAACLSATRDLLMTLAELGYRVSGKKAQLCQEEVTYLGFKIHKGSRSLSNSRTQAILQIPVPKTKRQVREFLGKIGYCRLFIPGFAELAQPLYAATRPGNDPLVWGEKEEEAFQSLKLALTQPPALALPSLDKPFQLFVEETSGAAKGVLTQALGPWKRPVAYLSKRLDPVAAGWPRCLRAIAAAALLTREASKLTFGQDIEITSSHNLESLLRSPPDKWLTNARITQYQVLLLDPPRVRFKQTAALNPATLLPETDDTLPIHHCLDTLDSLTSTRPDLTDQPLAQAEATLFTDGSSYIRDGKRYAGAAVVTLDSVIWAEPLPIGTSAQKAELIALTKALEWSKDKSVNIYTDSRYAFATLHVHGMIYRERGWLTAGGKAIKNAPEILALLTAVWLPKRVAVMHCKGHQKDDAPTSTGNRRADEVAREVAIRPLSTQATISGSSGSSGSSGSSGSSGSSMASNFTQFVLVDNGGTGDVTVAPSNFANGIAEWISSNSRSQAYKVTCSVRQSSAQNRKYTIKVEVPKGAWRSYLNMELTIPIFATNSDCELIVKAMQGLLKDGNPIPSAIAANSGIYGGSGGSMASNFTQFVLVDNGGTGDVTVAPSNFANGIAEWISSNSRSQAYKVTCSVRQSSAQNRKYTIKVEVPKGAWRSYLNMELTIPIFATNSDCELIVKAMQGLLKDGNPIPSAIAANSGIYGGGSGGGSGGGSGGGSMASNFTQFVLVDNGGTGDVTVAPSNFANGIAEWISSNSRSQAYKVTCSVRQSSAQNRKYTIKVEVPKGAWRSYLNMELTIPIFATNSDCELIVKAMQGLLKDGNPIPSAIAANSGIYGGSGGSMASNFTQFVLVDNGGTGDVTVAPSNFANGIAEWISSNSRSQAYKVTCSVRQSSAQNRKYTIKVEVPKGAWRSYLNMELTIPIFATNSDCELIVKAMQGLLKDGNPIPSAIAANSGIYAEAAAKEAAAKEAAAKEAAAKALEAEAAAKEAAAKEAAAKEAAAKADKKYSIGLDIGTNSVGWAVITDEYKVPSKKFKVLGNTDRHSIKKNLIGALLFDSGETAEATRLKRTARRRYTRRKNRICYLQEIFSNEMAKVDDSFFHRLEESFLVEEDKKHERHPIFGNIVDEVAYHEKYPTIYHLRKKLVDSTDKADLRLIYLALAHMIKFRGHFLIEGDLNPDNSDVDKLFIQLVQTYNQLFEENPINASGVDAKAILSARLSKSRRLENLIAQLPGEKKNGLFGNLIALSLGLTPNFKSNFDLAEDAKLQLSKDTYDDDLDNLLAQIGDQYADLFLAAKNLSDAILLSDILRVNTEITKAPLSASMIKRYDEHHQDLTLLKALVRQQLPEKYKEIFFDQSKNGYAGYIDGGASQEEFYKFIKPILEKMDGTEELLVKLNREDLLRKQRTFDNGSIPHQIHLGELHAILRRQEDFYPFLKDNREKIEKILTFRIPYYVGPLARGNSRFAWMTRKSEETITPWNFEEVVDKGASAQSFIERMTNFDKNLPNEKVLPKHSLLYEYFTVYNELTKVKYVTEGMRKPAFLSGEQKKAIVDLLFKTNRKVTVKQLKEDYFKKIECFDSVEISGVEDRFNASLGTYHDLLKIIKDKDFLDNEENEDILEDIVLTLTLFEDREMIEERLKTYAHLFDDKVMKQLKRRRYTGWGRLSRKLINGIRDKQSGKTILDFLKSDGFANRNFMQLIHDDSLTFKEDIQKAQVSGQGDSLHEHIANLAGSPAIKKGILQTVKVVDELVKVMGRHKPENIVIEMARENQTTQKGQKNSRERMKRIEEGIKELGSQILKEHPVENTQLQNEKLYLYYLQNGRDMYVDQELDINRLSDYDVDHIVPQSFLKDDSIDNKVLTRSDKARGKSDNVPSEEVVKKMKNYWRQLLNAKLITQRKFDNLTKAERGGLSELDKAGFIKRQLVETRQITKHVAQILDSRMNTKYDENDKLIREVKVITLKSKLVSDFRKDFQFYKVREINNYHHAHDAYLNAVVGTALIKKYPKLESEFVYGDYKVYDVRKMIAKSEQEIGKATAKYFFYSNIMNFFKTEITLANGEIRKRPLIETNGETGEIVWDKGRDFATVRKVLSMPQVNIVKKTEVQTGGFSKESILPKRNSDKLIARKKDWDPKKYGGFDSPTVAYSVLVVAKVEKGKSKKLKSVKELLGITIMERSSFEKNPIDFLEAKGYKEVKKDLIIKLPKYSLFELENGRKRMLASAGELQKGNELALPSKYVNFLYLASHYEKLKGSPEDNEQKQLFVEQHKHYLDEIIEQISEFSKRVILADANLDKVLSAYNKHRDKPIREQAENIIHLFTLTNLGAPAAFKYFDTTIDRKRYTSTKEVLDATLIHQSITGLYETRIDLSQLGGDKRTADGSEFESPKKKAKVE

SEQ ID NO: 16181 - protein, 2618 aa, synthetic construct
MPAAKRVKLDGGTAPLEEEYRLFLEAPIQNVTLLEQWKREIPKVWAEINPPGLASTQAPIHVQLLSTALPVRVRQYPITLEAKRSLRETIRKFRAAGILRPVHSPWNTPLLPVRKSGTSEYRMVQDLREVNKRVETIHPTVPNPYTLLSLLPPDRIWYSVLDLKDAFFCIPLAPESQLIFAFEWADAEEGESGQLTWTRLPQGFKNSPTLFNEALNRDLQGFRLDHPSVSLLQYVDDLLIAADTQAACLSATRDLLMTLAELGYRVSGKKAQLCQEEVTYLGFKIHKGSRSLSNSRTQAILQIPVPKTKRQVREFLGKIGYCRLFIPGFAELAQPLYAATRPGNDPLVWGEKEEEAFQSLKLALTQPPALALPSLDKPFQLFVEETSGAAKGVLTQALGPWKRPVAYLSKRLDPVAAGWPRCLRAIAAAALLTREASKLTFGQDIEITSSHNLESLLRSPPDKWLTNARITQYQVLLLDPPRVRFKQTAALNPATLLPETDDTLPIHHCLDTLDSLTSTRPDLTDQPLAQAEATLFTDGSSYIRDGKRYAGAAVVTLDSVIWAEPLPIGTSAQKAELIALTKALEWSKDKSVNIYTDSRYAFATLHVHGMIYRERGWLTAGGKAIKNAPEILALLTAVWLPKRVAVMHCKGHQKDDAPTSTGNRRADEVAREVAIRPLSTQATISGSSGSSGSSGSSGSSGSSMASNFTQFVLVDNGGTGDVTVAPSNFANGIAEWISSNSRSQAYKVTCSVRQSSAQNRKYTIKVEVPKGAWRSYLNMELTIPIFATNSDCELIVKAMQGLLKDGNPIPSAIAANSGIYGGSGGSMASNFTQFVLVDNGGTGDVTVAPSNFANGIAEWISSNSRSQAYKVTCSVRQSSAQNRKYTIKVEVPKGAWRSYLNMELTIPIFATNSDCELIVKAMQGLLKDGNPIPSAIAANSGIYGGGSGGGSGGGSGGGSMASNFTQFVLVDNGGTGDVTVAPSNFANGIAEWISSNSRSQAYKVTCSVRQSSAQNRKYTIKVEVPKGAWRSYLNMELTIPIFATNSDCELIVKAMQGLLKDGNPIPSAIAANSGIYGGSGGSMASNFTQFVLVDNGGTGDVTVAPSNFANGIAEWISSNSRSQAYKVTCSVRQSSAQNRKYTIKVEVPKGAWRSYLNMELTIPIFATNSDCELIVKAMQGLLKDGNPIPSAIAANSGIYSGGSSGGSSGSETPGTSESATPESSGGSSGGSSDKKYSIGLDIGTNSVGWAVITDEYKVPSKKFKVLGNTDRHSIKKNLIGALLFDSGETAEATRLKRTARRRYTRRKNRICYLQEIFSNEMAKVDDSFFHRLEESFLVEEDKKHERHPIFGNIVDEVAYHEKYPTIYHLRKKLVDSTDKADLRLIYLALAHMIKFRGHFLIEGDLNPDNSDVDKLFIQLVQTYNQLFEENPINASGVDAKAILSARLSKSRRLENLIAQLPGEKKNGLFGNLIALSLGLTPNFKSNFDLAEDAKLQLSKDTYDDDLDNLLAQIGDQYADLFLAAKNLSDAILLSDILRVNTEITKAPLSASMIKRYDEHHQDLTLLKALVRQQLPEKYKEIFFDQSKNGYAGYIDGGASQEEFYKFIKPILEKMDGTEELLVKLNREDLLRKQRTFDNGSIPHQIHLGELHAILRRQEDFYPFLKDNREKIEKILTFRIPYYVGPLARGNSRFAWMTRKSEETITPWNFEEVVDKGASAQSFIERMTNFDKNLPNEKVLPKHSLLYEYFTVYNELTKVKYVTEGMRKPAFLSGEQKKAIVDLLFKTNRKVTVKQLKEDYFKKIECFDSVEISGVEDRFNASLGTYHDLLKIIKDKDFLDNEENEDILEDIVLTLTLFEDREMIEERLKTYAHLFDDKVMKQLKRRRYTGWGRLSRKLINGIRDKQSGKTILDFLKSDGFANRNFMQLIHDDSLTFKEDIQKAQVSGQGDSLHEHIANLAGSPAIKKGILQTVKVVDELVKVMGRHKPENIVIEMARENQTTQKGQKNSRERMKRIEEGIKELGSQILKEHPVENTQLQNEKLYLYYLQNGRDMYVDQELDINRLSDYDVDHIVPQSFLKDDSIDNKVLTRSDKARGKSDNVPSEEVVKKMKNYWRQLLNAKLITQRKFDNLTKAERGGLSELDKAGFIKRQLVETRQITKHVAQILDSRMNTKYDENDKLIREVKVITLKSKLVSDFRKDFQFYKVREINNYHHAHDAYLNAVVGTALIKKYPKLESEFVYGDYKVYDVRKMIAKSEQEIGKATAKYFFYSNIMNFFKTEITLANGEIRKRPLIETNGETGEIVWDKGRDFATVRKVLSMPQVNIVKKTEVQTGGFSKESILPKRNSDKLIARKKDWDPKKYGGFDSPTVAYSVLVVAKVEKGKSKKLKSVKELLGITIMERSSFEKNPIDFLEAKGYKEVKKDLIIKLPKYSLFELENGRKRMLASAGELQKGNELALPSKYVNFLYLASHYEKLKGSPEDNEQKQLFVEQHKHYLDEIIEQISEFSKRVILADANLDKVLSAYNKHRDKPIREQAENIIHLFTLTNLGAPAAFKYFDTTIDRKRYTSTKEVLDATLIHQSITGLYETRIDLSQLGGDKRTADGSEFESPKKKAKVE

SEQ ID NO: 16182 - protein, 2603 aa, synthetic construct
MPAAKRVKLDGGTAPLEEEYRLFLEAPIQNVTLLEQWKREIPKVWAEINPPGLASTQAPIHVQLLSTALPVRVRQYPITLEAKRSLRETIRKFRAAGILRPVHSPWNTPLLPVRKSGTSEYRMVQDLREVNKRVETIHPTVPNPYTLLSLLPPDRIWYSVLDLKDAFFCIPLAPESQLIFAFEWADAEEGESGQLTWTRLPQGFKNSPTLFNEALNRDLQGFRLDHPSVSLLQYVDDLLIAADTQAACLSATRDLLMTLAELGYRVSGKKAQLCQEEVTYLGFKIHKGSRSLSNSRTQAILQIPVPKTKRQVREFLGKIGYCRLFIPGFAELAQPLYAATRPGNDPLVWGEKEEEAFQSLKLALTQPPALALPSLDKPFQLFVEETSGAAKGVLTQALGPWKRPVAYLSKRLDPVAAGWPRCLRAIAAAALLTREASKLTFGQDIEITSSHNLESLLRSPPDKWLTNARITQYQVLLLDPPRVRFKQTAALNPATLLPETDDTLPIHHCLDTLDSLTSTRPDLTDQPLAQAEATLFTDGSSYIRDGKRYAGAAVVTLDSVIWAEPLPIGTSAQKAELIALTKALEWSKDKSVNIYTDSRYAFATLHVHGMIYRERGWLTAGGKAIKNAPEILALLTAVWLPKRVAVMHCKGHQKDDAPTSTGNRRADEVAREVAIRPLSTQATISGSSGSSGSSGSSGSSGSSMASNFTQFVLVDNGGTGDVTVAPSNFANGIAEWISSNSRSQAYKVTCSVRQSSAQNRKYTIKVEVPKGAWRSYLNMELTIPIFATNSDCELIVKAMQGLLKDGNPIPSAIAANSGIYGGSGGSMASNFTQFVLVDNGGTGDVTVAPSNFANGIAEWISSNSRSQAYKVTCSVRQSSAQNRKYTIKVEVPKGAWRSYLNMELTIPIFATNSDCELIVKAMQGLLKDGNPIPSAIAANSGIYGGGSGGGSGGGSGGGSMASNFTQFVLVDNGGTGDVTVAPSNFANGIAEWISSNSRSQAYKVTCSVRQSSAQNRKYTIKVEVPKGAWRSYLNMELTIPIFATNSDCELIVKAMQGLLKDGNPIPSAIAANSGIYGGSGGSMASNFTQFVLVDNGGTGDVTVAPSNFANGIAEWISSNSRSQAYKVTCSVRQSSAQNRKYTIKVEVPKGAWRSYLNMELTIPIFATNSDCELIVKAMQGLLKDGNPIPSAIAANSGIYGSSGSSGSSGSSGSSGSSDKKYSIGLDIGTNSVGWAVITDEYKVPSKKFKVLGNTDRHSIKKNLIGALLFDSGETAEATRLKRTARRRYTRRKNRICYLQEIFSNEMAKVDDSFFHRLEESFLVEEDKKHERHPIFGNIVDEVAYHEKYPTIYHLRKKLVDSTDKADLRLIYLALAHMIKFRGHFLIEGDLNPDNSDVDKLFIQLVQTYNQLFEENPINASGVDAKAILSARLSKSRRLENLIAQLPGEKKNGLFGNLIALSLGLTPNFKSNFDLAEDAKLQLSKDTYDDDLDNLLAQIGDQYADLFLAAKNLSDAILLSDILRVNTEITKAPLSASMIKRYDEHHQDLTLLKALVRQQLPEKYKEIFFDQSKNGYAGYIDGGASQEEFYKFIKPILEKMDGTEELLVKLNREDLLRKQRTFDNGSIPHQIHLGELHAILRRQEDFYPFLKDNREKIEKILTFRIPYYVGPLARGNSRFAWMTRKSEETITPWNFEEVVDKGASAQSFIERMTNFDKNLPNEKVLPKHSLLYEYFTVYNELTKVKYVTEGMRKPAFLSGEQKKAIVDLLFKTNRKVTVKQLKEDYFKKIECFDSVEISGVEDRFNASLGTYHDLLKIIKDKDFLDNEENEDILEDIVLTLTLFEDREMIEERLKTYAHLFDDKVMKQLKRRRYTGWGRLSRKLINGIRDKQSGKTILDFLKSDGFANRNFMQLIHDDSLTFKEDIQKAQVSGQGDSLHEHIANLAGSPAIKKGILQTVKVVDELVKVMGRHKPENIVIEMARENQTTQKGQKNSRERMKRIEEGIKELGSQILKEHPVENTQLQNEKLYLYYLQNGRDMYVDQELDINRLSDYDVDHIVPQSFLKDDSIDNKVLTRSDKARGKSDNVPSEEVVKKMKNYWRQLLNAKLITQRKFDNLTKAERGGLSELDKAGFIKRQLVETRQITKHVAQILDSRMNTKYDENDKLIREVKVITLKSKLVSDFRKDFQFYKVREINNYHHAHDAYLNAVVGTALIKKYPKLESEFVYGDYKVYDVRKMIAKSEQEIGKATAKYFFYSNIMNFFKTEITLANGEIRKRPLIETNGETGEIVWDKGRDFATVRKVLSMPQVNIVKKTEVQTGGFSKESILPKRNSDKLIARKKDWDPKKYGGFDSPTVAYSVLVVAKVEKGKSKKLKSVKELLGITIMERSSFEKNPIDFLEAKGYKEVKKDLIIKLPKYSLFELENGRKRMLASAGELQKGNELALPSKYVNFLYLASHYEKLKGSPEDNEQKQLFVEQHKHYLDEIIEQISEFSKRVILADANLDKVLSAYNKHRDKPIREQAENIIHLFTLTNLGAPAAFKYFDTTIDRKRYTSTKEVLDATLIHQSITGLYETRIDLSQLGGDKRTADGSEFESPKKKAKVE

SEQ ID NO: 16183 - protein, 2596 aa, synthetic construct
MPAAKRVKLDGGTAPLEEEYRLFLEAPIQNVTLLEQWKREIPKVWAEINPPGLASTQAPIHVQLLSTALPVRVRQYPITLEAKRSLRETIRKFRAAGILRPVHSPWNTPLLPVRKSGTSEYRMVQDLREVNKRVETIHPTVPNPYTLLSLLPPDRIWYSVLDLKDAFFCIPLAPESQLIFAFEWADAEEGESGQLTWTRLPQGFKNSPTLFNEALNRDLQGFRLDHPSVSLLQYVDDLLIAADTQAACLSATRDLLMTLAELGYRVSGKKAQLCQEEVTYLGFKIHKGSRSLSNSRTQAILQIPVPKTKRQVREFLGKIGYCRLFIPGFAELAQPLYAATRPGNDPLVWGEKEEEAFQSLKLALTQPPALALPSLDKPFQLFVEETSGAAKGVLTQALGPWKRPVAYLSKRLDPVAAGWPRCLRAIAAAALLTREASKLTFGQDIEITSSHNLESLLRSPPDKWLTNARITQYQVLLLDPPRVRFKQTAALNPATLLPETDDTLPIHHCLDTLDSLTSTRPDLTDQPLAQAEATLFTDGSSYIRDGKRYAGAAVVTLDSVIWAEPLPIGTSAQKAELIALTKALEWSKDKSVNIYTDSRYAFATLHVHGMIYRERGWLTAGGKAIKNAPEILALLTAVWLPKRVAVMHCKGHQKDDAPTSTGNRRADEVAREVAIRPLSTQATISGSSGSSGSSGSSGSSGSSMASNFTQFVLVDNGGTGDVTVAPSNFANGIAEWISSNSRSQAYKVTCSVRQSSAQNRKYTIKVEVPKGAWRSYLNMELTIPIFATNSDCELIVKAMQGLLKDGNPIPSAIAANSGIYGGSGGSMASNFTQFVLVDNGGTGDVTVAPSNFANGIAEWISSNSRSQAYKVTCSVRQSSAQNRKYTIKVEVPKGAWRSYLNMELTIPIFATNSDCELIVKAMQGLLKDGNPIPSAIAANSGIYGGGSGGGSGGGSGGGSMASNFTQFVLVDNGGTGDVTVAPSNFANGIAEWISSNSRSQAYKVTCSVRQSSAQNRKYTIKVEVPKGAWRSYLNMELTIPIFATNSDCELIVKAMQGLLKDGNPIPSAIAANSGIYGGSGGSMASNFTQFVLVDNGGTGDVTVAPSNFANGIAEWISSNSRSQAYKVTCSVRQSSAQNRKYTIKVEVPKGAWRSYLNMELTIPIFATNSDCELIVKAMQGLLKDGNPIPSAIAANSGIYGSSGGGEAAAKDKKYSIGLDIGTNSVGWAVITDEYKVPSKKFKVLGNTDRHSIKKNLIGALLFDSGETAEATRLKRTARRRYTRRKNRICYLQEIFSNEMAKVDDSFFHRLEESFLVEEDKKHERHPIFGNIVDEVAYHEKYPTIYHLRKKLVDSTDKADLRLIYLALAHMIKFRGHFLIEGDLNPDNSDVDKLFIQLVQTYNQLFEENPINASGVDAKAILSARLSKSRRLENLIAQLPGEKKNGLFGNLIALSLGLTPNFKSNFDLAEDAKLQLSKDTYDDDLDNLLAQIGDQYADLFLAAKNLSDAILLSDILRVNTEITKAPLSASMIKRYDEHHQDLTLLKALVRQQLPEKYKEIFFDQSKNGYAGYIDGGASQEEFYKFIKPILEKMDGTEELLVKLNREDLLRKQRTFDNGSIPHQIHLGELHAILRRQEDFYPFLKDNREKIEKILTFRIPYYVGPLARGNSRFAWMTRKSEETITPWNFEEVVDKGASAQSFIERMTNFDKNLPNEKVLPKHSLLYEYFTVYNELTKVKYVTEGMRKPAFLSGEQKKAIVDLLFKTNRKVTVKQLKEDYFKKIECFDSVEISGVEDRFNASLGTYHDLLKIIKDKDFLDNEENEDILEDIVLTLTLFEDREMIEERLKTYAHLFDDKVMKQLKRRRYTGWGRLSRKLINGIRDKQSGKTILDFLKSDGFANRNFMQLIHDDSLTFKEDIQKAQVSGQGDSLHEHIANLAGSPAIKKGILQTVKVVDELVKVMGRHKPENIVIEMARENQTTQKGQKNSRERMKRIEEGIKELGSQILKEHPVENTQLQNEKLYLYYLQNGRDMYVDQELDINRLSDYDVDHIVPQSFLKDDSIDNKVLTRSDKARGKSDNVPSEEVVKKMKNYWRQLLNAKLITQRKFDNLTKAERGGLSELDKAGFIKRQLVETRQITKHVAQILDSRMNTKYDENDKLIREVKVITLKSKLVSDFRKDFQFYKVREINNYHHAHDAYLNAVVGTALIKKYPKLESEFVYGDYKVYDVRKMIAKSEQEIGKATAKYFFYSNIMNFFKTEITLANGEIRKRPLIETNGETGEIVWDKGRDFATVRKVLSMPQVNIVKKTEVQTGGFSKESILPKRNSDKLIARKKDWDPKKYGGFDSPTVAYSVLVVAKVEKGKSKKLKSVKELLGITIMERSSFEKNPIDFLEAKGYKEVKKDLIIKLPKYSLFELENGRKRMLASAGELQKGNELALPSKYVNFLYLASHYEKLKGSPEDNEQKQLFVEQHKHYLDEIIEQISEFSKRVILADANLDKVLSAYNKHRDKPIREQAENIIHLFTLTNLGAPAAFKYFDTTIDRKRYTSTKEVLDATLIHQSITGLYETRIDLSQLGGDKRTADGSEFESPKKKAKVE

SEQ ID NO: 16184 - protein, 2245 aa, synthetic construct
MPAAKRVKLDGGTAPLEEEYRLFLEAPIQNVTLLEQWKREIPKVWAEINPPGLASTQAPIHVQLLSTALPVRVRQYPITLEAKRSLRETIRKFRAAGILRPVHSPWNTPLLPVRKSGTSEYRMVQDLREVNKRVETIHPTVPNPYTLLSLLPPDRIWYSVLDLKDAFFCIPLAPESQLIFAFEWADAEEGESGQLTWTRLPQGFKNSPTLFNEALNRDLQGFRLDHPSVSLLQYVDDLLIAADTQAACLSATRDLLMTLAELGYRVSGKKAQLCQEEVTYLGFKIHKGSRSLSNSRTQAILQIPVPKTKRQVREFLGKIGYCRLFIPGFAELAQPLYAATRPGNDPLVWGEKEEEAFQSLKLALTQPPALALPSLDKPFQLFVEETSGAAKGVLTQALGPWKRPVAYLSKRLDPVAAGWPRCLRAIAAAALLTREASKLTFGQDIEITSSHNLESLLRSPPDKWLTNARITQYQVLLLDPPRVRFKQTAALNPATLLPETDDTLPIHHCLDTLDSLTSTRPDLTDQPLAQAEATLFTDGSSYIRDGKRYAGAAVVTLDSVIWAEPLPIGTSAQKAELIALTKALEWSKDKSVNIYTDSRYAFATLHVHGMIYRERGWLTAGGKAIKNAPEILALLTAVWLPKRVAVMHCKGHQKDDAPTSTGNRRADEVAREVAIRPLSTQATISGSSGGGEAAAKMASNFTQFVLVDNGGTGDVTVAPSNFANGIAEWISSNSRSQAYKVTCSVRQSSAQNRKYTIKVEVPKGAWRSYLNMELTIPIFATNSDCELIVKAMQGLLKDGNPIPSAIAANSGIYAEAAAKEAAAKEAAAKEAAAKALEAEAAAKEAAAKEAAAKEAAAKADKKYSIGLDIGTNSVGWAVITDEYKVPSKKFKVLGNTDRHSIKKNLIGALLFDSGETAEATRLKRTARRRYTRRKNRICYLQEIFSNEMAKVDDSFFHRLEESFLVEEDKKHERHPIFGNIVDEVAYHEKYPTIYHLRKKLVDSTDKADLRLIYLALAHMIKFRGHFLIEGDLNPDNSDVDKLFIQLVQTYNQLFEENPINASGVDAKAILSARLSKSRRLENLIAQLPGEKKNGLFGNLIALSLGLTPNFKSNFDLAEDAKLQLSKDTYDDDLDNLLAQIGDQYADLFLAAKNLSDAILLSDILRVNTEITKAPLSASMIKRYDEHHQDLTLLKALVRQQLPEKYKEIFFDQSKNGYAGYIDGGASQEEFYKFIKPILEKMDGTEELLVKLNREDLLRKQRTFDNGSIPHQIHLGELHAILRRQEDFYPFLKDNREKIEKILTFRIPYYVGPLARGNSRFAWMTRKSEETITPWNFEEVVDKGASAQSFIERMTNFDKNLPNEKVLPKHSLLYEYFTVYNELTKVKYVTEGMRKPAFLSGEQKKAIVDLLFKTNRKVTVKQLKEDYFKKIECFDSVEISGVEDRFNASLGTYHDLLKIIKDKDFLDNEENEDILEDIVLTLTLFEDREMIEERLKTYAHLFDDKVMKQLKRRRYTGWGRLSRKLINGIRDKQSGKTILDFLKSDGFANRNFMQLIHDDSLTFKEDIQKAQVSGQGDSLHEHIANLAGSPAIKKGILQTVKVVDELVKVMGRHKPENIVIEMARENQTTQKGQKNSRERMKRIEEGIKELGSQILKEHPVENTQLQNEKLYLYYLQNGRDMYVDQELDINRLSDYDVDHIVPQSFLKDDSIDNKVLTRSDKARGKSDNVPSEEVVKKMKNYWRQLLNAKLITQRKFDNLTKAERGGLSELDKAGFIKRQLVETRQITKHVAQILDSRMNTKYDENDKLIREVKVITLKSKLVSDFRKDFQFYKVREINNYHHAHDAYLNAVVGTALIKKYPKLESEFVYGDYKVYDVRKMIAKSEQEIGKATAKYFFYSNIMNFFKTEITLANGEIRKRPLIETNGETGEIVWDKGRDFATVRKVLSMPQVNIVKKTEVQTGGFSKESILPKRNSDKLIARKKDWDPKKYGGFDSPTVAYSVLVVAKVEKGKSKKLKSVKELLGITIMERSSFEKNPIDFLEAKGYKEVKKDLIIKLPKYSLFELENGRKRMLASAGELQKGNELALPSKYVNFLYLASHYEKLKGSPEDNEQKQLFVEQHKHYLDEIIEQISEFSKRVILADANLDKVLSAYNKHRDKPIREQAENIIHLFTLTNLGAPAAFKYFDTTIDRKRYTSTKEVLDATLIHQSITGLYETRIDLSQLGGDKRTADGSEFESPKKKAKVE

SEQ ID NO: 16185 - protein, 2232 aa, synthetic construct
MPAAKRVKLDGGTAPLEEEYRLFLEAPIQNVTLLEQWKREIPKVWAEINPPGLASTQAPIHVQLLSTALPVRVRQYPITLEAKRSLRETIRKFRAAGILRPVHSPWNTPLLPVRKSGTSEYRMVQDLREVNKRVETIHPTVPNPYTLLSLLPPDRIWYSVLDLKDAFFCIPLAPESQLIFAFEWADAEEGESGQLTWTRLPQGFKNSPTLFNEALNRDLQGFRLDHPSVSLLQYVDDLLIAADTQAACLSATRDLLMTLAELGYRVSGKKAQLCQEEVTYLGFKIHKGSRSLSNSRTQAILQIPVPKTKRQVREFLGKIGYCRLFIPGFAELAQPLYAATRPGNDPLVWGEKEEEAFQSLKLALTQPPALALPSLDKPFQLFVEETSGAAKGVLTQALGPWKRPVAYLSKRLDPVAAGWPRCLRAIAAAALLTREASKLTFGQDIEITSSHNLESLLRSPPDKWLTNARITQYQVLLLDPPRVRFKQTAALNPATLLPETDDTLPIHHCLDTLDSLTSTRPDLTDQPLAQAEATLFTDGSSYIRDGKRYAGAAVVTLDSVIWAEPLPIGTSAQKAELIALTKALEWSKDKSVNIYTDSRYAFATLHVHGMIYRERGWLTAGGKAIKNAPEILALLTAVWLPKRVAVMHCKGHQKDDAPTSTGNRRADEVAREVAIRPLSTQATISGSSGGGEAAAKMASNFTQFVLVDNGGTGDVTVAPSNFANGIAEWISSNSRSQAYKVTCSVRQSSAQNRKYTIKVEVPKGAWRSYLNMELTIPIFATNSDCELIVKAMQGLLKDGNPIPSAIAANSGIYSGGSSGGSSGSETPGTSESATPESSGGSSGGSSDKKYSIGLDIGTNSVGWAVITDEYKVPSKKFKVLGNTDRHSIKKNLIGALLFDSGETAEATRLKRTARRRYTRRKNRICYLQEIFSNEMAKVDDSFFHRLEESFLVEEDKKHERHPIFGNIVDEVAYHEKYPTIYHLRKKLVDSTDKADLRLIYLALAHMIKFRGHFLIEGDLNPDNSDVDKLFIQLVQTYNQLFEENPINASGVDAKAILSARLSKSRRLENLIAQLPGEKKNGLFGNLIALSLGLTPNFKSNFDLAEDAKLQLSKDTYDDDLDNLLAQIGDQYADLFLAAKNLSDAILLSDILRVNTEITKAPLSASMIKRYDEHHQDLTLLKALVRQQLPEKYKEIFFDQSKNGYAGYIDGGASQEEFYKFIKPILEKMDGTEELLVKLNREDLLRKQRTFDNGSIPHQIHLGELHAILRRQEDFYPFLKDNREKIEKILTFRIPYYVGPLARGNSRFAWMTRKSEETITPWNFEEVVDKGASAQSFIERMTNFDKNLPNEKVLPKHSLLYEYFTVYNELTKVKYVTEGMRKPAFLSGEQKKAIVDLLFKTNRKVTVKQLKEDYFKKIECFDSVEISGVEDRFNASLGTYHDLLKIIKDKDFLDNEENEDILEDIVLTLTLFEDREMIEERLKTYAHLFDDKVMKQLKRRRYTGWGRLSRKLINGIRDKQSGKTILDFLKSDGFANRNFMQLIHDDSLTFKEDIQKAQVSGQGDSLHEHIANLAGSPAIKKGILQTVKVVDELVKVMGRHKPENIVIEMARENQTTQKGQKNSRERMKRIEEGIKELGSQILKEHPVENTQLQNEKLYLYYLQNGRDMYVDQELDINRLSDYDVDHIVPQSFLKDDSIDNKVLTRSDKARGKSDNVPSEEVVKKMKNYWRQLLNAKLITQRKFDNLTKAERGGLSELDKAGFIKRQLVETRQITKHVAQILDSRMNTKYDENDKLIREVKVITLKSKLVSDFRKDFQFYKVREINNYHHAHDAYLNAVVGTALIKKYPKLESEFVYGDYKVYDVRKMIAKSEQEIGKATAKYFFYSNIMNFFKTEITLANGEIRKRPLIETNGETGEIVWDKGRDFATVRKVLSMPQVNIVKKTEVQTGGFSKESILPKRNSDKLIARKKDWDPKKYGGFDSPTVAYSVLVVAKVEKGKSKKLKSVKELLGITIMERSSFEKNPIDFLEAKGYKEVKKDLIIKLPKYSLFELENGRKRMLASAGELQKGNELALPSKYVNFLYLASHYEKLKGSPEDNEQKQLFVEQHKHYLDEIIEQISEFSKRVILADANLDKVLSAYNKHRDKPIREQAENIIHLFTLTNLGAPAAFKYFDTTIDRKRYTSTKEVLDATLIHQSITGLYETRIDLSQLGGDKRTADGSEFESPKKKAKVE

SEQ ID NO: 16186 - protein, 2217 aa, synthetic construct
MPAAKRVKLDGGTAPLEEEYRLFLEAPIQNVTLLEQWKREIPKVWAEINPPGLASTQAPIHVQLLSTALPVRVRQYPITLEAKRSLRETIRKFRAAGILRPVHSPWNTPLLPVRKSGTSEYRMVQDLREVNKRVETIHPTVPNPYTLLSLLPPDRIWYSVLDLKDAFFCIPLAPESQLIFAFEWADAEEGESGQLTWTRLPQGFKNSPTLFNEALNRDLQGFRLDHPSVSLLQYVDDLLIAADTQAACLSATRDLLMTLAELGYRVSGKKAQLCQEEVTYLGFKIHKGSRSLSNSRTQAILQIPVPKTKRQVREFLGKIGYCRLFIPGFAELAQPLYAATRPGNDPLVWGEKEEEAFQSLKLALTQPPALALPSLDKPFQLFVEETSGAAKGVLTQALGPWKRPVAYLSKRLDPVAAGWPRCLRAIAAAALLTREASKLTFGQDIEITSSHNLESLLRSPPDKWLTNARITQYQVLLLDPPRVRFKQTAALNPATLLPETDDTLPIHHCLDTLDSLTSTRPDLTDQPLAQAEATLFTDGSSYIRDGKRYAGAAVVTLDSVIWAEPLPIGTSAQKAELIALTKALEWSKDKSVNIYTDSRYAFATLHVHGMIYRERGWLTAGGKAIKNAPEILALLTAVWLPKRVAVMHCKGHQKDDAPTSTGNRRADEVAREVAIRPLSTQATISGSSGGGEAAAKMASNFTQFVLVDNGGTGDVTVAPSNFANGIAEWISSNSRSQAYKVTCSVRQSSAQNRKYTIKVEVPKGAWRSYLNMELTIPIFATNSDCELIVKAMQGLLKDGNPIPSAIAANSGIYGSSGSSGSSGSSGSSGSSDKKYSIGLDIGTNSVGWAVITDEYKVPSKKFKVLGNTDRHSIKKNLIGALLFDSGETAEATRLKRTARRRYTRRKNRICYLQEIFSNEMAKVDDSFFHRLEESFLVEEDKKHERHPIFGNIVDEVAYHEKYPTIYHLRKKLVDSTDKADLRLIYLALAHMIKFRGHFLIEGDLNPDNSDVDKLFIQLVQTYNQLFEENPINASGVDAKAILSARLSKSRRLENLIAQLPGEKKNGLFGNLIALSLGLTPNFKSNFDLAEDAKLQLSKDTYDDDLDNLLAQIGDQYADLFLAAKNLSDAILLSDILRVNTEITKAPLSASMIKRYDEHHQDLTLLKALVRQQLPEKYKEIFFDQSKNGYAGYIDGGASQEEFYKFIKPILEKMDGTEELLVKLNREDLLRKQRTFDNGSIPHQIHLGELHAILRRQEDFYPFLKDNREKIEKILTFRIPYYVGPLARGNSRFAWMTRKSEETITPWNFEEVVDKGASAQSFIERMTNFDKNLPNEKVLPKHSLLYEYFTVYNELTKVKYVTEGMRKPAFLSGEQKKAIVDLLFKTNRKVTVKQLKEDYFKKIECFDSVEISGVEDRFNASLGTYHDLLKIIKDKDFLDNEENEDILEDIVLTLTLFEDREMIEERLKTYAHLFDDKVMKQLKRRRYTGWGRLSRKLINGIRDKQSGKTILDFLKSDGFANRNFMQLIHDDSLTFKEDIQKAQVSGQGDSLHEHIANLAGSPAIKKGILQTVKVVDELVKVMGRHKPENIVIEMARENQTTQKGQKNSRERMKRIEEGIKELGSQILKEHPVENTQLQNEKLYLYYLQNGRDMYVDQELDINRLSDYDVDHIVPQSFLKDDSIDNKVLTRSDKARGKSDNVPSEEVVKKMKNYWRQLLNAKLITQRKFDNLTKAERGGLSELDKAGFIKRQLVETRQITKHVAQILDSRMNTKYDENDKLIREVKVITLKSKLVSDFRKDFQFYKVREINNYHHAHDAYLNAVVGTALIKKYPKLESEFVYGDYKVYDVRKMIAKSEQEIGKATAKYFFYSNIMNFFKTEITLANGEIRKRPLIETNGETGEIVWDKGRDFATVRKVLSMPQVNIVKKTEVQTGGFSKESILPKRNSDKLIARKKDWDPKKYGGFDSPTVAYSVLVVAKVEKGKSKKLKSVKELLGITIMERSSFEKNPIDFLEAKGYKEVKKDLIIKLPKYSLFELENGRKRMLASAGELQKGNELALPSKYVNFLYLASHYEKLKGSPEDNEQKQLFVEQHKHYLDEIIEQISEFSKRVILADANLDKVLSAYNKHRDKPIREQAENIIHLFTLTNLGAPAAFKYFDTTIDRKRYTSTKEVLDATLIHQSITGLYETRIDLSQLGGDKRTADGSEFESPKKKAKVE

SEQ ID NO: 16187 - protein, 2210 aa, synthetic construct
MPAAKRVKLDGGTAPLEEEYRLFLEAPIQNVTLLEQWKREIPKVWAEINPPGLASTQAPIHVQLLSTALPVRVRQYPITLEAKRSLRETIRKFRAAGILRPVHSPWNTPLLPVRKSGTSEYRMVQDLREVNKRVETIHPTVPNPYTLLSLLPPDRIWYSVLDLKDAFFCIPLAPESQLIFAFEWADAEEGESGQLTWTRLPQGFKNSPTLFNEALNRDLQGFRLDHPSVSLLQYVDDLLIAADTQAACLSATRDLLMTLAELGYRVSGKKAQLCQEEVTYLGFKIHKGSRSLSNSRTQAILQIPVPKTKRQVREFLGKIGYCRLFIPGFAELAQPLYAATRPGNDPLVWGEKEEEAFQSLKLALTQPPALALPSLDKPFQLFVEETSGAAKGVLTQALGPWKRPVAYLSKRLDPVAAGWPRCLRAIAAAALLTREASKLTFGQDIEITSSHNLESLLRSPPDKWLTNARITQYQVLLLDPPRVRFKQTAALNPATLLPETDDTLPIHHCLDTLDSLTSTRPDLTDQPLAQAEATLFTDGSSYIRDGKRYAGAAVVTLDSVIWAEPLPIGTSAQKAELIALTKALEWSKDKSVNIYTDSRYAFATLHVHGMIYRERGWLTAGGKAIKNAPEILALLTAVWLPKRVAVMHCKGHQKDDAPTSTGNRRADEVAREVAIRPLSTQATISGSSGGGEAAAKMASNFTQFVLVDNGGTGDVTVAPSNFANGIAEWISSNSRSQAYKVTCSVRQSSAQNRKYTIKVEVPKGAWRSYLNMELTIPIFATNSDCELIVKAMQGLLKDGNPIPSAIAANSGIYGSSGGGEAAAKDKKYSIGLDIGTNSVGWAVITDEYKVPSKKFKVLGNTDRHSIKKNLIGALLFDSGETAEATRLKRTARRRYTRRKNRICYLQEIFSNEMAKVDDSFFHRLEESFLVEEDKKHERHPIFGNIVDEVAYHEKYPTIYHLRKKLVDSTDKADLRLIYLALAHMIKFRGHFLIEGDLNPDNSDVDKLFIQLVQTYNQLFEENPINASGVDAKAILSARLSKSRRLENLIAQLPGEKKNGLFGNLIALSLGLTPNFKSNFDLAEDAKLQLSKDTYDDDLDNLLAQIGDQYADLFLAAKNLSDAILLSDILRVNTEITKAPLSASMIKRYDEHHQDLTLLKALVRQQLPEKYKEIFFDQSKNGYAGYIDGGASQEEFYKFIKPILEKMDGTEELLVKLNREDLLRKQRTFDNGSIPHQIHLGELHAILRRQEDFYPFLKDNREKIEKILTFRIPYYVGPLARGNSRFAWMTRKSEETITPWNFEEVVDKGASAQSFIERMTNFDKNLPNEKVLPKHSLLYEYFTVYNELTKVKYVTEGMRKPAFLSGEQKKAIVDLLFKTNRKVTVKQLKEDYFKKIECFDSVEISGVEDRFNASLGTYHDLLKIIKDKDFLDNEENEDILEDIVLTLTLFEDREMIEERLKTYAHLFDDKVMKQLKRRRYTGWGRLSRKLINGIRDKQSGKTILDFLKSDGFANRNFMQLIHDDSLTFKEDIQKAQVSGQGDSLHEHIANLAGSPAIKKGILQTVKVVDELVKVMGRHKPENIVIEMARENQTTQKGQKNSRERMKRIEEGIKELGSQILKEHPVENTQLQNEKLYLYYLQNGRDMYVDQELDINRLSDYDVDHIVPQSFLKDDSIDNKVLTRSDKARGKSDNVPSEEVVKKMKNYWRQLLNAKLITQRKFDNLTKAERGGLSELDKAGFIKRQLVETRQITKHVAQILDSRMNTKYDENDKLIREVKVITLKSKLVSDFRKDFQFYKVREINNYHHAHDAYLNAVVGTALIKKYPKLESEFVYGDYKVYDVRKMIAKSEQEIGKATAKYFFYSNIMNFFKTEITLANGEIRKRPLIETNGETGEIVWDKGRDFATVRKVLSMPQVNIVKKTEVQTGGFSKESILPKRNSDKLIARKKDWDPKKYGGFDSPTVAYSVLVVAKVEKGKSKKLKSVKELLGITIMERSSFEKNPIDFLEAKGYKEVKKDLIIKLPKYSLFELENGRKRMLASAGELQKGNELALPSKYVNFLYLASHYEKLKGSPEDNEQKQLFVEQHKHYLDEIIEQISEFSKRVILADANLDKVLSAYNKHRDKPIREQAENIIHLFTLTNLGAPAAFKYFDTTIDRKRYTSTKEVLDATLIHQSITGLYETRIDLSQLGGDKRTADGSEFESPKKKAKVE

SEQ ID NO: 16188 - protein, 2368 aa, synthetic construct
MPAAKRVKLDGGTAPLEEEYRLFLEAPIQNVTLLEQWKREIPKVWAEINPPGLASTQAPIHVQLLSTALPVRVRQYPITLEAKRSLRETIRKFRAAGILRPVHSPWNTPLLPVRKSGTSEYRMVQDLREVNKRVETIHPTVPNPYTLLSLLPPDRIWYSVLDLKDAFFCIPLAPESQLIFAFEWADAEEGESGQLTWTRLPQGFKNSPTLFNEALNRDLQGFRLDHPSVSLLQYVDDLLIAADTQAACLSATRDLLMTLAELGYRVSGKKAQLCQEEVTYLGFKIHKGSRSLSNSRTQAILQIPVPKTKRQVREFLGKIGYCRLFIPGFAELAQPLYAATRPGNDPLVWGEKEEEAFQSLKLALTQPPALALPSLDKPFQLFVEETSGAAKGVLTQALGPWKRPVAYLSKRLDPVAAGWPRCLRAIAAAALLTREASKLTFGQDIEITSSHNLESLLRSPPDKWLTNARITQYQVLLLDPPRVRFKQTAALNPATLLPETDDTLPIHHCLDTLDSLTSTRPDLTDQPLAQAEATLFTDGSSYIRDGKRYAGAAVVTLDSVIWAEPLPIGTSAQKAELIALTKALEWSKDKSVNIYTDSRYAFATLHVHGMIYRERGWLTAGGKAIKNAPEILALLTAVWLPKRVAVMHCKGHQKDDAPTSTGNRRADEVAREVAIRPLSTQATISGSSGGGEAAAKMASNFTQFVLVDNGGTGDVTVAPSNFANGIAEWISSNSRSQAYKVTCSVRQSSAQNRKYTIKVEVPKGAWRSYLNMELTIPIFATNSDCELIVKAMQGLLKDGNPIPSAIAANSGIYGGSGGSMASNFTQFVLVDNGGTGDVTVAPSNFANGIAEWISSNSRSQAYKVTCSVRQSSAQNRKYTIKVEVPKGAWRSYLNMELTIPIFATNSDCELIVKAMQGLLKDGNPIPSAIAANSGIYAEAAAKEAAAKEAAAKEAAAKALEAEAAAKEAAAKEAAAKEAAAKADKKYSIGLDIGTNSVGWAVITDEYKVPSKKFKVLGNTDRHSIKKNLIGALLFDSGETAEATRLKRTARRRYTRRKNRICYLQEIFSNEMAKVDDSFFHRLEESFLVEEDKKHERHPIFGNIVDEVAYHEKYPTIYHLRKKLVDSTDKADLRLIYLALAHMIKFRGHFLIEGDLNPDNSDVDKLFIQLVQTYNQLFEENPINASGVDAKAILSARLSKSRRLENLIAQLPGEKKNGLFGNLIALSLGLTPNFKSNFDLAEDAKLQLSKDTYDDDLDNLLAQIGDQYADLFLAAKNLSDAILLSDILRVNTEITKAPLSASMIKRYDEHHQDLTLLKALVRQQLPEKYKEIFFDQSKNGYAGYIDGGASQEEFYKFIKPILEKMDGTEELLVKLNREDLLRKQRTFDNGSIPHQIHLGELHAILRRQEDFYPFLKDNREKIEKILTFRIPYYVGPLARGNSRFAWMTRKSEETITPWNFEEVVDKGASAQSFIERMTNFDKNLPNEKVLPKHSLLYEYFTVYNELTKVKYVTEGMRKPAFLSGEQKKAIVDLLFKTNRKVTVKQLKEDYFKKIECFDSVEISGVEDRFNASLGTYHDLLKIIKDKDFLDNEENEDILEDIVLTLTLFEDREMIEERLKTYAHLFDDKVMKQLKRRRYTGWGRLSRKLINGIRDKQSGKTILDFLKSDGFANRNFMQLIHDDSLTFKEDIQKAQVSGQGDSLHEHIANLAGSPAIKKGILQTVKVVDELVKVMGRHKPENIVIEMARENQTTQKGQKNSRERMKRIEEGIKELGSQILKEHPVENTQLQNEKLYLYYLQNGRDMYVDQELDINRLSDYDVDHIVPQSFLKDDSIDNKVLTRSDKARGKSDNVPSEEVVKKMKNYWRQLLNAKLITQRKFDNLTKAERGGLSELDKAGFIKRQLVETRQITKHVAQILDSRMNTKYDENDKLIREVKVITLKSKLVSDFRKDFQFYKVREINNYHHAHDAYLNAVVGTALIKKYPKLESEFVYGDYKVYDVRKMIAKSEQEIGKATAKYFFYSNIMNFFKTEITLANGEIRKRPLIETNGETGEIVWDKGRDFATVRKVLSMPQVNIVKKTEVQTGGFSKESILPKRNSDKLIARKKDWDPKKYGGFDSPTVAYSVLVVAKVEKGKSKKLKSVKELLGITIMERSSFEKNPIDFLEAKGYKEVKKDLIIKLPKYSLFELENGRKRMLASAGELQKGNELALPSKYVNFLYLASHYEKLKGSPEDNEQKQLFVEQHKHYLDEIIEQISEFSKRVILADANLDKVLSAYNKHRDKPIREQAENIIHLFTLTNLGAPAAFKYFDTTIDRKRYTSTKEVLDATLIHQSITGLYETRIDLSQLGGDKRTADGSEFESPKKKAKVE

SEQ ID NO: 16189 - protein, 2355 aa, synthetic construct
MPAAKRVKLDGGTAPLEEEYRLFLEAPIQNVTLLEQWKREIPKVWAEINPPGLASTQAPIHVQLLSTALPVRVRQYPITLEAKRSLRETIRKFRAAGILRPVHSPWNTPLLPVRKSGTSEYRMVQDLREVNKRVETIHPTVPNPYTLLSLLPPDRIWYSVLDLKDAFFCIPLAPESQLIFAFEWADAEEGESGQLTWTRLPQGFKNSPTLFNEALNRDLQGFRLDHPSVSLLQYVDDLLIAADTQAACLSATRDLLMTLAELGYRVSGKKAQLCQEEVTYLGFKIHKGSRSLSNSRTQAILQIPVPKTKRQVREFLGKIGYCRLFIPGFAELAQPLYAATRPGNDPLVWGEKEEEAFQSLKLALTQPPALALPSLDKPFQLFVEETSGAAKGVLTQALGPWKRPVAYLSKRLDPVAAGWPRCLRAIAAAALLTREASKLTFGQDIEITSSHNLESLLRSPPDKWLTNARITQYQVLLLDPPRVRFKQTAALNPATLLPETDDTLPIHHCLDTLDSLTSTRPDLTDQPLAQAEATLFTDGSSYIRDGKRYAGAAVVTLDSVIWAEPLPIGTSAQKAELIALTKALEWSKDKSVNIYTDSRYAFATLHVHGMIYRERGWLTAGGKAIKNAPEILALLTAVWLPKRVAVMHCKGHQKDDAPTSTGNRRADEVAREVAIRPLSTQATISGSSGGGEAAAKMASNFTQFVLVDNGGTGDVTVAPSNFANGIAEWISSNSRSQAYKVTCSVRQSSAQNRKYTIKVEVPKGAWRSYLNMELTIPIFATNSDCELIVKAMQGLLKDGNPIPSAIAANSGIYGGSGGSMASNFTQFVLVDNGGTGDVTVAPSNFANGIAEWISSNSRSQAYKVTCSVRQSSAQNRKYTIKVEVPKGAWRSYLNMELTIPIFATNSDCELIVKAMQGLLKDGNPIPSAIAANSGIYSGGSSGGSSGSETPGTSESATPESSGGSSGGSSDKKYSIGLDIGTNSVGWAVITDEYKVPSKKFKVLGNTDRHSIKKNLIGALLFDSGETAEATRLKRTARRRYTRRKNRICYLQEIFSNEMAKVDDSFFHRLEESFLVEEDKKHERHPIFGNIVDEVAYHEKYPTIYHLRKKLVDSTDKADLRLIYLALAHMIKFRGHFLIEGDLNPDNSDVDKLFIQLVQTYNQLFEENPINASGVDAKAILSARLSKSRRLENLIAQLPGEKKNGLFGNLIALSLGLTPNFKSNFDLAEDAKLQLSKDTYDDDLDNLLAQIGDQYADLFLAAKNLSDAILLSDILRVNTEITKAPLSASMIKRYDEHHQDLTLLKALVRQQLPEKYKEIFFDQSKNGYAGYIDGGASQEEFYKFIKPILEKMDGTEELLVKLNREDLLRKQRTFDNGSIPHQIHLGELHAILRRQEDFYPFLKDNREKIEKILTFRIPYYVGPLARGNSRFAWMTRKSEETITPWNFEEVVDKGASAQSFIERMTNFDKNLPNEKVLPKHSLLYEYFTVYNELTKVKYVTEGMRKPAFLSGEQKKAIVDLLFKTNRKVTVKQLKEDYFKKIECFDSVEISGVEDRFNASLGTYHDLLKIIKDKDFLDNEENEDILEDIVLTLTLFEDREMIEERLKTYAHLFDDKVMKQLKRRRYTGWGRLSRKLINGIRDKQSGKTILDFLKSDGFANRNFMQLIHDDSLTFKEDIQKAQVSGQGDSLHEHIANLAGSPAIKKGILQTVKVVDELVKVMGRHKPENIVIEMARENQTTQKGQKNSRERMKRIEEGIKELGSQILKEHPVENTQLQNEKLYLYYLQNGRDMYVDQELDINRLSDYDVDHIVPQSFLKDDSIDNKVLTRSDKARGKSDNVPSEEVVKKMKNYWRQLLNAKLITQRKFDNLTKAERGGLSELDKAGFIKRQLVETRQITKHVAQILDSRMNTKYDENDKLIREVKVITLKSKLVSDFRKDFQFYKVREINNYHHAHDAYLNAVVGTALIKKYPKLESEFVYGDYKVYDVRKMIAKSEQEIGKATAKYFFYSNIMNFFKTEITLANGEIRKRPLIETNGETGEIVWDKGRDFATVRKVLSMPQVNIVKKTEVQTGGFSKESILPKRNSDKLIARKKDWDPKKYGGFDSPTVAYSVLVVAKVEKGKSKKLKSVKELLGITIMERSSFEKNPIDFLEAKGYKEVKKDLIIKLPKYSLFELENGRKRMLASAGELQKGNELALPSKYVNFLYLASHYEKLKGSPEDNEQKQLFVEQHKHYLDEIIEQISEFSKRVILADANLDKVLSAYNKHRDKPIREQAENIIHLFTLTNLGAPAAFKYFDTTIDRKRYTSTKEVLDATLIHQSITGLYETRIDLSQLGGDKRTADGSEFESPKKKAKVE

SEQ ID NO: 16190 - protein, 2340 aa, synthetic construct
MPAAKRVKLDGGTAPLEEEYRLFLEAPIQNVTLLEQWKREIPKVWAEINPPGLASTQAPIHVQLLSTALPVRVRQYPITLEAKRSLRETIRKFRAAGILRPVHSPWNTPLLPVRKSGTSEYRMVQDLREVNKRVETIHPTVPNPYTLLSLLPPDRIWYSVLDLKDAFFCIPLAPESQLIFAFEWADAEEGESGQLTWTRLPQGFKNSPTLFNEALNRDLQGFRLDHPSVSLLQYVDDLLIAADTQAACLSATRDLLMTLAELGYRVSGKKAQLCQEEVTYLGFKIHKGSRSLSNSRTQAILQIPVPKTKRQVREFLGKIGYCRLFIPGFAELAQPLYAATRPGNDPLVWGEKEEEAFQSLKLALTQPPALALPSLDKPFQLFVEETSGAAKGVLTQALGPWKRPVAYLSKRLDPVAAGWPRCLRAIAAAALLTREASKLTFGQDIEITSSHNLESLLRSPPDKWLTNARITQYQVLLLDPPRVRFKQTAALNPATLLPETDDTLPIHHCLDTLDSLTSTRPDLTDQPLAQAEATLFTDGSSYIRDGKRYAGAAVVTLDSVIWAEPLPIGTSAQKAELIALTKALEWSKDKSVNIYTDSRYAFATLHVHGMIYRERGWLTAGGKAIKNAPEILALLTAVWLPKRVAVMHCKGHQKDDAPTSTGNRRADEVAREVAIRPLSTQATISGSSGGGEAAAKMASNFTQFVLVDNGGTGDVTVAPSNFANGIAEWISSNSRSQAYKVTCSVRQSSAQNRKYTIKVEVPKGAWRSYLNMELTIPIFATNSDCELIVKAMQGLLKDGNPIPSAIAANSGIYGGSGGSMASNFTQFVLVDNGGTGDVTVAPSNFANGIAEWISSNSRSQAYKVTCSVRQSSAQNRKYTIKVEVPKGAWRSYLNMELTIPIFATNSDCELIVKAMQGLLKDGNPIPSAIAANSGIYGSSGSSGSSGSSGSSGSSDKKYSIGLDIGTNSVGWAVITDEYKVPSKKFKVLGNTDRHSIKKNLIGALLFDSGETAEATRLKRTARRRYTRRKNRICYLQEIFSNEMAKVDDSFFHRLEESFLVEEDKKHERHPIFGNIVDEVAYHEKYPTIYHLRKKLVDSTDKADLRLIYLALAHMIKFRGHFLIEGDLNPDNSDVDKLFIQLVQTYNQLFEENPINASGVDAKAILSARLSKSRRLENLIAQLPGEKKNGLFGNLIALSLGLTPNFKSNFDLAEDAKLQLSKDTYDDDLDNLLAQIGDQYADLFLAAKNLSDAILLSDILRVNTEITKAPLSASMIKRYDEHHQDLTLLKALVRQQLPEKYKEIFFDQSKNGYAGYIDGGASQEEFYKFIKPILEKMDGTEELLVKLNREDLLRKQRTFDNGSIPHQIHLGELHAILRRQEDFYPFLKDNREKIEKILTFRIPYYVGPLARGNSRFAWMTRKSEETITPWNFEEVVDKGASAQSFIERMTNFDKNLPNEKVLPKHSLLYEYFTVYNELTKVKYVTEGMRKPAFLSGEQKKAIVDLLFKTNRKVTVKQLKEDYFKKIECFDSVEISGVEDRFNASLGTYHDLLKIIKDKDFLDNEENEDILEDIVLTLTLFEDREMIEERLKTYAHLFDDKVMKQLKRRRYTGWGRLSRKLINGIRDKQSGKTILDFLKSDGFANRNFMQLIHDDSLTFKEDIQKAQVSGQGDSLHEHIANLAGSPAIKKGILQTVKVVDELVKVMGRHKPENIVIEMARENQTTQKGQKNSRERMKRIEEGIKELGSQILKEHPVENTQLQNEKLYLYYLQNGRDMYVDQELDINRLSDYDVDHIVPQSFLKDDSIDNKVLTRSDKARGKSDNVPSEEVVKKMKNYWRQLLNAKLITQRKFDNLTKAERGGLSELDKAGFIKRQLVETRQITKHVAQILDSRMNTKYDENDKLIREVKVITLKSKLVSDFRKDFQFYKVREINNYHHAHDAYLNAVVGTALIKKYPKLESEFVYGDYKVYDVRKMIAKSEQEIGKATAKYFFYSNIMNFFKTEITLANGEIRKRPLIETNGETGEIVWDKGRDFATVRKVLSMPQVNIVKKTEVQTGGFSKESILPKRNSDKLIARKKDWDPKKYGGFDSPTVAYSVLVVAKVEKGKSKKLKSVKELLGITIMERSSFEKNPIDFLEAKGYKEVKKDLIIKLPKYSLFELENGRKRMLASAGELQKGNELALPSKYVNFLYLASHYEKLKGSPEDNEQKQLFVEQHKHYLDEIIEQISEFSKRVILADANLDKVLSAYNKHRDKPIREQAENIIHLFTLTNLGAPAAFKYFDTTIDRKRYTSTKEVLDATLIHQSITGLYETRIDLSQLGGDKRTADGSEFESPKKKAKVE

SEQ ID NO: 16191 - protein, 2333 aa, synthetic construct
MPAAKRVKLDGGTAPLEEEYRLFLEAPIQNVTLLEQWKREIPKVWAEINPPGLASTQAPIHVQLLSTALPVRVRQYPITLEAKRSLRETIRKFRAAGILRPVHSPWNTPLLPVRKSGTSEYRMVQDLREVNKRVETIHPTVPNPYTLLSLLPPDRIWYSVLDLKDAFFCIPLAPESQLIFAFEWADAEEGESGQLTWTRLPQGFKNSPTLFNEALNRDLQGFRLDHPSVSLLQYVDDLLIAADTQAACLSATRDLLMTLAELGYRVSGKKAQLCQEEVTYLGFKIHKGSRSLSNSRTQAILQIPVPKTKRQVREFLGKIGYCRLFIPGFAELAQPLYAATRPGNDPLVWGEKEEEAFQSLKLALTQPPALALPSLDKPFQLFVEETSGAAKGVLTQALGPWKRPVAYLSKRLDPVAAGWPRCLRAIAAAALLTREASKLTFGQDIEITSSHNLESLLRSPPDKWLTNARITQYQVLLLDPPRVRFKQTAALNPATLLPETDDTLPIHHCLDTLDSLTSTRPDLTDQPLAQAEATLFTDGSSYIRDGKRYAGAAVVTLDSVIWAEPLPIGTSAQKAELIALTKALEWSKDKSVNIYTDSRYAFATLHVHGMIYRERGWLTAGGKAIKNAPEILALLTAVWLPKRVAVMHCKGHQKDDAPTSTGNRRADEVAREVAIRPLSTQATISGSSGGGEAAAKMASNFTQFVLVDNGGTGDVTVAPSNFANGIAEWISSNSRSQAYKVTCSVRQSSAQNRKYTIKVEVPKGAWRSYLNMELTIPIFATNSDCELIVKAMQGLLKDGNPIPSAIAANSGIYGGSGGSMASNFTQFVLVDNGGTGDVTVAPSNFANGIAEWISSNSRSQAYKVTCSVRQSSAQNRKYTIKVEVPKGAWRSYLNMELTIPIFATNSDCELIVKAMQGLLKDGNPIPSAIAANSGIYGSSGGGEAAAKDKKYSIGLDIGTNSVGWAVITDEYKVPSKKFKVLGNTDRHSIKKNLIGALLFDSGETAEATRLKRTARRRYTRRKNRICYLQEIFSNEMAKVDDSFFHRLEESFLVEEDKKHERHPIFGNIVDEVAYHEKYPTIYHLRKKLVDSTDKADLRLIYLALAHMIKFRGHFLIEGDLNPDNSDVDKLFIQLVQTYNQLFEENPINASGVDAKAILSARLSKSRRLENLIAQLPGEKKNGLFGNLIALSLGLTPNFKSNFDLAEDAKLQLSKDTYDDDLDNLLAQIGDQYADLFLAAKNLSDAILLSDILRVNTEITKAPLSASMIKRYDEHHQDLTLLKALVRQQLPEKYKEIFFDQSKNGYAGYIDGGASQEEFYKFIKPILEKMDGTEELLVKLNREDLLRKQRTFDNGSIPHQIHLGELHAILRRQEDFYPFLKDNREKIEKILTFRIPYYVGPLARGNSRFAWMTRKSEETITPWNFEEVVDKGASAQSFIERMTNFDKNLPNEKVLPKHSLLYEYFTVYNELTKVKYVTEGMRKPAFLSGEQKKAIVDLLFKTNRKVTVKQLKEDYFKKIECFDSVEISGVEDRFNASLGTYHDLLKIIKDKDFLDNEENEDILEDIVLTLTLFEDREMIEERLKTYAHLFDDKVMKQLKRRRYTGWGRLSRKLINGIRDKQSGKTILDFLKSDGFANRNFMQLIHDDSLTFKEDIQKAQVSGQGDSLHEHIANLAGSPAIKKGILQTVKVVDELVKVMGRHKPENIVIEMARENQTTQKGQKNSRERMKRIEEGIKELGSQILKEHPVENTQLQNEKLYLYYLQNGRDMYVDQELDINRLSDYDVDHIVPQSFLKDDSIDNKVLTRSDKARGKSDNVPSEEVVKKMKNYWRQLLNAKLITQRKFDNLTKAERGGLSELDKAGFIKRQLVETRQITKHVAQILDSRMNTKYDENDKLIREVKVITLKSKLVSDFRKDFQFYKVREINNYHHAHDAYLNAVVGTALIKKYPKLESEFVYGDYKVYDVRKMIAKSEQEIGKATAKYFFYSNIMNFFKTEITLANGEIRKRPLIETNGETGEIVWDKGRDFATVRKVLSMPQVNIVKKTEVQTGGFSKESILPKRNSDKLIARKKDWDPKKYGGFDSPTVAYSVLVVAKVEKGKSKKLKSVKELLGITIMERSSFEKNPIDFLEAKGYKEVKKDLIIKLPKYSLFELENGRKRMLASAGELQKGNELALPSKYVNFLYLASHYEKLKGSPEDNEQKQLFVEQHKHYLDEIIEQISEFSKRVILADANLDKVLSAYNKHRDKPIREQAENIIHLFTLTNLGAPAAFKYFDTTIDRKRYTSTKEVLDATLIHQSITGLYETRIDLSQLGGDKRTADGSEFESPKKKAKVE

SEQ ID NO: 16192 - protein, 2624 aa, synthetic construct
MPAAKRVKLDGGTAPLEEEYRLFLEAPIQNVTLLEQWKREIPKVWAEINPPGLASTQAPIHVQLLSTALPVRVRQYPITLEAKRSLRETIRKFRAAGILRPVHSPWNTPLLPVRKSGTSEYRMVQDLREVNKRVETIHPTVPNPYTLLSLLPPDRIWYSVLDLKDAFFCIPLAPESQLIFAFEWADAEEGESGQLTWTRLPQGFKNSPTLFNEALNRDLQGFRLDHPSVSLLQYVDDLLIAADTQAACLSATRDLLMTLAELGYRVSGKKAQLCQEEVTYLGFKIHKGSRSLSNSRTQAILQIPVPKTKRQVREFLGKIGYCRLFIPGFAELAQPLYAATRPGNDPLVWGEKEEEAFQSLKLALTQPPALALPSLDKPFQLFVEETSGAAKGVLTQALGPWKRPVAYLSKRLDPVAAGWPRCLRAIAAAALLTREASKLTFGQDIEITSSHNLESLLRSPPDKWLTNARITQYQVLLLDPPRVRFKQTAALNPATLLPETDDTLPIHHCLDTLDSLTSTRPDLTDQPLAQAEATLFTDGSSYIRDGKRYAGAAVVTLDSVIWAEPLPIGTSAQKAELIALTKALEWSKDKSVNIYTDSRYAFATLHVHGMIYRERGWLTAGGKAIKNAPEILALLTAVWLPKRVAVMHCKGHQKDDAPTSTGNRRADEVAREVAIRPLSTQATISGSSGGGEAAAKMASNFTQFVLVDNGGTGDVTVAPSNFANGIAEWISSNSRSQAYKVTCSVRQSSAQNRKYTIKVEVPKGAWRSYLNMELTIPIFATNSDCELIVKAMQGLLKDGNPIPSAIAANSGIYGGSGGSMASNFTQFVLVDNGGTGDVTVAPSNFANGIAEWISSNSRSQAYKVTCSVRQSSAQNRKYTIKVEVPKGAWRSYLNMELTIPIFATNSDCELIVKAMQGLLKDGNPIPSAIAANSGIYGGGSGGGSGGGSGGGSMASNFTQFVLVDNGGTGDVTVAPSNFANGIAEWISSNSRSQAYKVTCSVRQSSAQNRKYTIKVEVPKGAWRSYLNMELTIPIFATNSDCELIVKAMQGLLKDGNPIPSAIAANSGIYGGSGGSMASNFTQFVLVDNGGTGDVTVAPSNFANGIAEWISSNSRSQAYKVTCSVRQSSAQNRKYTIKVEVPKGAWRSYLNMELTIPIFATNSDCELIVKAMQGLLKDGNPIPSAIAANSGIYAEAAAKEAAAKEAAAKEAAAKALEAEAAAKEAAAKEAAAKEAAAKADKKYSIGLDIGTNSVGWAVITDEYKVPSKKFKVLGNTDRHSIKKNLIGALLFDSGETAEATRLKRTARRRYTRRKNRICYLQEIFSNEMAKVDDSFFHRLEESFLVEEDKKHERHPIFGNIVDEVAYHEKYPTIYHLRKKLVDSTDKADLRLIYLALAHMIKFRGHFLIEGDLNPDNSDVDKLFIQLVQTYNQLFEENPINASGVDAKAILSARLSKSRRLENLIAQLPGEKKNGLFGNLIALSLGLTPNFKSNFDLAEDAKLQLSKDTYDDDLDNLLAQIGDQYADLFLAAKNLSDAILLSDILRVNTEITKAPLSASMIKRYDEHHQDLTLLKALVRQQLPEKYKEIFFDQSKNGYAGYIDGGASQEEFYKFIKPILEKMDGTEELLVKLNREDLLRKQRTFDNGSIPHQIHLGELHAILRRQEDFYPFLKDNREKIEKILTFRIPYYVGPLARGNSRFAWMTRKSEETITPWNFEEVVDKGASAQSFIERMTNFDKNLPNEKVLPKHSLLYEYFTVYNELTKVKYVTEGMRKPAFLSGEQKKAIVDLLFKTNRKVTVKQLKEDYFKKIECFDSVEISGVEDRFNASLGTYHDLLKIIKDKDFLDNEENEDILEDIVLTLTLFEDREMIEERLKTYAHLFDDKVMKQLKRRRYTGWGRLSRKLINGIRDKQSGKTILDFLKSDGFANRNFMQLIHDDSLTFKEDIQKAQVSGQGDSLHEHIANLAGSPAIKKGILQTVKVVDELVKVMGRHKPENIVIEMARENQTTQKGQKNSRERMKRIEEGIKELGSQILKEHPVENTQLQNEKLYLYYLQNGRDMYVDQELDINRLSDYDVDHIVPQSFLKDDSIDNKVLTRSDKARGKSDNVPSEEVVKKMKNYWRQLLNAKLITQRKFDNLTKAERGGLSELDKAGFIKRQLVETRQITKHVAQILDSRMNTKYDENDKLIREVKVITLKSKLVSDFRKDFQFYKVREINNYHHAHDAYLNAVVGTALIKKYPKLESEFVYGDYKVYDVRKMIAKSEQEIGKATAKYFFYSNIMNFFKTEITLANGEIRKRPLIETNGETGEIVWDKGRDFATVRKVLSMPQVNIVKKTEVQTGGFSKESILPKRNSDKLIARKKDWDPKKYGGFDSPTVAYSVLVVAKVEKGKSKKLKSVKELLGITIMERSSFEKNPIDFLEAKGYKEVKKDLIIKLPKYSLFELENGRKRMLASAGELQKGNELALPSKYVNFLYLASHYEKLKGSPEDNEQKQLFVEQHKHYLDEIIEQISEFSKRVILADANLDKVLSAYNKHRDKPIREQAENIIHLFTLTNLGAPAAFKYFDTTIDRKRYTSTKEVLDATLIHQSITGLYETRIDLSQLGGDKRTADGSEFESPKKKAKVE

SEQ ID NO: 16193 - protein, 2611 aa, synthetic construct
MPAAKRVKLDGGTAPLEEEYRLFLEAPIQNVTLLEQWKREIPKVWAEINPPGLASTQAPIHVQLLSTALPVRVRQYPITLEAKRSLRETIRKFRAAGILRPVHSPWNTPLLPVRKSGTSEYRMVQDLREVNKRVETIHPTVPNPYTLLSLLPPDRIWYSVLDLKDAFFCIPLAPESQLIFAFEWADAEEGESGQLTWTRLPQGFKNSPTLFNEALNRDLQGFRLDHPSVSLLQYVDDLLIAADTQAACLSATRDLLMTLAELGYRVSGKKAQLCQEEVTYLGFKIHKGSRSLSNSRTQAILQIPVPKTKRQVREFLGKIGYCRLFIPGFAELAQPLYAATRPGNDPLVWGEKEEEAFQSLKLALTQPPALALPSLDKPFQLFVEETSGAAKGVLTQALGPWKRPVAYLSKRLDPVAAGWPRCLRAIAAAALLTREASKLTFGQDIEITSSHNLESLLRSPPDKWLTNARITQYQVLLLDPPRVRFKQTAALNPATLLPETDDTLPIHHCLDTLDSLTSTRPDLTDQPLAQAEATLFTDGSSYIRDGKRYAGAAVVTLDSVIWAEPLPIGTSAQKAELIALTKALEWSKDKSVNIYTDSRYAFATLHVHGMIYRERGWLTAGGKAIKNAPEILALLTAVWLPKRVAVMHCKGHQKDDAPTSTGNRRADEVAREVAIRPLSTQATISGSSGGGEAAAKMASNFTQFVLVDNGGTGDVTVAPSNFANGIAEWISSNSRSQAYKVTCSVRQSSAQNRKYTIKVEVPKGAWRSYLNMELTIPIFATNSDCELIVKAMQGLLKDGNPIPSAIAANSGIYGGSGGSMASNFTQFVLVDNGGTGDVTVAPSNFANGIAEWISSNSRSQAYKVTCSVRQSSAQNRKYTIKVEVPKGAWRSYLNMELTIPIFATNSDCELIVKAMQGLLKDGNPIPSAIAANSGIYGGGSGGGSGGGSGGGSMASNFTQFVLVDNGGTGDVTVAPSNFANGIAEWISSNSRSQAYKVTCSVRQSSAQNRKYTIKVEVPKGAWRSYLNMELTIPIFATNSDCELIVKAMQGLLKDGNPIPSAIAANSGIYGGSGGSMASNFTQFVLVDNGGTGDVTVAPSNFANGIAEWISSNSRSQAYKVTCSVRQSSAQNRKYTIKVEVPKGAWRSYLNMELTIPIFATNSDCELIVKAMQGLLKDGNPIPSAIAANSGIYSGGSSGGSSGSETPGTSESATPESSGGSSGGSSDKKYSIGLDIGTNSVGWAVITDEYKVPSKKFKVLGNTDRHSIKKNLIGALLFDSGETAEATRLKRTARRRYTRRKNRICYLQEIFSNEMAKVDDSFFHRLEESFLVEEDKKHERHPIFGNIVDEVAYHEKYPTIYHLRKKLVDSTDKADLRLIYLALAHMIKFRGHFLIEGDLNPDNSDVDKLFIQLVQTYNQLFEENPINASGVDAKAILSARLSKSRRLENLIAQLPGEKKNGLFGNLIALSLGLTPNFKSNFDLAEDAKLQLSKDTYDDDLDNLLAQIGDQYADLFLAAKNLSDAILLSDILRVNTEITKAPLSASMIKRYDEHHQDLTLLKALVRQQLPEKYKEIFFDQSKNGYAGYIDGGASQEEFYKFIKPILEKMDGTEELLVKLNREDLLRKQRTFDNGSIPHQIHLGELHAILRRQEDFYPFLKDNREKIEKILTFRIPYYVGPLARGNSRFAWMTRKSEETITPWNFEEVVDKGASAQSFIERMTNFDKNLPNEKVLPKHSLLYEYFTVYNELTKVKYVTEGMRKPAFLSGEQKKAIVDLLFKTNRKVTVKQLKEDYFKKIECFDSVEISGVEDRFNASLGTYHDLLKIIKDKDFLDNEENEDILEDIVLTLTLFEDREMIEERLKTYAHLFDDKVMKQLKRRRYTGWGRLSRKLINGIRDKQSGKTILDFLKSDGFANRNFMQLIHDDSLTFKEDIQKAQVSGQGDSLHEHIANLAGSPAIKKGILQTVKVVDELVKVMGRHKPENIVIEMARENQTTQKGQKNSRERMKRIEEGIKELGSQILKEHPVENTQLQNEKLYLYYLQNGRDMYVDQELDINRLSDYDVDHIVPQSFLKDDSIDNKVLTRSDKARGKSDNVPSEEVVKKMKNYWRQLLNAKLITQRKFDNLTKAERGGLSELDKAGFIKRQLVETRQITKHVAQILDSRMNTKYDENDKLIREVKVITLKSKLVSDFRKDFQFYKVREINNYHHAHDAYLNAVVGTALIKKYPKLESEFVYGDYKVYDVRKMIAKSEQEIGKATAKYFFYSNIMNFFKTEITLANGEIRKRPLIETNGETGEIVWDKGRDFATVRKVLSMPQVNIVKKTEVQTGGFSKESILPKRNSDKLIARKKDWDPKKYGGFDSPTVAYSVLVVAKVEKGKSKKLKSVKELLGITIMERSSFEKNPIDFLEAKGYKEVKKDLIIKLPKYSLFELENGRKRMLASAGELQKGNELALPSKYVNFLYLASHYEKLKGSPEDNEQKQLFVEQHKHYLDEIIEQISEFSKRVILADANLDKVLSAYNKHRDKPIREQAENIIHLFTLTNLGAPAAFKYFDTTIDRKRYTSTKEVLDATLIHQSITGLYETRIDLSQLGGDKRTADGSEFESPKKKAKVE

SEQ ID NO: 16194 - protein, 2596 aa, synthetic construct
MPAAKRVKLDGGTAPLEEEYRLFLEAPIQNVTLLEQWKREIPKVWAEINPPGLASTQAPIHVQLLSTALPVRVRQYPITLEAKRSLRETIRKFRAAGILRPVHSPWNTPLLPVRKSGTSEYRMVQDLREVNKRVETIHPTVPNPYTLLSLLPPDRIWYSVLDLKDAFFCIPLAPESQLIFAFEWADAEEGESGQLTWTRLPQGFKNSPTLFNEALNRDLQGFRLDHPSVSLLQYVDDLLIAADTQAACLSATRDLLMTLAELGYRVSGKKAQLCQEEVTYLGFKIHKGSRSLSNSRTQAILQIPVPKTKRQVREFLGKIGYCRLFIPGFAELAQPLYAATRPGNDPLVWGEKEEEAFQSLKLALTQPPALALPSLDKPFQLFVEETSGAAKGVLTQALGPWKRPVAYLSKRLDPVAAGWPRCLRAIAAAALLTREASKLTFGQDIEITSSHNLESLLRSPPDKWLTNARITQYQVLLLDPPRVRFKQTAALNPATLLPETDDTLPIHHCLDTLDSLTSTRPDLTDQPLAQAEATLFTDGSSYIRDGKRYAGAAVVTLDSVIWAEPLPIGTSAQKAELIALTKALEWSKDKSVNIYTDSRYAFATLHVHGMIYRERGWLTAGGKAIKNAPEILALLTAVWLPKRVAVMHCKGHQKDDAPTSTGNRRADEVAREVAIRPLSTQATISGSSGGGEAAAKMASNFTQFVLVDNGGTGDVTVAPSNFANGIAEWISSNSRSQAYKVTCSVRQSSAQNRKYTIKVEVPKGAWRSYLNMELTIPIFATNSDCELIVKAMQGLLKDGNPIPSAIAANSGIYGGSGGSMASNFTQFVLVDNGGTGDVTVAPSNFANGIAEWISSNSRSQAYKVTCSVRQSSAQNRKYTIKVEVPKGAWRSYLNMELTIPIFATNSDCELIVKAMQGLLKDGNPIPSAIAANSGIYGGGSGGGSGGGSGGGSMASNFTQFVLVDNGGTGDVTVAPSNFANGIAEWISSNSRSQAYKVTCSVRQSSAQNRKYTIKVEVPKGAWRSYLNMELTIPIFATNSDCELIVKAMQGLLKDGNPIPSAIAANSGIYGGSGGSMASNFTQFVLVDNGGTGDVTVAPSNFANGIAEWISSNSRSQAYKVTCSVRQSSAQNRKYTIKVEVPKGAWRSYLNMELTIPIFATNSDCELIVKAMQGLLKDGNPIPSAIAANSGIYGSSGSSGSSGSSGSSGSSDKKYSIGLDIGTNSVGWAVITDEYKVPSKKFKVLGNTDRHSIKKNLIGALLFDSGETAEATRLKRTARRRYTRRKNRICYLQEIFSNEMAKVDDSFFHRLEESFLVEEDKKHERHPIFGNIVDEVAYHEKYPTIYHLRKKLVDSTDKADLRLIYLALAHMIKFRGHFLIEGDLNPDNSDVDKLFIQLVQTYNQLFEENPINASGVDAKAILSARLSKSRRLENLIAQLPGEKKNGLFGNLIALSLGLTPNFKSNFDLAEDAKLQLSKDTYDDDLDNLLAQIGDQYADLFLAAKNLSDAILLSDILRVNTEITKAPLSASMIKRYDEHHQDLTLLKALVRQQLPEKYKEIFFDQSKNGYAGYIDGGASQEEFYKFIKPILEKMDGTEELLVKLNREDLLRKQRTFDNGSIPHQIHLGELHAILRRQEDFYPFLKDNREKIEKILTFRIPYYVGPLARGNSRFAWMTRKSEETITPWNFEEVVDKGASAQSFIERMTNFDKNLPNEKVLPKHSLLYEYFTVYNELTKVKYVTEGMRKPAFLSGEQKKAIVDLLFKTNRKVTVKQLKEDYFKKIECFDSVEISGVEDRFNASLGTYHDLLKIIKDKDFLDNEENEDILEDIVLTLTLFEDREMIEERLKTYAHLFDDKVMKQLKRRRYTGWGRLSRKLINGIRDKQSGKTILDFLKSDGFANRNFMQLIHDDSLTFKEDIQKAQVSGQGDSLHEHIANLAGSPAIKKGILQTVKVVDELVKVMGRHKPENIVIEMARENQTTQKGQKNSRERMKRIEEGIKELGSQILKEHPVENTQLQNEKLYLYYLQNGRDMYVDQELDINRLSDYDVDHIVPQSFLKDDSIDNKVLTRSDKARGKSDNVPSEEVVKKMKNYWRQLLNAKLITQRKFDNLTKAERGGLSELDKAGFIKRQLVETRQITKHVAQILDSRMNTKYDENDKLIREVKVITLKSKLVSDFRKDFQFYKVREINNYHHAHDAYLNAVVGTALIKKYPKLESEFVYGDYKVYDVRKMIAKSEQEIGKATAKYFFYSNIMNFFKTEITLANGEIRKRPLIETNGETGEIVWDKGRDFATVRKVLSMPQVNIVKKTEVQTGGFSKESILPKRNSDKLIARKKDWDPKKYGGFDSPTVAYSVLVVAKVEKGKSKKLKSVKELLGITIMERSSFEKNPIDFLEAKGYKEVKKDLIIKLPKYSLFELENGRKRMLASAGELQKGNELALPSKYVNFLYLASHYEKLKGSPEDNEQKQLFVEQHKHYLDEIIEQISEFSKRVILADANLDKVLSAYNKHRDKPIREQAENIIHLFTLTNLGAPAAFKYFDTTIDRKRYTSTKEVLDATLIHQSITGLYETRIDLSQLGGDKRTADGSEFESPKKKAKVE

SEQ ID NO: 16195 - protein, 2589 aa, synthetic construct
MPAAKRVKLDGGTAPLEEEYRLFLEAPIQNVTLLEQWKREIPKVWAEINPPGLASTQAPIHVQLLSTALPVRVRQYPITLEAKRSLRETIRKFRAAGILRPVHSPWNTPLLPVRKSGTSEYRMVQDLREVNKRVETIHPTVPNPYTLLSLLPPDRIWYSVLDLKDAFFCIPLAPESQLIFAFEWADAEEGESGQLTWTRLPQGFKNSPTLFNEALNRDLQGFRLDHPSVSLLQYVDDLLIAADTQAACLSATRDLLMTLAELGYRVSGKKAQLCQEEVTYLGFKIHKGSRSLSNSRTQAILQIPVPKTKRQVREFLGKIGYCRLFIPGFAELAQPLYAATRPGNDPLVWGEKEEEAFQSLKLALTQPPALALPSLDKPFQLFVEETSGAAKGVLTQALGPWKRPVAYLSKRLDPVAAGWPRCLRAIAAAALLTREASKLTFGQDIEITSSHNLESLLRSPPDKWLTNARITQYQVLLLDPPRVRFKQTAALNPATLLPETDDTLPIHHCLDTLDSLTSTRPDLTDQPLAQAEATLFTDGSSYIRDGKRYAGAAVVTLDSVIWAEPLPIGTSAQKAELIALTKALEWSKDKSVNIYTDSRYAFATLHVHGMIYRERGWLTAGGKAIKNAPEILALLTAVWLPKRVAVMHCKGHQKDDAPTSTGNRRADEVAREVAIRPLSTQATISGSSGGGEAAAKMASNFTQFVLVDNGGTGDVTVAPSNFANGIAEWISSNSRSQAYKVTCSVRQSSAQNRKYTIKVEVPKGAWRSYLNMELTIPIFATNSDCELIVKAMQGLLKDGNPIPSAIAANSGIYGGSGGSMASNFTQFVLVDNGGTGDVTVAPSNFANGIAEWISSNSRSQAYKVTCSVRQSSAQNRKYTIKVEVPKGAWRSYLNMELTIPIFATNSDCELIVKAMQGLLKDGNPIPSAIAANSGIYGGGSGGGSGGGSGGGSMASNFTQFVLVDNGGTGDVTVAPSNFANGIAEWISSNSRSQAYKVTCSVRQSSAQNRKYTIKVEVPKGAWRSYLNMELTIPIFATNSDCELIVKAMQGLLKDGNPIPSAIAANSGIYGGSGGSMASNFTQFVLVDNGGTGDVTVAPSNFANGIAEWISSNSRSQAYKVTCSVRQSSAQNRKYTIKVEVPKGAWRSYLNMELTIPIFATNSDCELIVKAMQGLLKDGNPIPSAIAANSGIYGSSGGGEAAAKDKKYSIGLDIGTNSVGWAVITDEYKVPSKKFKVLGNTDRHSIKKNLIGALLFDSGETAEATRLKRTARRRYTRRKNRICYLQEIFSNEMAKVDDSFFHRLEESFLVEEDKKHERHPIFGNIVDEVAYHEKYPTIYHLRKKLVDSTDKADLRLIYLALAHMIKFRGHFLIEGDLNPDNSDVDKLFIQLVQTYNQLFEENPINASGVDAKAILSARLSKSRRLENLIAQLPGEKKNGLFGNLIALSLGLTPNFKSNFDLAEDAKLQLSKDTYDDDLDNLLAQIGDQYADLFLAAKNLSDAILLSDILRVNTEITKAPLSASMIKRYDEHHQDLTLLKALVRQQLPEKYKEIFFDQSKNGYAGYIDGGASQEEFYKFIKPILEKMDGTEELLVKLNREDLLRKQRTFDNGSIPHQIHLGELHAILRRQEDFYPFLKDNREKIEKILTFRIPYYVGPLARGNSRFAWMTRKSEETITPWNFEEVVDKGASAQSFIERMTNFDKNLPNEKVLPKHSLLYEYFTVYNELTKVKYVTEGMRKPAFLSGEQKKAIVDLLFKTNRKVTVKQLKEDYFKKIECFDSVEISGVEDRFNASLGTYHDLLKIIKDKDFLDNEENEDILEDIVLTLTLFEDREMIEERLKTYAHLFDDKVMKQLKRRRYTGWGRLSRKLINGIRDKQSGKTILDFLKSDGFANRNFMQLIHDDSLTFKEDIQKAQVSGQGDSLHEHIANLAGSPAIKKGILQTVKVVDELVKVMGRHKPENIVIEMARENQTTQKGQKNSRERMKRIEEGIKELGSQILKEHPVENTQLQNEKLYLYYLQNGRDMYVDQELDINRLSDYDVDHIVPQSFLKDDSIDNKVLTRSDKARGKSDNVPSEEVVKKMKNYWRQLLNAKLITQRKFDNLTKAERGGLSELDKAGFIKRQLVETRQITKHVAQILDSRMNTKYDENDKLIREVKVITLKSKLVSDFRKDFQFYKVREINNYHHAHDAYLNAVVGTALIKKYPKLESEFVYGDYKVYDVRKMIAKSEQEIGKATAKYFFYSNIMNFFKTEITLANGEIRKRPLIETNGETGEIVWDKGRDFATVRKVLSMPQVNIVKKTEVQTGGFSKESILPKRNSDKLIARKKDWDPKKYGGFDSPTVAYSVLVVAKVEKGKSKKLKSVKELLGITIMERSSFEKNPIDFLEAKGYKEVKKDLIIKLPKYSLFELENGRKRMLASAGELQKGNELALPSKYVNFLYLASHYEKLKGSPEDNEQKQLFVEQHKHYLDEIIEQISEFSKRVILADANLDKVLSAYNKHRDKPIREQAENIIHLFTLTNLGAPAAFKYFDTTIDRKRYTSTKEVLDATLIHQSITGLYETRIDLSQLGGDKRTADGSEFESPKKKAKVE

SEQ ID NO: 16196-16199 - skipped (4 entries)

SEQ ID NO: 16200 - protein, 2280 aa, synthetic construct
MPAAKRVKLDGGDKKYSIGLDIGTNSVGWAVITDEYKVPSKKFKVLGNTDRHSIKKNLIGALLFDSGETAEATRLKRTARRRYTRRKNRICYLQEIFSNEMAKVDDSFFHRLEESFLVEEDKKHERHPIFGNIVDEVAYHEKYPTIYHLRKKLVDSTDKADLRLIYLALAHMIKFRGHFLIEGDLNPDNSDVDKLFIQLVQTYNQLFEENPINASGVDAKAILSARLSKSRRLENLIAQLPGEKKNGLFGNLIALSLGLTPNFKSNFDLAEDAKLQLSKDTYDDDLDNLLAQIGDQYADLFLAAKNLSDAILLSDILRVNTEITKAPLSASMIKRYDEHHQDLTLLKALVRQQLPEKYKEIFFDQSKNGYAGYIDGGASQEEFYKFIKPILEKMDGTEELLVKLNREDLLRKQRTFDNGSIPHQIHLGELHAILRRQEDFYPFLKDNREKIEKILTFRIPYYVGPLARGNSRFAWMTRKSEETITPWNFEEVVDKGASAQSFIERMTNFDKNLPNEKVLPKHSLLYEYFTVYNELTKVKYVTEGMRKPAFLSGEQKKAIVDLLFKTNRKVTVKQLKEDYFKKIECFDSVEISGVEDRFNASLGTYHDLLKIIKDKDFLDNEENEDILEDIVLTLTLFEDREMIEERLKTYAHLFDDKVMKQLKRRRYTGWGRLSRKLINGIRDKQSGKTILDFLKSDGFANRNFMQLIHDDSLTFKEDIQKAQVSGQGDSLHEHIANLAGSPAIKKGILQTVKVVDELVKVMGRHKPENIVIEMARENQTTQKGQKNSRERMKRIEEGIKELGSQILKEHPVENTQLQNEKLYLYYLQNGRDMYVDQELDINRLSDYDVDHIVPQSFLKDDSIDNKVLTRSDKARGKSDNVPSEEVVKKMKNYWRQLLNAKLITQRKFDNLTKAERGGLSELDKAGFIKRQLVETRQITKHVAQILDSRMNTKYDENDKLIREVKVITLKSKLVSDFRKDFQFYKVREINNYHHAHDAYLNAVVGTALIKKYPKLESEFVYGDYKVYDVRKMIAKSEQEIGKATAKYFFYSNIMNFFKTEITLANGEIRKRPLIETNGETGEIVWDKGRDFATVRKVLSMPQVNIVKKTEVQTGGFSKESILPKRNSDKLIARKKDWDPKKYGGFDSPTVAYSVLVVAKVEKGKSKKLKSVKELLGITIMERSSFEKNPIDFLEAKGYKEVKKDLIIKLPKYSLFELENGRKRMLASAGELQKGNELALPSKYVNFLYLASHYEKLKGSPEDNEQKQLFVEQHKHYLDEIIEQISEFSKRVILADANLDKVLSAYNKHRDKPIREQAENIIHLFTLTNLGAPAAFKYFDTTIDRKRYTSTKEVLDATLIHQSITGLYETRIDLSQLGGDAEAAAKEAAAKEAAAKEAAAKALEAEAAAKEAAAKEAAAKEAAAKATAPLEEEYRLFLEAPIQNVTLLEQWKREIPKVWAEINPPGLASTQAPIHVQLLSTALPVRVRQYPITLEAKRSLRETIRKFRAAGILRPVHSPWNTPLLPVRKSGTSEYRMVQDLREVNKRVETIHPTVPNPYTLLSLLPPDRIWYSVLDLKDAFFCIPLAPESQLIFAFEWADAEEGESGQLTWTRLPQGFKNSPTLFNEALNRDLQGFRLDHPSVSLLQYVDDLLIAADTQAACLSATRDLLMTLAELGYRVSGKKAQLCQEEVTYLGFKIHKGSRSLSNSRTQAILQIPVPKTKRQVREFLGKIGYCRLFIPGFAELAQPLYAATRPGNDPLVWGEKEEEAFQSLKLALTQPPALALPSLDKPFQLFVEETSGAAKGVLTQALGPWKRPVAYLSKRLDPVAAGWPRCLRAIAAAALLTREASKLTFGQDIEITSSHNLESLLRSPPDKWLTNARITQYQVLLLDPPRVRFKQTAALNPATLLPETDDTLPIHHCLDTLDSLTSTRPDLTDQPLAQAEATLFTDGSSYIRDGKRYAGAAVVTLDSVIWAEPLPIGTSAQKAELIALTKALEWSKDKSVNIYTDSRYAFATLHVHGMIYRERGWLTAGGKAIKNAPEILALLTAVWLPKRVAVMHCKGHQKDDAPTSTGNRRADEVAREVAIRPLSTQATISAEAAAKEAAAKEAAAKEAAAKALEAEAAAKEAAAKEAAAKEAAAKAMASNFTQFVLVDNGGTGDVTVAPSNFANGIAEWISSNSRSQAYKVTCSVRQSSAQNRKYTIKVEVPKGAWRSYLNMELTIPIFATNSDCELIVKAMQGLLKDGNPIPSAIAANSGIYKRTADGSEFESPKKKAKVE

SEQ ID NO: 16201 - protein, 2403 aa, synthetic construct
MPAAKRVKLDGGDKKYSIGLDIGTNSVGWAVITDEYKVPSKKFKVLGNTDRHSIKKNLIGALLFDSGETAEATRLKRTARRRYTRRKNRICYLQEIFSNEMAKVDDSFFHRLEESFLVEEDKKHERHPIFGNIVDEVAYHEKYPTIYHLRKKLVDSTDKADLRLIYLALAHMIKFRGHFLIEGDLNPDNSDVDKLFIQLVQTYNQLFEENPINASGVDAKAILSARLSKSRRLENLIAQLPGEKKNGLFGNLIALSLGLTPNFKSNFDLAEDAKLQLSKDTYDDDLDNLLAQIGDQYADLFLAAKNLSDAILLSDILRVNTEITKAPLSASMIKRYDEHHQDLTLLKALVRQQLPEKYKEIFFDQSKNGYAGYIDGGASQEEFYKFIKPILEKMDGTEELLVKLNREDLLRKQRTFDNGSIPHQIHLGELHAILRRQEDFYPFLKDNREKIEKILTFRIPYYVGPLARGNSRFAWMTRKSEETITPWNFEEVVDKGASAQSFIERMTNFDKNLPNEKVLPKHSLLYEYFTVYNELTKVKYVTEGMRKPAFLSGEQKKAIVDLLFKTNRKVTVKQLKEDYFKKIECFDSVEISGVEDRFNASLGTYHDLLKIIKDKDFLDNEENEDILEDIVLTLTLFEDREMIEERLKTYAHLFDDKVMKQLKRRRYTGWGRLSRKLINGIRDKQSGKTILDFLKSDGFANRNFMQLIHDDSLTFKEDIQKAQVSGQGDSLHEHIANLAGSPAIKKGILQTVKVVDELVKVMGRHKPENIVIEMARENQTTQKGQKNSRERMKRIEEGIKELGSQILKEHPVENTQLQNEKLYLYYLQNGRDMYVDQELDINRLSDYDVDHIVPQSFLKDDSIDNKVLTRSDKARGKSDNVPSEEVVKKMKNYWRQLLNAKLITQRKFDNLTKAERGGLSELDKAGFIKRQLVETRQITKHVAQILDSRMNTKYDENDKLIREVKVITLKSKLVSDFRKDFQFYKVREINNYHHAHDAYLNAVVGTALIKKYPKLESEFVYGDYKVYDVRKMIAKSEQEIGKATAKYFFYSNIMNFFKTEITLANGEIRKRPLIETNGETGEIVWDKGRDFATVRKVLSMPQVNIVKKTEVQTGGFSKESILPKRNSDKLIARKKDWDPKKYGGFDSPTVAYSVLVVAKVEKGKSKKLKSVKELLGITIMERSSFEKNPIDFLEAKGYKEVKKDLIIKLPKYSLFELENGRKRMLASAGELQKGNELALPSKYVNFLYLASHYEKLKGSPEDNEQKQLFVEQHKHYLDEIIEQISEFSKRVILADANLDKVLSAYNKHRDKPIREQAENIIHLFTLTNLGAPAAFKYFDTTIDRKRYTSTKEVLDATLIHQSITGLYETRIDLSQLGGDAEAAAKEAAAKEAAAKEAAAKALEAEAAAKEAAAKEAAAKEAAAKATAPLEEEYRLFLEAPIQNVTLLEQWKREIPKVWAEINPPGLASTQAPIHVQLLSTALPVRVRQYPITLEAKRSLRETIRKFRAAGILRPVHSPWNTPLLPVRKSGTSEYRMVQDLREVNKRVETIHPTVPNPYTLLSLLPPDRIWYSVLDLKDAFFCIPLAPESQLIFAFEWADAEEGESGQLTWTRLPQGFKNSPTLFNEALNRDLQGFRLDHPSVSLLQYVDDLLIAADTQAACLSATRDLLMTLAELGYRVSGKKAQLCQEEVTYLGFKIHKGSRSLSNSRTQAILQIPVPKTKRQVREFLGKIGYCRLFIPGFAELAQPLYAATRPGNDPLVWGEKEEEAFQSLKLALTQPPALALPSLDKPFQLFVEETSGAAKGVLTQALGPWKRPVAYLSKRLDPVAAGWPRCLRAIAAAALLTREASKLTFGQDIEITSSHNLESLLRSPPDKWLTNARITQYQVLLLDPPRVRFKQTAALNPATLLPETDDTLPIHHCLDTLDSLTSTRPDLTDQPLAQAEATLFTDGSSYIRDGKRYAGAAVVTLDSVIWAEPLPIGTSAQKAELIALTKALEWSKDKSVNIYTDSRYAFATLHVHGMIYRERGWLTAGGKAIKNAPEILALLTAVWLPKRVAVMHCKGHQKDDAPTSTGNRRADEVAREVAIRPLSTQATISAEAAAKEAAAKEAAAKEAAAKALEAEAAAKEAAAKEAAAKEAAAKAMASNFTQFVLVDNGGTGDVTVAPSNFANGIAEWISSNSRSQAYKVTCSVRQSSAQNRKYTIKVEVPKGAWRSYLNMELTIPIFATNSDCELIVKAMQGLLKDGNPIPSAIAANSGIYGGSGGSMASNFTQFVLVDNGGTGDVTVAPSNFANGIAEWISSNSRSQAYKVTCSVRQSSAQNRKYTIKVEVPKGAWRSYLNMELTIPIFATNSDCELIVKAMQGLLKDGNPIPSAIAANSGIYKRTADGSEFESPKKKAKVE

SEQ ID NO: 16202 - protein, 2659 aa, synthetic construct
MPAAKRVKLDGGDKKYSIGLDIGTNSVGWAVITDEYKVPSKKFKVLGNTDRHSIKKNLIGALLFDSGETAEATRLKRTARRRYTRRKNRICYLQEIFSNEMAKVDDSFFHRLEESFLVEEDKKHERHPIFGNIVDEVAYHEKYPTIYHLRKKLVDSTDKADLRLIYLALAHMIKFRGHFLIEGDLNPDNSDVDKLFIQLVQTYNQLFEENPINASGVDAKAILSARLSKSRRLENLIAQLPGEKKNGLFGNLIALSLGLTPNFKSNFDLAEDAKLQLSKDTYDDDLDNLLAQIGDQYADLFLAAKNLSDAILLSDILRVNTEITKAPLSASMIKRYDEHHQDLTLLKALVRQQLPEKYKEIFFDQSKNGYAGYIDGGASQEEFYKFIKPILEKMDGTEELLVKLNREDLLRKQRTFDNGSIPHQIHLGELHAILRRQEDFYPFLKDNREKIEKILTFRIPYYVGPLARGNSRFAWMTRKSEETITPWNFEEVVDKGASAQSFIERMTNFDKNLPNEKVLPKHSLLYEYFTVYNELTKVKYVTEGMRKPAFLSGEQKKAIVDLLFKTNRKVTVKQLKEDYFKKIECFDSVEISGVEDRFNASLGTYHDLLKIIKDKDFLDNEENEDILEDIVLTLTLFEDREMIEERLKTYAHLFDDKVMKQLKRRRYTGWGRLSRKLINGIRDKQSGKTILDFLKSDGFANRNFMQLIHDDSLTFKEDIQKAQVSGQGDSLHEHIANLAGSPAIKKGILQTVKVVDELVKVMGRHKPENIVIEMARENQTTQKGQKNSRERMKRIEEGIKELGSQILKEHPVENTQLQNEKLYLYYLQNGRDMYVDQELDINRLSDYDVDHIVPQSFLKDDSIDNKVLTRSDKARGKSDNVPSEEVVKKMKNYWRQLLNAKLITQRKFDNLTKAERGGLSELDKAGFIKRQLVETRQITKHVAQILDSRMNTKYDENDKLIREVKVITLKSKLVSDFRKDFQFYKVREINNYHHAHDAYLNAVVGTALIKKYPKLESEFVYGDYKVYDVRKMIAKSEQEIGKATAKYFFYSNIMNFFKTEITLANGEIRKRPLIETNGETGEIVWDKGRDFATVRKVLSMPQVNIVKKTEVQTGGFSKESILPKRNSDKLIARKKDWDPKKYGGFDSPTVAYSVLVVAKVEKGKSKKLKSVKELLGITIMERSSFEKNPIDFLEAKGYKEVKKDLIIKLPKYSLFELENGRKRMLASAGELQKGNELALPSKYVNFLYLASHYEKLKGSPEDNEQKQLFVEQHKHYLDEIIEQISEFSKRVILADANLDKVLSAYNKHRDKPIREQAENIIHLFTLTNLGAPAAFKYFDTTIDRKRYTSTKEVLDATLIHQSITGLYETRIDLSQLGGDAEAAAKEAAAKEAAAKEAAAKALEAEAAAKEAAAKEAAAKEAAAKATAPLEEEYRLFLEAPIQNVTLLEQWKREIPKVWAEINPPGLASTQAPIHVQLLSTALPVRVRQYPITLEAKRSLRETIRKFRAAGILRPVHSPWNTPLLPVRKSGTSEYRMVQDLREVNKRVETIHPTVPNPYTLLSLLPPDRIWYSVLDLKDAFFCIPLAPESQLIFAFEWADAEEGESGQLTWTRLPQGFKNSPTLFNEALNRDLQGFRLDHPSVSLLQYVDDLLIAADTQAACLSATRDLLMTLAELGYRVSGKKAQLCQEEVTYLGFKIHKGSRSLSNSRTQAILQIPVPKTKRQVREFLGKIGYCRLFIPGFAELAQPLYAATRPGNDPLVWGEKEEEAFQSLKLALTQPPALALPSLDKPFQLFVEETSGAAKGVLTQALGPWKRPVAYLSKRLDPVAAGWPRCLRAIAAAALLTREASKLTFGQDIEITSSHNLESLLRSPPDKWLTNARITQYQVLLLDPPRVRFKQTAALNPATLLPETDDTLPIHHCLDTLDSLTSTRPDLTDQPLAQAEATLFTDGSSYIRDGKRYAGAAVVTLDSVIWAEPLPIGTSAQKAELIALTKALEWSKDKSVNIYTDSRYAFATLHVHGMIYRERGWLTAGGKAIKNAPEILALLTAVWLPKRVAVMHCKGHQKDDAPTSTGNRRADEVAREVAIRPLSTQATISAEAAAKEAAAKEAAAKEAAAKALEAEAAAKEAAAKEAAAKEAAAKAMASNFTQFVLVDNGGTGDVTVAPSNFANGIAEWISSNSRSQAYKVTCSVRQSSAQNRKYTIKVEVPKGAWRSYLNMELTIPIFATNSDCELIVKAMQGLLKDGNPIPSAIAANSGIYGGSGGSMASNFTQFVLVDNGGTGDVTVAPSNFANGIAEWISSNSRSQAYKVTCSVRQSSAQNRKYTIKVEVPKGAWRSYLNMELTIPIFATNSDCELIVKAMQGLLKDGNPIPSAIAANSGIYGGGSGGGSGGGSGGGSMASNFTQFVLVDNGGTGDVTVAPSNFANGIAEWISSNSRSQAYKVTCSVRQSSAQNRKYTIKVEVPKGAWRSYLNMELTIPIFATNSDCELIVKAMQGLLKDGNPIPSAIAANSGIYGGSGGSMASNFTQFVLVDNGGTGDVTVAPSNFANGIAEWISSNSRSQAYKVTCSVRQSSAQNRKYTIKVEVPKGAWRSYLNMELTIPIFATNSDCELIVKAMQGLLKDGNPIPSAIAANSGIYKRTADGSEFESPKKKAKVE

SEQ ID NO: 16203 - protein, 2267 aa, synthetic construct
MPAAKRVKLDGGDKKYSIGLDIGTNSVGWAVITDEYKVPSKKFKVLGNTDRHSIKKNLIGALLFDSGETAEATRLKRTARRRYTRRKNRICYLQEIFSNEMAKVDDSFFHRLEESFLVEEDKKHERHPIFGNIVDEVAYHEKYPTIYHLRKKLVDSTDKADLRLIYLALAHMIKFRGHFLIEGDLNPDNSDVDKLFIQLVQTYNQLFEENPINASGVDAKAILSARLSKSRRLENLIAQLPGEKKNGLFGNLIALSLGLTPNFKSNFDLAEDAKLQLSKDTYDDDLDNLLAQIGDQYADLFLAAKNLSDAILLSDILRVNTEITKAPLSASMIKRYDEHHQDLTLLKALVRQQLPEKYKEIFFDQSKNGYAGYIDGGASQEEFYKFIKPILEKMDGTEELLVKLNREDLLRKQRTFDNGSIPHQIHLGELHAILRRQEDFYPFLKDNREKIEKILTFRIPYYVGPLARGNSRFAWMTRKSEETITPWNFEEVVDKGASAQSFIERMTNFDKNLPNEKVLPKHSLLYEYFTVYNELTKVKYVTEGMRKPAFLSGEQKKAIVDLLFKTNRKVTVKQLKEDYFKKIECFDSVEISGVEDRFNASLGTYHDLLKIIKDKDFLDNEENEDILEDIVLTLTLFEDREMIEERLKTYAHLFDDKVMKQLKRRRYTGWGRLSRKLINGIRDKQSGKTILDFLKSDGFANRNFMQLIHDDSLTFKEDIQKAQVSGQGDSLHEHIANLAGSPAIKKGILQTVKVVDELVKVMGRHKPENIVIEMARENQTTQKGQKNSRERMKRIEEGIKELGSQILKEHPVENTQLQNEKLYLYYLQNGRDMYVDQELDINRLSDYDVDHIVPQSFLKDDSIDNKVLTRSDKARGKSDNVPSEEVVKKMKNYWRQLLNAKLITQRKFDNLTKAERGGLSELDKAGFIKRQLVETRQITKHVAQILDSRMNTKYDENDKLIREVKVITLKSKLVSDFRKDFQFYKVREINNYHHAHDAYLNAVVGTALIKKYPKLESEFVYGDYKVYDVRKMIAKSEQEIGKATAKYFFYSNIMNFFKTEITLANGEIRKRPLIETNGETGEIVWDKGRDFATVRKVLSMPQVNIVKKTEVQTGGFSKESILPKRNSDKLIARKKDWDPKKYGGFDSPTVAYSVLVVAKVEKGKSKKLKSVKELLGITIMERSSFEKNPIDFLEAKGYKEVKKDLIIKLPKYSLFELENGRKRMLASAGELQKGNELALPSKYVNFLYLASHYEKLKGSPEDNEQKQLFVEQHKHYLDEIIEQISEFSKRVILADANLDKVLSAYNKHRDKPIREQAENIIHLFTLTNLGAPAAFKYFDTTIDRKRYTSTKEVLDATLIHQSITGLYETRIDLSQLGGDAEAAAKEAAAKEAAAKEAAAKALEAEAAAKEAAAKEAAAKEAAAKATAPLEEEYRLFLEAPIQNVTLLEQWKREIPKVWAEINPPGLASTQAPIHVQLLSTALPVRVRQYPITLEAKRSLRETIRKFRAAGILRPVHSPWNTPLLPVRKSGTSEYRMVQDLREVNKRVETIHPTVPNPYTLLSLLPPDRIWYSVLDLKDAFFCIPLAPESQLIFAFEWADAEEGESGQLTWTRLPQGFKNSPTLFNEALNRDLQGFRLDHPSVSLLQYVDDLLIAADTQAACLSATRDLLMTLAELGYRVSGKKAQLCQEEVTYLGFKIHKGSRSLSNSRTQAILQIPVPKTKRQVREFLGKIGYCRLFIPGFAELAQPLYAATRPGNDPLVWGEKEEEAFQSLKLALTQPPALALPSLDKPFQLFVEETSGAAKGVLTQALGPWKRPVAYLSKRLDPVAAGWPRCLRAIAAAALLTREASKLTFGQDIEITSSHNLESLLRSPPDKWLTNARITQYQVLLLDPPRVRFKQTAALNPATLLPETDDTLPIHHCLDTLDSLTSTRPDLTDQPLAQAEATLFTDGSSYIRDGKRYAGAAVVTLDSVIWAEPLPIGTSAQKAELIALTKALEWSKDKSVNIYTDSRYAFATLHVHGMIYRERGWLTAGGKAIKNAPEILALLTAVWLPKRVAVMHCKGHQKDDAPTSTGNRRADEVAREVAIRPLSTQATISSGGSSGGSSGSETPGTSESATPESSGGSSGGSSMASNFTQFVLVDNGGTGDVTVAPSNFANGIAEWISSNSRSQAYKVTCSVRQSSAQNRKYTIKVEVPKGAWRSYLNMELTIPIFATNSDCELIVKAMQGLLKDGNPIPSAIAANSGIYKRTADGSEFESPKKKAKVE

SEQ ID NO: 16204 - protein, 2390 aa, synthetic construct
MPAAKRVKLDGGDKKYSIGLDIGTNSVGWAVITDEYKVPSKKFKVLGNTDRHSIKKNLIGALLFDSGETAEATRLKRTARRRYTRRKNRICYLQEIFSNEMAKVDDSFFHRLEESFLVEEDKKHERHPIFGNIVDEVAYHEKYPTIYHLRKKLVDSTDKADLRLIYLALAHMIKFRGHFLIEGDLNPDNSDVDKLFIQLVQTYNQLFEENPINASGVDAKAILSARLSKSRRLENLIAQLPGEKKNGLFGNLIALSLGLTPNFKSNFDLAEDAKLQLSKDTYDDDLDNLLAQIGDQYADLFLAAKNLSDAILLSDILRVNTEITKAPLSASMIKRYDEHHQDLTLLKALVRQQLPEKYKEIFFDQSKNGYAGYIDGGASQEEFYKFIKPILEKMDGTEELLVKLNREDLLRKQRTFDNGSIPHQIHLGELHAILRRQEDFYPFLKDNREKIEKILTFRIPYYVGPLARGNSRFAWMTRKSEETITPWNFEEVVDKGASAQSFIERMTNFDKNLPNEKVLPKHSLLYEYFTVYNELTKVKYVTEGMRKPAFLSGEQKKAIVDLLFKTNRKVTVKQLKEDYFKKIECFDSVEISGVEDRFNASLGTYHDLLKIIKDKDFLDNEENEDILEDIVLTLTLFEDREMIEERLKTYAHLFDDKVMKQLKRRRYTGWGRLSRKLINGIRDKQSGKTILDFLKSDGFANRNFMQLIHDDSLTFKEDIQKAQVSGQGDSLHEHIANLAGSPAIKKGILQTVKVVDELVKVMGRHKPENIVIEMARENQTTQKGQKNSRERMKRIEEGIKELGSQILKEHPVENTQLQNEKLYLYYLQNGRDMYVDQELDINRLSDYDVDHIVPQSFLKDDSIDNKVLTRSDKARGKSDNVPSEEVVKKMKNYWRQLLNAKLITQRKFDNLTKAERGGLSELDKAGFIKRQLVETRQITKHVAQILDSRMNTKYDENDKLIREVKVITLKSKLVSDFRKDFQFYKVREINNYHHAHDAYLNAVVGTALIKKYPKLESEFVYGDYKVYDVRKMIAKSEQEIGKATAKYFFYSNIMNFFKTEITLANGEIRKRPLIETNGETGEIVWDKGRDFATVRKVLSMPQVNIVKKTEVQTGGFSKESILPKRNSDKLIARKKDWDPKKYGGFDSPTVAYSVLVVAKVEKGKSKKLKSVKELLGITIMERSSFEKNPIDFLEAKGYKEVKKDLIIKLPKYSLFELENGRKRMLASAGELQKGNELALPSKYVNFLYLASHYEKLKGSPEDNEQKQLFVEQHKHYLDEIIEQISEFSKRVILADANLDKVLSAYNKHRDKPIREQAENIIHLFTLTNLGAPAAFKYFDTTIDRKRYTSTKEVLDATLIHQSITGLYETRIDLSQLGGDAEAAAKEAAAKEAAAKEAAAKALEAEAAAKEAAAKEAAAKEAAAKATAPLEEEYRLFLEAPIQNVTLLEQWKREIPKVWAEINPPGLASTQAPIHVQLLSTALPVRVRQYPITLEAKRSLRETIRKFRAAGILRPVHSPWNTPLLPVRKSGTSEYRMVQDLREVNKRVETIHPTVPNPYTLLSLLPPDRIWYSVLDLKDAFFCIPLAPESQLIFAFEWADAEEGESGQLTWTRLPQGFKNSPTLFNEALNRDLQGFRLDHPSVSLLQYVDDLLIAADTQAACLSATRDLLMTLAELGYRVSGKKAQLCQEEVTYLGFKIHKGSRSLSNSRTQAILQIPVPKTKRQVREFLGKIGYCRLFIPGFAELAQPLYAATRPGNDPLVWGEKEEEAFQSLKLALTQPPALALPSLDKPFQLFVEETSGAAKGVLTQALGPWKRPVAYLSKRLDPVAAGWPRCLRAIAAAALLTREASKLTFGQDIEITSSHNLESLLRSPPDKWLTNARITQYQVLLLDPPRVRFKQTAALNPATLLPETDDTLPIHHCLDTLDSLTSTRPDLTDQPLAQAEATLFTDGSSYIRDGKRYAGAAVVTLDSVIWAEPLPIGTSAQKAELIALTKALEWSKDKSVNIYTDSRYAFATLHVHGMIYRERGWLTAGGKAIKNAPEILALLTAVWLPKRVAVMHCKGHQKDDAPTSTGNRRADEVAREVAIRPLSTQATISSGGSSGGSSGSETPGTSESATPESSGGSSGGSSMASNFTQFVLVDNGGTGDVTVAPSNFANGIAEWISSNSRSQAYKVTCSVRQSSAQNRKYTIKVEVPKGAWRSYLNMELTIPIFATNSDCELIVKAMQGLLKDGNPIPSAIAANSGIYGGSGGSMASNFTQFVLVDNGGTGDVTVAPSNFANGIAEWISSNSRSQAYKVTCSVRQSSAQNRKYTIKVEVPKGAWRSYLNMELTIPIFATNSDCELIVKAMQGLLKDGNPIPSAIAANSGIYKRTADGSEFESPKKKAKVE

SEQ ID NO: 16205 - protein, 2646 aa, synthetic construct
MPAAKRVKLDGGDKKYSIGLDIGTNSVGWAVITDEYKVPSKKFKVLGNTDRHSIKKNLIGALLFDSGETAEATRLKRTARRRYTRRKNRICYLQEIFSNEMAKVDDSFFHRLEESFLVEEDKKHERHPIFGNIVDEVAYHEKYPTIYHLRKKLVDSTDKADLRLIYLALAHMIKFRGHFLIEGDLNPDNSDVDKLFIQLVQTYNQLFEENPINASGVDAKAILSARLSKSRRLENLIAQLPGEKKNGLFGNLIALSLGLTPNFKSNFDLAEDAKLQLSKDTYDDDLDNLLAQIGDQYADLFLAAKNLSDAILLSDILRVNTEITKAPLSASMIKRYDEHHQDLTLLKALVRQQLPEKYKEIFFDQSKNGYAGYIDGGASQEEFYKFIKPILEKMDGTEELLVKLNREDLLRKQRTFDNGSIPHQIHLGELHAILRRQEDFYPFLKDNREKIEKILTFRIPYYVGPLARGNSRFAWMTRKSEETITPWNFEEVVDKGASAQSFIERMTNFDKNLPNEKVLPKHSLLYEYFTVYNELTKVKYVTEGMRKPAFLSGEQKKAIVDLLFKTNRKVTVKQLKEDYFKKIECFDSVEISGVEDRFNASLGTYHDLLKIIKDKDFLDNEENEDILEDIVLTLTLFEDREMIEERLKTYAHLFDDKVMKQLKRRRYTGWGRLSRKLINGIRDKQSGKTILDFLKSDGFANRNFMQLIHDDSLTFKEDIQKAQVSGQGDSLHEHIANLAGSPAIKKGILQTVKVVDELVKVMGRHKPENIVIEMARENQTTQKGQKNSRERMKRIEEGIKELGSQILKEHPVENTQLQNEKLYLYYLQNGRDMYVDQELDINRLSDYDVDHIVPQSFLKDDSIDNKVLTRSDKARGKSDNVPSEEVVKKMKNYWRQLLNAKLITQRKFDNLTKAERGGLSELDKAGFIKRQLVETRQITKHVAQILDSRMNTKYDENDKLIREVKVITLKSKLVSDFRKDFQFYKVREINNYHHAHDAYLNAVVGTALIKKYPKLESEFVYGDYKVYDVRKMIAKSEQEIGKATAKYFFYSNIMNFFKTEITLANGEIRKRPLIETNGETGEIVWDKGRDFATVRKVLSMPQVNIVKKTEVQTGGFSKESILPKRNSDKLIARKKDWDPKKYGGFDSPTVAYSVLVVAKVEKGKSKKLKSVKELLGITIMERSSFEKNPIDFLEAKGYKEVKKDLIIKLPKYSLFELENGRKRMLASAGELQKGNELALPSKYVNFLYLASHYEKLKGSPEDNEQKQLFVEQHKHYLDEIIEQISEFSKRVILADANLDKVLSAYNKHRDKPIREQAENIIHLFTLTNLGAPAAFKYFDTTIDRKRYTSTKEVLDATLIHQSITGLYETRIDLSQLGGDAEAAAKEAAAKEAAAKEAAAKALEAEAAAKEAAAKEAAAKEAAAKATAPLEEEYRLFLEAPIQNVTLLEQWKREIPKVWAEINPPGLASTQAPIHVQLLSTALPVRVRQYPITLEAKRSLRETIRKFRAAGILRPVHSPWNTPLLPVRKSGTSEYRMVQDLREVNKRVETIHPTVPNPYTLLSLLPPDRIWYSVLDLKDAFFCIPLAPESQLIFAFEWADAEEGESGQLTWTRLPQGFKNSPTLFNEALNRDLQGFRLDHPSVSLLQYVDDLLIAADTQAACLSATRDLLMTLAELGYRVSGKKAQLCQEEVTYLGFKIHKGSRSLSNSRTQAILQIPVPKTKRQVREFLGKIGYCRLFIPGFAELAQPLYAATRPGNDPLVWGEKEEEAFQSLKLALTQPPALALPSLDKPFQLFVEETSGAAKGVLTQALGPWKRPVAYLSKRLDPVAAGWPRCLRAIAAAALLTREASKLTFGQDIEITSSHNLESLLRSPPDKWLTNARITQYQVLLLDPPRVRFKQTAALNPATLLPETDDTLPIHHCLDTLDSLTSTRPDLTDQPLAQAEATLFTDGSSYIRDGKRYAGAAVVTLDSVIWAEPLPIGTSAQKAELIALTKALEWSKDKSVNIYTDSRYAFATLHVHGMIYRERGWLTAGGKAIKNAPEILALLTAVWLPKRVAVMHCKGHQKDDAPTSTGNRRADEVAREVAIRPLSTQATISSGGSSGGSSGSETPGTSESATPESSGGSSGGSSMASNFTQFVLVDNGGTGDVTVAPSNFANGIAEWISSNSRSQAYKVTCSVRQSSAQNRKYTIKVEVPKGAWRSYLNMELTIPIFATNSDCELIVKAMQGLLKDGNPIPSAIAANSGIYGGSGGSMASNFTQFVLVDNGGTGDVTVAPSNFANGIAEWISSNSRSQAYKVTCSVRQSSAQNRKYTIKVEVPKGAWRSYLNMELTIPIFATNSDCELIVKAMQGLLKDGNPIPSAIAANSGIYGGGSGGGSGGGSGGGSMASNFTQFVLVDNGGTGDVTVAPSNFANGIAEWISSNSRSQAYKVTCSVRQSSAQNRKYTIKVEVPKGAWRSYLNMELTIPIFATNSDCELIVKAMQGLLKDGNPIPSAIAANSGIYGGSGGSMASNFTQFVLVDNGGTGDVTVAPSNFANGIAEWISSNSRSQAYKVTCSVRQSSAQNRKYTIKVEVPKGAWRSYLNMELTIPIFATNSDCELIVKAMQGLLKDGNPIPSAIAANSGIYKRTADGSEFESPKKKAKVE

SEQ ID NO: 16206 - protein, 2252 aa, synthetic construct
MPAAKRVKLDGGDKKYSIGLDIGTNSVGWAVITDEYKVPSKKFKVLGNTDRHSIKKNLIGALLFDSGETAEATRLKRTARRRYTRRKNRICYLQEIFSNEMAKVDDSFFHRLEESFLVEEDKKHERHPIFGNIVDEVAYHEKYPTIYHLRKKLVDSTDKADLRLIYLALAHMIKFRGHFLIEGDLNPDNSDVDKLFIQLVQTYNQLFEENPINASGVDAKAILSARLSKSRRLENLIAQLPGEKKNGLFGNLIALSLGLTPNFKSNFDLAEDAKLQLSKDTYDDDLDNLLAQIGDQYADLFLAAKNLSDAILLSDILRVNTEITKAPLSASMIKRYDEHHQDLTLLKALVRQQLPEKYKEIFFDQSKNGYAGYIDGGASQEEFYKFIKPILEKMDGTEELLVKLNREDLLRKQRTFDNGSIPHQIHLGELHAILRRQEDFYPFLKDNREKIEKILTFRIPYYVGPLARGNSRFAWMTRKSEETITPWNFEEVVDKGASAQSFIERMTNFDKNLPNEKVLPKHSLLYEYFTVYNELTKVKYVTEGMRKPAFLSGEQKKAIVDLLFKTNRKVTVKQLKEDYFKKIECFDSVEISGVEDRFNASLGTYHDLLKIIKDKDFLDNEENEDILEDIVLTLTLFEDREMIEERLKTYAHLFDDKVMKQLKRRRYTGWGRLSRKLINGIRDKQSGKTILDFLKSDGFANRNFMQLIHDDSLTFKEDIQKAQVSGQGDSLHEHIANLAGSPAIKKGILQTVKVVDELVKVMGRHKPENIVIEMARENQTTQKGQKNSRERMKRIEEGIKELGSQILKEHPVENTQLQNEKLYLYYLQNGRDMYVDQELDINRLSDYDVDHIVPQSFLKDDSIDNKVLTRSDKARGKSDNVPSEEVVKKMKNYWRQLLNAKLITQRKFDNLTKAERGGLSELDKAGFIKRQLVETRQITKHVAQILDSRMNTKYDENDKLIREVKVITLKSKLVSDFRKDFQFYKVREINNYHHAHDAYLNAVVGTALIKKYPKLESEFVYGDYKVYDVRKMIAKSEQEIGKATAKYFFYSNIMNFFKTEITLANGEIRKRPLIETNGETGEIVWDKGRDFATVRKVLSMPQVNIVKKTEVQTGGFSKESILPKRNSDKLIARKKDWDPKKYGGFDSPTVAYSVLVVAKVEKGKSKKLKSVKELLGITIMERSSFEKNPIDFLEAKGYKEVKKDLIIKLPKYSLFELENGRKRMLASAGELQKGNELALPSKYVNFLYLASHYEKLKGSPEDNEQKQLFVEQHKHYLDEIIEQISEFSKRVILADANLDKVLSAYNKHRDKPIREQAENIIHLFTLTNLGAPAAFKYFDTTIDRKRYTSTKEVLDATLIHQSITGLYETRIDLSQLGGDAEAAAKEAAAKEAAAKEAAAKALEAEAAAKEAAAKEAAAKEAAAKATAPLEEEYRLFLEAPIQNVTLLEQWKREIPKVWAEINPPGLASTQAPIHVQLLSTALPVRVRQYPITLEAKRSLRETIRKFRAAGILRPVHSPWNTPLLPVRKSGTSEYRMVQDLREVNKRVETIHPTVPNPYTLLSLLPPDRIWYSVLDLKDAFFCIPLAPESQLIFAFEWADAEEGESGQLTWTRLPQGFKNSPTLFNEALNRDLQGFRLDHPSVSLLQYVDDLLIAADTQAACLSATRDLLMTLAELGYRVSGKKAQLCQEEVTYLGFKIHKGSRSLSNSRTQAILQIPVPKTKRQVREFLGKIGYCRLFIPGFAELAQPLYAATRPGNDPLVWGEKEEEAFQSLKLALTQPPALALPSLDKPFQLFVEETSGAAKGVLTQALGPWKRPVAYLSKRLDPVAAGWPRCLRAIAAAALLTREASKLTFGQDIEITSSHNLESLLRSPPDKWLTNARITQYQVLLLDPPRVRFKQTAALNPATLLPETDDTLPIHHCLDTLDSLTSTRPDLTDQPLAQAEATLFTDGSSYIRDGKRYAGAAVVTLDSVIWAEPLPIGTSAQKAELIALTKALEWSKDKSVNIYTDSRYAFATLHVHGMIYRERGWLTAGGKAIKNAPEILALLTAVWLPKRVAVMHCKGHQKDDAPTSTGNRRADEVAREVAIRPLSTQATISGSSGSSGSSGSSGSSGSSMASNFTQFVLVDNGGTGDVTVAPSNFANGIAEWISSNSRSQAYKVTCSVRQSSAQNRKYTIKVEVPKGAWRSYLNMELTIPIFATNSDCELIVKAMQGLLKDGNPIPSAIAANSGIYKRTADGSEFESPKKKAKVE

SEQ ID NO: 16207 - protein, 2375 aa, synthetic construct
MPAAKRVKLDGGDKKYSIGLDIGTNSVGWAVITDEYKVPSKKFKVLGNTDRHSIKKNLIGALLFDSGETAEATRLKRTARRRYTRRKNRICYLQEIFSNEMAKVDDSFFHRLEESFLVEEDKKHERHPIFGNIVDEVAYHEKYPTIYHLRKKLVDSTDKADLRLIYLALAHMIKFRGHFLIEGDLNPDNSDVDKLFIQLVQTYNQLFEENPINASGVDAKAILSARLSKSRRLENLIAQLPGEKKNGLFGNLIALSLGLTPNFKSNFDLAEDAKLQLSKDTYDDDLDNLLAQIGDQYADLFLAAKNLSDAILLSDILRVNTEITKAPLSASMIKRYDEHHQDLTLLKALVRQQLPEKYKEIFFDQSKNGYAGYIDGGASQEEFYKFIKPILEKMDGTEELLVKLNREDLLRKQRTFDNGSIPHQIHLGELHAILRRQEDFYPFLKDNREKIEKILTFRIPYYVGPLARGNSRFAWMTRKSEETITPWNFEEVVDKGASAQSFIERMTNFDKNLPNEKVLPKHSLLYEYFTVYNELTKVKYVTEGMRKPAFLSGEQKKAIVDLLFKTNRKVTVKQLKEDYFKKIECFDSVEISGVEDRFNASLGTYHDLLKIIKDKDFLDNEENEDILEDIVLTLTLFEDREMIEERLKTYAHLFDDKVMKQLKRRRYTGWGRLSRKLINGIRDKQSGKTILDFLKSDGFANRNFMQLIHDDSLTFKEDIQKAQVSGQGDSLHEHIANLAGSPAIKKGILQTVKVVDELVKVMGRHKPENIVIEMARENQTTQKGQKNSRERMKRIEEGIKELGSQILKEHPVENTQLQNEKLYLYYLQNGRDMYVDQELDINRLSDYDVDHIVPQSFLKDDSIDNKVLTRSDKARGKSDNVPSEEVVKKMKNYWRQLLNAKLITQRKFDNLTKAERGGLSELDKAGFIKRQLVETRQITKHVAQILDSRMNTKYDENDKLIREVKVITLKSKLVSDFRKDFQFYKVREINNYHHAHDAYLNAVVGTALIKKYPKLESEFVYGDYKVYDVRKMIAKSEQEIGKATAKYFFYSNIMNFFKTEITLANGEIRKRPLIETNGETGEIVWDKGRDFATVRKVLSMPQVNIVKKTEVQTGGFSKESILPKRNSDKLIARKKDWDPKKYGGFDSPTVAYSVLVVAKVEKGKSKKLKSVKELLGITIMERSSFEKNPIDFLEAKGYKEVKKDLIIKLPKYSLFELENGRKRMLASAGELQKGNELALPSKYVNFLYLASHYEKLKGSPEDNEQKQLFVEQHKHYLDEIIEQISEFSKRVILADANLDKVLSAYNKHRDKPIREQAENIIHLFTLTNLGAPAAFKYFDTTIDRKRYTSTKEVLDATLIHQSITGLYETRIDLSQLGGDAEAAAKEAAAKEAAAKEAAAKALEAEAAAKEAAAKEAAAKEAAAKATAPLEEEYRLFLEAPIQNVTLLEQWKREIPKVWAEINPPGLASTQAPIHVQLLSTALPVRVRQYPITLEAKRSLRETIRKFRAAGILRPVHSPWNTPLLPVRKSGTSEYRMVQDLREVNKRVETIHPTVPNPYTLLSLLPPDRIWYSVLDLKDAFFCIPLAPESQLIFAFEWADAEEGESGQLTWTRLPQGFKNSPTLFNEALNRDLQGFRLDHPSVSLLQYVDDLLIAADTQAACLSATRDLLMTLAELGYRVSGKKAQLCQEEVTYLGFKIHKGSRSLSNSRTQAILQIPVPKTKRQVREFLGKIGYCRLFIPGFAELAQPLYAATRPGNDPLVWGEKEEEAFQSLKLALTQPPALALPSLDKPFQLFVEETSGAAKGVLTQALGPWKRPVAYLSKRLDPVAAGWPRCLRAIAAAALLTREASKLTFGQDIEITSSHNLESLLRSPPDKWLTNARITQYQVLLLDPPRVRFKQTAALNPATLLPETDDTLPIHHCLDTLDSLTSTRPDLTDQPLAQAEATLFTDGSSYIRDGKRYAGAAVVTLDSVIWAEPLPIGTSAQKAELIALTKALEWSKDKSVNIYTDSRYAFATLHVHGMIYRERGWLTAGGKAIKNAPEILALLTAVWLPKRVAVMHCKGHQKDDAPTSTGNRRADEVAREVAIRPLSTQATISGSSGSSGSSGSSGSSGSSMASNFTQFVLVDNGGTGDVTVAPSNFANGIAEWISSNSRSQAYKVTCSVRQSSAQNRKYTIKVEVPKGAWRSYLNMELTIPIFATNSDCELIVKAMQGLLKDGNPIPSAIAANSGIYGGSGGSMASNFTQFVLVDNGGTGDVTVAPSNFANGIAEWISSNSRSQAYKVTCSVRQSSAQNRKYTIKVEVPKGAWRSYLNMELTIPIFATNSDCELIVKAMQGLLKDGNPIPSAIAANSGIYKRTADGSEFESPKKKAKVE

SEQ ID NO: 16208 - protein, 2631 aa, synthetic construct
MPAAKRVKLDGGDKKYSIGLDIGTNSVGWAVITDEYKVPSKKFKVLGNTDRHSIKKNLIGALLFDSGETAEATRLKRTARRRYTRRKNRICYLQEIFSNEMAKVDDSFFHRLEESFLVEEDKKHERHPIFGNIVDEVAYHEKYPTIYHLRKKLVDSTDKADLRLIYLALAHMIKFRGHFLIEGDLNPDNSDVDKLFIQLVQTYNQLFEENPINASGVDAKAILSARLSKSRRLENLIAQLPGEKKNGLFGNLIALSLGLTPNFKSNFDLAEDAKLQLSKDTYDDDLDNLLAQIGDQYADLFLAAKNLSDAILLSDILRVNTEITKAPLSASMIKRYDEHHQDLTLLKALVRQQLPEKYKEIFFDQSKNGYAGYIDGGASQEEFYKFIKPILEKMDGTEELLVKLNREDLLRKQRTFDNGSIPHQIHLGELHAILRRQEDFYPFLKDNREKIEKILTFRIPYYVGPLARGNSRFAWMTRKSEETITPWNFEEVVDKGASAQSFIERMTNFDKNLPNEKVLPKHSLLYEYFTVYNELTKVKYVTEGMRKPAFLSGEQKKAIVDLLFKTNRKVTVKQLKEDYFKKIECFDSVEISGVEDRFNASLGTYHDLLKIIKDKDFLDNEENEDILEDIVLTLTLFEDREMIEERLKTYAHLFDDKVMKQLKRRRYTGWGRLSRKLINGIRDKQSGKTILDFLKSDGFANRNFMQLIHDDSLTFKEDIQKAQVSGQGDSLHEHIANLAGSPAIKKGILQTVKVVDELVKVMGRHKPENIVIEMARENQTTQKGQKNSRERMKRIEEGIKELGSQILKEHPVENTQLQNEKLYLYYLQNGRDMYVDQELDINRLSDYDVDHIVPQSFLKDDSIDNKVLTRSDKARGKSDNVPSEEVVKKMKNYWRQLLNAKLITQRKFDNLTKAERGGLSELDKAGFIKRQLVETRQITKHVAQILDSRMNTKYDENDKLIREVKVITLKSKLVSDFRKDFQFYKVREINNYHHAHDAYLNAVVGTALIKKYPKLESEFVYGDYKVYDVRKMIAKSEQEIGKATAKYFFYSNIMNFFKTEITLANGEIRKRPLIETNGETGEIVWDKGRDFATVRKVLSMPQVNIVKKTEVQTGGFSKESILPKRNSDKLIARKKDWDPKKYGGFDSPTVAYSVLVVAKVEKGKSKKLKSVKELLGITIMERSSFEKNPIDFLEAKGYKEVKKDLIIKLPKYSLFELENGRKRMLASAGELQKGNELALPSKYVNFLYLASHYEKLKGSPEDNEQKQLFVEQHKHYLDEIIEQISEFSKRVILADANLDKVLSAYNKHRDKPIREQAENIIHLFTLTNLGAPAAFKYFDTTIDRKRYTSTKEVLDATLIHQSITGLYETRIDLSQLGGDAEAAAKEAAAKEAAAKEAAAKALEAEAAAKEAAAKEAAAKEAAAKATAPLEEEYRLFLEAPIQNVTLLEQWKREIPKVWAEINPPGLASTQAPIHVQLLSTALPVRVRQYPITLEAKRSLRETIRKFRAAGILRPVHSPWNTPLLPVRKSGTSEYRMVQDLREVNKRVETIHPTVPNPYTLLSLLPPDRIWYSVLDLKDAFFCIPLAPESQLIFAFEWADAEEGESGQLTWTRLPQGFKNSPTLFNEALNRDLQGFRLDHPSVSLLQYVDDLLIAADTQAACLSATRDLLMTLAELGYRVSGKKAQLCQEEVTYLGFKIHKGSRSLSNSRTQAILQIPVPKTKRQVREFLGKIGYCRLFIPGFAELAQPLYAATRPGNDPLVWGEKEEEAFQSLKLALTQPPALALPSLDKPFQLFVEETSGAAKGVLTQALGPWKRPVAYLSKRLDPVAAGWPRCLRAIAAAALLTREASKLTFGQDIEITSSHNLESLLRSPPDKWLTNARITQYQVLLLDPPRVRFKQTAALNPATLLPETDDTLPIHHCLDTLDSLTSTRPDLTDQPLAQAEATLFTDGSSYIRDGKRYAGAAVVTLDSVIWAEPLPIGTSAQKAELIALTKALEWSKDKSVNIYTDSRYAFATLHVHGMIYRERGWLTAGGKAIKNAPEILALLTAVWLPKRVAVMHCKGHQKDDAPTSTGNRRADEVAREVAIRPLSTQATISGSSGSSGSSGSSGSSGSSMASNFTQFVLVDNGGTGDVTVAPSNFANGIAEWISSNSRSQAYKVTCSVRQSSAQNRKYTIKVEVPKGAWRSYLNMELTIPIFATNSDCELIVKAMQGLLKDGNPIPSAIAANSGIYGGSGGSMASNFTQFVLVDNGGTGDVTVAPSNFANGIAEWISSNSRSQAYKVTCSVRQSSAQNRKYTIKVEVPKGAWRSYLNMELTIPIFATNSDCELIVKAMQGLLKDGNPIPSAIAANSGIYGGGSGGGSGGGSGGGSMASNFTQFVLVDNGGTGDVTVAPSNFANGIAEWISSNSRSQAYKVTCSVRQSSAQNRKYTIKVEVPKGAWRSYLNMELTIPIFATNSDCELIVKAMQGLLKDGNPIPSAIAANSGIYGGSGGSMASNFTQFVLVDNGGTGDVTVAPSNFANGIAEWISSNSRSQAYKVTCSVRQSSAQNRKYTIKVEVPKGAWRSYLNMELTIPIFATNSDCELIVKAMQGLLKDGNPIPSAIAANSGIYKRTADGSEFESPKKKAKVE

SEQ ID NO: 16209 - protein, 2245 aa, synthetic construct
MPAAKRVKLDGGDKKYSIGLDIGTNSVGWAVITDEYKVPSKKFKVLGNTDRHSIKKNLIGALLFDSGETAEATRLKRTARRRYTRRKNRICYLQEIFSNEMAKVDDSFFHRLEESFLVEEDKKHERHPIFGNIVDEVAYHEKYPTIYHLRKKLVDSTDKADLRLIYLALAHMIKFRGHFLIEGDLNPDNSDVDKLFIQLVQTYNQLFEENPINASGVDAKAILSARLSKSRRLENLIAQLPGEKKNGLFGNLIALSLGLTPNFKSNFDLAEDAKLQLSKDTYDDDLDNLLAQIGDQYADLFLAAKNLSDAILLSDILRVNTEITKAPLSASMIKRYDEHHQDLTLLKALVRQQLPEKYKEIFFDQSKNGYAGYIDGGASQEEFYKFIKPILEKMDGTEELLVKLNREDLLRKQRTFDNGSIPHQIHLGELHAILRRQEDFYPFLKDNREKIEKILTFRIPYYVGPLARGNSRFAWMTRKSEETITPWNFEEVVDKGASAQSFIERMTNFDKNLPNEKVLPKHSLLYEYFTVYNELTKVKYVTEGMRKPAFLSGEQKKAIVDLLFKTNRKVTVKQLKEDYFKKIECFDSVEISGVEDRFNASLGTYHDLLKIIKDKDFLDNEENEDILEDIVLTLTLFEDREMIEERLKTYAHLFDDKVMKQLKRRRYTGWGRLSRKLINGIRDKQSGKTILDFLKSDGFANRNFMQLIHDDSLTFKEDIQKAQVSGQGDSLHEHIANLAGSPAIKKGILQTVKVVDELVKVMGRHKPENIVIEMARENQTTQKGQKNSRERMKRIEEGIKELGSQILKEHPVENTQLQNEKLYLYYLQNGRDMYVDQELDINRLSDYDVDHIVPQSFLKDDSIDNKVLTRSDKARGKSDNVPSEEVVKKMKNYWRQLLNAKLITQRKFDNLTKAERGGLSELDKAGFIKRQLVETRQITKHVAQILDSRMNTKYDENDKLIREVKVITLKSKLVSDFRKDFQFYKVREINNYHHAHDAYLNAVVGTALIKKYPKLESEFVYGDYKVYDVRKMIAKSEQEIGKATAKYFFYSNIMNFFKTEITLANGEIRKRPLIETNGETGEIVWDKGRDFATVRKVLSMPQVNIVKKTEVQTGGFSKESILPKRNSDKLIARKKDWDPKKYGGFDSPTVAYSVLVVAKVEKGKSKKLKSVKELLGITIMERSSFEKNPIDFLEAKGYKEVKKDLIIKLPKYSLFELENGRKRMLASAGELQKGNELALPSKYVNFLYLASHYEKLKGSPEDNEQKQLFVEQHKHYLDEIIEQISEFSKRVILADANLDKVLSAYNKHRDKPIREQAENIIHLFTLTNLGAPAAFKYFDTTIDRKRYTSTKEVLDATLIHQSITGLYETRIDLSQLGGDAEAAAKEAAAKEAAAKEAAAKALEAEAAAKEAAAKEAAAKEAAAKATAPLEEEYRLFLEAPIQNVTLLEQWKREIPKVWAEINPPGLASTQAPIHVQLLSTALPVRVRQYPITLEAKRSLRETIRKFRAAGILRPVHSPWNTPLLPVRKSGTSEYRMVQDLREVNKRVETIHPTVPNPYTLLSLLPPDRIWYSVLDLKDAFFCIPLAPESQLIFAFEWADAEEGESGQLTWTRLPQGFKNSPTLFNEALNRDLQGFRLDHPSVSLLQYVDDLLIAADTQAACLSATRDLLMTLAELGYRVSGKKAQLCQEEVTYLGFKIHKGSRSLSNSRTQAILQIPVPKTKRQVREFLGKIGYCRLFIPGFAELAQPLYAATRPGNDPLVWGEKEEEAFQSLKLALTQPPALALPSLDKPFQLFVEETSGAAKGVLTQALGPWKRPVAYLSKRLDPVAAGWPRCLRAIAAAALLTREASKLTFGQDIEITSSHNLESLLRSPPDKWLTNARITQYQVLLLDPPRVRFKQTAALNPATLLPETDDTLPIHHCLDTLDSLTSTRPDLTDQPLAQAEATLFTDGSSYIRDGKRYAGAAVVTLDSVIWAEPLPIGTSAQKAELIALTKALEWSKDKSVNIYTDSRYAFATLHVHGMIYRERGWLTAGGKAIKNAPEILALLTAVWLPKRVAVMHCKGHQKDDAPTSTGNRRADEVAREVAIRPLSTQATISGSSGGGEAAAKMASNFTQFVLVDNGGTGDVTVAPSNFANGIAEWISSNSRSQAYKVTCSVRQSSAQNRKYTIKVEVPKGAWRSYLNMELTIPIFATNSDCELIVKAMQGLLKDGNPIPSAIAANSGIYKRTADGSEFESPKKKAKVE

SEQ ID NO: 16210 - protein, 2368 aa, synthetic construct
MPAAKRVKLDGGDKKYSIGLDIGTNSVGWAVITDEYKVPSKKFKVLGNTDRHSIKKNLIGALLFDSGETAEATRLKRTARRRYTRRKNRICYLQEIFSNEMAKVDDSFFHRLEESFLVEEDKKHERHPIFGNIVDEVAYHEKYPTIYHLRKKLVDSTDKADLRLIYLALAHMIKFRGHFLIEGDLNPDNSDVDKLFIQLVQTYNQLFEENPINASGVDAKAILSARLSKSRRLENLIAQLPGEKKNGLFGNLIALSLGLTPNFKSNFDLAEDAKLQLSKDTYDDDLDNLLAQIGDQYADLFLAAKNLSDAILLSDILRVNTEITKAPLSASMIKRYDEHHQDLTLLKALVRQQLPEKYKEIFFDQSKNGYAGYIDGGASQEEFYKFIKPILEKMDGTEELLVKLNREDLLRKQRTFDNGSIPHQIHLGELHAILRRQEDFYPFLKDNREKIEKILTFRIPYYVGPLARGNSRFAWMTRKSEETITPWNFEEVVDKGASAQSFIERMTNFDKNLPNEKVLPKHSLLYEYFTVYNELTKVKYVTEGMRKPAFLSGEQKKAIVDLLFKTNRKVTVKQLKEDYFKKIECFDSVEISGVEDRFNASLGTYHDLLKIIKDKDFLDNEENEDILEDIVLTLTLFEDREMIEERLKTYAHLFDDKVMKQLKRRRYTGWGRLSRKLINGIRDKQSGKTILDFLKSDGFANRNFMQLIHDDSLTFKEDIQKAQVSGQGDSLHEHIANLAGSPAIKKGILQTVKVVDELVKVMGRHKPENIVIEMARENQTTQKGQKNSRERMKRIEEGIKELGSQILKEHPVENTQLQNEKLYLYYLQNGRDMYVDQELDINRLSDYDVDHIVPQSFLKDDSIDNKVLTRSDKARGKSDNVPSEEVVKKMKNYWRQLLNAKLITQRKFDNLTKAERGGLSELDKAGFIKRQLVETRQITKHVAQILDSRMNTKYDENDKLIREVKVITLKSKLVSDFRKDFQFYKVREINNYHHAHDAYLNAVVGTALIKKYPKLESEFVYGDYKVYDVRKMIAKSEQEIGKATAKYFFYSNIMNFFKTEITLANGEIRKRPLIETNGETGEIVWDKGRDFATVRKVLSMPQVNIVKKTEVQTGGFSKESILPKRNSDKLIARKKDWDPKKYGGFDSPTVAYSVLVVAKVEKGKSKKLKSVKELLGITIMERSSFEKNPIDFLEAKGYKEVKKDLIIKLPKYSLFELENGRKRMLASAGELQKGNELALPSKYVNFLYLASHYEKLKGSPEDNEQKQLFVEQHKHYLDEIIEQISEFSKRVILADANLDKVLSAYNKHRDKPIREQAENIIHLFTLTNLGAPAAFKYFDTTIDRKRYTSTKEVLDATLIHQSITGLYETRIDLSQLGGDAEAAAKEAAAKEAAAKEAAAKALEAEAAAKEAAAKEAAAKEAAAKATAPLEEEYRLFLEAPIQNVTLLEQWKREIPKVWAEINPPGLASTQAPIHVQLLSTALPVRVRQYPITLEAKRSLRETIRKFRAAGILRPVHSPWNTPLLPVRKSGTSEYRMVQDLREVNKRVETIHPTVPNPYTLLSLLPPDRIWYSVLDLKDAFFCIPLAPESQLIFAFEWADAEEGESGQLTWTRLPQGFKNSPTLFNEALNRDLQGFRLDHPSVSLLQYVDDLLIAADTQAACLSATRDLLMTLAELGYRVSGKKAQLCQEEVTYLGFKIHKGSRSLSNSRTQAILQIPVPKTKRQVREFLGKIGYCRLFIPGFAELAQPLYAATRPGNDPLVWGEKEEEAFQSLKLALTQPPALALPSLDKPFQLFVEETSGAAKGVLTQALGPWKRPVAYLSKRLDPVAAGWPRCLRAIAAAALLTREASKLTFGQDIEITSSHNLESLLRSPPDKWLTNARITQYQVLLLDPPRVRFKQTAALNPATLLPETDDTLPIHHCLDTLDSLTSTRPDLTDQPLAQAEATLFTDGSSYIRDGKRYAGAAVVTLDSVIWAEPLPIGTSAQKAELIALTKALEWSKDKSVNIYTDSRYAFATLHVHGMIYRERGWLTAGGKAIKNAPEILALLTAVWLPKRVAVMHCKGHQKDDAPTSTGNRRADEVAREVAIRPLSTQATISGSSGGGEAAAKMASNFTQFVLVDNGGTGDVTVAPSNFANGIAEWISSNSRSQAYKVTCSVRQSSAQNRKYTIKVEVPKGAWRSYLNMELTIPIFATNSDCELIVKAMQGLLKDGNPIPSAIAANSGIYGGSGGSMASNFTQFVLVDNGGTGDVTVAPSNFANGIAEWISSNSRSQAYKVTCSVRQSSAQNRKYTIKVEVPKGAWRSYLNMELTIPIFATNSDCELIVKAMQGLLKDGNPIPSAIAANSGIYKRTADGSEFESPKKKAKVE

SEQ ID NO: 16211 - protein, 2624 aa, synthetic construct
MPAAKRVKLDGGDKKYSIGLDIGTNSVGWAVITDEYKVPSKKFKVLGNTDRHSIKKNLIGALLFDSGETAEATRLKRTARRRYTRRKNRICYLQEIFSNEMAKVDDSFFHRLEESFLVEEDKKHERHPIFGNIVDEVAYHEKYPTIYHLRKKLVDSTDKADLRLIYLALAHMIKFRGHFLIEGDLNPDNSDVDKLFIQLVQTYNQLFEENPINASGVDAKAILSARLSKSRRLENLIAQLPGEKKNGLFGNLIALSLGLTPNFKSNFDLAEDAKLQLSKDTYDDDLDNLLAQIGDQYADLFLAAKNLSDAILLSDILRVNTEITKAPLSASMIKRYDEHHQDLTLLKALVRQQLPEKYKEIFFDQSKNGYAGYIDGGASQEEFYKFIKPILEKMDGTEELLVKLNREDLLRKQRTFDNGSIPHQIHLGELHAILRRQEDFYPFLKDNREKIEKILTFRIPYYVGPLARGNSRFAWMTRKSEETITPWNFEEVVDKGASAQSFIERMTNFDKNLPNEKVLPKHSLLYEYFTVYNELTKVKYVTEGMRKPAFLSGEQKKAIVDLLFKTNRKVTVKQLKEDYFKKIECFDSVEISGVEDRFNASLGTYHDLLKIIKDKDFLDNEENEDILEDIVLTLTLFEDREMIEERLKTYAHLFDDKVMKQLKRRRYTGWGRLSRKLINGIRDKQSGKTILDFLKSDGFANRNFMQLIHDDSLTFKEDIQKAQVSGQGDSLHEHIANLAGSPAIKKGILQTVKVVDELVKVMGRHKPENIVIEMARENQTTQKGQKNSRERMKRIEEGIKELGSQILKEHPVENTQLQNEKLYLYYLQNGRDMYVDQELDINRLSDYDVDHIVPQSFLKDDSIDNKVLTRSDKARGKSDNVPSEEVVKKMKNYWRQLLNAKLITQRKFDNLTKAERGGLSELDKAGFIKRQLVETRQITKHVAQILDSRMNTKYDENDKLIREVKVITLKSKLVSDFRKDFQFYKVREINNYHHAHDAYLNAVVGTALIKKYPKLESEFVYGDYKVYDVRKMIAKSEQEIGKATAKYFFYSNIMNFFKTEITLANGEIRKRPLIETNGETGEIVWDKGRDFATVRKVLSMPQVNIVKKTEVQTGGFSKESILPKRNSDKLIARKKDWDPKKYGGFDSPTVAYSVLVVAKVEKGKSKKLKSVKELLGITIMERSSFEKNPIDFLEAKGYKEVKKDLIIKLPKYSLFELENGRKRMLASAGELQKGNELALPSKYVNFLYLASHYEKLKGSPEDNEQKQLFVEQHKHYLDEIIEQISEFSKRVILADANLDKVLSAYNKHRDKPIREQAENIIHLFTLTNLGAPAAFKYFDTTIDRKRYTSTKEVLDATLIHQSITGLYETRIDLSQLGGDAEAAAKEAAAKEAAAKEAAAKALEAEAAAKEAAAKEAAAKEAAAKATAPLEEEYRLFLEAPIQNVTLLEQWKREIPKVWAEINPPGLASTQAPIHVQLLSTALPVRVRQYPITLEAKRSLRETIRKFRAAGILRPVHSPWNTPLLPVRKSGTSEYRMVQDLREVNKRVETIHPTVPNPYTLLSLLPPDRIWYSVLDLKDAFFCIPLAPESQLIFAFEWADAEEGESGQLTWTRLPQGFKNSPTLFNEALNRDLQGFRLDHPSVSLLQYVDDLLIAADTQAACLSATRDLLMTLAELGYRVSGKKAQLCQEEVTYLGFKIHKGSRSLSNSRTQAILQIPVPKTKRQVREFLGKIGYCRLFIPGFAELAQPLYAATRPGNDPLVWGEKEEEAFQSLKLALTQPPALALPSLDKPFQLFVEETSGAAKGVLTQALGPWKRPVAYLSKRLDPVAAGWPRCLRAIAAAALLTREASKLTFGQDIEITSSHNLESLLRSPPDKWLTNARITQYQVLLLDPPRVRFKQTAALNPATLLPETDDTLPIHHCLDTLDSLTSTRPDLTDQPLAQAEATLFTDGSSYIRDGKRYAGAAVVTLDSVIWAEPLPIGTSAQKAELIALTKALEWSKDKSVNIYTDSRYAFATLHVHGMIYRERGWLTAGGKAIKNAPEILALLTAVWLPKRVAVMHCKGHQKDDAPTSTGNRRADEVAREVAIRPLSTQATISGSSGGGEAAAKMASNFTQFVLVDNGGTGDVTVAPSNFANGIAEWISSNSRSQAYKVTCSVRQSSAQNRKYTIKVEVPKGAWRSYLNMELTIPIFATNSDCELIVKAMQGLLKDGNPIPSAIAANSGIYGGSGGSMASNFTQFVLVDNGGTGDVTVAPSNFANGIAEWISSNSRSQAYKVTCSVRQSSAQNRKYTIKVEVPKGAWRSYLNMELTIPIFATNSDCELIVKAMQGLLKDGNPIPSAIAANSGIYGGGSGGGSGGGSGGGSMASNFTQFVLVDNGGTGDVTVAPSNFANGIAEWISSNSRSQAYKVTCSVRQSSAQNRKYTIKVEVPKGAWRSYLNMELTIPIFATNSDCELIVKAMQGLLKDGNPIPSAIAANSGIYGGSGGSMASNFTQFVLVDNGGTGDVTVAPSNFANGIAEWISSNSRSQAYKVTCSVRQSSAQNRKYTIKVEVPKGAWRSYLNMELTIPIFATNSDCELIVKAMQGLLKDGNPIPSAIAANSGIYKRTADGSEFESPKKKAKVE

SEQ ID NO: 16212 - protein, 2278 aa, synthetic construct
MPAAKRVKLDGGDKKYSIGLDIGTNSVGWAVITDEYKVPSKKFKVLGNTDRHSIKKNLIGALLFDSGETAEATRLKRTARRRYTRRKNRICYLQEIFSNEMAKVDDSFFHRLEESFLVEEDKKHERHPIFGNIVDEVAYHEKYPTIYHLRKKLVDSTDKADLRLIYLALAHMIKFRGHFLIEGDLNPDNSDVDKLFIQLVQTYNQLFEENPINASGVDAKAILSARLSKSRRLENLIAQLPGEKKNGLFGNLIALSLGLTPNFKSNFDLAEDAKLQLSKDTYDDDLDNLLAQIGDQYADLFLAAKNLSDAILLSDILRVNTEITKAPLSASMIKRYDEHHQDLTLLKALVRQQLPEKYKEIFFDQSKNGYAGYIDGGASQEEFYKFIKPILEKMDGTEELLVKLNREDLLRKQRTFDNGSIPHQIHLGELHAILRRQEDFYPFLKDNREKIEKILTFRIPYYVGPLARGNSRFAWMTRKSEETITPWNFEEVVDKGASAQSFIERMTNFDKNLPNEKVLPKHSLLYEYFTVYNELTKVKYVTEGMRKPAFLSGEQKKAIVDLLFKTNRKVTVKQLKEDYFKKIECFDSVEISGVEDRFNASLGTYHDLLKIIKDKDFLDNEENEDILEDIVLTLTLFEDREMIEERLKTYAHLFDDKVMKQLKRRRYTGWGRLSRKLINGIRDKQSGKTILDFLKSDGFANRNFMQLIHDDSLTFKEDIQKAQVSGQGDSLHEHIANLAGSPAIKKGILQTVKVVDELVKVMGRHKPENIVIEMARENQTTQKGQKNSRERMKRIEEGIKELGSQILKEHPVENTQLQNEKLYLYYLQNGRDMYVDQELDINRLSDYDVDHIVPQSFLKDDSIDNKVLTRSDKARGKSDNVPSEEVVKKMKNYWRQLLNAKLITQRKFDNLTKAERGGLSELDKAGFIKRQLVETRQITKHVAQILDSRMNTKYDENDKLIREVKVITLKSKLVSDFRKDFQFYKVREINNYHHAHDAYLNAVVGTALIKKYPKLESEFVYGDYKVYDVRKMIAKSEQEIGKATAKYFFYSNIMNFFKTEITLANGEIRKRPLIETNGETGEIVWDKGRDFATVRKVLSMPQVNIVKKTEVQTGGFSKESILPKRNSDKLIARKKDWDPKKYGGFDSPTVAYSVLVVAKVEKGKSKKLKSVKELLGITIMERSSFEKNPIDFLEAKGYKEVKKDLIIKLPKYSLFELENGRKRMLASAGELQKGNELALPSKYVNFLYLASHYEKLKGSPEDNEQKQLFVEQHKHYLDEIIEQISEFSKRVILADANLDKVLSAYNKHRDKPIREQAENIIHLFTLTNLGAPAAFKYFDTTIDRKRYTSTKEVLDATLIHQSITGLYETRIDLSQLGGDAEAAAKEAAAKEAAAKEAAAKALEAEAAAKEAAAKEAAAKEAAAKATLNIEDEHRLHETSKEPDVSLGSTWLSDFPQAWAETGGMGLAVRQAPLIIPLKATSTPVSIKQYPMSQEARLGIKPHIQRLLDQGILVPCQSPWNTPLLPVKKPGTNDYRPVQDLREVNKRVEDIHPTVPNPYNLLSGLPPSHQWYTVLDLKDAFFCLRLHPTSQPLFAFEWRDPEMGISGQLTWTRLPQGFKNSPTLFNEALHRDLADFRIQHPDLILLQYVDDLLLAATSELDCQQGTRALLQTLGNLGYRASAKKAQICQKQVKYLGYLLKEGQRWLTEARKETVMGQPTPKTPRQLREFLGKAGFCRLFIPGFAEMAAPLYPLTKPGTLFNWGPDQQKAYQEIKQALLTAPALGLPDLTKPFELFVDEKQGYAKGVLTQKLGPWRRPVAYLSKKLDPVAAGWPPCLRMVAAIAVLTKDAGKLTMGQPLVILAPHAVEALVKQPPDRWLSNARMTHYQALLLDTDRVQFGPVVALNPATLLPLPEEGLQHNCLDILAEAHGTRPDLTDQPLPDADHTWYTDGSSLLQEGQRKAGAAVTTETEVIWAKALPAGTSAQRAELIALTQALKMAEGKKLNVYTDSRYAFATAHIHGEIYRRRGWLTSEGKEIKNKDEILALLKALFLPKRLSIIHCPGHQKGHSAEARGNRMADQAARKAAITETPDTSTLLAEAAAKEAAAKEAAAKEAAAKALEAEAAAKEAAAKEAAAKEAAAKAMASNFTQFVLVDNGGTGDVTVAPSNFANGIAEWISSNSRSQAYKVTCSVRQSSAQNRKYTIKVEVPKGAWRSYLNMELTIPIFATNSDCELIVKAMQGLLKDGNPIPSAIAANSGIYKRTADGSEFESPKKKAKVE

SEQ ID NO: 16213 - protein, 2401 aa, synthetic construct
MPAAKRVKLDGGDKKYSIGLDIGTNSVGWAVITDEYKVPSKKFKVLGNTDRHSIKKNLIGALLFDSGETAEATRLKRTARRRYTRRKNRICYLQEIFSNEMAKVDDSFFHRLEESFLVEEDKKHERHPIFGNIVDEVAYHEKYPTIYHLRKKLVDSTDKADLRLIYLALAHMIKFRGHFLIEGDLNPDNSDVDKLFIQLVQTYNQLFEENPINASGVDAKAILSARLSKSRRLENLIAQLPGEKKNGLFGNLIALSLGLTPNFKSNFDLAEDAKLQLSKDTYDDDLDNLLAQIGDQYADLFLAAKNLSDAILLSDILRVNTEITKAPLSASMIKRYDEHHQDLTLLKALVRQQLPEKYKEIFFDQSKNGYAGYIDGGASQEEFYKFIKPILEKMDGTEELLVKLNREDLLRKQRTFDNGSIPHQIHLGELHAILRRQEDFYPFLKDNREKIEKILTFRIPYYVGPLARGNSRFAWMTRKSEETITPWNFEEVVDKGASAQSFIERMTNFDKNLPNEKVLPKHSLLYEYFTVYNELTKVKYVTEGMRKPAFLSGEQKKAIVDLLFKTNRKVTVKQLKEDYFKKIECFDSVEISGVEDRFNASLGTYHDLLKIIKDKDFLDNEENEDILEDIVLTLTLFEDREMIEERLKTYAHLFDDKVMKQLKRRRYTGWGRLSRKLINGIRDKQSGKTILDFLKSDGFANRNFMQLIHDDSLTFKEDIQKAQVSGQGDSLHEHIANLAGSPAIKKGILQTVKVVDELVKVMGRHKPENIVIEMARENQTTQKGQKNSRERMKRIEEGIKELGSQILKEHPVENTQLQNEKLYLYYLQNGRDMYVDQELDINRLSDYDVDHIVPQSFLKDDSIDNKVLTRSDKARGKSDNVPSEEVVKKMKNYWRQLLNAKLITQRKFDNLTKAERGGLSELDKAGFIKRQLVETRQITKHVAQILDSRMNTKYDENDKLIREVKVITLKSKLVSDFRKDFQFYKVREINNYHHAHDAYLNAVVGTALIKKYPKLESEFVYGDYKVYDVRKMIAKSEQEIGKATAKYFFYSNIMNFFKTEITLANGEIRKRPLIETNGETGEIVWDKGRDFATVRKVLSMPQVNIVKKTEVQTGGFSKESILPKRNSDKLIARKKDWDPKKYGGFDSPTVAYSVLVVAKVEKGKSKKLKSVKELLGITIMERSSFEKNPIDFLEAKGYKEVKKDLIIKLPKYSLFELENGRKRMLASAGELQKGNELALPSKYVNFLYLASHYEKLKGSPEDNEQKQLFVEQHKHYLDEIIEQISEFSKRVILADANLDKVLSAYNKHRDKPIREQAENIIHLFTLTNLGAPAAFKYFDTTIDRKRYTSTKEVLDATLIHQSITGLYETRIDLSQLGGDAEAAAKEAAAKEAAAKEAAAKALEAEAAAKEAAAKEAAAKEAAAKATLNIEDEHRLHETSKEPDVSLGSTWLSDFPQAWAETGGMGLAVRQAPLIIPLKATSTPVSIKQYPMSQEARLGIKPHIQRLLDQGILVPCQSPWNTPLLPVKKPGTNDYRPVQDLREVNKRVEDIHPTVPNPYNLLSGLPPSHQWYTVLDLKDAFFCLRLHPTSQPLFAFEWRDPEMGISGQLTWTRLPQGFKNSPTLFNEALHRDLADFRIQHPDLILLQYVDDLLLAATSELDCQQGTRALLQTLGNLGYRASAKKAQICQKQVKYLGYLLKEGQRWLTEARKETVMGQPTPKTPRQLREFLGKAGFCRLFIPGFAEMAAPLYPLTKPGTLFNWGPDQQKAYQEIKQALLTAPALGLPDLTKPFELFVDEKQGYAKGVLTQKLGPWRRPVAYLSKKLDPVAAGWPPCLRMVAAIAVLTKDAGKLTMGQPLVILAPHAVEALVKQPPDRWLSNARMTHYQALLLDTDRVQFGPVVALNPATLLPLPEEGLQHNCLDILAEAHGTRPDLTDQPLPDADHTWYTDGSSLLQEGQRKAGAAVTTETEVIWAKALPAGTSAQRAELIALTQALKMAEGKKLNVYTDSRYAFATAHIHGEIYRRRGWLTSEGKEIKNKDEILALLKALFLPKRLSIIHCPGHQKGHSAEARGNRMADQAARKAAITETPDTSTLLAEAAAKEAAAKEAAAKEAAAKALEAEAAAKEAAAKEAAAKEAAAKAMASNFTQFVLVDNGGTGDVTVAPSNFANGIAEWISSNSRSQAYKVTCSVRQSSAQNRKYTIKVEVPKGAWRSYLNMELTIPIFATNSDCELIVKAMQGLLKDGNPIPSAIAANSGIYGGSGGSMASNFTQFVLVDNGGTGDVTVAPSNFANGIAEWISSNSRSQAYKVTCSVRQSSAQNRKYTIKVEVPKGAWRSYLNMELTIPIFATNSDCELIVKAMQGLLKDGNPIPSAIAANSGIYKRTADGSEFESPKKKAKVE

SEQ ID NO: 16214 - protein, 2657 aa, synthetic construct
MPAAKRVKLDGGDKKYSIGLDIGTNSVGWAVITDEYKVPSKKFKVLGNTDRHSIKKNLIGALLFDSGETAEATRLKRTARRRYTRRKNRICYLQEIFSNEMAKVDDSFFHRLEESFLVEEDKKHERHPIFGNIVDEVAYHEKYPTIYHLRKKLVDSTDKADLRLIYLALAHMIKFRGHFLIEGDLNPDNSDVDKLFIQLVQTYNQLFEENPINASGVDAKAILSARLSKSRRLENLIAQLPGEKKNGLFGNLIALSLGLTPNFKSNFDLAEDAKLQLSKDTYDDDLDNLLAQIGDQYADLFLAAKNLSDAILLSDILRVNTEITKAPLSASMIKRYDEHHQDLTLLKALVRQQLPEKYKEIFFDQSKNGYAGYIDGGASQEEFYKFIKPILEKMDGTEELLVKLNREDLLRKQRTFDNGSIPHQIHLGELHAILRRQEDFYPFLKDNREKIEKILTFRIPYYVGPLARGNSRFAWMTRKSEETITPWNFEEVVDKGASAQSFIERMTNFDKNLPNEKVLPKHSLLYEYFTVYNELTKVKYVTEGMRKPAFLSGEQKKAIVDLLFKTNRKVTVKQLKEDYFKKIECFDSVEISGVEDRFNASLGTYHDLLKIIKDKDFLDNEENEDILEDIVLTLTLFEDREMIEERLKTYAHLFDDKVMKQLKRRRYTGWGRLSRKLINGIRDKQSGKTILDFLKSDGFANRNFMQLIHDDSLTFKEDIQKAQVSGQGDSLHEHIANLAGSPAIKKGILQTVKVVDELVKVMGRHKPENIVIEMARENQTTQKGQKNSRERMKRIEEGIKELGSQILKEHPVENTQLQNEKLYLYYLQNGRDMYVDQELDINRLSDYDVDHIVPQSFLKDDSIDNKVLTRSDKARGKSDNVPSEEVVKKMKNYWRQLLNAKLITQRKFDNLTKAERGGLSELDKAGFIKRQLVETRQITKHVAQILDSRMNTKYDENDKLIREVKVITLKSKLVSDFRKDFQFYKVREINNYHHAHDAYLNAVVGTALIKKYPKLESEFVYGDYKVYDVRKMIAKSEQEIGKATAKYFFYSNIMNFFKTEITLANGEIRKRPLIETNGETGEIVWDKGRDFATVRKVLSMPQVNIVKKTEVQTGGFSKESILPKRNSDKLIARKKDWDPKKYGGFDSPTVAYSVLVVAKVEKGKSKKLKSVKELLGITIMERSSFEKNPIDFLEAKGYKEVKKDLIIKLPKYSLFELENGRKRMLASAGELQKGNELALPSKYVNFLYLASHYEKLKGSPEDNEQKQLFVEQHKHYLDEIIEQISEFSKRVILADANLDKVLSAYNKHRDKPIREQAENIIHLFTLTNLGAPAAFKYFDTTIDRKRYTSTKEVLDATLIHQSITGLYETRIDLSQLGGDAEAAAKEAAAKEAAAKEAAAKALEAEAAAKEAAAKEAAAKEAAAKATLNIEDEHRLHETSKEPDVSLGSTWLSDFPQAWAETGGMGLAVRQAPLIIPLKATSTPVSIKQYPMSQEARLGIKPHIQRLLDQGILVPCQSPWNTPLLPVKKPGTNDYRPVQDLREVNKRVEDIHPTVPNPYNLLSGLPPSHQWYTVLDLKDAFFCLRLHPTSQPLFAFEWRDPEMGISGQLTWTRLPQGFKNSPTLFNEALHRDLADFRIQHPDLILLQYVDDLLLAATSELDCQQGTRALLQTLGNLGYRASAKKAQICQKQVKYLGYLLKEGQRWLTEARKETVMGQPTPKTPRQLREFLGKAGFCRLFIPGFAEMAAPLYPLTKPGTLFNWGPDQQKAYQEIKQALLTAPALGLPDLTKPFELFVDEKQGYAKGVLTQKLGPWRRPVAYLSKKLDPVAAGWPPCLRMVAAIAVLTKDAGKLTMGQPLVILAPHAVEALVKQPPDRWLSNARMTHYQALLLDTDRVQFGPVVALNPATLLPLPEEGLQHNCLDILAEAHGTRPDLTDQPLPDADHTWYTDGSSLLQEGQRKAGAAVTTETEVIWAKALPAGTSAQRAELIALTQALKMAEGKKLNVYTDSRYAFATAHIHGEIYRRRGWLTSEGKEIKNKDEILALLKALFLPKRLSIIHCPGHQKGHSAEARGNRMADQAARKAAITETPDTSTLLAEAAAKEAAAKEAAAKEAAAKALEAEAAAKEAAAKEAAAKEAAAKAMASNFTQFVLVDNGGTGDVTVAPSNFANGIAEWISSNSRSQAYKVTCSVRQSSAQNRKYTIKVEVPKGAWRSYLNMELTIPIFATNSDCELIVKAMQGLLKDGNPIPSAIAANSGIYGGSGGSMASNFTQFVLVDNGGTGDVTVAPSNFANGIAEWISSNSRSQAYKVTCSVRQSSAQNRKYTIKVEVPKGAWRSYLNMELTIPIFATNSDCELIVKAMQGLLKDGNPIPSAIAANSGIYGGGSGGGSGGGSGGGSMASNFTQFVLVDNGGTGDVTVAPSNFANGIAEWISSNSRSQAYKVTCSVRQSSAQNRKYTIKVEVPKGAWRSYLNMELTIPIFATNSDCELIVKAMQGLLKDGNPIPSAIAANSGIYGGSGGSMASNFTQFVLVDNGGTGDVTVAPSNFANGIAEWISSNSRSQAYKVTCSVRQSSAQNRKYTIKVEVPKGAWRSYLNMELTIPIFATNSDCELIVKAMQGLLKDGNPIPSAIAANSGIYKRTADGSEFESPKKKAKVE

SEQ ID NO: 16215 - protein, 2265 aa, synthetic construct
MPAAKRVKLDGGDKKYSIGLDIGTNSVGWAVITDEYKVPSKKFKVLGNTDRHSIKKNLIGALLFDSGETAEATRLKRTARRRYTRRKNRICYLQEIFSNEMAKVDDSFFHRLEESFLVEEDKKHERHPIFGNIVDEVAYHEKYPTIYHLRKKLVDSTDKADLRLIYLALAHMIKFRGHFLIEGDLNPDNSDVDKLFIQLVQTYNQLFEENPINASGVDAKAILSARLSKSRRLENLIAQLPGEKKNGLFGNLIALSLGLTPNFKSNFDLAEDAKLQLSKDTYDDDLDNLLAQIGDQYADLFLAAKNLSDAILLSDILRVNTEITKAPLSASMIKRYDEHHQDLTLLKALVRQQLPEKYKEIFFDQSKNGYAGYIDGGASQEEFYKFIKPILEKMDGTEELLVKLNREDLLRKQRTFDNGSIPHQIHLGELHAILRRQEDFYPFLKDNREKIEKILTFRIPYYVGPLARGNSRFAWMTRKSEETITPWNFEEVVDKGASAQSFIERMTNFDKNLPNEKVLPKHSLLYEYFTVYNELTKVKYVTEGMRKPAFLSGEQKKAIVDLLFKTNRKVTVKQLKEDYFKKIECFDSVEISGVEDRFNASLGTYHDLLKIIKDKDFLDNEENEDILEDIVLTLTLFEDREMIEERLKTYAHLFDDKVMKQLKRRRYTGWGRLSRKLINGIRDKQSGKTILDFLKSDGFANRNFMQLIHDDSLTFKEDIQKAQVSGQGDSLHEHIANLAGSPAIKKGILQTVKVVDELVKVMGRHKPENIVIEMARENQTTQKGQKNSRERMKRIEEGIKELGSQILKEHPVENTQLQNEKLYLYYLQNGRDMYVDQELDINRLSDYDVDHIVPQSFLKDDSIDNKVLTRSDKARGKSDNVPSEEVVKKMKNYWRQLLNAKLITQRKFDNLTKAERGGLSELDKAGFIKRQLVETRQITKHVAQILDSRMNTKYDENDKLIREVKVITLKSKLVSDFRKDFQFYKVREINNYHHAHDAYLNAVVGTALIKKYPKLESEFVYGDYKVYDVRKMIAKSEQEIGKATAKYFFYSNIMNFFKTEITLANGEIRKRPLIETNGETGEIVWDKGRDFATVRKVLSMPQVNIVKKTEVQTGGFSKESILPKRNSDKLIARKKDWDPKKYGGFDSPTVAYSVLVVAKVEKGKSKKLKSVKELLGITIMERSSFEKNPIDFLEAKGYKEVKKDLIIKLPKYSLFELENGRKRMLASAGELQKGNELALPSKYVNFLYLASHYEKLKGSPEDNEQKQLFVEQHKHYLDEIIEQISEFSKRVILADANLDKVLSAYNKHRDKPIREQAENIIHLFTLTNLGAPAAFKYFDTTIDRKRYTSTKEVLDATLIHQSITGLYETRIDLSQLGGDAEAAAKEAAAKEAAAKEAAAKALEAEAAAKEAAAKEAAAKEAAAKATLNIEDEHRLHETSKEPDVSLGSTWLSDFPQAWAETGGMGLAVRQAPLIIPLKATSTPVSIKQYPMSQEARLGIKPHIQRLLDQGILVPCQSPWNTPLLPVKKPGTNDYRPVQDLREVNKRVEDIHPTVPNPYNLLSGLPPSHQWYTVLDLKDAFFCLRLHPTSQPLFAFEWRDPEMGISGQLTWTRLPQGFKNSPTLFNEALHRDLADFRIQHPDLILLQYVDDLLLAATSELDCQQGTRALLQTLGNLGYRASAKKAQICQKQVKYLGYLLKEGQRWLTEARKETVMGQPTPKTPRQLREFLGKAGFCRLFIPGFAEMAAPLYPLTKPGTLFNWGPDQQKAYQEIKQALLTAPALGLPDLTKPFELFVDEKQGYAKGVLTQKLGPWRRPVAYLSKKLDPVAAGWPPCLRMVAAIAVLTKDAGKLTMGQPLVILAPHAVEALVKQPPDRWLSNARMTHYQALLLDTDRVQFGPVVALNPATLLPLPEEGLQHNCLDILAEAHGTRPDLTDQPLPDADHTWYTDGSSLLQEGQRKAGAAVTTETEVIWAKALPAGTSAQRAELIALTQALKMAEGKKLNVYTDSRYAFATAHIHGEIYRRRGWLTSEGKEIKNKDEILALLKALFLPKRLSIIHCPGHQKGHSAEARGNRMADQAARKAAITETPDTSTLLSGGSSGGSSGSETPGTSESATPESSGGSSGGSSMASNFTQFVLVDNGGTGDVTVAPSNFANGIAEWISSNSRSQAYKVTCSVRQSSAQNRKYTIKVEVPKGAWRSYLNMELTIPIFATNSDCELIVKAMQGLLKDGNPIPSAIAANSGIYKRTADGSEFESPKKKAKVE

SEQ ID NO: 16216 - protein, 2388 aa, synthetic construct
MPAAKRVKLDGGDKKYSIGLDIGTNSVGWAVITDEYKVPSKKFKVLGNTDRHSIKKNLIGALLFDSGETAEATRLKRTARRRYTRRKNRICYLQEIFSNEMAKVDDSFFHRLEESFLVEEDKKHERHPIFGNIVDEVAYHEKYPTIYHLRKKLVDSTDKADLRLIYLALAHMIKFRGHFLIEGDLNPDNSDVDKLFIQLVQTYNQLFEENPINASGVDAKAILSARLSKSRRLENLIAQLPGEKKNGLFGNLIALSLGLTPNFKSNFDLAEDAKLQLSKDTYDDDLDNLLAQIGDQYADLFLAAKNLSDAILLSDILRVNTEITKAPLSASMIKRYDEHHQDLTLLKALVRQQLPEKYKEIFFDQSKNGYAGYIDGGASQEEFYKFIKPILEKMDGTEELLVKLNREDLLRKQRTFDNGSIPHQIHLGELHAILRRQEDFYPFLKDNREKIEKILTFRIPYYVGPLARGNSRFAWMTRKSEETITPWNFEEVVDKGASAQSFIERMTNFDKNLPNEKVLPKHSLLYEYFTVYNELTKVKYVTEGMRKPAFLSGEQKKAIVDLLFKTNRKVTVKQLKEDYFKKIECFDSVEISGVEDRFNASLGTYHDLLKIIKDKDFLDNEENEDILEDIVLTLTLFEDREMIEERLKTYAHLFDDKVMKQLKRRRYTGWGRLSRKLINGIRDKQSGKTILDFLKSDGFANRNFMQLIHDDSLTFKEDIQKAQVSGQGDSLHEHIANLAGSPAIKKGILQTVKVVDELVKVMGRHKPENIVIEMARENQTTQKGQKNSRERMKRIEEGIKELGSQILKEHPVENTQLQNEKLYLYYLQNGRDMYVDQELDINRLSDYDVDHIVPQSFLKDDSIDNKVLTRSDKARGKSDNVPSEEVVKKMKNYWRQLLNAKLITQRKFDNLTKAERGGLSELDKAGFIKRQLVETRQITKHVAQILDSRMNTKYDENDKLIREVKVITLKSKLVSDFRKDFQFYKVREINNYHHAHDAYLNAVVGTALIKKYPKLESEFVYGDYKVYDVRKMIAKSEQEIGKATAKYFFYSNIMNFFKTEITLANGEIRKRPLIETNGETGEIVWDKGRDFATVRKVLSMPQVNIVKKTEVQTGGFSKESILPKRNSDKLIARKKDWDPKKYGGFDSPTVAYSVLVVAKVEKGKSKKLKSVKELLGITIMERSSFEKNPIDFLEAKGYKEVKKDLIIKLPKYSLFELENGRKRMLASAGELQKGNELALPSKYVNFLYLASHYEKLKGSPEDNEQKQLFVEQHKHYLDEIIEQISEFSKRVILADANLDKVLSAYNKHRDKPIREQAENIIHLFTLTNLGAPAAFKYFDTTIDRKRYTSTKEVLDATLIHQSITGLYETRIDLSQLGGDAEAAAKEAAAKEAAAKEAAAKALEAEAAAKEAAAKEAAAKEAAAKATLNIEDEHRLHETSKEPDVSLGSTWLSDFPQAWAETGGMGLAVRQAPLIIPLKATSTPVSIKQYPMSQEARLGIKPHIQRLLDQGILVPCQSPWNTPLLPVKKPGTNDYRPVQDLREVNKRVEDIHPTVPNPYNLLSGLPPSHQWYTVLDLKDAFFCLRLHPTSQPLFAFEWRDPEMGISGQLTWTRLPQGFKNSPTLFNEALHRDLADFRIQHPDLILLQYVDDLLLAATSELDCQQGTRALLQTLGNLGYRASAKKAQICQKQVKYLGYLLKEGQRWLTEARKETVMGQPTPKTPRQLREFLGKAGFCRLFIPGFAEMAAPLYPLTKPGTLFNWGPDQQKAYQEIKQALLTAPALGLPDLTKPFELFVDEKQGYAKGVLTQKLGPWRRPVAYLSKKLDPVAAGWPPCLRMVAAIAVLTKDAGKLTMGQPLVILAPHAVEALVKQPPDRWLSNARMTHYQALLLDTDRVQFGPVVALNPATLLPLPEEGLQHNCLDILAEAHGTRPDLTDQPLPDADHTWYTDGSSLLQEGQRKAGAAVTTETEVIWAKALPAGTSAQRAELIALTQALKMAEGKKLNVYTDSRYAFATAHIHGEIYRRRGWLTSEGKEIKNKDEILALLKALFLPKRLSIIHCPGHQKGHSAEARGNRMADQAARKAAITETPDTSTLLSGGSSGGSSGSETPGTSESATPESSGGSSGGSSMASNFTQFVLVDNGGTGDVTVAPSNFANGIAEWISSNSRSQAYKVTCSVRQSSAQNRKYTIKVEVPKGAWRSYLNMELTIPIFATNSDCELIVKAMQGLLKDGNPIPSAIAANSGIYGGSGGSMASNFTQFVLVDNGGTGDVTVAPSNFANGIAEWISSNSRSQAYKVTCSVRQSSAQNRKYTIKVEVPKGAWRSYLNMELTIPIFATNSDCELIVKAMQGLLKDGNPIPSAIAANSGIYKRTADGSEFESPKKKAKVE

SEQ ID NO: 16217 - protein, 2644 aa, synthetic construct
MPAAKRVKLDGGDKKYSIGLDIGTNSVGWAVITDEYKVPSKKFKVLGNTDRHSIKKNLIGALLFDSGETAEATRLKRTARRRYTRRKNRICYLQEIFSNEMAKVDDSFFHRLEESFLVEEDKKHERHPIFGNIVDEVAYHEKYPTIYHLRKKLVDSTDKADLRLIYLALAHMIKFRGHFLIEGDLNPDNSDVDKLFIQLVQTYNQLFEENPINASGVDAKAILSARLSKSRRLENLIAQLPGEKKNGLFGNLIALSLGLTPNFKSNFDLAEDAKLQLSKDTYDDDLDNLLAQIGDQYADLFLAAKNLSDAILLSDILRVNTEITKAPLSASMIKRYDEHHQDLTLLKALVRQQLPEKYKEIFFDQSKNGYAGYIDGGASQEEFYKFIKPILEKMDGTEELLVKLNREDLLRKQRTFDNGSIPHQIHLGELHAILRRQEDFYPFLKDNREKIEKILTFRIPYYVGPLARGNSRFAWMTRKSEETITPWNFEEVVDKGASAQSFIERMTNFDKNLPNEKVLPKHSLLYEYFTVYNELTKVKYVTEGMRKPAFLSGEQKKAIVDLLFKTNRKVTVKQLKEDYFKKIECFDSVEISGVEDRFNASLGTYHDLLKIIKDKDFLDNEENEDILEDIVLTLTLFEDREMIEERLKTYAHLFDDKVMKQLKRRRYTGWGRLSRKLINGIRDKQSGKTILDFLKSDGFANRNFMQLIHDDSLTFKEDIQKAQVSGQGDSLHEHIANLAGSPAIKKGILQTVKVVDELVKVMGRHKPENIVIEMARENQTTQKGQKNSRERMKRIEEGIKELGSQILKEHPVENTQLQNEKLYLYYLQNGRDMYVDQELDINRLSDYDVDHIVPQSFLKDDSIDNKVLTRSDKARGKSDNVPSEEVVKKMKNYWRQLLNAKLITQRKFDNLTKAERGGLSELDKAGFIKRQLVETRQITKHVAQILDSRMNTKYDENDKLIREVKVITLKSKLVSDFRKDFQFYKVREINNYHHAHDAYLNAVVGTALIKKYPKLESEFVYGDYKVYDVRKMIAKSEQEIGKATAKYFFYSNIMNFFKTEITLANGEIRKRPLIETNGETGEIVWDKGRDFATVRKVLSMPQVNIVKKTEVQTGGFSKESILPKRNSDKLIARKKDWDPKKYGGFDSPTVAYSVLVVAKVEKGKSKKLKSVKELLGITIMERSSFEKNPIDFLEAKGYKEVKKDLIIKLPKYSLFELENGRKRMLASAGELQKGNELALPSKYVNFLYLASHYEKLKGSPEDNEQKQLFVEQHKHYLDEIIEQISEFSKRVILADANLDKVLSAYNKHRDKPIREQAENIIHLFTLTNLGAPAAFKYFDTTIDRKRYTSTKEVLDATLIHQSITGLYETRIDLSQLGGDAEAAAKEAAAKEAAAKEAAAKALEAEAAAKEAAAKEAAAKEAAAKATLNIEDEHRLHETSKEPDVSLGSTWLSDFPQAWAETGGMGLAVRQAPLIIPLKATSTPVSIKQYPMSQEARLGIKPHIQRLLDQGILVPCQSPWNTPLLPVKKPGTNDYRPVQDLREVNKRVEDIHPTVPNPYNLLSGLPPSHQWYTVLDLKDAFFCLRLHPTSQPLFAFEWRDPEMGISGQLTWTRLPQGFKNSPTLFNEALHRDLADFRIQHPDLILLQYVDDLLLAATSELDCQQGTRALLQTLGNLGYRASAKKAQICQKQVKYLGYLLKEGQRWLTEARKETVMGQPTPKTPRQLREFLGKAGFCRLFIPGFAEMAAPLYPLTKPGTLFNWGPDQQKAYQEIKQALLTAPALGLPDLTKPFELFVDEKQGYAKGVLTQKLGPWRRPVAYLSKKLDPVAAGWPPCLRMVAAIAVLTKDAGKLTMGQPLVILAPHAVEALVKQPPDRWLSNARMTHYQALLLDTDRVQFGPVVALNPATLLPLPEEGLQHNCLDILAEAHGTRPDLTDQPLPDADHTWYTDGSSLLQEGQRKAGAAVTTETEVIWAKALPAGTSAQRAELIALTQALKMAEGKKLNVYTDSRYAFATAHIHGEIYRRRGWLTSEGKEIKNKDEILALLKALFLPKRLSIIHCPGHQKGHSAEARGNRMADQAARKAAITETPDTSTLLSGGSSGGSSGSETPGTSESATPESSGGSSGGSSMASNFTQFVLVDNGGTGDVTVAPSNFANGIAEWISSNSRSQAYKVTCSVRQSSAQNRKYTIKVEVPKGAWRSYLNMELTIPIFATNSDCELIVKAMQGLLKDGNPIPSAIAANSGIYGGSGGSMASNFTQFVLVDNGGTGDVTVAPSNFANGIAEWISSNSRSQAYKVTCSVRQSSAQNRKYTIKVEVPKGAWRSYLNMELTIPIFATNSDCELIVKAMQGLLKDGNPIPSAIAANSGIYGGGSGGGSGGGSGGGSMASNFTQFVLVDNGGTGDVTVAPSNFANGIAEWISSNSRSQAYKVTCSVRQSSAQNRKYTIKVEVPKGAWRSYLNMELTIPIFATNSDCELIVKAMQGLLKDGNPIPSAIAANSGIYGGSGGSMASNFTQFVLVDNGGTGDVTVAPSNFANGIAEWISSNSRSQAYKVTCSVRQSSAQNRKYTIKVEVPKGAWRSYLNMELTIPIFATNSDCELIVKAMQGLLKDGNPIPSAIAANSGIYKRTADGSEFESPKKKAKVE

SEQ ID NO: 16218 - protein, 2250 aa, synthetic construct
MPAAKRVKLDGGDKKYSIGLDIGTNSVGWAVITDEYKVPSKKFKVLGNTDRHSIKKNLIGALLFDSGETAEATRLKRTARRRYTRRKNRICYLQEIFSNEMAKVDDSFFHRLEESFLVEEDKKHERHPIFGNIVDEVAYHEKYPTIYHLRKKLVDSTDKADLRLIYLALAHMIKFRGHFLIEGDLNPDNSDVDKLFIQLVQTYNQLFEENPINASGVDAKAILSARLSKSRRLENLIAQLPGEKKNGLFGNLIALSLGLTPNFKSNFDLAEDAKLQLSKDTYDDDLDNLLAQIGDQYADLFLAAKNLSDAILLSDILRVNTEITKAPLSASMIKRYDEHHQDLTLLKALVRQQLPEKYKEIFFDQSKNGYAGYIDGGASQEEFYKFIKPILEKMDGTEELLVKLNREDLLRKQRTFDNGSIPHQIHLGELHAILRRQEDFYPFLKDNREKIEKILTFRIPYYVGPLARGNSRFAWMTRKSEETITPWNFEEVVDKGASAQSFIERMTNFDKNLPNEKVLPKHSLLYEYFTVYNELTKVKYVTEGMRKPAFLSGEQKKAIVDLLFKTNRKVTVKQLKEDYFKKIECFDSVEISGVEDRFNASLGTYHDLLKIIKDKDFLDNEENEDILEDIVLTLTLFEDREMIEERLKTYAHLFDDKVMKQLKRRRYTGWGRLSRKLINGIRDKQSGKTILDFLKSDGFANRNFMQLIHDDSLTFKEDIQKAQVSGQGDSLHEHIANLAGSPAIKKGILQTVKVVDELVKVMGRHKPENIVIEMARENQTTQKGQKNSRERMKRIEEGIKELGSQILKEHPVENTQLQNEKLYLYYLQNGRDMYVDQELDINRLSDYDVDHIVPQSFLKDDSIDNKVLTRSDKARGKSDNVPSEEVVKKMKNYWRQLLNAKLITQRKFDNLTKAERGGLSELDKAGFIKRQLVETRQITKHVAQILDSRMNTKYDENDKLIREVKVITLKSKLVSDFRKDFQFYKVREINNYHHAHDAYLNAVVGTALIKKYPKLESEFVYGDYKVYDVRKMIAKSEQEIGKATAKYFFYSNIMNFFKTEITLANGEIRKRPLIETNGETGEIVWDKGRDFATVRKVLSMPQVNIVKKTEVQTGGFSKESILPKRNSDKLIARKKDWDPKKYGGFDSPTVAYSVLVVAKVEKGKSKKLKSVKELLGITIMERSSFEKNPIDFLEAKGYKEVKKDLIIKLPKYSLFELENGRKRMLASAGELQKGNELALPSKYVNFLYLASHYEKLKGSPEDNEQKQLFVEQHKHYLDEIIEQISEFSKRVILADANLDKVLSAYNKHRDKPIREQAENIIHLFTLTNLGAPAAFKYFDTTIDRKRYTSTKEVLDATLIHQSITGLYETRIDLSQLGGDAEAAAKEAAAKEAAAKEAAAKALEAEAAAKEAAAKEAAAKEAAAKATLNIEDEHRLHETSKEPDVSLGSTWLSDFPQAWAETGGMGLAVRQAPLIIPLKATSTPVSIKQYPMSQEARLGIKPHIQRLLDQGILVPCQSPWNTPLLPVKKPGTNDYRPVQDLREVNKRVEDIHPTVPNPYNLLSGLPPSHQWYTVLDLKDAFFCLRLHPTSQPLFAFEWRDPEMGISGQLTWTRLPQGFKNSPTLFNEALHRDLADFRIQHPDLILLQYVDDLLLAATSELDCQQGTRALLQTLGNLGYRASAKKAQICQKQVKYLGYLLKEGQRWLTEARKETVMGQPTPKTPRQLREFLGKAGFCRLFIPGFAEMAAPLYPLTKPGTLFNWGPDQQKAYQEIKQALLTAPALGLPDLTKPFELFVDEKQGYAKGVLTQKLGPWRRPVAYLSKKLDPVAAGWPPCLRMVAAIAVLTKDAGKLTMGQPLVILAPHAVEALVKQPPDRWLSNARMTHYQALLLDTDRVQFGPVVALNPATLLPLPEEGLQHNCLDILAEAHGTRPDLTDQPLPDADHTWYTDGSSLLQEGQRKAGAAVTTETEVIWAKALPAGTSAQRAELIALTQALKMAEGKKLNVYTDSRYAFATAHIHGEIYRRRGWLTSEGKEIKNKDEILALLKALFLPKRLSIIHCPGHQKGHSAEARGNRMADQAARKAAITETPDTSTLLGSSGSSGSSGSSGSSGSSMASNFTQFVLVDNGGTGDVTVAPSNFANGIAEWISSNSRSQAYKVTCSVRQSSAQNRKYTIKVEVPKGAWRSYLNMELTIPIFATNSDCELIVKAMQGLLKDGNPIPSAIAANSGIYKRTADGSEFESPKKKAKVE

SEQ ID NO: 16219 - protein, 2373 aa, synthetic construct
MPAAKRVKLDGGDKKYSIGLDIGTNSVGWAVITDEYKVPSKKFKVLGNTDRHSIKKNLIGALLFDSGETAEATRLKRTARRRYTRRKNRICYLQEIFSNEMAKVDDSFFHRLEESFLVEEDKKHERHPIFGNIVDEVAYHEKYPTIYHLRKKLVDSTDKADLRLIYLALAHMIKFRGHFLIEGDLNPDNSDVDKLFIQLVQTYNQLFEENPINASGVDAKAILSARLSKSRRLENLIAQLPGEKKNGLFGNLIALSLGLTPNFKSNFDLAEDAKLQLSKDTYDDDLDNLLAQIGDQYADLFLAAKNLSDAILLSDILRVNTEITKAPLSASMIKRYDEHHQDLTLLKALVRQQLPEKYKEIFFDQSKNGYAGYIDGGASQEEFYKFIKPILEKMDGTEELLVKLNREDLLRKQRTFDNGSIPHQIHLGELHAILRRQEDFYPFLKDNREKIEKILTFRIPYYVGPLARGNSRFAWMTRKSEETITPWNFEEVVDKGASAQSFIERMTNFDKNLPNEKVLPKHSLLYEYFTVYNELTKVKYVTEGMRKPAFLSGEQKKAIVDLLFKTNRKVTVKQLKEDYFKKIECFDSVEISGVEDRFNASLGTYHDLLKIIKDKDFLDNEENEDILEDIVLTLTLFEDREMIEERLKTYAHLFDDKVMKQLKRRRYTGWGRLSRKLINGIRDKQSGKTILDFLKSDGFANRNFMQLIHDDSLTFKEDIQKAQVSGQGDSLHEHIANLAGSPAIKKGILQTVKVVDELVKVMGRHKPENIVIEMARENQTTQKGQKNSRERMKRIEEGIKELGSQILKEHPVENTQLQNEKLYLYYLQNGRDMYVDQELDINRLSDYDVDHIVPQSFLKDDSIDNKVLTRSDKARGKSDNVPSEEVVKKMKNYWRQLLNAKLITQRKFDNLTKAERGGLSELDKAGFIKRQLVETRQITKHVAQILDSRMNTKYDENDKLIREVKVITLKSKLVSDFRKDFQFYKVREINNYHHAHDAYLNAVVGTALIKKYPKLESEFVYGDYKVYDVRKMIAKSEQEIGKATAKYFFYSNIMNFFKTEITLANGEIRKRPLIETNGETGEIVWDKGRDFATVRKVLSMPQVNIVKKTEVQTGGFSKESILPKRNSDKLIARKKDWDPKKYGGFDSPTVAYSVLVVAKVEKGKSKKLKSVKELLGITIMERSSFEKNPIDFLEAKGYKEVKKDLIIKLPKYSLFELENGRKRMLASAGELQKGNELALPSKYVNFLYLASHYEKLKGSPEDNEQKQLFVEQHKHYLDEIIEQISEFSKRVILADANLDKVLSAYNKHRDKPIREQAENIIHLFTLTNLGAPAAFKYFDTTIDRKRYTSTKEVLDATLIHQSITGLYETRIDLSQLGGDAEAAAKEAAAKEAAAKEAAAKALEAEAAAKEAAAKEAAAKEAAAKATLNIEDEHRLHETSKEPDVSLGSTWLSDFPQAWAETGGMGLAVRQAPLIIPLKATSTPVSIKQYPMSQEARLGIKPHIQRLLDQGILVPCQSPWNTPLLPVKKPGTNDYRPVQDLREVNKRVEDIHPTVPNPYNLLSGLPPSHQWYTVLDLKDAFFCLRLHPTSQPLFAFEWRDPEMGISGQLTWTRLPQGFKNSPTLFNEALHRDLADFRIQHPDLILLQYVDDLLLAATSELDCQQGTRALLQTLGNLGYRASAKKAQICQKQVKYLGYLLKEGQRWLTEARKETVMGQPTPKTPRQLREFLGKAGFCRLFIPGFAEMAAPLYPLTKPGTLFNWGPDQQKAYQEIKQALLTAPALGLPDLTKPFELFVDEKQGYAKGVLTQKLGPWRRPVAYLSKKLDPVAAGWPPCLRMVAAIAVLTKDAGKLTMGQPLVILAPHAVEALVKQPPDRWLSNARMTHYQALLLDTDRVQFGPVVALNPATLLPLPEEGLQHNCLDILAEAHGTRPDLTDQPLPDADHTWYTDGSSLLQEGQRKAGAAVTTETEVIWAKALPAGTSAQRAELIALTQALKMAEGKKLNVYTDSRYAFATAHIHGEIYRRRGWLTSEGKEIKNKDEILALLKALFLPKRLSIIHCPGHQKGHSAEARGNRMADQAARKAAITETPDTSTLLGSSGSSGSSGSSGSSGSSMASNFTQFVLVDNGGTGDVTVAPSNFANGIAEWISSNSRSQAYKVTCSVRQSSAQNRKYTIKVEVPKGAWRSYLNMELTIPIFATNSDCELIVKAMQGLLKDGNPIPSAIAANSGIYGGSGGSMASNFTQFVLVDNGGTGDVTVAPSNFANGIAEWISSNSRSQAYKVTCSVRQSSAQNRKYTIKVEVPKGAWRSYLNMELTIPIFATNSDCELIVKAMQGLLKDGNPIPSAIAANSGIYKRTADGSEFESPKKKAKVE

SEQ ID NO: 16220 - protein, 2629 aa, synthetic construct
MPAAKRVKLDGGDKKYSIGLDIGTNSVGWAVITDEYKVPSKKFKVLGNTDRHSIKKNLIGALLFDSGETAEATRLKRTARRRYTRRKNRICYLQEIFSNEMAKVDDSFFHRLEESFLVEEDKKHERHPIFGNIVDEVAYHEKYPTIYHLRKKLVDSTDKADLRLIYLALAHMIKFRGHFLIEGDLNPDNSDVDKLFIQLVQTYNQLFEENPINASGVDAKAILSARLSKSRRLENLIAQLPGEKKNGLFGNLIALSLGLTPNFKSNFDLAEDAKLQLSKDTYDDDLDNLLAQIGDQYADLFLAAKNLSDAILLSDILRVNTEITKAPLSASMIKRYDEHHQDLTLLKALVRQQLPEKYKEIFFDQSKNGYAGYIDGGASQEEFYKFIKPILEKMDGTEELLVKLNREDLLRKQRTFDNGSIPHQIHLGELHAILRRQEDFYPFLKDNREKIEKILTFRIPYYVGPLARGNSRFAWMTRKSEETITPWNFEEVVDKGASAQSFIERMTNFDKNLPNEKVLPKHSLLYEYFTVYNELTKVKYVTEGMRKPAFLSGEQKKAIVDLLFKTNRKVTVKQLKEDYFKKIECFDSVEISGVEDRFNASLGTYHDLLKIIKDKDFLDNEENEDILEDIVLTLTLFEDREMIEERLKTYAHLFDDKVMKQLKRRRYTGWGRLSRKLINGIRDKQSGKTILDFLKSDGFANRNFMQLIHDDSLTFKEDIQKAQVSGQGDSLHEHIANLAGSPAIKKGILQTVKVVDELVKVMGRHKPENIVIEMARENQTTQKGQKNSRERMKRIEEGIKELGSQILKEHPVENTQLQNEKLYLYYLQNGRDMYVDQELDINRLSDYDVDHIVPQSFLKDDSIDNKVLTRSDKARGKSDNVPSEEVVKKMKNYWRQLLNAKLITQRKFDNLTKAERGGLSELDKAGFIKRQLVETRQITKHVAQILDSRMNTKYDENDKLIREVKVITLKSKLVSDFRKDFQFYKVREINNYHHAHDAYLNAVVGTALIKKYPKLESEFVYGDYKVYDVRKMIAKSEQEIGKATAKYFFYSNIMNFFKTEITLANGEIRKRPLIETNGETGEIVWDKGRDFATVRKVLSMPQVNIVKKTEVQTGGFSKESILPKRNSDKLIARKKDWDPKKYGGFDSPTVAYSVLVVAKVEKGKSKKLKSVKELLGITIMERSSFEKNPIDFLEAKGYKEVKKDLIIKLPKYSLFELENGRKRMLASAGELQKGNELALPSKYVNFLYLASHYEKLKGSPEDNEQKQLFVEQHKHYLDEIIEQISEFSKRVILADANLDKVLSAYNKHRDKPIREQAENIIHLFTLTNLGAPAAFKYFDTTIDRKRYTSTKEVLDATLIHQSITGLYETRIDLSQLGGDAEAAAKEAAAKEAAAKEAAAKALEAEAAAKEAAAKEAAAKEAAAKATLNIEDEHRLHETSKEPDVSLGSTWLSDFPQAWAETGGMGLAVRQAPLIIPLKATSTPVSIKQYPMSQEARLGIKPHIQRLLDQGILVPCQSPWNTPLLPVKKPGTNDYRPVQDLREVNKRVEDIHPTVPNPYNLLSGLPPSHQWYTVLDLKDAFFCLRLHPTSQPLFAFEWRDPEMGISGQLTWTRLPQGFKNSPTLFNEALHRDLADFRIQHPDLILLQYVDDLLLAATSELDCQQGTRALLQTLGNLGYRASAKKAQICQKQVKYLGYLLKEGQRWLTEARKETVMGQPTPKTPRQLREFLGKAGFCRLFIPGFAEMAAPLYPLTKPGTLFNWGPDQQKAYQEIKQALLTAPALGLPDLTKPFELFVDEKQGYAKGVLTQKLGPWRRPVAYLSKKLDPVAAGWPPCLRMVAAIAVLTKDAGKLTMGQPLVILAPHAVEALVKQPPDRWLSNARMTHYQALLLDTDRVQFGPVVALNPATLLPLPEEGLQHNCLDILAEAHGTRPDLTDQPLPDADHTWYTDGSSLLQEGQRKAGAAVTTETEVIWAKALPAGTSAQRAELIALTQALKMAEGKKLNVYTDSRYAFATAHIHGEIYRRRGWLTSEGKEIKNKDEILALLKALFLPKRLSIIHCPGHQKGHSAEARGNRMADQAARKAAITETPDTSTLLGSSGSSGSSGSSGSSGSSMASNFTQFVLVDNGGTGDVTVAPSNFANGIAEWISSNSRSQAYKVTCSVRQSSAQNRKYTIKVEVPKGAWRSYLNMELTIPIFATNSDCELIVKAMQGLLKDGNPIPSAIAANSGIYGGSGGSMASNFTQFVLVDNGGTGDVTVAPSNFANGIAEWISSNSRSQAYKVTCSVRQSSAQNRKYTIKVEVPKGAWRSYLNMELTIPIFATNSDCELIVKAMQGLLKDGNPIPSAIAANSGIYGGGSGGGSGGGSGGGSMASNFTQFVLVDNGGTGDVTVAPSNFANGIAEWISSNSRSQAYKVTCSVRQSSAQNRKYTIKVEVPKGAWRSYLNMELTIPIFATNSDCELIVKAMQGLLKDGNPIPSAIAANSGIYGGSGGSMASNFTQFVLVDNGGTGDVTVAPSNFANGIAEWISSNSRSQAYKVTCSVRQSSAQNRKYTIKVEVPKGAWRSYLNMELTIPIFATNSDCELIVKAMQGLLKDGNPIPSAIAANSGIYKRTADGSEFESPKKKAKVE

SEQ ID NO: 16221 - protein, 2243 aa, synthetic construct
MPAAKRVKLDGGDKKYSIGLDIGTNSVGWAVITDEYKVPSKKFKVLGNTDRHSIKKNLIGALLFDSGETAEATRLKRTARRRYTRRKNRICYLQEIFSNEMAKVDDSFFHRLEESFLVEEDKKHERHPIFGNIVDEVAYHEKYPTIYHLRKKLVDSTDKADLRLIYLALAHMIKFRGHFLIEGDLNPDNSDVDKLFIQLVQTYNQLFEENPINASGVDAKAILSARLSKSRRLENLIAQLPGEKKNGLFGNLIALSLGLTPNFKSNFDLAEDAKLQLSKDTYDDDLDNLLAQIGDQYADLFLAAKNLSDAILLSDILRVNTEITKAPLSASMIKRYDEHHQDLTLLKALVRQQLPEKYKEIFFDQSKNGYAGYIDGGASQEEFYKFIKPILEKMDGTEELLVKLNREDLLRKQRTFDNGSIPHQIHLGELHAILRRQEDFYPFLKDNREKIEKILTFRIPYYVGPLARGNSRFAWMTRKSEETITPWNFEEVVDKGASAQSFIERMTNFDKNLPNEKVLPKHSLLYEYFTVYNELTKVKYVTEGMRKPAFLSGEQKKAIVDLLFKTNRKVTVKQLKEDYFKKIECFDSVEISGVEDRFNASLGTYHDLLKIIKDKDFLDNEENEDILEDIVLTLTLFEDREMIEERLKTYAHLFDDKVMKQLKRRRYTGWGRLSRKLINGIRDKQSGKTILDFLKSDGFANRNFMQLIHDDSLTFKEDIQKAQVSGQGDSLHEHIANLAGSPAIKKGILQTVKVVDELVKVMGRHKPENIVIEMARENQTTQKGQKNSRERMKRIEEGIKELGSQILKEHPVENTQLQNEKLYLYYLQNGRDMYVDQELDINRLSDYDVDHIVPQSFLKDDSIDNKVLTRSDKARGKSDNVPSEEVVKKMKNYWRQLLNAKLITQRKFDNLTKAERGGLSELDKAGFIKRQLVETRQITKHVAQILDSRMNTKYDENDKLIREVKVITLKSKLVSDFRKDFQFYKVREINNYHHAHDAYLNAVVGTALIKKYPKLESEFVYGDYKVYDVRKMIAKSEQEIGKATAKYFFYSNIMNFFKTEITLANGEIRKRPLIETNGETGEIVWDKGRDFATVRKVLSMPQVNIVKKTEVQTGGFSKESILPKRNSDKLIARKKDWDPKKYGGFDSPTVAYSVLVVAKVEKGKSKKLKSVKELLGITIMERSSFEKNPIDFLEAKGYKEVKKDLIIKLPKYSLFELENGRKRMLASAGELQKGNELALPSKYVNFLYLASHYEKLKGSPEDNEQKQLFVEQHKHYLDEIIEQISEFSKRVILADANLDKVLSAYNKHRDKPIREQAENIIHLFTLTNLGAPAAFKYFDTTIDRKRYTSTKEVLDATLIHQSITGLYETRIDLSQLGGDAEAAAKEAAAKEAAAKEAAAKALEAEAAAKEAAAKEAAAKEAAAKATLNIEDEHRLHETSKEPDVSLGSTWLSDFPQAWAETGGMGLAVRQAPLIIPLKATSTPVSIKQYPMSQEARLGIKPHIQRLLDQGILVPCQSPWNTPLLPVKKPGTNDYRPVQDLREVNKRVEDIHPTVPNPYNLLSGLPPSHQWYTVLDLKDAFFCLRLHPTSQPLFAFEWRDPEMGISGQLTWTRLPQGFKNSPTLFNEALHRDLADFRIQHPDLILLQYVDDLLLAATSELDCQQGTRALLQTLGNLGYRASAKKAQICQKQVKYLGYLLKEGQRWLTEARKETVMGQPTPKTPRQLREFLGKAGFCRLFIPGFAEMAAPLYPLTKPGTLFNWGPDQQKAYQEIKQALLTAPALGLPDLTKPFELFVDEKQGYAKGVLTQKLGPWRRPVAYLSKKLDPVAAGWPPCLRMVAAIAVLTKDAGKLTMGQPLVILAPHAVEALVKQPPDRWLSNARMTHYQALLLDTDRVQFGPVVALNPATLLPLPEEGLQHNCLDILAEAHGTRPDLTDQPLPDADHTWYTDGSSLLQEGQRKAGAAVTTETEVIWAKALPAGTSAQRAELIALTQALKMAEGKKLNVYTDSRYAFATAHIHGEIYRRRGWLTSEGKEIKNKDEILALLKALFLPKRLSIIHCPGHQKGHSAEARGNRMADQAARKAAITETPDTSTLLGSSGGGEAAAKMASNFTQFVLVDNGGTGDVTVAPSNFANGIAEWISSNSRSQAYKVTCSVRQSSAQNRKYTIKVEVPKGAWRSYLNMELTIPIFATNSDCELIVKAMQGLLKDGNPIPSAIAANSGIYKRTADGSEFESPKKKAKVE

SEQ ID NO: 16222 - protein, 2366 aa, synthetic construct
MPAAKRVKLDGGDKKYSIGLDIGTNSVGWAVITDEYKVPSKKFKVLGNTDRHSIKKNLIGALLFDSGETAEATRLKRTARRRYTRRKNRICYLQEIFSNEMAKVDDSFFHRLEESFLVEEDKKHERHPIFGNIVDEVAYHEKYPTIYHLRKKLVDSTDKADLRLIYLALAHMIKFRGHFLIEGDLNPDNSDVDKLFIQLVQTYNQLFEENPINASGVDAKAILSARLSKSRRLENLIAQLPGEKKNGLFGNLIALSLGLTPNFKSNFDLAEDAKLQLSKDTYDDDLDNLLAQIGDQYADLFLAAKNLSDAILLSDILRVNTEITKAPLSASMIKRYDEHHQDLTLLKALVRQQLPEKYKEIFFDQSKNGYAGYIDGGASQEEFYKFIKPILEKMDGTEELLVKLNREDLLRKQRTFDNGSIPHQIHLGELHAILRRQEDFYPFLKDNREKIEKILTFRIPYYVGPLARGNSRFAWMTRKSEETITPWNFEEVVDKGASAQSFIERMTNFDKNLPNEKVLPKHSLLYEYFTVYNELTKVKYVTEGMRKPAFLSGEQKKAIVDLLFKTNRKVTVKQLKEDYFKKIECFDSVEISGVEDRFNASLGTYHDLLKIIKDKDFLDNEENEDILEDIVLTLTLFEDREMIEERLKTYAHLFDDKVMKQLKRRRYTGWGRLSRKLINGIRDKQSGKTILDFLKSDGFANRNFMQLIHDDSLTFKEDIQKAQVSGQGDSLHEHIANLAGSPAIKKGILQTVKVVDELVKVMGRHKPENIVIEMARENQTTQKGQKNSRERMKRIEEGIKELGSQILKEHPVENTQLQNEKLYLYYLQNGRDMYVDQELDINRLSDYDVDHIVPQSFLKDDSIDNKVLTRSDKARGKSDNVPSEEVVKKMKNYWRQLLNAKLITQRKFDNLTKAERGGLSELDKAGFIKRQLVETRQITKHVAQILDSRMNTKYDENDKLIREVKVITLKSKLVSDFRKDFQFYKVREINNYHHAHDAYLNAVVGTALIKKYPKLESEFVYGDYKVYDVRKMIAKSEQEIGKATAKYFFYSNIMNFFKTEITLANGEIRKRPLIETNGETGEIVWDKGRDFATVRKVLSMPQVNIVKKTEVQTGGFSKESILPKRNSDKLIARKKDWDPKKYGGFDSPTVAYSVLVVAKVEKGKSKKLKSVKELLGITIMERSSFEKNPIDFLEAKGYKEVKKDLIIKLPKYSLFELENGRKRMLASAGELQKGNELALPSKYVNFLYLASHYEKLKGSPEDNEQKQLFVEQHKHYLDEIIEQISEFSKRVILADANLDKVLSAYNKHRDKPIREQAENIIHLFTLTNLGAPAAFKYFDTTIDRKRYTSTKEVLDATLIHQSITGLYETRIDLSQLGGDAEAAAKEAAAKEAAAKEAAAKALEAEAAAKEAAAKEAAAKEAAAKATLNIEDEHRLHETSKEPDVSLGSTWLSDFPQAWAETGGMGLAVRQAPLIIPLKATSTPVSIKQYPMSQEARLGIKPHIQRLLDQGILVPCQSPWNTPLLPVKKPGTNDYRPVQDLREVNKRVEDIHPTVPNPYNLLSGLPPSHQWYTVLDLKDAFFCLRLHPTSQPLFAFEWRDPEMGISGQLTWTRLPQGFKNSPTLFNEALHRDLADFRIQHPDLILLQYVDDLLLAATSELDCQQGTRALLQTLGNLGYRASAKKAQICQKQVKYLGYLLKEGQRWLTEARKETVMGQPTPKTPRQLREFLGKAGFCRLFIPGFAEMAAPLYPLTKPGTLFNWGPDQQKAYQEIKQALLTAPALGLPDLTKPFELFVDEKQGYAKGVLTQKLGPWRRPVAYLSKKLDPVAAGWPPCLRMVAAIAVLTKDAGKLTMGQPLVILAPHAVEALVKQPPDRWLSNARMTHYQALLLDTDRVQFGPVVALNPATLLPLPEEGLQHNCLDILAEAHGTRPDLTDQPLPDADHTWYTDGSSLLQEGQRKAGAAVTTETEVIWAKALPAGTSAQRAELIALTQALKMAEGKKLNVYTDSRYAFATAHIHGEIYRRRGWLTSEGKEIKNKDEILALLKALFLPKRLSIIHCPGHQKGHSAEARGNRMADQAARKAAITETPDTSTLLGSSGGGEAAAKMASNFTQFVLVDNGGTGDVTVAPSNFANGIAEWISSNSRSQAYKVTCSVRQSSAQNRKYTIKVEVPKGAWRSYLNMELTIPIFATNSDCELIVKAMQGLLKDGNPIPSAIAANSGIYGGSGGSMASNFTQFVLVDNGGTGDVTVAPSNFANGIAEWISSNSRSQAYKVTCSVRQSSAQNRKYTIKVEVPKGAWRSYLNMELTIPIFATNSDCELIVKAMQGLLKDGNPIPSAIAANSGIYKRTADGSEFESPKKKAKVE

SEQ ID NO: 16223 - protein, 2622 aa, synthetic construct
MPAAKRVKLDGGDKKYSIGLDIGTNSVGWAVITDEYKVPSKKFKVLGNTDRHSIKKNLIGALLFDSGETAEATRLKRTARRRYTRRKNRICYLQEIFSNEMAKVDDSFFHRLEESFLVEEDKKHERHPIFGNIVDEVAYHEKYPTIYHLRKKLVDSTDKADLRLIYLALAHMIKFRGHFLIEGDLNPDNSDVDKLFIQLVQTYNQLFEENPINASGVDAKAILSARLSKSRRLENLIAQLPGEKKNGLFGNLIALSLGLTPNFKSNFDLAEDAKLQLSKDTYDDDLDNLLAQIGDQYADLFLAAKNLSDAILLSDILRVNTEITKAPLSASMIKRYDEHHQDLTLLKALVRQQLPEKYKEIFFDQSKNGYAGYIDGGASQEEFYKFIKPILEKMDGTEELLVKLNREDLLRKQRTFDNGSIPHQIHLGELHAILRRQEDFYPFLKDNREKIEKILTFRIPYYVGPLARGNSRFAWMTRKSEETITPWNFEEVVDKGASAQSFIERMTNFDKNLPNEKVLPKHSLLYEYFTVYNELTKVKYVTEGMRKPAFLSGEQKKAIVDLLFKTNRKVTVKQLKEDYFKKIECFDSVEISGVEDRFNASLGTYHDLLKIIKDKDFLDNEENEDILEDIVLTLTLFEDREMIEERLKTYAHLFDDKVMKQLKRRRYTGWGRLSRKLINGIRDKQSGKTILDFLKSDGFANRNFMQLIHDDSLTFKEDIQKAQVSGQGDSLHEHIANLAGSPAIKKGILQTVKVVDELVKVMGRHKPENIVIEMARENQTTQKGQKNSRERMKRIEEGIKELGSQILKEHPVENTQLQNEKLYLYYLQNGRDMYVDQELDINRLSDYDVDHIVPQSFLKDDSIDNKVLTRSDKARGKSDNVPSEEVVKKMKNYWRQLLNAKLITQRKFDNLTKAERGGLSELDKAGFIKRQLVETRQITKHVAQILDSRMNTKYDENDKLIREVKVITLKSKLVSDFRKDFQFYKVREINNYHHAHDAYLNAVVGTALIKKYPKLESEFVYGDYKVYDVRKMIAKSEQEIGKATAKYFFYSNIMNFFKTEITLANGEIRKRPLIETNGETGEIVWDKGRDFATVRKVLSMPQVNIVKKTEVQTGGFSKESILPKRNSDKLIARKKDWDPKKYGGFDSPTVAYSVLVVAKVEKGKSKKLKSVKELLGITIMERSSFEKNPIDFLEAKGYKEVKKDLIIKLPKYSLFELENGRKRMLASAGELQKGNELALPSKYVNFLYLASHYEKLKGSPEDNEQKQLFVEQHKHYLDEIIEQISEFSKRVILADANLDKVLSAYNKHRDKPIREQAENIIHLFTLTNLGAPAAFKYFDTTIDRKRYTSTKEVLDATLIHQSITGLYETRIDLSQLGGDAEAAAKEAAAKEAAAKEAAAKALEAEAAAKEAAAKEAAAKEAAAKATLNIEDEHRLHETSKEPDVSLGSTWLSDFPQAWAETGGMGLAVRQAPLIIPLKATSTPVSIKQYPMSQEARLGIKPHIQRLLDQGILVPCQSPWNTPLLPVKKPGTNDYRPVQDLREVNKRVEDIHPTVPNPYNLLSGLPPSHQWYTVLDLKDAFFCLRLHPTSQPLFAFEWRDPEMGISGQLTWTRLPQGFKNSPTLFNEALHRDLADFRIQHPDLILLQYVDDLLLAATSELDCQQGTRALLQTLGNLGYRASAKKAQICQKQVKYLGYLLKEGQRWLTEARKETVMGQPTPKTPRQLREFLGKAGFCRLFIPGFAEMAAPLYPLTKPGTLFNWGPDQQKAYQEIKQALLTAPALGLPDLTKPFELFVDEKQGYAKGVLTQKLGPWRRPVAYLSKKLDPVAAGWPPCLRMVAAIAVLTKDAGKLTMGQPLVILAPHAVEALVKQPPDRWLSNARMTHYQALLLDTDRVQFGPVVALNPATLLPLPEEGLQHNCLDILAEAHGTRPDLTDQPLPDADHTWYTDGSSLLQEGQRKAGAAVTTETEVIWAKALPAGTSAQRAELIALTQALKMAEGKKLNVYTDSRYAFATAHIHGEIYRRRGWLTSEGKEIKNKDEILALLKALFLPKRLSIIHCPGHQKGHSAEARGNRMADQAARKAAITETPDTSTLLGSSGGGEAAAKMASNFTQFVLVDNGGTGDVTVAPSNFANGIAEWISSNSRSQAYKVTCSVRQSSAQNRKYTIKVEVPKGAWRSYLNMELTIPIFATNSDCELIVKAMQGLLKDGNPIPSAIAANSGIYGGSGGSMASNFTQFVLVDNGGTGDVTVAPSNFANGIAEWISSNSRSQAYKVTCSVRQSSAQNRKYTIKVEVPKGAWRSYLNMELTIPIFATNSDCELIVKAMQGLLKDGNPIPSAIAANSGIYGGGSGGGSGGGSGGGSMASNFTQFVLVDNGGTGDVTVAPSNFANGIAEWISSNSRSQAYKVTCSVRQSSAQNRKYTIKVEVPKGAWRSYLNMELTIPIFATNSDCELIVKAMQGLLKDGNPIPSAIAANSGIYGGSGGSMASNFTQFVLVDNGGTGDVTVAPSNFANGIAEWISSNSRSQAYKVTCSVRQSSAQNRKYTIKVEVPKGAWRSYLNMELTIPIFATNSDCELIVKAMQGLLKDGNPIPSAIAANSGIYKRTADGSEFESPKKKAKVE

SEQ ID NO: 16224-16300 - skipped (77 entries)

SEQ ID NO: 16301 - DNA, 56 bp, synthetic construct
  source 1..56: mol_type = other DNA
gaccaccctgacgtacggcgtgcagacatacaagcacatgaggatcacccatgtgc

SEQ ID NO: 16302 - DNA, 114 bp, synthetic construct
  source 1..114: mol_type = other DNA
gaccaccctgacgtacggcgtgcagacatacaagcacatgaggatcacccatgtgctctctctcgggtcaggagcccccccctgaacccaggataaccctcaaagtcggggggc

SEQ ID NO: 16303 - DNA, 89 bp, synthetic construct
  source 1..89: mol_type = other DNA
gaccaccctgacgtacggcgtgcagacatacaagggagcacatgaggatcacccatgtgcgactcccacagtcactggggagtcttccc

SEQ ID NO: 16304 - DNA, 147 bp, synthetic construct
  source 1..147: mol_type = other DNA
gaccaccctgacgtacggcgtgcagacatacaagggagcacatgaggatcacccatgtgcgactcccacagtcactggggagtcttccctctctctcgggtcaggagcccccccctgaacccaggataaccctcaaagtcggggggc

SEQ ID NO: 16305 - DNA, 165 bp, synthetic construct
  source 1..165: mol_type = other DNA
gaccaccctgacgtacggcgtgcagacatacaagggagcacatgaggatcacccatgtgcgactcccacagtcactggggagtcttccctctctctctctctctctctcgggagcacatgaggatcacccatgtgcgactcccacagtcactggggagtcttccc

SEQ ID NO: 16306 - DNA, 223 bp, synthetic construct
  source 1..223: mol_type = other DNA
gaccaccctgacgtacggcgtgcagacatacaagggagcacatgaggatcacccatgtgcgactcccacagtcactggggagtcttccctctctctctctctctctctcgggagcacatgaggatcacccatgtgcgactcccacagtcactggggagtcttccctctctctcgggtcaggagcccccccctgaacccaggataaccctcaaagtcggggggc

SEQ ID NO: 16307 - DNA, 64 bp, synthetic construct
  source 1..64: mol_type = other DNA
gaccaccctgacgtacggcgtgcagacatacaactaacatagcacatgaggatcacccatgtgc

SEQ ID NO: 16308 - DNA, 122 bp, synthetic construct
  source 1..122: mol_type = other DNA
gaccaccctgacgtacggcgtgcagacatacaactaacatagcacatgaggatcacccatgtgctctctctcgggtcaggagcccccccctgaacccaggataaccctcaaagtcggggggc

SEQ ID NO: 16309 - DNA, 97 bp, synthetic construct
  source 1..97: mol_type = other DNA
gaccaccctgacgtacggcgtgcagacatacaactaacatagggagcacatgaggatcacccatgtgcgactcccacagtcactggggagtcttccc

SEQ ID NO: 16310 - DNA, 155 bp, synthetic construct
  source 1..155: mol_type = other DNA
gaccaccctgacgtacggcgtgcagacatacaactaacatagggagcacatgaggatcacccatgtgcgactcccacagtcactggggagtcttccctctctctcgggtcaggagcccccccctgaacccaggataaccctcaaagtcggggggc

SEQ ID NO: 16311 - DNA, 173 bp, synthetic construct
  source 1..173: mol_type = other DNA
gaccaccctgacgtacggcgtgcagacatacaactaacatagggagcacatgaggatcacccatgtgcgactcccacagtcactggggagtcttccctctctctctctctctctctcgggagcacatgaggatcacccatgtgcgactcccacagtcactggggagtcttccc

SEQ ID NO: 16312 - DNA, 231 bp, synthetic construct
  source 1..231: mol_type = other DNA
gaccaccctgacgtacggcgtgcagacatacaactaacatagggagcacatgaggatcacccatgtgcgactcccacagtcactggggagtcttccctctctctctctctctctctcgggagcacatgaggatcacccatgtgcgactcccacagtcactggggagtcttccctctctctcgggtcaggagcccccccctgaacccaggataaccctcaaagtcggggggc

SEQ ID NO: 16313 - DNA, 61 bp, synthetic construct
  source 1..61: mol_type = other DNA
gaccaccctgacgtacggcgtgcagtgcttacatacaagcacatgaggatcacccatgtgc

SEQ ID NO: 16314 - DNA, 119 bp, synthetic construct
  source 1..119: mol_type = other DNA
gaccaccctgacgtacggcgtgcagtgcttacatacaagcacatgaggatcacccatgtgctctctctcgggtcaggagcccccccctgaacccaggataaccctcaaagtcggggggc

SEQ ID NO: 16315 - DNA, 94 bp, synthetic construct
  source 1..94: mol_type = other DNA
gaccaccctgacgtacggcgtgcagtgcttacatacaagggagcacatgaggatcacccatgtgcgactcccacagtcactggggagtcttccc

SEQ ID NO: 16316 - DNA, 152 bp, synthetic construct
  source 1..152: mol_type = other DNA
gaccaccctgacgtacggcgtgcagtgcttacatacaagggagcacatgaggatcacccatgtgcgactcccacagtcactggggagtcttccctctctctcgggtcaggagcccccccctgaacccaggataaccctcaaagtcggggggc

SEQ ID NO: 16317 - DNA, 170 bp, synthetic construct
  source 1..170: mol_type = other DNA
gaccaccctgacgtacggcgtgcagtgcttacatacaagggagcacatgaggatcacccatgtgcgactcccacagtcactggggagtcttccctctctctctctctctctctcgggagcacatgaggatcacccatgtgcgactcccacagtcactggggagtcttccc

SEQ ID NO: 16318 - DNA, 228 bp, synthetic construct
  source 1..228: mol_type = other DNA
gaccaccctgacgtacggcgtgcagtgcttacatacaagggagcacatgaggatcacccatgtgcgactcccacagtcactggggagtcttccctctctctctctctctctctcgggagcacatgaggatcacccatgtgcgactcccacagtcactggggagtcttccctctctctcgggtcaggagcccccccctgaacccaggataaccctcaaagtcggggggc

SEQ ID NO: 16319 - DNA, 69 bp, synthetic construct
  source 1..69: mol_type = other DNA
gaccaccctgacgtacggcgtgcagtgcttacatacaactaacatagcacatgaggatcacccatgtgc

SEQ ID NO: 16320 - DNA, 127 bp, synthetic construct
  source 1..127: mol_type = other DNA
gaccaccctgacgtacggcgtgcagtgcttacatacaactaacatagcacatgaggatcacccatgtgctctctctcgggtcaggagcccccccctgaacccaggataaccctcaaagtcggggggc

SEQ ID NO: 16321 - DNA, 102 bp, synthetic construct
  source 1..102: mol_type = other DNA
gaccaccctgacgtacggcgtgcagtgcttacatacaactaacatagggagcacatgaggatcacccatgtgcgactcccacagtcactggggagtcttccc

SEQ ID NO: 16322 - DNA, 160 bp, synthetic construct
  source 1..160: mol_type = other DNA
gaccaccctgacgtacggcgtgcagtgcttacatacaactaacatagggagcacatgaggatcacccatgtgcgactcccacagtcactggggagtcttccctctctctcgggtcaggagcccccccctgaacccaggataaccctcaaagtcggggggc

SEQ ID NO: 16323 - DNA, 178 bp, synthetic construct
  source 1..178: mol_type = other DNA
gaccaccctgacgtacggcgtgcagtgcttacatacaactaacatagggagcacatgaggatcacccatgtgcgactcccacagtcactggggagtcttccctctctctctctctctctctcgggagcacatgaggatcacccatgtgcgactcccacagtcactggggagtcttccc

SEQ ID NO: 16324 - DNA, 236 bp, synthetic construct
  source 1..236: mol_type = other DNA
gaccaccctgacgtacggcgtgcagtgcttacatacaactaacatagggagcacatgaggatcacccatgtgcgactcccacagtcactggggagtcttccctctctctctctctctctctcgggagcacatgaggatcacccatgtgcgactcccacagtcactggggagtcttccctctctctcgggtcaggagcccccccctgaacccaggataaccctcaaagtcggggggc

SEQ ID NO: 16325 - DNA, 65 bp, synthetic construct
  source 1..65: mol_type = other DNA
gaccaccctgacgtacggcgtgcagtgcttcggcacatacaagcacatgaggatcacccatgtgc

SEQ ID NO: 16326 - DNA, 123 bp, synthetic construct
  source 1..123: mol_type = other DNA
gaccaccctgacgtacggcgtgcagtgcttcggcacatacaagcacatgaggatcacccatgtgctctctctcgggtcaggagcccccccctgaacccaggataaccctcaaagtcggggggc

SEQ ID NO: 16327 - DNA, 98 bp, synthetic construct
  source 1..98: mol_type = other DNA
gaccaccctgacgtacggcgtgcagtgcttcggcacatacaagggagcacatgaggatcacccatgtgcgactcccacagtcactggggagtcttccc

SEQ ID NO: 16328 - DNA, 156 bp, synthetic construct
  source 1..156: mol_type = other DNA
gaccaccctgacgtacggcgtgcagtgcttcggcacatacaagggagcacatgaggatcacccatgtgcgactcccacagtcactggggagtcttccctctctctcgggtcaggagcccccccctgaacccaggataaccctcaaagtcggggggc

SEQ ID NO: 16329 - DNA, 174 bp, synthetic construct
  source 1..174: mol_type = other DNA
gaccaccctgacgtacggcgtgcagtgcttcggcacatacaagggagcacatgaggatcacccatgtgcgactcccacagtcactggggagtcttccctctctctctctctctctctcgggagcacatgaggatcacccatgtgcgactcccacagtcactggggagtcttccc

SEQ ID NO: 16330 - DNA, 232 bp, synthetic construct
  source 1..232: mol_type = other DNA
gaccaccctgacgtacggcgtgcagtgcttcggcacatacaagggagcacatgaggatcacccatgtgcgactcccacagtcactggggagtcttccctctctctctctctctctctcgggagcacatgaggatcacccatgtgcgactcccacagtcactggggagtcttccctctctctcgggtcaggagcccccccctgaacccaggataaccctcaaagtcggggggc

SEQ ID NO: 16331 - DNA, 73 bp, synthetic construct
  source 1..73: mol_type = other DNA
gaccaccctgacgtacggcgtgcagtgcttcggcacatacaactaacatagcacatgaggatcacccatgtgc

SEQ ID NO: 16332 - DNA, 131 bp, synthetic construct
  source 1..131: mol_type = other DNA
gaccaccctgacgtacggcgtgcagtgcttcggcacatacaactaacatagcacatgaggatcacccatgtgctctctctcgggtcaggagcccccccctgaacccaggataaccctcaaagtcggggggc

SEQ ID NO: 16333 - DNA, 106 bp, synthetic construct
  source 1..106: mol_type = other DNA
gaccaccctgacgtacggcgtgcagtgcttcggcacatacaactaacatagggagcacatgaggatcacccatgtgcgactcccacagtcactggggagtcttccc

SEQ ID NO: 16334 - DNA, 164 bp, synthetic construct
  source 1..164: mol_type = other DNA
gaccaccctgacgtacggcgtgcagtgcttcggcacatacaactaacatagggagcacatgaggatcacccatgtgcgactcccacagtcactggggagtcttccctctctctcgggtcaggagcccccccctgaacccaggataaccctcaaagtcggggggc

SEQ ID NO: 16335 - DNA, 182 bp, synthetic construct
  source 1..182: mol_type = other DNA
gaccaccctgacgtacggcgtgcagtgcttcggcacatacaactaacatagggagcacatgaggatcacccatgtgcgactcccacagtcactggggagtcttccctctctctctctctctctctcgggagcacatgaggatcacccatgtgcgactcccacagtcactggggagtcttccc

SEQ ID NO: 16336 - DNA, 240 bp, synthetic construct
  source 1..240: mol_type = other DNA
gaccaccctgacgtacggcgtgcagtgcttcggcacatacaactaacatagggagcacatgaggatcacccatgtgcgactcccacagtcactggggagtcttccctctctctctctctctctctcgggagcacatgaggatcacccatgtgcgactcccacagtcactggggagtcttccctctctctcgggtcaggagcccccccctgaacccaggataaccctcaaagtcggggggc

SEQ ID NO: 16337 - DNA, 61 bp, synthetic construct
  source 1..61: mol_type = other DNA
gaccaccctgacgtacggtcctgtgagcttacatacaagcacatgaggatcacccatgtgc

SEQ ID NO: 16338 - DNA, 119 bp, synthetic construct
  source 1..119: mol_type = other DNA
gaccaccctgacgtacggtcctgtgagcttacatacaagcacatgaggatcacccatgtgctctctctcgggtcaggagcccccccctgaacccaggataaccctcaaagtcggggggc

SEQ ID NO: 16339 - DNA, 94 bp, synthetic construct
  source 1..94: mol_type = other DNA
gaccaccctgacgtacggtcctgtgagcttacatacaagggagcacatgaggatcacccatgtgcgactcccacagtcactggggagtcttccc

SEQ ID NO: 16340 - DNA, 152 bp, synthetic construct
  source 1..152: mol_type = other DNA
gaccaccctgacgtacggtcctgtgagcttacatacaagggagcacatgaggatcacccatgtgcgactcccacagtcactggggagtcttccctctctctcgggtcaggagcccccccctgaacccaggataaccctcaaagtcggggggc

SEQ ID NO: 16341 - DNA, 170 bp, synthetic construct
  source 1..170: mol_type = other DNA
gaccaccctgacgtacggtcctgtgagcttacatacaagggagcacatgaggatcacccatgtgcgactcccacagtcactggggagtcttccctctctctctctctctctctcgggagcacatgaggatcacccatgtgcgactcccacagtcactggggagtcttccc

SEQ ID NO: 16342 - DNA, 228 bp, synthetic construct
  source 1..228: mol_type = other DNA
gaccaccctgacgtacggtcctgtgagcttacatacaagggagcacatgaggatcacccatgtgcgactcccacagtcactggggagtcttccctctctctctctctctctctcgggagcacatgaggatcacccatgtgcgactcccacagtcactggggagtcttccctctctctcgggtcaggagcccccccctgaacccaggataaccctcaaagtcggggggc

SEQ ID NO: 16343 - DNA, 69 bp, synthetic construct
  source 1..69: mol_type = other DNA
gaccaccctgacgtacggtcctgtgagcttacatacaactaacatagcacatgaggatcacccatgtgc

SEQ ID NO: 16344 - DNA, 127 bp, synthetic construct
  source 1..127: mol_type = other DNA
gaccaccctgacgtacggtcctgtgagcttacatacaactaacatagcacatgaggatcacccatgtgctctctctcgggtcaggagcccccccctgaacccaggataaccctcaaagtcggggggc

SEQ ID NO: 16345 - DNA, 102 bp, synthetic construct
  source 1..102: mol_type = other DNA
gaccaccctgacgtacggtcctgtgagcttacatacaactaacatagggagcacatgaggatcacccatgtgcgactcccacagtcactggggagtcttccc

SEQ ID NO: 16346 - DNA, 160 bp, synthetic construct
  source 1..160: mol_type = other DNA
gaccaccctgacgtacggtcctgtgagcttacatacaactaacatagggagcacatgaggatcacccatgtgcgactcccacagtcactggggagtcttccctctctctcgggtcaggagcccccccctgaacccaggataaccctcaaagtcggggggc

SEQ ID NO: 16347 - DNA, 178 bp, synthetic construct
  source 1..178: mol_type = other DNA
gaccaccctgacgtacggtcctgtgagcttacatacaactaacatagggagcacatgaggatcacccatgtgcgactcccacagtcactggggagtcttccctctctctctctctctctctcgggagcacatgaggatcacccatgtgcgactcccacagtcactggggagtcttccc

SEQ ID NO: 16348 - DNA, 236 bp, synthetic construct
  source 1..236: mol_type = other DNA
gaccaccctgacgtacggtcctgtgagcttacatacaactaacatagggagcacatgaggatcacccatgtgcgactcccacagtcactggggagtcttccctctctctctctctctctctcgggagcacatgaggatcacccatgtgcgactcccacagtcactggggagtcttccctctctctcgggtcaggagcccccccctgaacccaggataaccctcaaagtcggggggc

SEQ ID NO: 16349 - DNA, 107 bp, synthetic construct
  source 1..107: mol_type = other DNA
gaagttcatctgtaccaccggcaaactgcccgtgccttggcccaccctcgtcaccaccctgacgtacggcgtgcagacatacaagcacatgaggatcacccatgtgc

SEQ ID NO: 16350 - DNA, 165 bp, synthetic construct
  source 1..165: mol_type = other DNA
gaagttcatctgtaccaccggcaaactgcccgtgccttggcccaccctcgtcaccaccctgacgtacggcgtgcagacatacaagcacatgaggatcacccatgtgctctctctcgggtcaggagcccccccctgaacccaggataaccctcaaagtcggggggc

SEQ ID NO: 16351 - DNA, 140 bp, synthetic construct
  source 1..140: mol_type = other DNA
gaagttcatctgtaccaccggcaaactgcccgtgccttggcccaccctcgtcaccaccctgacgtacggcgtgcagacatacaagggagcacatgaggatcacccatgtgcgactcccacagtcactggggagtcttccc

SEQ ID NO: 16352 - DNA, 198 bp, synthetic construct
  source 1..198: mol_type = other DNA
gaagttcatctgtaccaccggcaaactgcccgtgccttggcccaccctcgtcaccaccctgacgtacggcgtgcagacatacaagggagcacatgaggatcacccatgtgcgactcccacagtcactggggagtcttccctctctctcgggtcaggagcccccccctgaacccaggataaccctcaaagtcggggggc

SEQ ID NO: 16353 - DNA, 216 bp, synthetic construct
  source 1..216: mol_type = other DNA
gaagttcatctgtaccaccggcaaactgcccgtgccttggcccaccctcgtcaccaccctgacgtacggcgtgcagacatacaagggagcacatgaggatcacccatgtgcgactcccacagtcactggggagtcttccctctctctctctctctctctcgggagcacatgaggatcacccatgtgcgactcccacagtcactggggagtcttccc

SEQ ID NO: 16354 - DNA, 274 bp, synthetic construct
  source 1..274: mol_type = other DNA
gaagttcatctgtaccaccggcaaactgcccgtgccttggcccaccctcgtcaccaccctgacgtacggcgtgcagacatacaagggagcacatgaggatcacccatgtgcgactcccacagtcactggggagtcttccctctctctctctctctctctcgggagcacatgaggatcacccatgtgcgactcccacagtcactggggagtcttccctctctctcgggtcaggagcccccccctgaacccaggataaccctcaaagtcggggggc

SEQ ID NO: 16355 - DNA, 115 bp, synthetic construct
  source 1..115: mol_type = other DNA
gaagttcatctgtaccaccggcaaactgcccgtgccttggcccaccctcgtcaccaccctgacgtacggcgtgcagacatacaactaacatagcacatgaggatcacccatgtgc

SEQ ID NO: 16356 - DNA, 173 bp, synthetic construct
  source 1..173: mol_type = other DNA
gaagttcatctgtaccaccggcaaactgcccgtgccttggcccaccctcgtcaccaccctgacgtacggcgtgcagacatacaactaacatagcacatgaggatcacccatgtgctctctctcgggtcaggagcccccccctgaacccaggataaccctcaaagtcggggggc

SEQ ID NO: 16357 - DNA, 148 bp, synthetic construct
  source 1..148: mol_type = other DNA
gaagttcatctgtaccaccggcaaactgcccgtgccttggcccaccctcgtcaccaccctgacgtacggcgtgcagacatacaactaacatagggagcacatgaggatcacccatgtgcgactcccacagtcactggggagtcttccc

SEQ ID NO: 16358 - DNA, 206 bp, synthetic construct
  source 1..206: mol_type = other DNA
gaagttcatctgtaccaccggcaaactgcccgtgccttggcccaccctcgtcaccaccctgacgtacggcgtgcagacatacaactaacatagggagcacatgaggatcacccatgtgcgactcccacagtcactggggagtcttccctctctctcgggtcaggagcccccccctgaacccaggataaccctcaaagtcggggggc

SEQ ID NO: 16359 - DNA, 224 bp, synthetic construct
  source 1..224: mol_type = other DNA
gaagttcatctgtaccaccggcaaactgcccgtgccttggcccaccctcgtcaccaccctgacgtacggcgtgcagacatacaactaacatagggagcacatgaggatcacccatgtgcgactcccacagtcactggggagtcttccctctctctctctctctctctcgggagcacatgaggatcacccatgtgcgactcccacagtcactggggagtcttccc

SEQ ID NO: 16360 - DNA, 282 bp, synthetic construct
  source 1..282: mol_type = other DNA
gaagttcatctgtaccaccggcaaactgcccgtgccttggcccaccctcgtcaccaccctgacgtacggcgtgcagacatacaactaacatagggagcacatgaggatcacccatgtgcgactcccacagtcactggggagtcttccctctctctctctctctctctcgggagcacatgaggatcacccatgtgcgactcccacagtcactggggagtcttccctctctctcgggtcaggagcccccccctgaacccaggataaccctcaaagtcggggggc

SEQ ID NO: 16361 - DNA, 112 bp, synthetic construct
  source 1..112: mol_type = other DNA
gaagttcatctgtaccaccggcaaactgcccgtgccttggcccaccctcgtcaccaccctgacgtacggcgtgcagtgcttacatacaagcacatgaggatcacccatgtgc

SEQ ID NO: 16362 - DNA, 170 bp, synthetic construct
  source 1..170: mol_type = other DNA
gaagttcatctgtaccaccggcaaactgcccgtgccttggcccaccctcgtcaccaccctgacgtacggcgtgcagtgcttacatacaagcacatgaggatcacccatgtgctctctctcgggtcaggagcccccccctgaacccaggataaccctcaaagtcggggggc

SEQ ID NO: 16363 - DNA, 145 bp, synthetic construct
  source 1..145: mol_type = other DNA
gaagttcatctgtaccaccggcaaactgcccgtgccttggcccaccctcgtcaccaccctgacgtacggcgtgcagtgcttacatacaagggagcacatgaggatcacccatgtgcgactcccacagtcactggggagtcttccc

SEQ ID NO: 16364 - DNA, 203 bp, synthetic construct
  source 1..203: mol_type = other DNA
gaagttcatctgtaccaccggcaaactgcccgtgccttggcccaccctcgtcaccaccctgacgtacggcgtgcagtgcttacatacaagggagcacatgaggatcacccatgtgcgactcccacagtcactggggagtcttccctctctctcgggtcaggagcccccccctgaacccaggataaccctcaaagtcggggggc

SEQ ID NO: 16365 - DNA, 221 bp, synthetic construct
  source 1..221: mol_type = other DNA
gaagttcatctgtaccaccggcaaactgcccgtgccttggcccaccctcgtcaccaccctgacgtacggcgtgcagtgcttacatacaagggagcacatgaggatcacccatgtgcgactcccacagtcactggggagtcttccctctctctctctctctctctcgggagcacatgaggatcacccatgtgcgactcccacagtcactggggagtcttccc

SEQ ID NO: 16366 - DNA, 279 bp, synthetic construct
  source 1..279: mol_type = other DNA
gaagttcatctgtaccaccggcaaactgcccgtgccttggcccaccctcgtcaccaccctgacgtacggcgtgcagtgcttacatacaagggagcacatgaggatcacccatgtgcgactcccacagtcactggggagtcttccctctctctctctctctctctcgggagcacatgaggatcacccatgtgcgactcccacagtcactggggagtcttccctctctctcgggtcaggagcccccccctgaacccaggataaccctcaaagtcggggggc

SEQ ID NO: 16367 - DNA, 120 bp, synthetic construct
  source 1..120: mol_type = other DNA
gaagttcatctgtaccaccggcaaactgcccgtgccttggcccaccctcgtcaccaccctgacgtacggcgtgcagtgcttacatacaactaacatagcacatgaggatcacccatgtgc

SEQ ID NO: 16368 - DNA, 178 bp, synthetic construct
  source 1..178: mol_type = other DNA
gaagttcatctgtaccaccggcaaactgcccgtgccttggcccaccctcgtcaccaccctgacgtacggcgtgcagtgcttacatacaactaacatagcacatgaggatcacccatgtgctctctctcgggtcaggagcccccccctgaacccaggataaccctcaaagtcggggggc

SEQ ID NO: 16369 - DNA, 153 bp, synthetic construct
  source 1..153: mol_type = other DNA
gaagttcatctgtaccaccggcaaactgcccgtgccttggcccaccctcgtcaccaccctgacgtacggcgtgcagtgcttacatacaactaacatagggagcacatgaggatcacccatgtgcgactcccacagtcactggggagtcttccc

SEQ ID NO: 16370 - DNA, 211 bp, synthetic construct
  source 1..211: mol_type = other DNA
gaagttcatctgtaccaccggcaaactgcccgtgccttggcccaccctcgtcaccaccctgacgtacggcgtgcagtgcttacatacaactaacatagggagcacatgaggatcacccatgtgcgactcccacagtcactggggagtcttccctctctctcgggtcaggagcccccccctgaacccaggataaccctcaaagtcggggggc

SEQ ID NO: 16371 - DNA, 229 bp, synthetic construct
  source 1..229: mol_type = other DNA
gaagttcatctgtaccaccggcaaactgcccgtgccttggcccaccctcgtcaccaccctgacgtacggcgtgcagtgcttacatacaactaacatagggagcacatgaggatcacccatgtgcgactcccacagtcactggggagtcttccctctctctctctctctctctcgggagcacatgaggatcacccatgtgcgactcccacagtcactggggagtcttccc

SEQ ID NO: 16372 - DNA, 287 bp, synthetic construct
  source 1..287: mol_type = other DNA
gaagttcatctgtaccaccggcaaactgcccgtgccttggcccaccctcgtcaccaccctgacgtacggcgtgcagtgcttacatacaactaacatagggagcacatgaggatcacccatgtgcgactcccacagtcactggggagtcttccctctctctctctctctctctcgggagcacatgaggatcacccatgtgcgactcccacagtcactggggagtcttccctctctctcgggtcaggagcccccccctgaacccaggataaccctcaaagtcggggggc

SEQ ID NO: 16373 - DNA, 116 bp, synthetic construct
  source 1..116: mol_type = other DNA
gaagttcatctgtaccaccggcaaactgcccgtgccttggcccaccctcgtcaccaccctgacgtacggcgtgcagtgcttcggcacatacaagcacatgaggatcacccatgtgc

SEQ ID NO: 16374 - DNA, 174 bp, synthetic construct
  source 1..174: mol_type = other DNA
gaagttcatctgtaccaccggcaaactgcccgtgccttggcccaccctcgtcaccaccctgacgtacggcgtgcagtgcttcggcacatacaagcacatgaggatcacccatgtgctctctctcgggtcaggagcccccccctgaacccaggataaccctcaaagtcggggggc

SEQ ID NO: 16375 - DNA, 149 bp, synthetic construct
  source 1..149: mol_type = other DNA
gaagttcatctgtaccaccggcaaactgcccgtgccttggcccaccctcgtcaccaccctgacgtacggcgtgcagtgcttcggcacatacaagggagcacatgaggatcacccatgtgcgactcccacagtcactggggagtcttccc

SEQ ID NO: 16376 - DNA, 207 bp, synthetic construct
  source 1..207: mol_type = other DNA
gaagttcatctgtaccaccggcaaactgcccgtgccttggcccaccctcgtcaccaccctgacgtacggcgtgcagtgcttcggcacatacaagggagcacatgaggatcacccatgtgcgactcccacagtcactggggagtcttccctctctctcgggtcaggagcccccccctgaacccaggataaccctcaaagtcggggggc

SEQ ID NO: 16377 - DNA, 225 bp, synthetic construct
  source 1..225: mol_type = other DNA
gaagttcatctgtaccaccggcaaactgcccgtgccttggcccaccctcgtcaccaccctgacgtacggcgtgcagtgcttcggcacatacaagggagcacatgaggatcacccatgtgcgactcccacagtcactggggagtcttccctctctctctctctctctctcgggagcacatgaggatcacccatgtgcgactcccacagtcactggggagtcttccc

SEQ ID NO: 16378 - DNA, 283 bp, synthetic construct
  source 1..283: mol_type = other DNA
gaagttcatctgtaccaccggcaaactgcccgtgccttggcccaccctcgtcaccaccctgacgtacggcgtgcagtgcttcggcacatacaagggagcacatgaggatcacccatgtgcgactcccacagtcactggggagtcttccctctctctctctctctctctcgggagcacatgaggatcacccatgtgcgactcccacagtcactggggagtcttccctctctctcgggtcaggagcccccccctgaacccaggataaccctcaaagtcggggggc

SEQ ID NO: 16379 - DNA, 124 bp, synthetic construct
  source 1..124: mol_type = other DNA
gaagttcatctgtaccaccggcaaactgcccgtgccttggcccaccctcgtcaccaccctgacgtacggcgtgcagtgcttcggcacatacaactaacatagcacatgaggatcacccatgtgc

SEQ ID NO: 16380 - DNA, 182 bp, synthetic construct
  source 1..182: mol_type = other DNA
gaagttcatctgtaccaccggcaaactgcccgtgccttggcccaccctcgtcaccaccctgacgtacggcgtgcagtgcttcggcacatacaactaacatagcacatgaggatcacccatgtgctctctctcgggtcaggagcccccccctgaacccaggataaccctcaaagtcggggggc

SEQ ID NO: 16381 - DNA, 157 bp, synthetic construct
  source 1..157: mol_type = other DNA
gaagttcatctgtaccaccggcaaactgcccgtgccttggcccaccctcgtcaccaccctgacgtacggcgtgcagtgcttcggcacatacaactaacatagggagcacatgaggatcacccatgtgcgactcccacagtcactggggagtcttccc

SEQ ID NO: 16382 - DNA, 215 bp, synthetic construct
  source 1..215: mol_type = other DNA
gaagttcatctgtaccaccggcaaactgcccgtgccttggcccaccctcgtcaccaccctgacgtacggcgtgcagtgcttcggcacatacaactaacatagggagcacatgaggatcacccatgtgcgactcccacagtcactggggagtcttccctctctctcgggtcaggagcccccccctgaacccaggataaccctcaaagtcggggggc

SEQ ID NO: 16383 - DNA, 233 bp, synthetic construct
  source 1..233: mol_type = other DNA
gaagttcatctgtaccaccggcaaactgcccgtgccttggcccaccctcgtcaccaccctgacgtacggcgtgcagtgcttcggcacatacaactaacatagggagcacatgaggatcacccatgtgcgactcccacagtcactggggagtcttccctctctctctctctctctctcgggagcacatgaggatcacccatgtgcgactcccacagtcactggggagtcttccc

SEQ ID NO: 16384 - DNA, 291 bp, synthetic construct
  source 1..291: mol_type = other DNA
gaagttcatctgtaccaccggcaaactgcccgtgccttggcccaccctcgtcaccaccctgacgtacggcgtgcagtgcttcggcacatacaactaacatagggagcacatgaggatcacccatgtgcgactcccacagtcactggggagtcttccctctctctctctctctctctcgggagcacatgaggatcacccatgtgcgactcccacagtcactggggagtcttccctctctctcgggtcaggagcccccccctgaacccaggataaccctcaaagtcggggggc

SEQ ID NO: 16385 - DNA, 112 bp, synthetic construct
  source 1..112: mol_type = other DNA
gaagttcatctgtaccaccggcaaactgcccgtgccttggcccaccctcgtcaccaccctgacgtacggtcctgtgagcttacatacaagcacatgaggatcacccatgtgc

SEQ ID NO: 16386 - DNA, 170 bp, synthetic construct
  source 1..170: mol_type = other DNA
gaagttcatctgtaccaccggcaaactgcccgtgccttggcccaccctcgtcaccaccctgacgtacggtcctgtgagcttacatacaagcacatgaggatcacccatgtgctctctctcgggtcaggagcccccccctgaacccaggataaccctcaaagtcggggggc

SEQ ID NO: 16387 - DNA, 145 bp, synthetic construct
  source 1..145: mol_type = other DNA
gaagttcatctgtaccaccggcaaactgcccgtgccttggcccaccctcgtcaccaccctgacgtacggtcctgtgagcttacatacaagggagcacatgaggatcacccatgtgcgactcccacagtcactggggagtcttccc

SEQ ID NO: 16388 - DNA, 203 bp, synthetic construct
  source 1..203: mol_type = other DNA
gaagttcatctgtaccaccggcaaactgcccgtgccttggcccaccctcgtcaccaccctgacgtacggtcctgtgagcttacatacaagggagcacatgaggatcacccatgtgcgactcccacagtcactggggagtcttccctctctctcgggtcaggagcccccccctgaacccaggataaccctcaaagtcggggggc

SEQ ID NO: 16389 - DNA, 221 bp, synthetic construct
  source 1..221: mol_type = other DNA
gaagttcatctgtaccaccggcaaactgcccgtgccttggcccaccctcgtcaccaccctgacgtacggtcctgtgagcttacatacaagggagcacatgaggatcacccatgtgcgactcccacagtcactggggagtcttccctctctctctctctctctctcgggagcacatgaggatcacccatgtgcgactcccacagtcactggggagtcttccc

SEQ ID NO: 16390 - DNA, 279 bp, synthetic construct
  source 1..279: mol_type = other DNA
gaagttcatctgtaccaccggcaaactgcccgtgccttggcccaccctcgtcaccaccctgacgtacggtcctgtgagcttacatacaagggagcacatgaggatcacccatgtgcgactcccacagtcactggggagtcttccctctctctctctctctctctcgggagcacatgaggatcacccatgtgcgactcccacagtcactggggagtcttccctctctctcgggtcaggagcccccccctgaacccaggataaccctcaaagtcggggggc

SEQ ID NO: 16391 - DNA, 120 bp, synthetic construct
  source 1..120: mol_type = other DNA
gaagttcatctgtaccaccggcaaactgcccgtgccttggcccaccctcgtcaccaccctgacgtacggtcctgtgagcttacatacaactaacatagcacatgaggatcacccatgtgc

SEQ ID NO: 16392 - DNA, 178 bp, synthetic construct
  source 1..178: mol_type = other DNA
gaagttcatctgtaccaccggcaaactgcccgtgccttggcccaccctcgtcaccaccctgacgtacggtcctgtgagcttacatacaactaacatagcacatgaggatcacccatgtgctctctctcgggtcaggagcccccccctgaacccaggataaccctcaaagtcggggggc

SEQ ID NO: 16393 - DNA, 153 bp, synthetic construct
  source 1..153: mol_type = other DNA
gaagttcatctgtaccaccggcaaactgcccgtgccttggcccaccctcgtcaccaccctgacgtacggtcctgtgagcttacatacaactaacatagggagcacatgaggatcacccatgtgcgactcccacagtcactggggagtcttccc

SEQ ID NO: 16394 - DNA, 211 bp, synthetic construct
  source 1..211: mol_type = other DNA
gaagttcatctgtaccaccggcaaactgcccgtgccttggcccaccctcgtcaccaccctgacgtacggtcctgtgagcttacatacaactaacatagggagcacatgaggatcacccatgtgcgactcccacagtcactggggagtcttccctctctctcgggtcaggagcccccccctgaacccaggataaccctcaaagtcggggggc

SEQ ID NO: 16395 - DNA, 229 bp, synthetic construct
  source 1..229: mol_type = other DNA
gaagttcatctgtaccaccggcaaactgcccgtgccttggcccaccctcgtcaccaccctgacgtacggtcctgtgagcttacatacaactaacatagggagcacatgaggatcacccatgtgcgactcccacagtcactggggagtcttccctctctctctctctctctctcgggagcacatgaggatcacccatgtgcgactcccacagtcactggggagtcttccc

SEQ ID NO: 16396 - DNA, 287 bp, synthetic construct
  source 1..287: mol_type = other DNA
gaagttcatctgtaccaccggcaaactgcccgtgccttggcccaccctcgtcaccaccctgacgtacggtcctgtgagcttacatacaactaacatagggagcacatgaggatcacccatgtgcgactcccacagtcactggggagtcttccctctctctctctctctctctcgggagcacatgaggatcacccatgtgcgactcccacagtcactggggagtcttccctctctctcgggtcaggagcccccccctgaacccaggataaccctcaaagtcggggggc

SEQ ID NO: 16397 - DNA, 93 bp, synthetic construct
  source 1..93: mol_type = other DNA
cgcggttctatctagttacgcgttaaaccaactagaagaccaccctgacgtacggcgtgcagacatacaagcacatgaggatcacccatgtgc

SEQ ID NO: 16398 - DNA, 151 bp, synthetic construct
  source 1..151: mol_type = other DNA
cgcggttctatctagttacgcgttaaaccaactagaagaccaccctgacgtacggcgtgcagacatacaagcacatgaggatcacccatgtgctctctctcgggtcaggagcccccccctgaacccaggataaccctcaaagtcggggggc

SEQ ID NO: 16399 - DNA, 126 bp, synthetic construct
  source 1..126: mol_type = other DNA
cgcggttctatctagttacgcgttaaaccaactagaagaccaccctgacgtacggcgtgcagacatacaagggagcacatgaggatcacccatgtgcgactcccacagtcactggggagtcttccc

SEQ ID NO: 16400 - DNA, 184 bp, synthetic construct
  source 1..184: mol_type = other DNA
cgcggttctatctagttacgcgttaaaccaactagaagaccaccctgacgtacggcgtgcagacatacaagggagcacatgaggatcacccatgtgcgactcccacagtcactggggagtcttccctctctctcgggtcaggagcccccccctgaacccaggataaccctcaaagtcggggggc

SEQ ID NO: 16401 - DNA, 202 bp, synthetic construct
  source 1..202: mol_type = other DNA
cgcggttctatctagttacgcgttaaaccaactagaagaccaccctgacgtacggcgtgcagacatacaagggagcacatgaggatcacccatgtgcgactcccacagtcactggggagtcttccctctctctctctctctctctcgggagcacatgaggatcacccatgtgcgactcccacagtcactggggagtcttccc

SEQ ID NO: 16402 - DNA, 260 bp, synthetic construct
  source 1..260: mol_type = other DNA
cgcggttctatctagttacgcgttaaaccaactagaagaccaccctgacgtacggcgtgcagacatacaagggagcacatgaggatcacccatgtgcgactcccacagtcactggggagtcttccctctctctctctctctctctcgggagcacatgaggatcacccatgtgcgactcccacagtcactggggagtcttccctctctctcgggtcaggagcccccccctgaacccaggataaccctcaaagtcggggggc

SEQ ID NO: 16403 - DNA, 101 bp, synthetic construct
  source 1..101: mol_type = other DNA
cgcggttctatctagttacgcgttaaaccaactagaagaccaccctgacgtacggcgtgcagacatacaactaacatagcacatgaggatcacccatgtgc

SEQ ID NO: 16404 - DNA, 159 bp, synthetic construct
  source 1..159: mol_type = other DNA
cgcggttctatctagttacgcgttaaaccaactagaagaccaccctgacgtacggcgtgcagacatacaactaacatagcacatgaggatcacccatgtgctctctctcgggtcaggagcccccccctgaacccaggataaccctcaaagtcggggggc

SEQ ID NO: 16405 - DNA, 134 bp, synthetic construct
  source 1..134: mol_type = other DNA
cgcggttctatctagttacgcgttaaaccaactagaagaccaccctgacgtacggcgtgcagacatacaactaacatagggagcacatgaggatcacccatgtgcgactcccacagtcactggggagtcttccc

SEQ ID NO: 16406 - DNA, 192 bp, synthetic construct
  source 1..192: mol_type = other DNA
cgcggttctatctagttacgcgttaaaccaactagaagaccaccctgacgtacggcgtgcagacatacaactaacatagggagcacatgaggatcacccatgtgcgactcccacagtcactggggagtcttccctctctctcgggtcaggagcccccccctgaacccaggataaccctcaaagtcggggggc

SEQ ID NO: 16407 - DNA, 210 bp, synthetic construct
  source 1..210: mol_type = other DNA
cgcggttctatctagttacgcgttaaaccaactagaagaccaccctgacgtacggcgtgcagacatacaactaacatagggagcacatgaggatcacccatgtgcgactcccacagtcactggggagtcttccctctctctctctctctctctcgggagcacatgaggatcacccatgtgcgactcccacagtcactggggagtcttccc

SEQ ID NO: 16408 - DNA, 268 bp, synthetic construct
  source 1..268: mol_type = other DNA
cgcggttctatctagttacgcgttaaaccaactagaagaccaccctgacgtacggcgtgcagacatacaactaacatagggagcacatgaggatcacccatgtgcgactcccacagtcactggggagtcttccctctctctctctctctctctcgggagcacatgaggatcacccatgtgcgactcccacagtcactggggagtcttccctctctctcgggtcaggagcccccccctgaacccaggataaccctcaaagtcggggggc

SEQ ID NO: 16409 - DNA, 98 bp, synthetic construct
  source 1..98: mol_type = other DNA
cgcggttctatctagttacgcgttaaaccaactagaagaccaccctgacgtacggcgtgcagtgcttacatacaagcacatgaggatcacccatgtgc

SEQ ID NO: 16410 - DNA, 156 bp, synthetic construct
  source 1..156: mol_type = other DNA
cgcggttctatctagttacgcgttaaaccaactagaagaccaccctgacgtacggcgtgcagtgcttacatacaagcacatgaggatcacccatgtgctctctctcgggtcaggagcccccccctgaacccaggataaccctcaaagtcggggggc

SEQ ID NO: 16411 - DNA, 131 bp, synthetic construct
  source 1..131: mol_type = other DNA
cgcggttctatctagttacgcgttaaaccaactagaagaccaccctgacgtacggcgtgcagtgcttacatacaagggagcacatgaggatcacccatgtgcgactcccacagtcactggggagtcttccc

SEQ ID NO: 16412 - DNA, 189 bp, synthetic construct
  source 1..189: mol_type = other DNA
cgcggttctatctagttacgcgttaaaccaactagaagaccaccctgacgtacggcgtgcagtgcttacatacaagggagcacatgaggatcacccatgtgcgactcccacagtcactggggagtcttccctctctctcgggtcaggagcccccccctgaacccaggataaccctcaaagtcggggggc

SEQ ID NO: 16413 - DNA, 207 bp, synthetic construct
  source 1..207: mol_type = other DNA
cgcggttctatctagttacgcgttaaaccaactagaagaccaccctgacgtacggcgtgcagtgcttacatacaagggagcacatgaggatcacccatgtgcgactcccacagtcactggggagtcttccctctctctctctctctctctcgggagcacatgaggatcacccatgtgcgactcccacagtcactggggagtcttccc

SEQ ID NO: 16414 - DNA, 265 bp, synthetic construct
  source 1..265: mol_type = other DNA
cgcggttctatctagttacgcgttaaaccaactagaagaccaccctgacgtacggcgtgcagtgcttacatacaagggagcacatgaggatcacccatgtgcgactcccacagtcactggggagtcttccctctctctctctctctctctcgggagcacatgaggatcacccatgtgcgactcccacagtcactggggagtcttccctctctctcgggtcaggagcccccccctgaacccaggataaccctcaaagtcggggggc

SEQ ID NO: 16415 - DNA, 106 bp, synthetic construct
  source 1..106: mol_type = other DNA
cgcggttctatctagttacgcgttaaaccaactagaagaccaccctgacgtacggcgtgcagtgcttacatacaactaacatagcacatgaggatcacccatgtgc

SEQ ID NO: 16416 - DNA, 164 bp, synthetic construct
  source 1..164: mol_type = other DNA
cgcggttctatctagttacgcgttaaaccaactagaagaccaccctgacgtacggcgtgcagtgcttacatacaactaacatagcacatgaggatcacccatgtgctctctctcgggtcaggagcccccccctgaacccaggataaccctcaaagtcggggggc

SEQ ID NO: 16417 - DNA, 139 bp, synthetic construct
  source 1..139: mol_type = other DNA
cgcggttctatctagttacgcgttaaaccaactagaagaccaccctgacgtacggcgtgcagtgcttacatacaactaacatagggagcacatgaggatcacccatgtgcgactcccacagtcactggggagtcttccc

SEQ ID NO: 16418 - DNA, 197 bp, synthetic construct
  source 1..197: mol_type = other DNA
cgcggttctatctagttacgcgttaaaccaactagaagaccaccctgacgtacggcgtgcagtgcttacatacaactaacatagggagcacatgaggatcacccatgtgcgactcccacagtcactggggagtcttccctctctctcgggtcaggagcccccccctgaacccaggataaccctcaaagtcggggggc

SEQ ID NO: 16419 - DNA, 215 bp, synthetic construct
  source 1..215: mol_type = other DNA
cgcggttctatctagttacgcgttaaaccaactagaagaccaccctgacgtacggcgtgcagtgcttacatacaactaacatagggagcacatgaggatcacccatgtgcgactcccacagtcactggggagtcttccctctctctctctctctctctcgggagcacatgaggatcacccatgtgcgactcccacagtcactggggagtcttccc

SEQ ID NO: 16420 - DNA, 273 bp, synthetic construct
  source 1..273: mol_type = other DNA
cgcggttctatctagttacgcgttaaaccaactagaagaccaccctgacgtacggcgtgcagtgcttacatacaactaacatagggagcacatgaggatcacccatgtgcgactcccacagtcactggggagtcttccctctctctctctctctctctcgggagcacatgaggatcacccatgtgcgactcccacagtcactggggagtcttccctctctctcgggtcaggagcccccccctgaacccaggataaccctcaaagtcggggggc

SEQ ID NO: 16421 - DNA, 102 bp, synthetic construct
  source 1..102: mol_type = other DNA
cgcggttctatctagttacgcgttaaaccaactagaagaccaccctgacgtacggcgtgcagtgcttcggcacatacaagcacatgaggatcacccatgtgc

SEQ ID NO: 16422 - DNA, 160 bp, synthetic construct
  source 1..160: mol_type = other DNA
cgcggttctatctagttacgcgttaaaccaactagaagaccaccctgacgtacggcgtgcagtgcttcggcacatacaagcacatgaggatcacccatgtgctctctctcgggtcaggagcccccccctgaacccaggataaccctcaaagtcggggggc

SEQ ID NO: 16423 - DNA, 135 bp, synthetic construct
  source 1..135: mol_type = other DNA
cgcggttctatctagttacgcgttaaaccaactagaagaccaccctgacgtacggcgtgcagtgcttcggcacatacaagggagcacatgaggatcacccatgtgcgactcccacagtcactggggagtcttccc

SEQ ID NO: 16424 - DNA, 193 bp, synthetic construct
  source 1..193: mol_type = other DNA
cgcggttctatctagttacgcgttaaaccaactagaagaccaccctgacgtacggcgtgcagtgcttcggcacatacaagggagcacatgaggatcacccatgtgcgactcccacagtcactggggagtcttccctctctctcgggtcaggagcccccccctgaacccaggataaccctcaaagtcggggggc

SEQ ID NO: 16425 - DNA, 211 bp, synthetic construct
  source 1..211: mol_type = other DNA
cgcggttctatctagttacgcgttaaaccaactagaagaccaccctgacgtacggcgtgcagtgcttcggcacatacaagggagcacatgaggatcacccatgtgcgactcccacagtcactggggagtcttccctctctctctctctctctctcgggagcacatgaggatcacccatgtgcgactcccacagtcactggggagtcttccc

SEQ ID NO: 16426 - DNA, 269 bp, synthetic construct
  source 1..269: mol_type = other DNA
cgcggttctatctagttacgcgttaaaccaactagaagaccaccctgacgtacggcgtgcagtgcttcggcacatacaagggagcacatgaggatcacccatgtgcgactcccacagtcactggggagtcttccctctctctctctctctctctcgggagcacatgaggatcacccatgtgcgactcccacagtcactggggagtcttccctctctctcgggtcaggagcccccccctgaacccaggataaccctcaaagtcggggggc

SEQ ID NO: 16427 - DNA, 110 bp, synthetic construct
  source 1..110: mol_type = other DNA
cgcggttctatctagttacgcgttaaaccaactagaagaccaccctgacgtacggcgtgcagtgcttcggcacatacaactaacatagcacatgaggatcacccatgtgc

SEQ ID NO: 16428 - DNA, 168 bp, synthetic construct
  source 1..168: mol_type = other DNA
cgcggttctatctagttacgcgttaaaccaactagaagaccaccctgacgtacggcgtgcagtgcttcggcacatacaactaacatagcacatgaggatcacccatgtgctctctctcgggtcaggagcccccccctgaacccaggataaccctcaaagtcggggggc

SEQ ID NO: 16429 - DNA, 143 bp, synthetic construct
  source 1..143: mol_type = other DNA
cgcggttctatctagttacgcgttaaaccaactagaagaccaccctgacgtacggcgtgcagtgcttcggcacatacaactaacatagggagcacatgaggatcacccatgtgcgactcccacagtcactggggagtcttccc

SEQ ID NO: 16430 - DNA, 201 bp, synthetic construct
  source 1..201: mol_type = other DNA
cgcggttctatctagttacgcgttaaaccaactagaagaccaccctgacgtacggcgtgcagtgcttcggcacatacaactaacatagggagcacatgaggatcacccatgtgcgactcccacagtcactggggagtcttccctctctctcgggtcaggagcccccccctgaacccaggataaccctcaaagtcggggggc

SEQ ID NO: 16431 - DNA, 219 bp, synthetic construct
  source 1..219: mol_type = other DNA
cgcggttctatctagttacgcgttaaaccaactagaagaccaccctgacgtacggcgtgcagtgcttcggcacatacaactaacatagggagcacatgaggatcacccatgtgcgactcccacagtcactggggagtcttccctctctctctctctctctctcgggagcacatgaggatcacccatgtgcgactcccacagtcactggggagtcttccc

SEQ ID NO: 16432 - DNA, 277 bp, synthetic construct
  source 1..277: mol_type = other DNA
cgcggttctatctagttacgcgttaaaccaactagaagaccaccctgacgtacggcgtgcagtgcttcggcacatacaactaacatagggagcacatgaggatcacccatgtgcgactcccacagtcactggggagtcttccctctctctctctctctctctcgggagcacatgaggatcacccatgtgcgactcccacagtcactggggagtcttccctctctctcgggtcaggagcccccccctgaacccaggataaccctcaaagtcggggggc

SEQ ID NO: 16433 - DNA, 98 bp, synthetic construct
  source 1..98: mol_type = other DNA
cgcggttctatctagttacgcgttaaaccaactagaagaccaccctgacgtacggtcctgtgagcttacatacaagcacatgaggatcacccatgtgc

SEQ ID NO: 16434 - DNA, 156 bp, synthetic construct
  source 1..156: mol_type = other DNA
cgcggttctatctagttacgcgttaaaccaactagaagaccaccctgacgtacggtcctgtgagcttacatacaagcacatgaggatcacccatgtgctctctctcgggtcaggagcccccccctgaacccaggataaccctcaaagtcggggggc

SEQ ID NO: 16435 - DNA, 131 bp, synthetic construct
  source 1..131: mol_type = other DNA
cgcggttctatctagttacgcgttaaaccaactagaagaccaccctgacgtacggtcctgtgagcttacatacaagggagcacatgaggatcacccatgtgcgactcccacagtcactggggagtcttccc

SEQ ID NO: 16436 - DNA, 189 bp, synthetic construct
  source 1..189: mol_type = other DNA
cgcggttctatctagttacgcgttaaaccaactagaagaccaccctgacgtacggtcctgtgagcttacatacaagggagcacatgaggatcacccatgtgcgactcccacagtcactggggagtcttccctctctctcgggtcaggagcccccccctgaacccaggataaccctcaaagtcggggggc

SEQ ID NO: 16437 - DNA, 207 bp, synthetic construct
  source 1..207: mol_type = other DNA
cgcggttctatctagttacgcgttaaaccaactagaagaccaccctgacgtacggtcctgtgagcttacatacaagggagcacatgaggatcacccatgtgcgactcccacagtcactggggagtcttccctctctctctctctctctctcgggagcacatgaggatcacccatgtgcgactcccacagtcactggggagtcttccc

SEQ ID NO: 16438 - DNA, 265 bp, synthetic construct
  source 1..265: mol_type = other DNA
cgcggttctatctagttacgcgttaaaccaactagaagaccaccctgacgtacggtcctgtgagcttacatacaagggagcacatgaggatcacccatgtgcgactcccacagtcactggggagtcttccctctctctctctctctctctcgggagcacatgaggatcacccatgtgcgactcccacagtcactggggagtcttccctctctctcgggtcaggagcccccccctgaacccaggataaccctcaaagtcggggggc

SEQ ID NO: 16439 - DNA, 106 bp, synthetic construct
  source 1..106: mol_type = other DNA
cgcggttctatctagttacgcgttaaaccaactagaagaccaccctgacgtacggtcctgtgagcttacatacaactaacatagcacatgaggatcacccatgtgc

SEQ ID NO: 16440 - DNA, 164 bp, synthetic construct
  source 1..164: mol_type = other DNA
cgcggttctatctagttacgcgttaaaccaactagaagaccaccctgacgtacggtcctgtgagcttacatacaactaacatagcacatgaggatcacccatgtgctctctctcgggtcaggagcccccccctgaacccaggataaccctcaaagtcggggggc

SEQ ID NO: 16441 - DNA, 139 bp, synthetic construct
  source 1..139: mol_type = other DNA
cgcggttctatctagttacgcgttaaaccaactagaagaccaccctgacgtacggtcctgtgagcttacatacaactaacatagggagcacatgaggatcacccatgtgcgactcccacagtcactggggagtcttccc

SEQ ID NO: 16442 - DNA, 197 bp, synthetic construct
  source 1..197: mol_type = other DNA
cgcggttctatctagttacgcgttaaaccaactagaagaccaccctgacgtacggtcctgtgagcttacatacaactaacatagggagcacatgaggatcacccatgtgcgactcccacagtcactggggagtcttccctctctctcgggtcaggagcccccccctgaacccaggataaccctcaaagtcggggggc

SEQ ID NO: 16443 - DNA, 215 bp, synthetic construct
  source 1..215: mol_type = other DNA
cgcggttctatctagttacgcgttaaaccaactagaagaccaccctgacgtacggtcctgtgagcttacatacaactaacatagggagcacatgaggatcacccatgtgcgactcccacagtcactggggagtcttccctctctctctctctctctctcgggagcacatgaggatcacccatgtgcgactcccacagtcactggggagtcttccc

SEQ ID NO: 16444 - DNA, 273 bp, synthetic construct
  source 1..273: mol_type = other DNA
cgcggttctatctagttacgcgttaaaccaactagaagaccaccctgacgtacggtcctgtgagcttacatacaactaacatagggagcacatgaggatcacccatgtgcgactcccacagtcactggggagtcttccctctctctctctctctctctcgggagcacatgaggatcacccatgtgcgactcccacagtcactggggagtcttccctctctctcgggtcaggagcccccccctgaacccaggataaccctcaaagtcggggggc

SEQ ID NO: 16445 - DNA, 144 bp, synthetic construct
  source 1..144: mol_type = other DNA
cgcggttctatctagttacgcgttaaaccaactagaagaagttcatctgtaccaccggcaaactgcccgtgccttggcccaccctcgtcaccaccctgacgtacggcgtgcagacatacaagcacatgaggatcacccatgtgc

SEQ ID NO: 16446 - DNA, 202 bp, synthetic construct
  source 1..202: mol_type = other DNA
cgcggttctatctagttacgcgttaaaccaactagaagaagttcatctgtaccaccggcaaactgcccgtgccttggcccaccctcgtcaccaccctgacgtacggcgtgcagacatacaagcacatgaggatcacccatgtgctctctctcgggtcaggagcccccccctgaacccaggataaccctcaaagtcggggggc

SEQ ID NO: 16447 - DNA, 177 bp, synthetic construct
  source 1..177: mol_type = other DNA
cgcggttctatctagttacgcgttaaaccaactagaagaagttcatctgtaccaccggcaaactgcccgtgccttggcccaccctcgtcaccaccctgacgtacggcgtgcagacatacaagggagcacatgaggatcacccatgtgcgactcccacagtcactggggagtcttccc

SEQ ID NO: 16448 - DNA, 235 bp, synthetic construct
  source 1..235: mol_type = other DNA
cgcggttctatctagttacgcgttaaaccaactagaagaagttcatctgtaccaccggcaaactgcccgtgccttggcccaccctcgtcaccaccctgacgtacggcgtgcagacatacaagggagcacatgaggatcacccatgtgcgactcccacagtcactggggagtcttccctctctctcgggtcaggagcccccccctgaacccaggataaccctcaaagtcggggggc

SEQ ID NO: 16449 - DNA, 253 bp, synthetic construct
  source 1..253: mol_type = other DNA
cgcggttctatctagttacgcgttaaaccaactagaagaagttcatctgtaccaccggcaaactgcccgtgccttggcccaccctcgtcaccaccctgacgtacggcgtgcagacatacaagggagcacatgaggatcacccatgtgcgactcccacagtcactggggagtcttccctctctctctctctctctctcgggagcacatgaggatcacccatgtgcgactcccacagtcactggggagtcttccc

SEQ ID NO: 16450 - DNA, 311 bp, synthetic construct
  source 1..311: mol_type = other DNA
cgcggttctatctagttacgcgttaaaccaactagaagaagttcatctgtaccaccggcaaactgcccgtgccttggcccaccctcgtcaccaccctgacgtacggcgtgcagacatacaagggagcacatgaggatcacccatgtgcgactcccacagtcactggggagtcttccctctctctctctctctctctcgggagcacatgaggatcacccatgtgcgactcccacagtcactggggagtcttccctctctctcgggtcaggagcccccccctgaacccaggataaccctcaaagtcggggggc

SEQ ID NO: 16451 - DNA, 152 bp, synthetic construct
  source 1..152: mol_type = other DNA
cgcggttctatctagttacgcgttaaaccaactagaagaagttcatctgtaccaccggcaaactgcccgtgccttggcccaccctcgtcaccaccctgacgtacggcgtgcagacatacaactaacatagcacatgaggatcacccatgtgc

SEQ ID NO: 16452 - DNA, 210 bp, synthetic construct
  source 1..210: mol_type = other DNA
cgcggttctatctagttacgcgttaaaccaactagaagaagttcatctgtaccaccggcaaactgcccgtgccttggcccaccctcgtcaccaccctgacgtacggcgtgcagacatacaactaacatagcacatgaggatcacccatgtgctctctctcgggtcaggagcccccccctgaacccaggataaccctcaaagtcggggggc

SEQ ID NO: 16453 - DNA, 185 bp, synthetic construct
  source 1..185: mol_type = other DNA
cgcggttctatctagttacgcgttaaaccaactagaagaagttcatctgtaccaccggcaaactgcccgtgccttggcccaccctcgtcaccaccctgacgtacggcgtgcagacatacaactaacatagggagcacatgaggatcacccatgtgcgactcccacagtcactggggagtcttccc

SEQ ID NO: 16454 - DNA, 243 bp, synthetic construct
  source 1..243: mol_type = other DNA
cgcggttctatctagttacgcgttaaaccaactagaagaagttcatctgtaccaccggcaaactgcccgtgccttggcccaccctcgtcaccaccctgacgtacggcgtgcagacatacaactaacatagggagcacatgaggatcacccatgtgcgactcccacagtcactggggagtcttccctctctctcgggtcaggagcccccccctgaacccaggataaccctcaaagtcggggggc

SEQ ID NO: 16455 - DNA, 261 bp, synthetic construct
  source 1..261: mol_type = other DNA
cgcggttctatctagttacgcgttaaaccaactagaagaagttcatctgtaccaccggcaaactgcccgtgccttggcccaccctcgtcaccaccctgacgtacggcgtgcagacatacaactaacatagggagcacatgaggatcacccatgtgcgactcccacagtcactggggagtcttccctctctctctctctctctctcgggagcacatgaggatcacccatgtgcgactcccacagtcactggggagtcttccc

SEQ ID NO: 16456 - DNA, 319 bp, synthetic construct
  source 1..319: mol_type = other DNA
cgcggttctatctagttacgcgttaaaccaactagaagaagttcatctgtaccaccggcaaactgcccgtgccttggcccaccctcgtcaccaccctgacgtacggcgtgcagacatacaactaacatagggagcacatgaggatcacccatgtgcgactcccacagtcactggggagtcttccctctctctctctctctctctcgggagcacatgaggatcacccatgtgcgactcccacagtcactggggagtcttccctctctctcgggtcaggagcccccccctgaacccaggataaccctcaaagtcggggggc

SEQ ID NO: 16457 - DNA, 149 bp, synthetic construct
  source 1..149: mol_type = other DNA
cgcggttctatctagttacgcgttaaaccaactagaagaagttcatctgtaccaccggcaaactgcccgtgccttggcccaccctcgtcaccaccctgacgtacggcgtgcagtgcttacatacaagcacatgaggatcacccatgtgc

SEQ ID NO: 16458 - DNA, 207 bp, synthetic construct
  source 1..207: mol_type = other DNA
cgcggttctatctagttacgcgttaaaccaactagaagaagttcatctgtaccaccggcaaactgcccgtgccttggcccaccctcgtcaccaccctgacgtacggcgtgcagtgcttacatacaagcacatgaggatcacccatgtgctctctctcgggtcaggagcccccccctgaacccaggataaccctcaaagtcggggggc

SEQ ID NO: 16459 - DNA, 182 bp, synthetic construct
  source 1..182: mol_type = other DNA
cgcggttctatctagttacgcgttaaaccaactagaagaagttcatctgtaccaccggcaaactgcccgtgccttggcccaccctcgtcaccaccctgacgtacggcgtgcagtgcttacatacaagggagcacatgaggatcacccatgtgcgactcccacagtcactggggagtcttccc

SEQ ID NO: 16460 - DNA, 240 bp, synthetic construct
  source 1..240: mol_type = other DNA
cgcggttctatctagttacgcgttaaaccaactagaagaagttcatctgtaccaccggcaaactgcccgtgccttggcccaccctcgtcaccaccctgacgtacggcgtgcagtgcttacatacaagggagcacatgaggatcacccatgtgcgactcccacagtcactggggagtcttccctctctctcgggtcaggagcccccccctgaacccaggataaccctcaaagtcggggggc

SEQ ID NO: 16461 - DNA, 258 bp, synthetic construct
  source 1..258: mol_type = other DNA
cgcggttctatctagttacgcgttaaaccaactagaagaagttcatctgtaccaccggcaaactgcccgtgccttggcccaccctcgtcaccaccctgacgtacggcgtgcagtgcttacatacaagggagcacatgaggatcacccatgtgcgactcccacagtcactggggagtcttccctctctctctctctctctctcgggagcacatgaggatcacccatgtgcgactcccacagtcactggggagtcttccc

SEQ ID NO: 16462 - DNA, 316 bp, synthetic construct
  source 1..316: mol_type = other DNA
cgcggttctatctagttacgcgttaaaccaactagaagaagttcatctgtaccaccggcaaactgcccgtgccttggcccaccctcgtcaccaccctgacgtacggcgtgcagtgcttacatacaagggagcacatgaggatcacccatgtgcgactcccacagtcactggggagtcttccctctctctctctctctctctcgggagcacatgaggatcacccatgtgcgactcccacagtcactggggagtcttccctctctctcgggtcaggagcccccccctgaacccaggataaccctcaaagtcggggggc

SEQ ID NO: 16463 - DNA, 157 bp, synthetic construct
  source 1..157: mol_type = other DNA
cgcggttctatctagttacgcgttaaaccaactagaagaagttcatctgtaccaccggcaaactgcccgtgccttggcccaccctcgtcaccaccctgacgtacggcgtgcagtgcttacatacaactaacatagcacatgaggatcacccatgtgc

SEQ ID NO: 16464 - DNA, 215 bp, synthetic construct
  source 1..215: mol_type = other DNA
cgcggttctatctagttacgcgttaaaccaactagaagaagttcatctgtaccaccggcaaactgcccgtgccttggcccaccctcgtcaccaccctgacgtacggcgtgcagtgcttacatacaactaacatagcacatgaggatcacccatgtgctctctctcgggtcaggagcccccccctgaacccaggataaccctcaaagtcggggggc

SEQ ID NO: 16465 - DNA, 190 bp, synthetic construct
  source 1..190: mol_type = other DNA
cgcggttctatctagttacgcgttaaaccaactagaagaagttcatctgtaccaccggcaaactgcccgtgccttggcccaccctcgtcaccaccctgacgtacggcgtgcagtgcttacatacaactaacatagggagcacatgaggatcacccatgtgcgactcccacagtcactggggagtcttccc

SEQ ID NO: 16466 - DNA, 248 bp, synthetic construct
  source 1..248: mol_type = other DNA
cgcggttctatctagttacgcgttaaaccaactagaagaagttcatctgtaccaccggcaaactgcccgtgccttggcccaccctcgtcaccaccctgacgtacggcgtgcagtgcttacatacaactaacatagggagcacatgaggatcacccatgtgcgactcccacagtcactggggagtcttccctctctctcgggtcaggagcccccccctgaacccaggataaccctcaaagtcggggggc

SEQ ID NO: 16467 - DNA, 266 bp, synthetic construct
  source 1..266: mol_type = other DNA
cgcggttctatctagttacgcgttaaaccaactagaagaagttcatctgtaccaccggcaaactgcccgtgccttggcccaccctcgtcaccaccctgacgtacggcgtgcagtgcttacatacaactaacatagggagcacatgaggatcacccatgtgcgactcccacagtcactggggagtcttccctctctctctctctctctctcgggagcacatgaggatcacccatgtgcgactcccacagtcactggggagtcttccc

SEQ ID NO: 16468 - DNA, 324 bp, synthetic construct
  source 1..324: mol_type = other DNA
cgcggttctatctagttacgcgttaaaccaactagaagaagttcatctgtaccaccggcaaactgcccgtgccttggcccaccctcgtcaccaccctgacgtacggcgtgcagtgcttacatacaactaacatagggagcacatgaggatcacccatgtgcgactcccacagtcactggggagtcttccctctctctctctctctctctcgggagcacatgaggatcacccatgtgcgactcccacagtcactggggagtcttccctctctctcgggtcaggagcccccccctgaacccaggataaccctcaaagtcggggggc

SEQ ID NO: 16469 - DNA, 153 bp, synthetic construct
  source 1..153: mol_type = other DNA
cgcggttctatctagttacgcgttaaaccaactagaagaagttcatctgtaccaccggcaaactgcccgtgccttggcccaccctcgtcaccaccctgacgtacggcgtgcagtgcttcggcacatacaagcacatgaggatcacccatgtgc

SEQ ID NO: 16470 - skipped

SEQ ID NO: 16471 - DNA, 186 bp, synthetic construct
  source 1..186: mol_type = other DNA
cgcggttctatctagttacgcgttaaaccaactagaagaagttcatctgtaccaccggcaaactgcccgtgccttggcccaccctcgtcaccaccctgacgtacggcgtgcagtgcttcggcacatacaagggagcacatgaggatcacccatgtgcgactcccacagtcactggggagtcttccc

SEQ ID NO: 16472 - DNA, 244 bp, synthetic construct
  source 1..244: mol_type = other DNA
cgcggttctatctagttacgcgttaaaccaactagaagaagttcatctgtaccaccggcaaactgcccgtgccttggcccaccctcgtcaccaccctgacgtacggcgtgcagtgcttcggcacatacaagggagcacatgaggatcacccatgtgcgactcccacagtcactggggagtcttccctctctctcgggtcaggagcccccccctgaacccaggataaccctcaaagtcggggggc

SEQ ID NO: 16473 - DNA, 262 bp, synthetic construct
  source 1..262: mol_type = other DNA
cgcggttctatctagttacgcgttaaaccaactagaagaagttcatctgtaccaccggcaaactgcccgtgccttggcccaccctcgtcaccaccctgacgtacggcgtgcagtgcttcggcacatacaagggagcacatgaggatcacccatgtgcgactcccacagtcactggggagtcttccctctctctctctctctctctcgggagcacatgaggatcacccatgtgcgactcccacagtcactggggagtcttccc

SEQ ID NO: 16474 - DNA, 320 bp, synthetic construct
  source 1..320: mol_type = other DNA
cgcggttctatctagttacgcgttaaaccaactagaagaagttcatctgtaccaccggcaaactgcccgtgccttggcccaccctcgtcaccaccctgacgtacggcgtgcagtgcttcggcacatacaagggagcacatgaggatcacccatgtgcgactcccacagtcactggggagtcttccctctctctctctctctctctcgggagcacatgaggatcacccatgtgcgactcccacagtcactggggagtcttccctctctctcgggtcaggagcccccccctgaacccaggataaccctcaaagtcggggggc

SEQ ID NO: 16475 - DNA, 161 bp, synthetic construct
  source 1..161: mol_type = other DNA
cgcggttctatctagttacgcgttaaaccaactagaagaagttcatctgtaccaccggcaaactgcccgtgccttggcccaccctcgtcaccaccctgacgtacggcgtgcagtgcttcggcacatacaactaacatagcacatgaggatcacccatgtgc

SEQ ID NO: 16476 - DNA, 219 bp, synthetic construct
  source 1..219: mol_type = other DNA
cgcggttctatctagttacgcgttaaaccaactagaagaagttcatctgtaccaccggcaaactgcccgtgccttggcccaccctcgtcaccaccctgacgtacggcgtgcagtgcttcggcacatacaactaacatagcacatgaggatcacccatgtgctctctctcgggtcaggagcccccccctgaacccaggataaccctcaaagtcggggggc

SEQ ID NO: 16477 - DNA, 194 bp, synthetic construct
  source 1..194: mol_type = other DNA
cgcggttctatctagttacgcgttaaaccaactagaagaagttcatctgtaccaccggcaaactgcccgtgccttggcccaccctcgtcaccaccctgacgtacggcgtgcagtgcttcggcacatacaactaacatagggagcacatgaggatcacccatgtgcgactcccacagtcactggggagtcttccc

SEQ ID NO: 16478 - DNA, 252 bp, synthetic construct
  source 1..252: mol_type = other DNA
cgcggttctatctagttacgcgttaaaccaactagaagaagttcatctgtaccaccggcaaactgcccgtgccttggcccaccctcgtcaccaccctgacgtacggcgtgcagtgcttcggcacatacaactaacatagggagcacatgaggatcacccatgtgcgactcccacagtcactggggagtcttccctctctctcgggtcaggagcccccccctgaacccaggataaccctcaaagtcggggggc

SEQ ID NO: 16479 - DNA, 270 bp, synthetic construct
  source 1..270: mol_type = other DNA
cgcggttctatctagttacgcgttaaaccaactagaagaagttcatctgtaccaccggcaaactgcccgtgccttggcccaccctcgtcaccaccctgacgtacggcgtgcagtgcttcggcacatacaactaacatagggagcacatgaggatcacccatgtgcgactcccacagtcactggggagtcttccctctctctctctctctctctcgggagcacatgaggatcacccatgtgcgactcccacagtcactggggagtcttccc

SEQ ID NO: 16480 - DNA, 328 bp, synthetic construct
  source 1..328: mol_type = other DNA
cgcggttctatctagttacgcgttaaaccaactagaagaagttcatctgtaccaccggcaaactgcccgtgccttggcccaccctcgtcaccaccctgacgtacggcgtgcagtgcttcggcacatacaactaacatagggagcacatgaggatcacccatgtgcgactcccacagtcactggggagtcttccctctctctctctctctctctcgggagcacatgaggatcacccatgtgcgactcccacagtcactggggagtcttccctctctctcgggtcaggagcccccccctgaacccaggataaccctcaaagtcggggggc

SEQ ID NO: 16481 - DNA, 149 bp, synthetic construct
  source 1..149: mol_type = other DNA
cgcggttctatctagttacgcgttaaaccaactagaagaagttcatctgtaccaccggcaaactgcccgtgccttggcccaccctcgtcaccaccctgacgtacggtcctgtgagcttacatacaagcacatgaggatcacccatgtgc

SEQ ID NO: 16482 - DNA, 207 bp, synthetic construct
  source 1..207: mol_type = other DNA
cgcggttctatctagttacgcgttaaaccaactagaagaagttcatctgtaccaccggcaaactgcccgtgccttggcccaccctcgtcaccaccctgacgtacggtcctgtgagcttacatacaagcacatgaggatcacccatgtgctctctctcgggtcaggagcccccccctgaacccaggataaccctcaaagtcggggggc

SEQ ID NO: 16483 - DNA, 182 bp, synthetic construct
  source 1..182: mol_type = other DNA
cgcggttctatctagttacgcgttaaaccaactagaagaagttcatctgtaccaccggcaaactgcccgtgccttggcccaccctcgtcaccaccctgacgtacggtcctgtgagcttacatacaagggagcacatgaggatcacccatgtgcgactcccacagtcactggggagtcttccc

SEQ ID NO: 16484 - DNA, 240 bp, synthetic construct
  source 1..240: mol_type = other DNA
cgcggttctatctagttacgcgttaaaccaactagaagaagttcatctgtaccaccggcaaactgcccgtgccttggcccaccctcgtcaccaccctgacgtacggtcctgtgagcttacatacaagggagcacatgaggatcacccatgtgcgactcccacagtcactggggagtcttccctctctctcgggtcaggagcccccccctgaacccaggataaccctcaaagtcggggggc

SEQ ID NO: 16485 - DNA, 258 bp, synthetic construct
  source 1..258: mol_type = other DNA
cgcggttctatctagttacgcgttaaaccaactagaagaagttcatctgtaccaccggcaaactgcccgtgccttggcccaccctcgtcaccaccctgacgtacggtcctgtgagcttacatacaagggagcacatgaggatcacccatgtgcgactcccacagtcactggggagtcttccctctctctctctctctctctcgggagcacatgaggatcacccatgtgcgactcccacagtcactggggagtcttccc

SEQ ID NO: 16486 - DNA, 316 bp, synthetic construct
  source 1..316: mol_type = other DNA
cgcggttctatctagttacgcgttaaaccaactagaagaagttcatctgtaccaccggcaaactgcccgtgccttggcccaccctcgtcaccaccctgacgtacggtcctgtgagcttacatacaagggagcacatgaggatcacccatgtgcgactcccacagtcactggggagtcttccctctctctctctctctctctcgggagcacatgaggatcacccatgtgcgactcccacagtcactggggagtcttccctctctctcgggtcaggagcccccccctgaacccaggataaccctcaaagtcggggggc

SEQ ID NO: 16487 - DNA, 157 bp, synthetic construct
  source 1..157: mol_type = other DNA
cgcggttctatctagttacgcgttaaaccaactagaagaagttcatctgtaccaccggcaaactgcccgtgccttggcccaccctcgtcaccaccctgacgtacggtcctgtgagcttacatacaactaacatagcacatgaggatcacccatgtgc

SEQ ID NO: 16488 - DNA, 215 bp, synthetic construct
  source 1..215: mol_type = other DNA
cgcggttctatctagttacgcgttaaaccaactagaagaagttcatctgtaccaccggcaaactgcccgtgccttggcccaccctcgtcaccaccctgacgtacggtcctgtgagcttacatacaactaacatagcacatgaggatcacccatgtgctctctctcgggtcaggagcccccccctgaacccaggataaccctcaaagtcggggggc

SEQ ID NO: 16489 - DNA, 190 bp, synthetic construct
  source 1..190: mol_type = other DNA
cgcggttctatctagttacgcgttaaaccaactagaagaagttcatctgtaccaccggcaaactgcccgtgccttggcccaccctcgtcaccaccctgacgtacggtcctgtgagcttacatacaactaacatagggagcacatgaggatcacccatgtgcgactcccacagtcactggggagtcttccc

SEQ ID NO: 16490 - DNA, 248 bp, synthetic construct
  source 1..248: mol_type = other DNA
cgcggttctatctagttacgcgttaaaccaactagaagaagttcatctgtaccaccggcaaactgcccgtgccttggcccaccctcgtcaccaccctgacgtacggtcctgtgagcttacatacaactaacatagggagcacatgaggatcacccatgtgcgactcccacagtcactggggagtcttccctctctctcgggtcaggagcccccccctgaacccaggataaccctcaaagtcggggggc

SEQ ID NO: 16491 - DNA, 266 bp, synthetic construct
  source 1..266: mol_type = other DNA
cgcggttctatctagttacgcgttaaaccaactagaagaagttcatctgtaccaccggcaaactgcccgtgccttggcccaccctcgtcaccaccctgacgtacggtcctgtgagcttacatacaactaacatagggagcacatgaggatcacccatgtgcgactcccacagtcactggggagtcttccctctctctctctctctctctcgggagcacatgaggatcacccatgtgcgactcccacagtcactggggagtcttccc

SEQ ID NO: 16492 - DNA, 324 bp, synthetic construct
  source 1..324: mol_type = other DNA
cgcggttctatctagttacgcgttaaaccaactagaagaagttcatctgtaccaccggcaaactgcccgtgccttggcccaccctcgtcaccaccctgacgtacggtcctgtgagcttacatacaactaacatagggagcacatgaggatcacccatgtgcgactcccacagtcactggggagtcttccctctctctctctctctctctcgggagcacatgaggatcacccatgtgcgactcccacagtcactggggagtcttccctctctctcgggtcaggagcccccccctgaacccaggataaccctcaaagtcggggggc

SEQ ID NO: 16493 - DNA, 148 bp, synthetic construct
  source 1..148: mol_type = other DNA
caagctgcccgtgcccgttttagagctagaaatagcaagttaaaataaggctagtccgttatcaacttgaaaaagtggcaccgagtcggtgcgaccaccctgacgtacggcgtgcagacatacaagcacatgaggatcacccatgtgc

SEQ ID NO: 16494 - DNA, 206 bp, synthetic construct
  source 1..206: mol_type = other DNA
caagctgcccgtgcccgttttagagctagaaatagcaagttaaaataaggctagtccgttatcaacttgaaaaagtggcaccgagtcggtgcgaccaccctgacgtacggcgtgcagacatacaagcacatgaggatcacccatgtgctctctctcgggtcaggagcccccccctgaacccaggataaccctcaaagtcggggggc

SEQ ID NO: 16495 - DNA, 181 bp, synthetic construct
  source 1..181: mol_type = other DNA
caagctgcccgtgcccgttttagagctagaaatagcaagttaaaataaggctagtccgttatcaacttgaaaaagtggcaccgagtcggtgcgaccaccctgacgtacggcgtgcagacatacaagggagcacatgaggatcacccatgtgcgactcccacagtcactggggagtcttccc

SEQ ID NO: 16496 - DNA, 239 bp, synthetic construct
  source 1..239: mol_type = other DNA
caagctgcccgtgcccgttttagagctagaaatagcaagttaaaataaggctagtccgttatcaacttgaaaaagtggcaccgagtcggtgcgaccaccctgacgtacggcgtgcagacatacaagggagcacatgaggatcacccatgtgcgactcccacagtcactggggagtcttccctctctctcgggtcaggagcccccccctgaacccaggataaccctcaaagtcggggggc

SEQ ID NO: 16497 - DNA, 257 bp, synthetic construct
  source 1..257: mol_type = other DNA
caagctgcccgtgcccgttttagagctagaaatagcaagttaaaataaggctagtccgttatcaacttgaaaaagtggcaccgagtcggtgcgaccaccctgacgtacggcgtgcagacatacaagggagcacatgaggatcacccatgtgcgactcccacagtcactggggagtcttccctctctctctctctctctctcgggagcacatgaggatcacccatgtgcgactcccacagtcactggggagtcttccc

SEQ ID NO: 16498 - DNA, 315 bp, synthetic construct
  source 1..315: mol_type = other DNA
caagctgcccgtgcccgttttagagctagaaatagcaagttaaaataaggctagtccgttatcaacttgaaaaagtggcaccgagtcggtgcgaccaccctgacgtacggcgtgcagacatacaagggagcacatgaggatcacccatgtgcgactcccacagtcactggggagtcttccctctctctctctctctctctcgggagcacatgaggatcacccatgtgcgactcccacagtcactggggagtcttccctctctctcgggtcaggagcccccccctgaacccaggataaccctcaaagtcggggggc

SEQ ID NO: 16499 - DNA, 156 bp, synthetic construct
  source 1..156: mol_type = other DNA
caagctgcccgtgcccgttttagagctagaaatagcaagttaaaataaggctagtccgttatcaacttgaaaaagtggcaccgagtcggtgcgaccaccctgacgtacggcgtgcagacatacaactaacatagcacatgaggatcacccatgtgc

SEQ ID NO: 16500 - DNA, 214 bp, synthetic construct
  source 1..214: mol_type = other DNA
caagctgcccgtgcccgttttagagctagaaatagcaagttaaaataaggctagtccgttatcaacttgaaaaagtggcaccgagtcggtgcgaccaccctgacgtacggcgtgcagacatacaactaacatagcacatgaggatcacccatgtgctctctctcgggtcaggagcccccccctgaacccaggataaccctcaaagtcggggggc

SEQ ID NO: 16501 - DNA, 189 bp, synthetic construct
  source 1..189: mol_type = other DNA
caagctgcccgtgcccgttttagagctagaaatagcaagttaaaataaggctagtccgttatcaacttgaaaaagtggcaccgagtcggtgcgaccaccctgacgtacggcgtgcagacatacaactaacatagggagcacatgaggatcacccatgtgcgactcccacagtcactggggagtcttccc

SEQ ID NO: 16502 - DNA, 247 bp, synthetic construct
  source 1..247: mol_type = other DNA
caagctgcccgtgcccgttttagagctagaaatagcaagttaaaataaggctagtccgttatcaacttgaaaaagtggcaccgagtcggtgcgaccaccctgacgtacggcgtgcagacatacaactaacatagggagcacatgaggatcacccatgtgcgactcccacagtcactggggagtcttccctctctctcgggtcaggagcccccccctgaacccaggataaccctcaaagtcggggggc

SEQ ID NO: 16503 - DNA, 265 bp, synthetic construct
  source 1..265: mol_type = other DNA
caagctgcccgtgcccgttttagagctagaaatagcaagttaaaataaggctagtccgttatcaacttgaaaaagtggcaccgagtcggtgcgaccaccctgacgtacggcgtgcagacatacaactaacatagggagcacatgaggatcacccatgtgcgactcccacagtcactggggagtcttccctctctctctctctctctctcgggagcacatgaggatcacccatgtgcgactcccacagtcactggggagtcttccc

SEQ ID NO: 16504 - DNA, 323 bp, synthetic construct
  source 1..323: mol_type = other DNA
caagctgcccgtgcccgttttagagctagaaatagcaagttaaaataaggctagtccgttatcaacttgaaaaagtggcaccgagtcggtgcgaccaccctgacgtacggcgtgcagacatacaactaacatagggagcacatgaggatcacccatgtgcgactcccacagtcactggggagtcttccctctctctctctctctctctcgggagcacatgaggatcacccatgtgcgactcccacagtcactggggagtcttccctctctctcgggtcaggagcccccccctgaacccaggataaccctcaaagtcggggggc

SEQ ID NO: 16505 - DNA, 153 bp, synthetic construct
  source 1..153: mol_type = other DNA
caagctgcccgtgcccgttttagagctagaaatagcaagttaaaataaggctagtccgttatcaacttgaaaaagtggcaccgagtcggtgcgaccaccctgacgtacggcgtgcagtgcttacatacaagcacatgaggatcacccatgtgc

SEQ ID NO: 16506 - DNA, 211 bp, synthetic construct
  source 1..211: mol_type = other DNA
caagctgcccgtgcccgttttagagctagaaatagcaagttaaaataaggctagtccgttatcaacttgaaaaagtggcaccgagtcggtgcgaccaccctgacgtacggcgtgcagtgcttacatacaagcacatgaggatcacccatgtgctctctctcgggtcaggagcccccccctgaacccaggataaccctcaaagtcggggggc

SEQ ID NO: 16507 - DNA, 186 bp, synthetic construct
  source 1..186: mol_type = other DNA
caagctgcccgtgcccgttttagagctagaaatagcaagttaaaataaggctagtccgttatcaacttgaaaaagtggcaccgagtcggtgcgaccaccctgacgtacggcgtgcagtgcttacatacaagggagcacatgaggatcacccatgtgcgactcccacagtcactggggagtcttccc

SEQ ID NO: 16508 - DNA, 244 bp, synthetic construct
  source 1..244: mol_type = other DNA
caagctgcccgtgcccgttttagagctagaaatagcaagttaaaataaggctagtccgttatcaacttgaaaaagtggcaccgagtcggtgcgaccaccctgacgtacggcgtgcagtgcttacatacaagggagcacatgaggatcacccatgtgcgactcccacagtcactggggagtcttccctctctctcgggtcaggagcccccccctgaacccaggataaccctcaaagtcggggggc

SEQ ID NO: 16509 - DNA, 262 bp, synthetic construct
  source 1..262: mol_type = other DNA
caagctgcccgtgcccgttttagagctagaaatagcaagttaaaataaggctagtccgttatcaacttgaaaaagtggcaccgagtcggtgcgaccaccctgacgtacggcgtgcagtgcttacatacaagggagcacatgaggatcacccatgtgcgactcccacagtcactggggagtcttccctctctctctctctctctctcgggagcacatgaggatcacccatgtgcgactcccacagtcactggggagtcttccc

SEQ ID NO: 16510 - DNA, 320 bp, synthetic construct
  source 1..320: mol_type = other DNA
caagctgcccgtgcccgttttagagctagaaatagcaagttaaaataaggctagtccgttatcaacttgaaaaagtggcaccgagtcggtgcgaccaccctgacgtacggcgtgcagtgcttacatacaagggagcacatgaggatcacccatgtgcgactcccacagtcactggggagtcttccctctctctctctctctctctcgggagcacatgaggatcacccatgtgcgactcccacagtcactggggagtcttccctctctctcgggtcaggagcccccccctgaacccaggataaccctcaaagtcggggggc

SEQ ID NO: 16511 - DNA, 161 bp, synthetic construct
  source 1..161: mol_type = other DNA
caagctgcccgtgcccgttttagagctagaaatagcaagttaaaataaggctagtccgttatcaacttgaaaaagtggcaccgagtcggtgcgaccaccctgacgtacggcgtgcagtgcttacatacaactaacatagcacatgaggatcacccatgtgc

SEQ ID NO: 16512 - DNA, 219 bp, synthetic construct
  source 1..219: mol_type = other DNA
caagctgcccgtgcccgttttagagctagaaatagcaagttaaaataaggctagtccgttatcaacttgaaaaagtggcaccgagtcggtgcgaccaccctgacgtacggcgtgcagtgcttacatacaactaacatagcacatgaggatcacccatgtgctctctctcgggtcaggagcccccccctgaacccaggataaccctcaaagtcggggggc

SEQ ID NO: 16513 - DNA, 194 bp, synthetic construct
  source 1..194: mol_type = other DNA
caagctgcccgtgcccgttttagagctagaaatagcaagttaaaataaggctagtccgttatcaacttgaaaaagtggcaccgagtcggtgcgaccaccctgacgtacggcgtgcagtgcttacatacaactaacatagggagcacatgaggatcacccatgtgcgactcccacagtcactggggagtcttccc

SEQ ID NO: 16514 - DNA, 252 bp, synthetic construct
  source 1..252: mol_type = other DNA
caagctgcccgtgcccgttttagagctagaaatagcaagttaaaataaggctagtccgttatcaacttgaaaaagtggcaccgagtcggtgcgaccaccctgacgtacggcgtgcagtgcttacatacaactaacatagggagcacatgaggatcacccatgtgcgactcccacagtcactggggagtcttccctctctctcgggtcaggagcccccccctgaacccaggataaccctcaaagtcggggggc

SEQ ID NO: 16515 - DNA, 270 bp, synthetic construct
  source 1..270: mol_type = other DNA
caagctgcccgtgcccgttttagagctagaaatagcaagttaaaataaggctagtccgttatcaacttgaaaaagtggcaccgagtcggtgcgaccaccctgacgtacggcgtgcagtgcttacatacaactaacatagggagcacatgaggatcacccatgtgcgactcccacagtcactggggagtcttccctctctctctctctctctctcgggagcacatgaggatcacccatgtgcgactcccacagtcactggggagtcttccc

SEQ ID NO: 16516 - DNA, 328 bp, synthetic construct
  source 1..328: mol_type = other DNA
caagctgcccgtgcccgttttagagctagaaatagcaagttaaaataaggctagtccgttatcaacttgaaaaagtggcaccgagtcggtgcgaccaccctgacgtacggcgtgcagtgcttacatacaactaacatagggagcacatgaggatcacccatgtgcgactcccacagtcactggggagtcttccctctctctctctctctctctcgggagcacatgaggatcacccatgtgcgactcccacagtcactggggagtcttccctctctctcgggtcaggagcccccccctgaacccaggataaccctcaaagtcggggggc

SEQ ID NO: 16517 - DNA, 157 bp, synthetic construct
  source 1..157: mol_type = other DNA
caagctgcccgtgcccgttttagagctagaaatagcaagttaaaataaggctagtccgttatcaacttgaaaaagtggcaccgagtcggtgcgaccaccctgacgtacggcgtgcagtgcttcggcacatacaagcacatgaggatcacccatgtgc

SEQ ID NO: 16518 - DNA, 215 bp, synthetic construct
  source 1..215: mol_type = other DNA
caagctgcccgtgcccgttttagagctagaaatagcaagttaaaataaggctagtccgttatcaacttgaaaaagtggcaccgagtcggtgcgaccaccctgacgtacggcgtgcagtgcttcggcacatacaagcacatgaggatcacccatgtgctctctctcgggtcaggagcccccccctgaacccaggataaccctcaaagtcggggggc

SEQ ID NO: 16519 - DNA, 190 bp, synthetic construct
  source 1..190: mol_type = other DNA
caagctgcccgtgcccgttttagagctagaaatagcaagttaaaataaggctagtccgttatcaacttgaaaaagtggcaccgagtcggtgcgaccaccctgacgtacggcgtgcagtgcttcggcacatacaagggagcacatgaggatcacccatgtgcgactcccacagtcactggggagtcttccc

SEQ ID NO: 16520 - DNA, 248 bp, synthetic construct
  source 1..248: mol_type = other DNA
caagctgcccgtgcccgttttagagctagaaatagcaagttaaaataaggctagtccgttatcaacttgaaaaagtggcaccgagtcggtgcgaccaccctgacgtacggcgtgcagtgcttcggcacatacaagggagcacatgaggatcacccatgtgcgactcccacagtcactggggagtcttccctctctctcgggtcaggagcccccccctgaacccaggataaccctcaaagtcggggggc

SEQ ID NO: 16521 - DNA, 266 bp, synthetic construct
  source 1..266: mol_type = other DNA
caagctgcccgtgcccgttttagagctagaaatagcaagttaaaataaggctagtccgttatcaacttgaaaaagtggcaccgagtcggtgcgaccaccctgacgtacggcgtgcagtgcttcggcacatacaagggagcacatgaggatcacccatgtgcgactcccacagtcactggggagtcttccctctctctctctctctctctcgggagcacatgaggatcacccatgtgcgactcccacagtcactggggagtcttccc

SEQ ID NO: 16522 - DNA, 324 bp, synthetic construct
  source 1..324: mol_type = other DNA
caagctgcccgtgcccgttttagagctagaaatagcaagttaaaataaggctagtccgttatcaacttgaaaaagtggcaccgagtcggtgcgaccaccctgacgtacggcgtgcagtgcttcggcacatacaagggagcacatgaggatcacccatgtgcgactcccacagtcactggggagtcttccctctctctctctctctctctcgggagcacatgaggatcacccatgtgcgactcccacagtcactggggagtcttccctctctctcgggtcaggagcccccccctgaacccaggataaccctcaaagtcggggggc

SEQ ID NO: 16523 - DNA, 165 bp, synthetic construct
  source 1..165: mol_type = other DNA
caagctgcccgtgcccgttttagagctagaaatagcaagttaaaataaggctagtccgttatcaacttgaaaaagtggcaccgagtcggtgcgaccaccctgacgtacggcgtgcagtgcttcggcacatacaactaacatagcacatgaggatcacccatgtgc

SEQ ID NO: 16524 - DNA, 223 bp, synthetic construct
  source 1..223: mol_type = other DNA
caagctgcccgtgcccgttttagagctagaaatagcaagttaaaataaggctagtccgttatcaacttgaaaaagtggcaccgagtcggtgcgaccaccctgacgtacggcgtgcagtgcttcggcacatacaactaacatagcacatgaggatcacccatgtgctctctctcgggtcaggagcccccccctgaacccaggataaccctcaaagtcggggggc

SEQ ID NO: 16525 - DNA, 198 bp, synthetic construct
  source 1..198: mol_type = other DNA
caagctgcccgtgcccgttttagagctagaaatagcaagttaaaataaggctagtccgttatcaacttgaaaaagtggcaccgagtcggtgcgaccaccctgacgtacggcgtgcagtgcttcggcacatacaactaacatagggagcacatgaggatcacccatgtgcgactcccacagtcactggggagtcttccc

SEQ ID NO: 16526 - DNA, 256 bp, synthetic construct
  source 1..256: mol_type = other DNA
caagctgcccgtgcccgttttagagctagaaatagcaagttaaaataaggctagtccgttatcaacttgaaaaagtggcaccgagtcggtgcgaccaccctgacgtacggcgtgcagtgcttcggcacatacaactaacatagggagcacatgaggatcacccatgtgcgactcccacagtcactggggagtcttccctctctctcgggtcaggagcccccccctgaacccaggataaccctcaaagtcggggggc

SEQ ID NO: 16527 - DNA, 274 bp, synthetic construct
  source 1..274: mol_type = other DNA
caagctgcccgtgcccgttttagagctagaaatagcaagttaaaataaggctagtccgttatcaacttgaaaaagtggcaccgagtcggtgcgaccaccctgacgtacggcgtgcagtgcttcggcacatacaactaacatagggagcacatgaggatcacccatgtgcgactcccacagtcactggggagtcttccctctctctctctctctctctcgggagcacatgaggatcacccatgtgcgactcccacagtcactggggagtcttccc

SEQ ID NO: 16528 - DNA, 332 bp, synthetic construct
  source 1..332: mol_type = other DNA
caagctgcccgtgcccgttttagagctagaaatagcaagttaaaataaggctagtccgttatcaacttgaaaaagtggcaccgagtcggtgcgaccaccctgacgtacggcgtgcagtgcttcggcacatacaactaacatagggagcacatgaggatcacccatgtgcgactcccacagtcactggggagtcttccctctctctctctctctctctcgggagcacatgaggatcacccatgtgcgactcccacagtcactggggagtcttccctctctctcgggtcaggagcccccccctgaacccaggataaccctcaaagtcggggggc

SEQ ID NO: 16529 - DNA, 153 bp, synthetic construct
  source 1..153: mol_type = other DNA
caagctgcccgtgcccgttttagagctagaaatagcaagttaaaataaggctagtccgttatcaacttgaaaaagtggcaccgagtcggtgcgaccaccctgacgtacggtcctgtgagcttacatacaagcacatgaggatcacccatgtgc

SEQ ID NO: 16530 - DNA, 211 bp, synthetic construct
  source 1..211: mol_type = other DNA
caagctgcccgtgcccgttttagagctagaaatagcaagttaaaataaggctagtccgttatcaacttgaaaaagtggcaccgagtcggtgcgaccaccctgacgtacggtcctgtgagcttacatacaagcacatgaggatcacccatgtgctctctctcgggtcaggagcccccccctgaacccaggataaccctcaaagtcggggggc

SEQ ID NO: 16531 - DNA, 186 bp, synthetic construct
  source 1..186: mol_type = other DNA
caagctgcccgtgcccgttttagagctagaaatagcaagttaaaataaggctagtccgttatcaacttgaaaaagtggcaccgagtcggtgcgaccaccctgacgtacggtcctgtgagcttacatacaagggagcacatgaggatcacccatgtgcgactcccacagtcactggggagtcttccc

SEQ ID NO: 16532 - DNA, 244 bp, synthetic construct
  source 1..244: mol_type = other DNA
caagctgcccgtgcccgttttagagctagaaatagcaagttaaaataaggctagtccgttatcaacttgaaaaagtggcaccgagtcggtgcgaccaccctgacgtacggtcctgtgagcttacatacaagggagcacatgaggatcacccatgtgcgactcccacagtcactggggagtcttccctctctctcgggtcaggagcccccccctgaacccaggataaccctcaaagtcggggggc

SEQ ID NO: 16533 - DNA, 262 bp, synthetic construct
  source 1..262: mol_type = other DNA
caagctgcccgtgcccgttttagagctagaaatagcaagttaaaataaggctagtccgttatcaacttgaaaaagtggcaccgagtcggtgcgaccaccctgacgtacggtcctgtgagcttacatacaagggagcacatgaggatcacccatgtgcgactcccacagtcactggggagtcttccctctctctctctctctctctcgggagcacatgaggatcacccatgtgcgactcccacagtcactggggagtcttccc

SEQ ID NO: 16534 - DNA, 320 bp, synthetic construct
  source 1..320: mol_type = other DNA
caagctgcccgtgcccgttttagagctagaaatagcaagttaaaataaggctagtccgttatcaacttgaaaaagtggcaccgagtcggtgcgaccaccctgacgtacggtcctgtgagcttacatacaagggagcacatgaggatcacccatgtgcgactcccacagtcactggggagtcttccctctctctctctctctctctcgggagcacatgaggatcacccatgtgcgactcccacagtcactggggagtcttccctctctctcgggtcaggagcccccccctgaacccaggataaccctcaaagtcggggggc

SEQ ID NO: 16535 - DNA, 161 bp, synthetic construct
  source 1..161: mol_type = other DNA
caagctgcccgtgcccgttttagagctagaaatagcaagttaaaataaggctagtccgttatcaacttgaaaaagtggcaccgagtcggtgcgaccaccctgacgtacggtcctgtgagcttacatacaactaacatagcacatgaggatcacccatgtgc

SEQ ID NO: 16536 - DNA, 219 bp, synthetic construct
  source 1..219: mol_type = other DNA
caagctgcccgtgcccgttttagagctagaaatagcaagttaaaataaggctagtccgttatcaacttgaaaaagtggcaccgagtcggtgcgaccaccctgacgtacggtcctgtgagcttacatacaactaacatagcacatgaggatcacccatgtgctctctctcgggtcaggagcccccccctgaacccaggataaccctcaaagtcggggggc

SEQ ID NO: 16537 - DNA, 194 bp, synthetic construct
  source 1..194: mol_type = other DNA
caagctgcccgtgcccgttttagagctagaaatagcaagttaaaataaggctagtccgttatcaacttgaaaaagtggcaccgagtcggtgcgaccaccctgacgtacggtcctgtgagcttacatacaactaacatagggagcacatgaggatcacccatgtgcgactcccacagtcactggggagtcttccc

SEQ ID NO: 16538 - DNA, 252 bp, synthetic construct
  source 1..252: mol_type = other DNA
caagctgcccgtgcccgttttagagctagaaatagcaagttaaaataaggctagtccgttatcaacttgaaaaagtggcaccgagtcggtgcgaccaccctgacgtacggtcctgtgagcttacatacaactaacatagggagcacatgaggatcacccatgtgcgactcccacagtcactggggagtcttccctctctctcgggtcaggagcccccccctgaacccaggataaccctcaaagtcggggggc

SEQ ID NO: 16539 - skipped

SEQ ID NO: 16540 - DNA, 328 bp, synthetic construct
  source 1..328: mol_type = other DNA
caagctgcccgtgcccgttttagagctagaaatagcaagttaaaataaggctagtccgttatcaacttgaaaaagtggcaccgagtcggtgcgaccaccctgacgtacggtcctgtgagcttacatacaactaacatagggagcacatgaggatcacccatgtgcgactcccacagtcactggggagtcttccctctctctctctctctctctcgggagcacatgaggatcacccatgtgcgactcccacagtcactggggagtcttccctctctctcgggtcaggagcccccccctgaacccaggataaccctcaaagtcggggggc

SEQ ID NO: 16541 - DNA, 199 bp, synthetic construct
  source 1..199: mol_type = other DNA
agggcgatgccacctagttttagagctagaaatagcaagttaaaataaggctagtccgttatcaacttgaaaaagtggcaccgagtcggtgcgaagttcatctgtaccaccggcaaactgcccgtgccttggcccaccctcgtcaccaccctgacgtacggcgtgcagacatacaagcacatgaggatcacccatgtgc

SEQ ID NO: 16542 - DNA, 257 bp, synthetic construct
  source 1..257: mol_type = other DNA
agggcgatgccacctagttttagagctagaaatagcaagttaaaataaggctagtccgttatcaacttgaaaaagtggcaccgagtcggtgcgaagttcatctgtaccaccggcaaactgcccgtgccttggcccaccctcgtcaccaccctgacgtacggcgtgcagacatacaagcacatgaggatcacccatgtgctctctctcgggtcaggagcccccccctgaacccaggataaccctcaaagtcggggggc

SEQ ID NO: 16543 - DNA, 232 bp, synthetic construct
  source 1..232: mol_type = other DNA
agggcgatgccacctagttttagagctagaaatagcaagttaaaataaggctagtccgttatcaacttgaaaaagtggcaccgagtcggtgcgaagttcatctgtaccaccggcaaactgcccgtgccttggcccaccctcgtcaccaccctgacgtacggcgtgcagacatacaagggagcacatgaggatcacccatgtgcgactcccacagtcactggggagtcttccc

SEQ ID NO: 16544 - DNA, 290 bp, synthetic construct
  source 1..290: mol_type = other DNA
agggcgatgccacctagttttagagctagaaatagcaagttaaaataaggctagtccgttatcaacttgaaaaagtggcaccgagtcggtgcgaagttcatctgtaccaccggcaaactgcccgtgccttggcccaccctcgtcaccaccctgacgtacggcgtgcagacatacaagggagcacatgaggatcacccatgtgcgactcccacagtcactggggagtcttccctctctctcgggtcaggagcccccccctgaacccaggataaccctcaaagtcggggggc

SEQ ID NO: 16545 - DNA, 308 bp, synthetic construct
  source 1..308: mol_type = other DNA
agggcgatgccacctagttttagagctagaaatagcaagttaaaataaggctagtccgttatcaacttgaaaaagtggcaccgagtcggtgcgaagttcatctgtaccaccggcaaactgcccgtgccttggcccaccctcgtcaccaccctgacgtacggcgtgcagacatacaagggagcacatgaggatcacccatgtgcgactcccacagtcactggggagtcttccctctctctctctctctctctcgggagcacatgaggatcacccatgtgcgactcccacagtcactggggagtcttccc

SEQ ID NO: 16546 - DNA, 366 bp, synthetic construct
  source 1..366: mol_type = other DNA
agggcgatgccacctagttttagagctagaaatagcaagttaaaataaggctagtccgttatcaacttgaaaaagtggcaccgagtcggtgcgaagttcatctgtaccaccggcaaactgcccgtgccttggcccaccctcgtcaccaccctgacgtacggcgtgcagacatacaagggagcacatgaggatcacccatgtgcgactcccacagtcactggggagtcttccctctctctctctctctctctcgggagcacatgaggatcacccatgtgcgactcccacagtcactggggagtcttccctctctctcgggtcaggagcccccccctgaacccaggataaccctcaaagtcggggggc

SEQ ID NO: 16547 - DNA, 207 bp, synthetic construct
  source 1..207: mol_type = other DNA
agggcgatgccacctagttttagagctagaaatagcaagttaaaataaggctagtccgttatcaacttgaaaaagtggcaccgagtcggtgcgaagttcatctgtaccaccggcaaactgcccgtgccttggcccaccctcgtcaccaccctgacgtacggcgtgcagacatacaactaacatagcacatgaggatcacccatgtgc

SEQ ID NO: 16548 - DNA, 265 bp, synthetic construct
  source 1..265: mol_type = other DNA
agggcgatgccacctagttttagagctagaaatagcaagttaaaataaggctagtccgttatcaacttgaaaaagtggcaccgagtcggtgcgaagttcatctgtaccaccggcaaactgcccgtgccttggcccaccctcgtcaccaccctgacgtacggcgtgcagacatacaactaacatagcacatgaggatcacccatgtgctctctctcgggtcaggagcccccccctgaacccaggataaccctcaaagtcggggggc

SEQ ID NO: 16549 - DNA, 240 bp, synthetic construct
  source 1..240: mol_type = other DNA
agggcgatgccacctagttttagagctagaaatagcaagttaaaataaggctagtccgttatcaacttgaaaaagtggcaccgagtcggtgcgaagttcatctgtaccaccggcaaactgcccgtgccttggcccaccctcgtcaccaccctgacgtacggcgtgcagacatacaactaacatagggagcacatgaggatcacccatgtgcgactcccacagtcactggggagtcttccc

SEQ ID NO: 16550 - DNA, 298 bp, synthetic construct
  source 1..298: mol_type = other DNA
agggcgatgccacctagttttagagctagaaatagcaagttaaaataaggctagtccgttatcaacttgaaaaagtggcaccgagtcggtgcgaagttcatctgtaccaccggcaaactgcccgtgccttggcccaccctcgtcaccaccctgacgtacggcgtgcagacatacaactaacatagggagcacatgaggatcacccatgtgcgactcccacagtcactggggagtcttccctctctctcgggtcaggagcccccccctgaacccaggataaccctcaaagtcggggggc

SEQ ID NO: 16551 - DNA, 316 bp, synthetic construct
  source 1..316: mol_type = other DNA
agggcgatgccacctagttttagagctagaaatagcaagttaaaataaggctagtccgttatcaacttgaaaaagtggcaccgagtcggtgcgaagttcatctgtaccaccggcaaactgcccgtgccttggcccaccctcgtcaccaccctgacgtacggcgtgcagacatacaactaacatagggagcacatgaggatcacccatgtgcgactcccacagtcactggggagtcttccctctctctctctctctctctcgggagcacatgaggatcacccatgtgcgactcccacagtcactggggagtcttccc

SEQ ID NO: 16552 - skipped

SEQ ID NO: 16553 - DNA, 204 bp, synthetic construct
  source 1..204: mol_type = other DNA
agggcgatgccacctagttttagagctagaaatagcaagttaaaataaggctagtccgttatcaacttgaaaaagtggcaccgagtcggtgcgaagttcatctgtaccaccggcaaactgcccgtgccttggcccaccctcgtcaccaccctgacgtacggcgtgcagtgcttacatacaagcacatgaggatcacccatgtgc

SEQ ID NO: 16554 - DNA, 262 bp, synthetic construct
  source 1..262: mol_type = other DNA
agggcgatgccacctagttttagagctagaaatagcaagttaaaataaggctagtccgttatcaacttgaaaaagtggcaccgagtcggtgcgaagttcatctgtaccaccggcaaactgcccgtgccttggcccaccctcgtcaccaccctgacgtacggcgtgcagtgcttacatacaagcacatgaggatcacccatgtgctctctctcgggtcaggagcccccccctgaacccaggataaccctcaaagtcggggggc

SEQ ID NO: 16555 - DNA, 237 bp, synthetic construct
  source 1..237: mol_type = other DNA
agggcgatgccacctagttttagagctagaaatagcaagttaaaataaggctagtccgttatcaacttgaaaaagtggcaccgagtcggtgcgaagttcatctgtaccaccggcaaactgcccgtgccttggcccaccctcgtcaccaccctgacgtacggcgtgcagtgcttacatacaagggagcacatgaggatcacccatgtgcgactcccacagtcactggggagtcttccc

SEQ ID NO: 16556 - DNA, 295 bp, synthetic construct
  source 1..295: mol_type = other DNA
agggcgatgccacctagttttagagctagaaatagcaagttaaaataaggctagtccgttatcaacttgaaaaagtggcaccgagtcggtgcgaagttcatctgtaccaccggcaaactgcccgtgccttggcccaccctcgtcaccaccctgacgtacggcgtgcagtgcttacatacaagggagcacatgaggatcacccatgtgcgactcccacagtcactggggagtcttccctctctctcgggtcaggagcccccccctgaacccaggataaccctcaaagtcggggggc

SEQ ID NO: 16557 - DNA, 313 bp, synthetic construct
  source 1..313: mol_type = other DNA
agggcgatgccacctagttttagagctagaaatagcaagttaaaataaggctagtccgttatcaacttgaaaaagtggcaccgagtcggtgcgaagttcatctgtaccaccggcaaactgcccgtgccttggcccaccctcgtcaccaccctgacgtacggcgtgcagtgcttacatacaagggagcacatgaggatcacccatgtgcgactcccacagtcactggggagtcttccctctctctctctctctctctcgggagcacatgaggatcacccatgtgcgactcccacagtcactggggagtcttccc

SEQ ID NO: 16558 - DNA, 371 bp, synthetic construct
  source 1..371: mol_type = other DNA
agggcgatgccacctagttttagagctagaaatagcaagttaaaataaggctagtccgttatcaacttgaaaaagtggcaccgagtcggtgcgaagttcatctgtaccaccggcaaactgcccgtgccttggcccaccctcgtcaccaccctgacgtacggcgtgcagtgcttacatacaagggagcacatgaggatcacccatgtgcgactcccacagtcactggggagtcttccctctctctctctctctctctcgggagcacatgaggatcacccatgtgcgactcccacagtcactggggagtcttccctctctctcgggtcaggagcccccccctgaacccaggataaccctcaaagtcggggggc

SEQ ID NO: 16559 - DNA, 212 bp, synthetic construct
  source 1..212: mol_type = other DNA
agggcgatgccacctagttttagagctagaaatagcaagttaaaataaggctagtccgttatcaacttgaaaaagtggcaccgagtcggtgcgaagttcatctgtaccaccggcaaactgcccgtgccttggcccaccctcgtcaccaccctgacgtacggcgtgcagtgcttacatacaactaacatagcacatgaggatcacccatgtgc

SEQ ID NO: 16560 - DNA, 270 bp, synthetic construct
  source 1..270: mol_type = other DNA
agggcgatgccacctagttttagagctagaaatagcaagttaaaataaggctagtccgttatcaacttgaaaaagtggcaccgagtcggtgcgaagttcatctgtaccaccggcaaactgcccgtgccttggcccaccctcgtcaccaccctgacgtacggcgtgcagtgcttacatacaactaacatagcacatgaggatcacccatgtgctctctctcgggtcaggagcccccccctgaacccaggataaccctcaaagtcggggggc

SEQ ID NO: 16561 - DNA, 245 bp, synthetic construct
  source 1..245: mol_type = other DNA
agggcgatgccacctagttttagagctagaaatagcaagttaaaataaggctagtccgttatcaacttgaaaaagtggcaccgagtcggtgcgaagttcatctgtaccaccggcaaactgcccgtgccttggcccaccctcgtcaccaccctgacgtacggcgtgcagtgcttacatacaactaacatagggagcacatgaggatcacccatgtgcgactcccacagtcactggggagtcttccc

SEQ ID NO: 16562 - DNA, 303 bp, synthetic construct
  source 1..303: mol_type = other DNA
agggcgatgccacctagttttagagctagaaatagcaagttaaaataaggctagtccgttatcaacttgaaaaagtggcaccgagtcggtgcgaagttcatctgtaccaccggcaaactgcccgtgccttggcccaccctcgtcaccaccctgacgtacggcgtgcagtgcttacatacaactaacatagggagcacatgaggatcacccatgtgcgactcccacagtcactggggagtcttccctctctctcgggtcaggagcccccccctgaacccaggataaccctcaaagtcggggggc

SEQ ID NO: 16563 - DNA, 321 bp, synthetic construct
  source 1..321: mol_type = other DNA
agggcgatgccacctagttttagagctagaaatagcaagttaaaataaggctagtccgttatcaacttgaaaaagtggcaccgagtcggtgcgaagttcatctgtaccaccggcaaactgcccgtgccttggcccaccctcgtcaccaccctgacgtacggcgtgcagtgcttacatacaactaacatagggagcacatgaggatcacccatgtgcgactcccacagtcactggggagtcttccctctctctctctctctctctcgggagcacatgaggatcacccatgtgcgactcccacagtcactggggagtcttccc

SEQ ID NO: 16564 - DNA, 379 bp, synthetic construct
  source 1..379: mol_type = other DNA
agggcgatgccacctagttttagagctagaaatagcaagttaaaataaggctagtccgttatcaacttgaaaaagtggcaccgagtcggtgcgaagttcatctgtaccaccggcaaactgcccgtgccttggcccaccctcgtcaccaccctgacgtacggcgtgcagtgcttacatacaactaacatagggagcacatgaggatcacccatgtgcgactcccacagtcactggggagtcttccctctctctctctctctctctcgggagcacatgaggatcacccatgtgcgactcccacagtcactggggagtcttccctctctctcgggtcaggagcccccccctgaacccaggataaccctcaaagtcggggggc

SEQ ID NO: 16565 - DNA, 208 bp, synthetic construct
  source 1..208: mol_type = other DNA
agggcgatgccacctagttttagagctagaaatagcaagttaaaataaggctagtccgttatcaacttgaaaaagtggcaccgagtcggtgcgaagttcatctgtaccaccggcaaactgcccgtgccttggcccaccctcgtcaccaccctgacgtacggcgtgcagtgcttcggcacatacaagcacatgaggatcacccatgtgc

SEQ ID NO: 16566 - DNA, 266 bp, synthetic construct
  source 1..266: mol_type = other DNA
agggcgatgccacctagttttagagctagaaatagcaagttaaaataaggctagtccgttatcaacttgaaaaagtggcaccgagtcggtgcgaagttcatctgtaccaccggcaaactgcccgtgccttggcccaccctcgtcaccaccctgacgtacggcgtgcagtgcttcggcacatacaagcacatgaggatcacccatgtgctctctctcgggtcaggagcccccccctgaacccaggataaccctcaaagtcggggggc

SEQ ID NO: 16567 - DNA, 241 bp, synthetic construct
  source 1..241: mol_type = other DNA
agggcgatgccacctagttttagagctagaaatagcaagttaaaataaggctagtccgttatcaacttgaaaaagtggcaccgagtcggtgcgaagttcatctgtaccaccggcaaactgcccgtgccttggcccaccctcgtcaccaccctgacgtacggcgtgcagtgcttcggcacatacaagggagcacatgaggatcacccatgtgcgactcccacagtcactggggagtcttccc

SEQ ID NO: 16568 - DNA, 299 bp, synthetic construct
  source 1..299: mol_type = other DNA
agggcgatgccacctagttttagagctagaaatagcaagttaaaataaggctagtccgttatcaacttgaaaaagtggcaccgagtcggtgcgaagttcatctgtaccaccggcaaactgcccgtgccttggcccaccctcgtcaccaccctgacgtacggcgtgcagtgcttcggcacatacaagggagcacatgaggatcacccatgtgcgactcccacagtcactggggagtcttccctctctctcgggtcaggagcccccccctgaacccaggataaccctcaaagtcggggggc

SEQ ID NO: 16569 - DNA, 317 bp, synthetic construct
  source 1..317: mol_type = other DNA
agggcgatgccacctagttttagagctagaaatagcaagttaaaataaggctagtccgttatcaacttgaaaaagtggcaccgagtcggtgcgaagttcatctgtaccaccggcaaactgcccgtgccttggcccaccctcgtcaccaccctgacgtacggcgtgcagtgcttcggcacatacaagggagcacatgaggatcacccatgtgcgactcccacagtcactggggagtcttccctctctctctctctctctctcgggagcacatgaggatcacccatgtgcgactcccacagtcactggggagtcttccc

SEQ ID NO: 16570 - DNA, 375 bp, synthetic construct
  source 1..375: mol_type = other DNA
agggcgatgccacctagttttagagctagaaatagcaagttaaaataaggctagtccgttatcaacttgaaaaagtggcaccgagtcggtgcgaagttcatctgtaccaccggcaaactgcccgtgccttggcccaccctcgtcaccaccctgacgtacggcgtgcagtgcttcggcacatacaagggagcacatgaggatcacccatgtgcgactcccacagtcactggggagtcttccctctctctctctctctctctcgggagcacatgaggatcacccatgtgcgactcccacagtcactggggagtcttccctctctctcgggtcaggagcccccccctgaacccaggataaccctcaaagtcggggggc

SEQ ID NO: 16571 - DNA, 216 bp, synthetic construct
  source 1..216: mol_type = other DNA
agggcgatgccacctagttttagagctagaaatagcaagttaaaataaggctagtccgttatcaacttgaaaaagtggcaccgagtcggtgcgaagttcatctgtaccaccggcaaactgcccgtgccttggcccaccctcgtcaccaccctgacgtacggcgtgcagtgcttcggcacatacaactaacatagcacatgaggatcacccatgtgc

SEQ ID NO: 16572 - DNA, 274 bp, synthetic construct
  source 1..274: mol_type = other DNA
agggcgatgccacctagttttagagctagaaatagcaagttaaaataaggctagtccgttatcaacttgaaaaagtggcaccgagtcggtgcgaagttcatctgtaccaccggcaaactgcccgtgccttggcccaccctcgtcaccaccctgacgtacggcgtgcagtgcttcggcacatacaactaacatagcacatgaggatcacccatgtgctctctctcgggtcaggagcccccccctgaacccaggataaccctcaaagtcggggggc

SEQ ID NO: 16573 - DNA, 249 bp, synthetic construct
  source 1..249: mol_type = other DNA
agggcgatgccacctagttttagagctagaaatagcaagttaaaataaggctagtccgttatcaacttgaaaaagtggcaccgagtcggtgcgaagttcatctgtaccaccggcaaactgcccgtgccttggcccaccctcgtcaccaccctgacgtacggcgtgcagtgcttcggcacatacaactaacatagggagcacatgaggatcacccatgtgcgactcccacagtcactggggagtcttccc

SEQ ID NO: 16574 - DNA, 307 bp, synthetic construct
  source 1..307: mol_type = other DNA
agggcgatgccacctagttttagagctagaaatagcaagttaaaataaggctagtccgttatcaacttgaaaaagtggcaccgagtcggtgcgaagttcatctgtaccaccggcaaactgcccgtgccttggcccaccctcgtcaccaccctgacgtacggcgtgcagtgcttcggcacatacaactaacatagggagcacatgaggatcacccatgtgcgactcccacagtcactggggagtcttccctctctctcgggtcaggagcccccccctgaacccaggataaccctcaaagtcggggggc

SEQ ID NO: 16575 - DNA, 325 bp, synthetic construct
  source 1..325: mol_type = other DNA
agggcgatgccacctagttttagagctagaaatagcaagttaaaataaggctagtccgttatcaacttgaaaaagtggcaccgagtcggtgcgaagttcatctgtaccaccggcaaactgcccgtgccttggcccaccctcgtcaccaccctgacgtacggcgtgcagtgcttcggcacatacaactaacatagggagcacatgaggatcacccatgtgcgactcccacagtcactggggagtcttccctctctctctctctctctctcgggagcacatgaggatcacccatgtgcgactcccacagtcactggggagtcttccc

SEQ ID NO: 16576 - DNA, 383 bp, synthetic construct
  source 1..383: mol_type = other DNA
agggcgatgccacctagttttagagctagaaatagcaagttaaaataaggctagtccgttatcaacttgaaaaagtggcaccgagtcggtgcgaagttcatctgtaccaccggcaaactgcccgtgccttggcccaccctcgtcaccaccctgacgtacggcgtgcagtgcttcggcacatacaactaacatagggagcacatgaggatcacccatgtgcgactcccacagtcactggggagtcttccctctctctctctctctctctcgggagcacatgaggatcacccatgtgcgactcccacagtcactggggagtcttccctctctctcgggtcaggagcccccccctgaacccaggataaccctcaaagtcggggggc

SEQ ID NO: 16577 - DNA, 204 bp, synthetic construct
  source 1..204: mol_type = other DNA
agggcgatgccacctagttttagagctagaaatagcaagttaaaataaggctagtccgttatcaacttgaaaaagtggcaccgagtcggtgcgaagttcatctgtaccaccggcaaactgcccgtgccttggcccaccctcgtcaccaccctgacgtacggtcctgtgagcttacatacaagcacatgaggatcacccatgtgc

SEQ ID NO: 16578 - DNA, 262 bp, synthetic construct
  source 1..262: mol_type = other DNA
agggcgatgccacctagttttagagctagaaatagcaagttaaaataaggctagtccgttatcaacttgaaaaagtggcaccgagtcggtgcgaagttcatctgtaccaccggcaaactgcccgtgccttggcccaccctcgtcaccaccctgacgtacggtcctgtgagcttacatacaagcacatgaggatcacccatgtgctctctctcgggtcaggagcccccccctgaacccaggataaccctcaaagtcggggggc

SEQ ID NO: 16579 - DNA, 237 bp, synthetic construct
  source 1..237: mol_type = other DNA
agggcgatgccacctagttttagagctagaaatagcaagttaaaataaggctagtccgttatcaacttgaaaaagtggcaccgagtcggtgcgaagttcatctgtaccaccggcaaactgcccgtgccttggcccaccctcgtcaccaccctgacgtacggtcctgtgagcttacatacaagggagcacatgaggatcacccatgtgcgactcccacagtcactggggagtcttccc

SEQ ID NO: 16580 - DNA, 295 bp, synthetic construct
  source 1..295: mol_type = other DNA
agggcgatgccacctagttttagagctagaaatagcaagttaaaataaggctagtccgttatcaacttgaaaaagtggcaccgagtcggtgcgaagttcatctgtaccaccggcaaactgcccgtgccttggcccaccctcgtcaccaccctgacgtacggtcctgtgagcttacatacaagggagcacatgaggatcacccatgtgcgactcccacagtcactggggagtcttccctctctctcgggtcaggagcccccccctgaacccaggataaccctcaaagtcggggggc

SEQ ID NO: 16581 - DNA, 313 bp, synthetic construct
  source 1..313: mol_type = other DNA
agggcgatgccacctagttttagagctagaaatagcaagttaaaataaggctagtccgttatcaacttgaaaaagtggcaccgagtcggtgcgaagttcatctgtaccaccggcaaactgcccgtgccttggcccaccctcgtcaccaccctgacgtacggtcctgtgagcttacatacaagggagcacatgaggatcacccatgtgcgactcccacagtcactggggagtcttccctctctctctctctctctctcgggagcacatgaggatcacccatgtgcgactcccacagtcactggggagtcttccc

SEQ ID NO: 16582 - DNA, 371 bp, synthetic construct
  source 1..371: mol_type = other DNA
agggcgatgccacctagttttagagctagaaatagcaagttaaaataaggctagtccgttatcaacttgaaaaagtggcaccgagtcggtgcgaagttcatctgtaccaccggcaaactgcccgtgccttggcccaccctcgtcaccaccctgacgtacggtcctgtgagcttacatacaagggagcacatgaggatcacccatgtgcgactcccacagtcactggggagtcttccctctctctctctctctctctcgggagcacatgaggatcacccatgtgcgactcccacagtcactggggagtcttccctctctctcgggtcaggagcccccccctgaacccaggataaccctcaaagtcggggggc

SEQ ID NO: 16583 - DNA, 212 bp, synthetic construct
  source 1..212: mol_type = other DNA
agggcgatgccacctagttttagagctagaaatagcaagttaaaataaggctagtccgttatcaacttgaaaaagtggcaccgagtcggtgcgaagttcatctgtaccaccggcaaactgcccgtgccttggcccaccctcgtcaccaccctgacgtacggtcctgtgagcttacatacaactaacatagcacatgaggatcacccatgtgc

SEQ ID NO: 16584 - DNA, 270 bp, synthetic construct
  source 1..270: mol_type = other DNA
agggcgatgccacctagttttagagctagaaatagcaagttaaaataaggctagtccgttatcaacttgaaaaagtggcaccgagtcggtgcgaagttcatctgtaccaccggcaaactgcccgtgccttggcccaccctcgtcaccaccctgacgtacggtcctgtgagcttacatacaactaacatagcacatgaggatcacccatgtgctctctctcgggtcaggagcccccccctgaacccaggataaccctcaaagtcggggggc

SEQ ID NO: 16585 - DNA, 245 bp, synthetic construct
  source 1..245: mol_type = other DNA
agggcgatgccacctagttttagagctagaaatagcaagttaaaataaggctagtccgttatcaacttgaaaaagtggcaccgagtcggtgcgaagttcatctgtaccaccggcaaactgcccgtgccttggcccaccctcgtcaccaccctgacgtacggtcctgtgagcttacatacaactaacatagggagcacatgaggatcacccatgtgcgactcccacagtcactggggagtcttccc

SEQ ID NO: 16586 - DNA, 303 bp, synthetic construct
  source 1..303: mol_type = other DNA
agggcgatgccacctagttttagagctagaaatagcaagttaaaataaggctagtccgttatcaacttgaaaaagtggcaccgagtcggtgcgaagttcatctgtaccaccggcaaactgcccgtgccttggcccaccctcgtcaccaccctgacgtacggtcctgtgagcttacatacaactaacatagggagcacatgaggatcacccatgtgcgactcccacagtcactggggagtcttccctctctctcgggtcaggagcccccccctgaacccaggataaccctcaaagtcggggggc

SEQ ID NO: 16587 - DNA, 321 bp, synthetic construct
  source 1..321: mol_type = other DNA
agggcgatgccacctagttttagagctagaaatagcaagttaaaataaggctagtccgttatcaacttgaaaaagtggcaccgagtcggtgcgaagttcatctgtaccaccggcaaactgcccgtgccttggcccaccctcgtcaccaccctgacgtacggtcctgtgagcttacatacaactaacatagggagcacatgaggatcacccatgtgcgactcccacagtcactggggagtcttccctctctctctctctctctctcgggagcacatgaggatcacccatgtgcgactcccacagtcactggggagtcttccc

SEQ ID NO: 16588 - DNA, 379 bp, synthetic construct
  source 1..379: mol_type = other DNA
agggcgatgccacctagttttagagctagaaatagcaagttaaaataaggctagtccgttatcaacttgaaaaagtggcaccgagtcggtgcgaagttcatctgtaccaccggcaaactgcccgtgccttggcccaccctcgtcaccaccctgacgtacggtcctgtgagcttacatacaactaacatagggagcacatgaggatcacccatgtgcgactcccacagtcactggggagtcttccctctctctctctctctctctcgggagcacatgaggatcacccatgtgcgactcccacagtcactggggagtcttccctctctctcgggtcaggagcccccccctgaacccaggataaccctcaaagtcggggggc

SEQ ID NO: 16589 - DNA, 132 bp, synthetic construct
  source 1..132: mol_type = other DNA
gttttagagctagaaatagcaagttaaaataaggctagtccgttatcaacttgaaaaagtggcaccgagtcggtgcgaccaccctgacgtacggcgtgcagacatacaagcacatgaggatcacccatgtgc

SEQ ID NO: 16590 - DNA, 190 bp, synthetic construct
  source 1..190: mol_type = other DNA
gttttagagctagaaatagcaagttaaaataaggctagtccgttatcaacttgaaaaagtggcaccgagtcggtgcgaccaccctgacgtacggcgtgcagacatacaagcacatgaggatcacccatgtgctctctctcgggtcaggagcccccccctgaacccaggataaccctcaaagtcggggggc

SEQ ID NO: 16591 - DNA, 165 bp, synthetic construct
  source 1..165: mol_type = other DNA
gttttagagctagaaatagcaagttaaaataaggctagtccgttatcaacttgaaaaagtggcaccgagtcggtgcgaccaccctgacgtacggcgtgcagacatacaagggagcacatgaggatcacccatgtgcgactcccacagtcactggggagtcttccc

SEQ ID NO: 16592 - DNA, 223 bp, synthetic construct
  source 1..223: mol_type = other DNA
gttttagagctagaaatagcaagttaaaataaggctagtccgttatcaacttgaaaaagtggcaccgagtcggtgcgaccaccctgacgtacggcgtgcagacatacaagggagcacatgaggatcacccatgtgcgactcccacagtcactggggagtcttccctctctctcgggtcaggagcccccccctgaacccaggataaccctcaaagtcggggggc

SEQ ID NO: 16593 - DNA, 241 bp, synthetic construct
  source 1..241: mol_type = other DNA
gttttagagctagaaatagcaagttaaaataaggctagtccgttatcaacttgaaaaagtggcaccgagtcggtgcgaccaccctgacgtacggcgtgcagacatacaagggagcacatgaggatcacccatgtgcgactcccacagtcactggggagtcttccctctctctctctctctctctcgggagcacatgaggatcacccatgtgcgactcccacagtcactggggagtcttccc

SEQ ID NO: 16594 - DNA, 299 bp, synthetic construct
  source 1..299: mol_type = other DNA
gttttagagctagaaatagcaagttaaaataaggctagtccgttatcaacttgaaaaagtggcaccgagtcggtgcgaccaccctgacgtacggcgtgcagacatacaagggagcacatgaggatcacccatgtgcgactcccacagtcactggggagtcttccctctctctctctctctctctcgggagcacatgaggatcacccatgtgcgactcccacagtcactggggagtcttccctctctctcgggtcaggagcccccccctgaacccaggataaccctcaaagtcggggggc

SEQ ID NO: 16595 - DNA, 140 bp, synthetic construct
  source 1..140: mol_type = other DNA
gttttagagctagaaatagcaagttaaaataaggctagtccgttatcaacttgaaaaagtggcaccgagtcggtgcgaccaccctgacgtacggcgtgcagacatacaactaacatagcacatgaggatcacccatgtgc

SEQ ID NO: 16596 - DNA, 198 bp, synthetic construct
  source 1..198: mol_type = other DNA
gttttagagctagaaatagcaagttaaaataaggctagtccgttatcaacttgaaaaagtggcaccgagtcggtgcgaccaccctgacgtacggcgtgcagacatacaactaacatagcacatgaggatcacccatgtgctctctctcgggtcaggagcccccccctgaacccaggataaccctcaaagtcggggggc

SEQ ID NO: 16597 - DNA, 173 bp, synthetic construct
  source 1..173: mol_type = other DNA
gttttagagctagaaatagcaagttaaaataaggctagtccgttatcaacttgaaaaagtggcaccgagtcggtgcgaccaccctgacgtacggcgtgcagacatacaactaacatagggagcacatgaggatcacccatgtgcgactcccacagtcactggggagtcttccc

SEQ ID NO: 16598 - DNA, 231 bp, synthetic construct
  source 1..231: mol_type = other DNA
gttttagagctagaaatagcaagttaaaataaggctagtccgttatcaacttgaaaaagtggcaccgagtcggtgcgaccaccctgacgtacggcgtgcagacatacaactaacatagggagcacatgaggatcacccatgtgcgactcccacagtcactggggagtcttccctctctctcgggtcaggagcccccccctgaacccaggataaccctcaaagtcggggggc

SEQ ID NO: 16599 - DNA, 249 bp, synthetic construct
  source 1..249: mol_type = other DNA
gttttagagctagaaatagcaagttaaaataaggctagtccgttatcaacttgaaaaagtggcaccgagtcggtgcgaccaccctgacgtacggcgtgcagacatacaactaacatagggagcacatgaggatcacccatgtgcgactcccacagtcactggggagtcttccctctctctctctctctctctcgggagcacatgaggatcacccatgtgcgactcccacagtcactggggagtcttccc

SEQ ID NO: 16600 - DNA, 307 bp, synthetic construct
  source 1..307: mol_type = other DNA
gttttagagctagaaatagcaagttaaaataaggctagtccgttatcaacttgaaaaagtggcaccgagtcggtgcgaccaccctgacgtacggcgtgcagacatacaactaacatagggagcacatgaggatcacccatgtgcgactcccacagtcactggggagtcttccctctctctctctctctctctcgggagcacatgaggatcacccatgtgcgactcccacagtcactggggagtcttccctctctctcgggtcaggagcccccccctgaacccaggataaccctcaaagtcggggggc

SEQ ID NO: 16601 - DNA, 137 bp, synthetic construct
  source 1..137: mol_type = other DNA
gttttagagctagaaatagcaagttaaaataaggctagtccgttatcaacttgaaaaagtggcaccgagtcggtgcgaccaccctgacgtacggcgtgcagtgcttacatacaagcacatgaggatcacccatgtgc

SEQ ID NO: 16602 - DNA, 195 bp, synthetic construct
  source 1..195: mol_type = other DNA
gttttagagctagaaatagcaagttaaaataaggctagtccgttatcaacttgaaaaagtggcaccgagtcggtgcgaccaccctgacgtacggcgtgcagtgcttacatacaagcacatgaggatcacccatgtgctctctctcgggtcaggagcccccccctgaacccaggataaccctcaaagtcggggggc

SEQ ID NO: 16603 - DNA, 170 bp, synthetic construct
  source 1..170: mol_type = other DNA
gttttagagctagaaatagcaagttaaaataaggctagtccgttatcaacttgaaaaagtggcaccgagtcggtgcgaccaccctgacgtacggcgtgcagtgcttacatacaagggagcacatgaggatcacccatgtgcgactcccacagtcactggggagtcttccc

SEQ ID NO: 16604 - DNA, 228 bp, synthetic construct
  source 1..228: mol_type = other DNA
gttttagagctagaaatagcaagttaaaataaggctagtccgttatcaacttgaaaaagtggcaccgagtcggtgcgaccaccctgacgtacggcgtgcagtgcttacatacaagggagcacatgaggatcacccatgtgcgactcccacagtcactggggagtcttccctctctctcgggtcaggagcccccccctgaacccaggataaccctcaaagtcggggggc

SEQ ID NO: 16605 - DNA, 246 bp, synthetic construct
  source 1..246: mol_type = other DNA
gttttagagctagaaatagcaagttaaaataaggctagtccgttatcaacttgaaaaagtggcaccgagtcggtgcgaccaccctgacgtacggcgtgcagtgcttacatacaagggagcacatgaggatcacccatgtgcgactcccacagtcactggggagtcttccctctctctctctctctctctcgggagcacatgaggatcacccatgtgcgactcccacagtcactggggagtcttccc

SEQ ID NO: 16606 - DNA, 304 bp, synthetic construct
  source 1..304: mol_type = other DNA
gttttagagctagaaatagcaagttaaaataaggctagtccgttatcaacttgaaaaagtggcaccgagtcggtgcgaccaccctgacgtacggcgtgcagtgcttacatacaagggagcacatgaggatcacccatgtgcgactcccacagtcactggggagtcttccctctctctctctctctctctcgggagcacatgaggatcacccatgtgcgactcccacagtcactggggagtcttccctctctctcgggtcaggagcccccccctgaacccaggataaccctcaaagtcggggggc

SEQ ID NO: 16607 - DNA, 145 bp, synthetic construct
  source 1..145: mol_type = other DNA
gttttagagctagaaatagcaagttaaaataaggctagtccgttatcaacttgaaaaagtggcaccgagtcggtgcgaccaccctgacgtacggcgtgcagtgcttacatacaactaacatagcacatgaggatcacccatgtgc

SEQ ID NO: 16608 - DNA, 203 bp, synthetic construct
  source 1..203: mol_type = other DNA
gttttagagctagaaatagcaagttaaaataaggctagtccgttatcaacttgaaaaagtggcaccgagtcggtgcgaccaccctgacgtacggcgtgcagtgcttacatacaactaacatagcacatgaggatcacccatgtgctctctctcgggtcaggagcccccccctgaacccaggataaccctcaaagtcggggggc

SEQ ID NO: 16609 - DNA, 178 bp, synthetic construct
  source 1..178: mol_type = other DNA
gttttagagctagaaatagcaagttaaaataaggctagtccgttatcaacttgaaaaagtggcaccgagtcggtgcgaccaccctgacgtacggcgtgcagtgcttacatacaactaacatagggagcacatgaggatcacccatgtgcgactcccacagtcactggggagtcttccc

SEQ ID NO: 16610 - DNA, 236 bp, synthetic construct
  source 1..236: mol_type = other DNA
gttttagagctagaaatagcaagttaaaataaggctagtccgttatcaacttgaaaaagtggcaccgagtcggtgcgaccaccctgacgtacggcgtgcagtgcttacatacaactaacatagggagcacatgaggatcacccatgtgcgactcccacagtcactggggagtcttccctctctctcgggtcaggagcccccccctgaacccaggataaccctcaaagtcggggggc

SEQ ID NO: 16611 - DNA, 254 bp, synthetic construct
  source 1..254: mol_type = other DNA
gttttagagctagaaatagcaagttaaaataaggctagtccgttatcaacttgaaaaagtggcaccgagtcggtgcgaccaccctgacgtacggcgtgcagtgcttacatacaactaacatagggagcacatgaggatcacccatgtgcgactcccacagtcactggggagtcttccctctctctctctctctctctcgggagcacatgaggatcacccatgtgcgactcccacagtcactggggagtcttccc

SEQ ID NO: 16612 - DNA, 312 bp, synthetic construct
  source 1..312: mol_type = other DNA
gttttagagctagaaatagcaagttaaaataaggctagtccgttatcaacttgaaaaagtggcaccgagtcggtgcgaccaccctgacgtacggcgtgcagtgcttacatacaactaacatagggagcacatgaggatcacccatgtgcgactcccacagtcactggggagtcttccctctctctctctctctctctcgggagcacatgaggatcacccatgtgcgactcccacagtcactggggagtcttccctctctctcgggtcaggagcccccccctgaacccaggataaccctcaaagtcggggggc

SEQ ID NO: 16613 - DNA, 141 bp, synthetic construct
  source 1..141: mol_type = other DNA
gttttagagctagaaatagcaagttaaaataaggctagtccgttatcaacttgaaaaagtggcaccgagtcggtgcgaccaccctgacgtacggcgtgcagtgcttcggcacatacaagcacatgaggatcacccatgtgc

SEQ ID NO: 16614 - DNA, 199 bp, synthetic construct
  source 1..199: mol_type = other DNA
gttttagagctagaaatagcaagttaaaataaggctagtccgttatcaacttgaaaaagtggcaccgagtcggtgcgaccaccctgacgtacggcgtgcagtgcttcggcacatacaagcacatgaggatcacccatgtgctctctctcgggtcaggagcccccccctgaacccaggataaccctcaaagtcggggggc

SEQ ID NO: 16615 - DNA, 174 bp, synthetic construct
  source 1..174: mol_type = other DNA
gttttagagctagaaatagcaagttaaaataaggctagtccgttatcaacttgaaaaagtggcaccgagtcggtgcgaccaccctgacgtacggcgtgcagtgcttcggcacatacaagggagcacatgaggatcacccatgtgcgactcccacagtcactggggagtcttccc

SEQ ID NO: 16616 - DNA, 232 bp, synthetic construct
  source 1..232: mol_type = other DNA
gttttagagctagaaatagcaagttaaaataaggctagtccgttatcaacttgaaaaagtggcaccgagtcggtgcgaccaccctgacgtacggcgtgcagtgcttcggcacatacaagggagcacatgaggatcacccatgtgcgactcccacagtcactggggagtcttccctctctctcgggtcaggagcccccccctgaacccaggataaccctcaaagtcggggggc

SEQ ID NO: 16617 - DNA, 250 bp, synthetic construct
  source 1..250: mol_type = other DNA
gttttagagctagaaatagcaagttaaaataaggctagtccgttatcaacttgaaaaagtggcaccgagtcggtgcgaccaccctgacgtacggcgtgcagtgcttcggcacatacaagggagcacatgaggatcacccatgtgcgactcccacagtcactggggagtcttccctctctctctctctctctctcgggagcacatgaggatcacccatgtgcgactcccacagtcactggggagtcttccc

SEQ ID NO: 16618 - DNA, 308 bp, synthetic construct
  source 1..308: mol_type = other DNA
gttttagagctagaaatagcaagttaaaataaggctagtccgttatcaacttgaaaaagtggcaccgagtcggtgcgaccaccctgacgtacggcgtgcagtgcttcggcacatacaagggagcacatgaggatcacccatgtgcgactcccacagtcactggggagtcttccctctctctctctctctctctcgggagcacatgaggatcacccatgtgcgactcccacagtcactggggagtcttccctctctctcgggtcaggagcccccccctgaacccaggataaccctcaaagtcggggggc

SEQ ID NO: 16619 - DNA, 149 bp, synthetic construct
  source 1..149: mol_type = other DNA
gttttagagctagaaatagcaagttaaaataaggctagtccgttatcaacttgaaaaagtggcaccgagtcggtgcgaccaccctgacgtacggcgtgcagtgcttcggcacatacaactaacatagcacatgaggatcacccatgtgc

SEQ ID NO: 16620 - DNA, 207 bp, synthetic construct
  source 1..207: mol_type = other DNA
gttttagagctagaaatagcaagttaaaataaggctagtccgttatcaacttgaaaaagtggcaccgagtcggtgcgaccaccctgacgtacggcgtgcagtgcttcggcacatacaactaacatagcacatgaggatcacccatgtgctctctctcgggtcaggagcccccccctgaacccaggataaccctcaaagtcggggggc

SEQ ID NO: 16621 - DNA, 182 bp, synthetic construct
  source 1..182: mol_type = other DNA
gttttagagctagaaatagcaagttaaaataaggctagtccgttatcaacttgaaaaagtggcaccgagtcggtgcgaccaccctgacgtacggcgtgcagtgcttcggcacatacaactaacatagggagcacatgaggatcacccatgtgcgactcccacagtcactggggagtcttccc

SEQ ID NO: 16622 - DNA, 240 bp, synthetic construct
  source 1..240: mol_type = other DNA
gttttagagctagaaatagcaagttaaaataaggctagtccgttatcaacttgaaaaagtggcaccgagtcggtgcgaccaccctgacgtacggcgtgcagtgcttcggcacatacaactaacatagggagcacatgaggatcacccatgtgcgactcccacagtcactggggagtcttccctctctctcgggtcaggagcccccccctgaacccaggataaccctcaaagtcggggggc

SEQ ID NO: 16623 - DNA, 258 bp, synthetic construct
  source 1..258: mol_type = other DNA
gttttagagctagaaatagcaagttaaaataaggctagtccgttatcaacttgaaaaagtggcaccgagtcggtgcgaccaccctgacgtacggcgtgcagtgcttcggcacatacaactaacatagggagcacatgaggatcacccatgtgcgactcccacagtcactggggagtcttccctctctctctctctctctctcgggagcacatgaggatcacccatgtgcgactcccacagtcactggggagtcttccc

SEQ ID NO: 16624 - DNA, 316 bp, synthetic construct
  source 1..316: mol_type = other DNA
gttttagagctagaaatagcaagttaaaataaggctagtccgttatcaacttgaaaaagtggcaccgagtcggtgcgaccaccctgacgtacggcgtgcagtgcttcggcacatacaactaacatagggagcacatgaggatcacccatgtgcgactcccacagtcactggggagtcttccctctctctctctctctctctcgggagcacatgaggatcacccatgtgcgactcccacagtcactggggagtcttccctctctctcgggtcaggagcccccccctgaacccaggataaccctcaaagtcggggggc

SEQ ID NO: 16625 - DNA, 137 bp, synthetic construct
  source 1..137: mol_type = other DNA
gttttagagctagaaatagcaagttaaaataaggctagtccgttatcaacttgaaaaagtggcaccgagtcggtgcgaccaccctgacgtacggtcctgtgagcttacatacaagcacatgaggatcacccatgtgc

SEQ ID NO: 16626 - DNA, 195 bp, synthetic construct
  source 1..195: mol_type = other DNA
gttttagagctagaaatagcaagttaaaataaggctagtccgttatcaacttgaaaaagtggcaccgagtcggtgcgaccaccctgacgtacggtcctgtgagcttacatacaagcacatgaggatcacccatgtgctctctctcgggtcaggagcccccccctgaacccaggataaccctcaaagtcggggggc

SEQ ID NO: 16627 - DNA, 170 bp, synthetic construct
  source 1..170: mol_type = other DNA
gttttagagctagaaatagcaagttaaaataaggctagtccgttatcaacttgaaaaagtggcaccgagtcggtgcgaccaccctgacgtacggtcctgtgagcttacatacaagggagcacatgaggatcacccatgtgcgactcccacagtcactggggagtcttccc

SEQ ID NO: 16628 - DNA, 228 bp, synthetic construct
  source 1..228: mol_type = other DNA
gttttagagctagaaatagcaagttaaaataaggctagtccgttatcaacttgaaaaagtggcaccgagtcggtgcgaccaccctgacgtacggtcctgtgagcttacatacaagggagcacatgaggatcacccatgtgcgactcccacagtcactggggagtcttccctctctctcgggtcaggagcccccccctgaacccaggataaccctcaaagtcggggggc

SEQ ID NO: 16629 - DNA, 246 bp, synthetic construct
  source 1..246: mol_type = other DNA
gttttagagctagaaatagcaagttaaaataaggctagtccgttatcaacttgaaaaagtggcaccgagtcggtgcgaccaccctgacgtacggtcctgtgagcttacatacaagggagcacatgaggatcacccatgtgcgactcccacagtcactggggagtcttccctctctctctctctctctctcgggagcacatgaggatcacccatgtgcgactcccacagtcactggggagtcttccc

SEQ ID NO: 16630 - DNA, 304 bp, synthetic construct
  source 1..304: mol_type = other DNA
gttttagagctagaaatagcaagttaaaataaggctagtccgttatcaacttgaaaaagtggcaccgagtcggtgcgaccaccctgacgtacggtcctgtgagcttacatacaagggagcacatgaggatcacccatgtgcgactcccacagtcactggggagtcttccctctctctctctctctctctcgggagcacatgaggatcacccatgtgcgactcccacagtcactggggagtcttccctctctctcgggtcaggagcccccccctgaacccaggataaccctcaaagtcggggggc

SEQ ID NO: 16631 - DNA, 145 bp, synthetic construct
  source 1..145: mol_type = other DNA
gttttagagctagaaatagcaagttaaaataaggctagtccgttatcaacttgaaaaagtggcaccgagtcggtgcgaccaccctgacgtacggtcctgtgagcttacatacaactaacatagcacatgaggatcacccatgtgc

SEQ ID NO: 16632 - skipped

SEQ ID NO: 16633 - DNA, 178 bp, synthetic construct
  source 1..178: mol_type = other DNA
gttttagagctagaaatagcaagttaaaataaggctagtccgttatcaacttgaaaaagtggcaccgagtcggtgcgaccaccctgacgtacggtcctgtgagcttacatacaactaacatagggagcacatgaggatcacccatgtgcgactcccacagtcactggggagtcttccc

SEQ ID NO: 16634 - DNA, 236 bp, synthetic construct
  source 1..236: mol_type = other DNA
gttttagagctagaaatagcaagttaaaataaggctagtccgttatcaacttgaaaaagtggcaccgagtcggtgcgaccaccctgacgtacggtcctgtgagcttacatacaactaacatagggagcacatgaggatcacccatgtgcgactcccacagtcactggggagtcttccctctctctcgggtcaggagcccccccctgaacccaggataaccctcaaagtcggggggc

SEQ ID NO: 16635 - DNA, 254 bp, synthetic construct
  source 1..254: mol_type = other DNA
gttttagagctagaaatagcaagttaaaataaggctagtccgttatcaacttgaaaaagtggcaccgagtcggtgcgaccaccctgacgtacggtcctgtgagcttacatacaactaacatagggagcacatgaggatcacccatgtgcgactcccacagtcactggggagtcttccctctctctctctctctctctcgggagcacatgaggatcacccatgtgcgactcccacagtcactggggagtcttccc

SEQ ID NO: 16636 - DNA, 312 bp, synthetic construct
  source 1..312: mol_type = other DNA
gttttagagctagaaatagcaagttaaaataaggctagtccgttatcaacttgaaaaagtggcaccgagtcggtgcgaccaccctgacgtacggtcctgtgagcttacatacaactaacatagggagcacatgaggatcacccatgtgcgactcccacagtcactggggagtcttccctctctctctctctctctctcgggagcacatgaggatcacccatgtgcgactcccacagtcactggggagtcttccctctctctcgggtcaggagcccccccctgaacccaggataaccctcaaagtcggggggc

SEQ ID NO: 16637 - DNA, 183 bp, synthetic construct
  source 1..183: mol_type = other DNA
gttttagagctagaaatagcaagttaaaataaggctagtccgttatcaacttgaaaaagtggcaccgagtcggtgcgaagttcatctgtaccaccggcaaactgcccgtgccttggcccaccctcgtcaccaccctgacgtacggcgtgcagacatacaagcacatgaggatcacccatgtgc

SEQ ID NO: 16638 - DNA, 241 bp, synthetic construct
  source 1..241: mol_type = other DNA
gttttagagctagaaatagcaagttaaaataaggctagtccgttatcaacttgaaaaagtggcaccgagtcggtgcgaagttcatctgtaccaccggcaaactgcccgtgccttggcccaccctcgtcaccaccctgacgtacggcgtgcagacatacaagcacatgaggatcacccatgtgctctctctcgggtcaggagcccccccctgaacccaggataaccctcaaagtcggggggc

SEQ ID NO: 16639 - DNA, 216 bp, synthetic construct
  source 1..216: mol_type = other DNA
gttttagagctagaaatagcaagttaaaataaggctagtccgttatcaacttgaaaaagtggcaccgagtcggtgcgaagttcatctgtaccaccggcaaactgcccgtgccttggcccaccctcgtcaccaccctgacgtacggcgtgcagacatacaagggagcacatgaggatcacccatgtgcgactcccacagtcactggggagtcttccc

SEQ ID NO: 16640 - DNA, 274 bp, synthetic construct
  source 1..274: mol_type = other DNA
gttttagagctagaaatagcaagttaaaataaggctagtccgttatcaacttgaaaaagtggcaccgagtcggtgcgaagttcatctgtaccaccggcaaactgcccgtgccttggcccaccctcgtcaccaccctgacgtacggcgtgcagacatacaagggagcacatgaggatcacccatgtgcgactcccacagtcactggggagtcttccctctctctcgggtcaggagcccccccctgaacccaggataaccctcaaagtcggggggc

SEQ ID NO: 16641 - DNA, 292 bp, synthetic construct
  source 1..292: mol_type = other DNA
gttttagagctagaaatagcaagttaaaataaggctagtccgttatcaacttgaaaaagtggcaccgagtcggtgcgaagttcatctgtaccaccggcaaactgcccgtgccttggcccaccctcgtcaccaccctgacgtacggcgtgcagacatacaagggagcacatgaggatcacccatgtgcgactcccacagtcactggggagtcttccctctctctctctctctctctcgggagcacatgaggatcacccatgtgcgactcccacagtcactggggagtcttccc

SEQ ID NO: 16642 - DNA, 350 bp, synthetic construct
  source 1..350: mol_type = other DNA
gttttagagctagaaatagcaagttaaaataaggctagtccgttatcaacttgaaaaagtggcaccgagtcggtgcgaagttcatctgtaccaccggcaaactgcccgtgccttggcccaccctcgtcaccaccctgacgtacggcgtgcagacatacaagggagcacatgaggatcacccatgtgcgactcccacagtcactggggagtcttccctctctctctctctctctctcgggagcacatgaggatcacccatgtgcgactcccacagtcactggggagtcttccctctctctcgggtcaggagcccccccctgaacccaggataaccctcaaagtcggggggc

SEQ ID NO: 16643 - DNA, 191 bp, synthetic construct
  source 1..191: mol_type = other DNA
gttttagagctagaaatagcaagttaaaataaggctagtccgttatcaacttgaaaaagtggcaccgagtcggtgcgaagttcatctgtaccaccggcaaactgcccgtgccttggcccaccctcgtcaccaccctgacgtacggcgtgcagacatacaactaacatagcacatgaggatcacccatgtgc

SEQ ID NO: 16644 - DNA, 249 bp, synthetic construct
  source 1..249: mol_type = other DNA
gttttagagctagaaatagcaagttaaaataaggctagtccgttatcaacttgaaaaagtggcaccgagtcggtgcgaagttcatctgtaccaccggcaaactgcccgtgccttggcccaccctcgtcaccaccctgacgtacggcgtgcagacatacaactaacatagcacatgaggatcacccatgtgctctctctcgggtcaggagcccccccctgaacccaggataaccctcaaagtcggggggc

SEQ ID NO: 16645 - DNA, 224 bp, synthetic construct
  source 1..224: mol_type = other DNA
gttttagagctagaaatagcaagttaaaataaggctagtccgttatcaacttgaaaaagtggcaccgagtcggtgcgaagttcatctgtaccaccggcaaactgcccgtgccttggcccaccctcgtcaccaccctgacgtacggcgtgcagacatacaactaacatagggagcacatgaggatcacccatgtgcgactcccacagtcactggggagtcttccc

SEQ ID NO: 16646 - DNA, 282 bp, synthetic construct
  source 1..282: mol_type = other DNA
gttttagagctagaaatagcaagttaaaataaggctagtccgttatcaacttgaaaaagtggcaccgagtcggtgcgaagttcatctgtaccaccggcaaactgcccgtgccttggcccaccctcgtcaccaccctgacgtacggcgtgcagacatacaactaacatagggagcacatgaggatcacccatgtgcgactcccacagtcactggggagtcttccctctctctcgggtcaggagcccccccctgaacccaggataaccctcaaagtcggggggc

SEQ ID NO: 16647 - DNA, 300 bp, synthetic construct
  source 1..300: mol_type = other DNA
gttttagagctagaaatagcaagttaaaataaggctagtccgttatcaacttgaaaaagtggcaccgagtcggtgcgaagttcatctgtaccaccggcaaactgcccgtgccttggcccaccctcgtcaccaccctgacgtacggcgtgcagacatacaactaacatagggagcacatgaggatcacccatgtgcgactcccacagtcactggggagtcttccctctctctctctctctctctcgggagcacatgaggatcacccatgtgcgactcccacagtcactggggagtcttccc

SEQ ID NO: 16648 - DNA, 358 bp, synthetic construct
  source 1..358: mol_type = other DNA
gttttagagctagaaatagcaagttaaaataaggctagtccgttatcaacttgaaaaagtggcaccgagtcggtgcgaagttcatctgtaccaccggcaaactgcccgtgccttggcccaccctcgtcaccaccctgacgtacggcgtgcagacatacaactaacatagggagcacatgaggatcacccatgtgcgactcccacagtcactggggagtcttccctctctctctctctctctctcgggagcacatgaggatcacccatgtgcgactcccacagtcactggggagtcttccctctctctcgggtcaggagcccccccctgaacccaggataaccctcaaagtcggggggc

SEQ ID NO: 16649 - DNA, 188 bp, synthetic construct
  source 1..188: mol_type = other DNA
gttttagagctagaaatagcaagttaaaataaggctagtccgttatcaacttgaaaaagtggcaccgagtcggtgcgaagttcatctgtaccaccggcaaactgcccgtgccttggcccaccctcgtcaccaccctgacgtacggcgtgcagtgcttacatacaagcacatgaggatcacccatgtgc

SEQ ID NO: 16650 - DNA, 246 bp, synthetic construct
  source 1..246: mol_type = other DNA
gttttagagctagaaatagcaagttaaaataaggctagtccgttatcaacttgaaaaagtggcaccgagtcggtgcgaagttcatctgtaccaccggcaaactgcccgtgccttggcccaccctcgtcaccaccctgacgtacggcgtgcagtgcttacatacaagcacatgaggatcacccatgtgctctctctcgggtcaggagcccccccctgaacccaggataaccctcaaagtcggggggc

SEQ ID NO: 16651 - DNA, 221 bp, synthetic construct
  source 1..221: mol_type = other DNA
gttttagagctagaaatagcaagttaaaataaggctagtccgttatcaacttgaaaaagtggcaccgagtcggtgcgaagttcatctgtaccaccggcaaactgcccgtgccttggcccaccctcgtcaccaccctgacgtacggcgtgcagtgcttacatacaagggagcacatgaggatcacccatgtgcgactcccacagtcactggggagtcttccc

SEQ ID NO: 16652 - DNA, 279 bp, synthetic construct
  source 1..279: mol_type = other DNA
gttttagagctagaaatagcaagttaaaataaggctagtccgttatcaacttgaaaaagtggcaccgagtcggtgcgaagttcatctgtaccaccggcaaactgcccgtgccttggcccaccctcgtcaccaccctgacgtacggcgtgcagtgcttacatacaagggagcacatgaggatcacccatgtgcgactcccacagtcactggggagtcttccctctctctcgggtcaggagcccccccctgaacccaggataaccctcaaagtcggggggc

SEQ ID NO: 16653 - DNA, 297 bp, synthetic construct
  source 1..297: mol_type = other DNA
gttttagagctagaaatagcaagttaaaataaggctagtccgttatcaacttgaaaaagtggcaccgagtcggtgcgaagttcatctgtaccaccggcaaactgcccgtgccttggcccaccctcgtcaccaccctgacgtacggcgtgcagtgcttacatacaagggagcacatgaggatcacccatgtgcgactcccacagtcactggggagtcttccctctctctctctctctctctcgggagcacatgaggatcacccatgtgcgactcccacagtcactggggagtcttccc

SEQ ID NO: 16654 - DNA, 355 bp, synthetic construct
  source 1..355: mol_type = other DNA
gttttagagctagaaatagcaagttaaaataaggctagtccgttatcaacttgaaaaagtggcaccgagtcggtgcgaagttcatctgtaccaccggcaaactgcccgtgccttggcccaccctcgtcaccaccctgacgtacggcgtgcagtgcttacatacaagggagcacatgaggatcacccatgtgcgactcccacagtcactggggagtcttccctctctctctctctctctctcgggagcacatgaggatcacccatgtgcgactcccacagtcactggggagtcttccctctctctcgggtcaggagcccccccctgaacccaggataaccctcaaagtcggggggc

SEQ ID NO: 16655 - DNA, 196 bp, synthetic construct
  source 1..196: mol_type = other DNA
gttttagagctagaaatagcaagttaaaataaggctagtccgttatcaacttgaaaaagtggcaccgagtcggtgcgaagttcatctgtaccaccggcaaactgcccgtgccttggcccaccctcgtcaccaccctgacgtacggcgtgcagtgcttacatacaactaacatagcacatgaggatcacccatgtgc

SEQ ID NO: 16656 - DNA, 254 bp, synthetic construct
  source 1..254: mol_type = other DNA
gttttagagctagaaatagcaagttaaaataaggctagtccgttatcaacttgaaaaagtggcaccgagtcggtgcgaagttcatctgtaccaccggcaaactgcccgtgccttggcccaccctcgtcaccaccctgacgtacggcgtgcagtgcttacatacaactaacatagcacatgaggatcacccatgtgctctctctcgggtcaggagcccccccctgaacccaggataaccctcaaagtcggggggc

SEQ ID NO: 16657 - DNA, 229 bp, synthetic construct
  source 1..229: mol_type = other DNA
gttttagagctagaaatagcaagttaaaataaggctagtccgttatcaacttgaaaaagtggcaccgagtcggtgcgaagttcatctgtaccaccggcaaactgcccgtgccttggcccaccctcgtcaccaccctgacgtacggcgtgcagtgcttacatacaactaacatagggagcacatgaggatcacccatgtgcgactcccacagtcactggggagtcttccc

SEQ ID NO: 16658 - DNA, 287 bp, synthetic construct
  source 1..287: mol_type = other DNA
gttttagagctagaaatagcaagttaaaataaggctagtccgttatcaacttgaaaaagtggcaccgagtcggtgcgaagttcatctgtaccaccggcaaactgcccgtgccttggcccaccctcgtcaccaccctgacgtacggcgtgcagtgcttacatacaactaacatagggagcacatgaggatcacccatgtgcgactcccacagtcactggggagtcttccctctctctcgggtcaggagcccccccctgaacccaggataaccctcaaagtcggggggc

SEQ ID NO: 16659 - DNA, 305 bp, synthetic construct
  source 1..305: mol_type = other DNA
gttttagagctagaaatagcaagttaaaataaggctagtccgttatcaacttgaaaaagtggcaccgagtcggtgcgaagttcatctgtaccaccggcaaactgcccgtgccttggcccaccctcgtcaccaccctgacgtacggcgtgcagtgcttacatacaactaacatagggagcacatgaggatcacccatgtgcgactcccacagtcactggggagtcttccctctctctctctctctctctcgggagcacatgaggatcacccatgtgcgactcccacagtcactggggagtcttccc

SEQ ID NO: 16660 - DNA, 363 bp, synthetic construct
  source 1..363: mol_type = other DNA
gttttagagctagaaatagcaagttaaaataaggctagtccgttatcaacttgaaaaagtggcaccgagtcggtgcgaagttcatctgtaccaccggcaaactgcccgtgccttggcccaccctcgtcaccaccctgacgtacggcgtgcagtgcttacatacaactaacatagggagcacatgaggatcacccatgtgcgactcccacagtcactggggagtcttccctctctctctctctctctctcgggagcacatgaggatcacccatgtgcgactcccacagtcactggggagtcttccctctctctcgggtcaggagcccccccctgaacccaggataaccctcaaagtcggggggc

SEQ ID NO: 16661 - DNA, 192 bp, synthetic construct
  source 1..192: mol_type = other DNA
gttttagagctagaaatagcaagttaaaataaggctagtccgttatcaacttgaaaaagtggcaccgagtcggtgcgaagttcatctgtaccaccggcaaactgcccgtgccttggcccaccctcgtcaccaccctgacgtacggcgtgcagtgcttcggcacatacaagcacatgaggatcacccatgtgc

SEQ ID NO: 16662 - DNA, 250 bp, synthetic construct
  source 1..250: mol_type = other DNA
gttttagagctagaaatagcaagttaaaataaggctagtccgttatcaacttgaaaaagtggcaccgagtcggtgcgaagttcatctgtaccaccggcaaactgcccgtgccttggcccaccctcgtcaccaccctgacgtacggcgtgcagtgcttcggcacatacaagcacatgaggatcacccatgtgctctctctcgggtcaggagcccccccctgaacccaggataaccctcaaagtcggggggc

SEQ ID NO: 16663 - DNA, 225 bp, synthetic construct
  source 1..225: mol_type = other DNA
gttttagagctagaaatagcaagttaaaataaggctagtccgttatcaacttgaaaaagtggcaccgagtcggtgcgaagttcatctgtaccaccggcaaactgcccgtgccttggcccaccctcgtcaccaccctgacgtacggcgtgcagtgcttcggcacatacaagggagcacatgaggatcacccatgtgcgactcccacagtcactggggagtcttccc

SEQ ID NO: 16664 - DNA, 283 bp, synthetic construct
  source 1..283: mol_type = other DNA
gttttagagctagaaatagcaagttaaaataaggctagtccgttatcaacttgaaaaagtggcaccgagtcggtgcgaagttcatctgtaccaccggcaaactgcccgtgccttggcccaccctcgtcaccaccctgacgtacggcgtgcagtgcttcggcacatacaagggagcacatgaggatcacccatgtgcgactcccacagtcactggggagtcttccctctctctcgggtcaggagcccccccctgaacccaggataaccctcaaagtcggggggc

SEQ ID NO: 16665 - DNA, 301 bp, synthetic construct
  source 1..301: mol_type = other DNA
gttttagagctagaaatagcaagttaaaataaggctagtccgttatcaacttgaaaaagtggcaccgagtcggtgcgaagttcatctgtaccaccggcaaactgcccgtgccttggcccaccctcgtcaccaccctgacgtacggcgtgcagtgcttcggcacatacaagggagcacatgaggatcacccatgtgcgactcccacagtcactggggagtcttccctctctctctctctctctctcgggagcacatgaggatcacccatgtgcgactcccacagtcactggggagtcttccc

SEQ ID NO: 16666 - DNA, 359 bp, synthetic construct
  source 1..359: mol_type = other DNA
gttttagagctagaaatagcaagttaaaataaggctagtccgttatcaacttgaaaaagtggcaccgagtcggtgcgaagttcatctgtaccaccggcaaactgcccgtgccttggcccaccctcgtcaccaccctgacgtacggcgtgcagtgcttcggcacatacaagggagcacatgaggatcacccatgtgcgactcccacagtcactggggagtcttccctctctctctctctctctctcgggagcacatgaggatcacccatgtgcgactcccacagtcactggggagtcttccctctctctcgggtcaggagcccccccctgaacccaggataaccctcaaagtcggggggc

SEQ ID NO: 16667 - DNA, 200 bp, synthetic construct
  source 1..200: mol_type = other DNA
gttttagagctagaaatagcaagttaaaataaggctagtccgttatcaacttgaaaaagtggcaccgagtcggtgcgaagttcatctgtaccaccggcaaactgcccgtgccttggcccaccctcgtcaccaccctgacgtacggcgtgcagtgcttcggcacatacaactaacatagcacatgaggatcacccatgtgc

SEQ ID NO: 16668 - DNA, 258 bp, synthetic construct
  source 1..258: mol_type = other DNA
gttttagagctagaaatagcaagttaaaataaggctagtccgttatcaacttgaaaaagtggcaccgagtcggtgcgaagttcatctgtaccaccggcaaactgcccgtgccttggcccaccctcgtcaccaccctgacgtacggcgtgcagtgcttcggcacatacaactaacatagcacatgaggatcacccatgtgctctctctcgggtcaggagcccccccctgaacccaggataaccctcaaagtcggggggc

SEQ ID NO: 16669 - DNA, 233 bp, synthetic construct
  source 1..233: mol_type = other DNA
gttttagagctagaaatagcaagttaaaataaggctagtccgttatcaacttgaaaaagtggcaccgagtcggtgcgaagttcatctgtaccaccggcaaactgcccgtgccttggcccaccctcgtcaccaccctgacgtacggcgtgcagtgcttcggcacatacaactaacatagggagcacatgaggatcacccatgtgcgactcccacagtcactggggagtcttccc

SEQ ID NO: 16670 - DNA, 291 bp, synthetic construct
  source 1..291: mol_type = other DNA
gttttagagctagaaatagcaagttaaaataaggctagtccgttatcaacttgaaaaagtggcaccgagtcggtgcgaagttcatctgtaccaccggcaaactgcccgtgccttggcccaccctcgtcaccaccctgacgtacggcgtgcagtgcttcggcacatacaactaacatagggagcacatgaggatcacccatgtgcgactcccacagtcactggggagtcttccctctctctcgggtcaggagcccccccctgaacccaggataaccctcaaagtcggggggc

SEQ ID NO: 16671 - DNA, 309 bp, synthetic construct
  source 1..309: mol_type = other DNA
gttttagagctagaaatagcaagttaaaataaggctagtccgttatcaacttgaaaaagtggcaccgagtcggtgcgaagttcatctgtaccaccggcaaactgcccgtgccttggcccaccctcgtcaccaccctgacgtacggcgtgcagtgcttcggcacatacaactaacatagggagcacatgaggatcacccatgtgcgactcccacagtcactggggagtcttccctctctctctctctctctctcgggagcacatgaggatcacccatgtgcgactcccacagtcactggggagtcttccc

SEQ ID NO: 16672 - DNA, 367 bp, synthetic construct
  source 1..367: mol_type = other DNA
gttttagagctagaaatagcaagttaaaataaggctagtccgttatcaacttgaaaaagtggcaccgagtcggtgcgaagttcatctgtaccaccggcaaactgcccgtgccttggcccaccctcgtcaccaccctgacgtacggcgtgcagtgcttcggcacatacaactaacatagggagcacatgaggatcacccatgtgcgactcccacagtcactggggagtcttccctctctctctctctctctctcgggagcacatgaggatcacccatgtgcgactcccacagtcactggggagtcttccctctctctcgggtcaggagcccccccctgaacccaggataaccctcaaagtcggggggc

SEQ ID NO: 16673 - DNA, 188 bp, synthetic construct
  source 1..188: mol_type = other DNA
gttttagagctagaaatagcaagttaaaataaggctagtccgttatcaacttgaaaaagtggcaccgagtcggtgcgaagttcatctgtaccaccggcaaactgcccgtgccttggcccaccctcgtcaccaccctgacgtacggtcctgtgagcttacatacaagcacatgaggatcacccatgtgc

SEQ ID NO: 16674 - DNA, 246 bp, synthetic construct
  source 1..246: mol_type = other DNA
gttttagagctagaaatagcaagttaaaataaggctagtccgttatcaacttgaaaaagtggcaccgagtcggtgcgaagttcatctgtaccaccggcaaactgcccgtgccttggcccaccctcgtcaccaccctgacgtacggtcctgtgagcttacatacaagcacatgaggatcacccatgtgctctctctcgggtcaggagcccccccctgaacccaggataaccctcaaagtcggggggc

SEQ ID NO: 16675 - DNA, 221 bp, synthetic construct
  source 1..221: mol_type = other DNA
gttttagagctagaaatagcaagttaaaataaggctagtccgttatcaacttgaaaaagtggcaccgagtcggtgcgaagttcatctgtaccaccggcaaactgcccgtgccttggcccaccctcgtcaccaccctgacgtacggtcctgtgagcttacatacaagggagcacatgaggatcacccatgtgcgactcccacagtcactggggagtcttccc

SEQ ID NO: 16676 - DNA, 279 bp, synthetic construct
  source 1..279: mol_type = other DNA
gttttagagctagaaatagcaagttaaaataaggctagtccgttatcaacttgaaaaagtggcaccgagtcggtgcgaagttcatctgtaccaccggcaaactgcccgtgccttggcccaccctcgtcaccaccctgacgtacggtcctgtgagcttacatacaagggagcacatgaggatcacccatgtgcgactcccacagtcactggggagtcttccctctctctcgggtcaggagcccccccctgaacccaggataaccctcaaagtcggggggc

SEQ ID NO: 16677 - DNA, 297 bp, synthetic construct
  source 1..297: mol_type = other DNA
gttttagagctagaaatagcaagttaaaataaggctagtccgttatcaacttgaaaaagtggcaccgagtcggtgcgaagttcatctgtaccaccggcaaactgcccgtgccttggcccaccctcgtcaccaccctgacgtacggtcctgtgagcttacatacaagggagcacatgaggatcacccatgtgcgactcccacagtcactggggagtcttccctctctctctctctctctctcgggagcacatgaggatcacccatgtgcgactcccacagtcactggggagtcttccc

SEQ ID NO: 16678 - DNA, 355 bp, synthetic construct
  source 1..355: mol_type = other DNA
gttttagagctagaaatagcaagttaaaataaggctagtccgttatcaacttgaaaaagtggcaccgagtcggtgcgaagttcatctgtaccaccggcaaactgcccgtgccttggcccaccctcgtcaccaccctgacgtacggtcctgtgagcttacatacaagggagcacatgaggatcacccatgtgcgactcccacagtcactggggagtcttccctctctctctctctctctctcgggagcacatgaggatcacccatgtgcgactcccacagtcactggggagtcttccctctctctcgggtcaggagcccccccctgaacccaggataaccctcaaagtcggggggc

SEQ ID NO: 16679 - DNA, 196 bp, synthetic construct
  source 1..196: mol_type = other DNA
gttttagagctagaaatagcaagttaaaataaggctagtccgttatcaacttgaaaaagtggcaccgagtcggtgcgaagttcatctgtaccaccggcaaactgcccgtgccttggcccaccctcgtcaccaccctgacgtacggtcctgtgagcttacatacaactaacatagcacatgaggatcacccatgtgc

SEQ ID NO: 16680 - DNA, 254 bp, synthetic construct
  source 1..254: mol_type = other DNA
gttttagagctagaaatagcaagttaaaataaggctagtccgttatcaacttgaaaaagtggcaccgagtcggtgcgaagttcatctgtaccaccggcaaactgcccgtgccttggcccaccctcgtcaccaccctgacgtacggtcctgtgagcttacatacaactaacatagcacatgaggatcacccatgtgctctctctcgggtcaggagcccccccctgaacccaggataaccctcaaagtcggggggc

SEQ ID NO: 16681 - DNA, 229 bp, synthetic construct
  source 1..229: mol_type = other DNA
gttttagagctagaaatagcaagttaaaataaggctagtccgttatcaacttgaaaaagtggcaccgagtcggtgcgaagttcatctgtaccaccggcaaactgcccgtgccttggcccaccctcgtcaccaccctgacgtacggtcctgtgagcttacatacaactaacatagggagcacatgaggatcacccatgtgcgactcccacagtcactggggagtcttccc

SEQ ID NO: 16682 - DNA, 287 bp, synthetic construct
  source 1..287: mol_type = other DNA
gttttagagctagaaatagcaagttaaaataaggctagtccgttatcaacttgaaaaagtggcaccgagtcggtgcgaagttcatctgtaccaccggcaaactgcccgtgccttggcccaccctcgtcaccaccctgacgtacggtcctgtgagcttacatacaactaacatagggagcacatgaggatcacccatgtgcgactcccacagtcactggggagtcttccctctctctcgggtcaggagcccccccctgaacccaggataaccctcaaagtcggggggc

SEQ ID NO: 16683 - DNA, 305 bp, synthetic construct
  source 1..305: mol_type = other DNA
gttttagagctagaaatagcaagttaaaataaggctagtccgttatcaacttgaaaaagtggcaccgagtcggtgcgaagttcatctgtaccaccggcaaactgcccgtgccttggcccaccctcgtcaccaccctgacgtacggtcctgtgagcttacatacaactaacatagggagcacatgaggatcacccatgtgcgactcccacagtcactggggagtcttccctctctctctctctctctctcgggagcacatgaggatcacccatgtgcgactcccacagtcactggggagtcttccc

SEQ ID NO: 16684 - DNA, 363 bp, synthetic construct
  source 1..363: mol_type = other DNA
gttttagagctagaaatagcaagttaaaataaggctagtccgttatcaacttgaaaaagtggcaccgagtcggtgcgaagttcatctgtaccaccggcaaactgcccgtgccttggcccaccctcgtcaccaccctgacgtacggtcctgtgagcttacatacaactaacatagggagcacatgaggatcacccatgtgcgactcccacagtcactggggagtcttccctctctctctctctctctctcgggagcacatgaggatcacccatgtgcgactcccacagtcactggggagtcttccctctctctcgggtcaggagcccccccctgaacccaggataaccctcaaagtcggggggc

SEQ ID NO: 16685-16700 - skipped (16 entries)

SEQ ID NO: 16701 - DNA, 96 bp, synthetic construct
  source 1..96: mol_type = other DNA
gccgaagcactgcacgccgtgttttagagctagaaatagcaagttaaaataaggctagtccgttatcaacttgaaaaagtggcaccgagtcggtgc

SEQ ID NO: 16702 - DNA, 20 bp, synthetic construct
  source 1..20: mol_type = other DNA
actaacatacaactaacata

SEQ ID NO: 16703 - DNA, 96 bp, synthetic construct; identical to SEQ ID NO: 16701
  source 1..96: mol_type = other DNA

SEQ ID NO: 16704 - DNA, 122 bp, synthetic construct
  source 1..122: mol_type = other DNA
gccgaagcactgcacgccgtgttttagagctagaaatagcaagttaaaataaggctagtccgttatcaacttgaaaaagtggcaccgagtcggtgcaccctgacgtacggcgtgcagtgctt

SEQ ID NO: 16705 - DNA, 122 bp, synthetic construct; identical to SEQ ID NO: 16704
  source 1..122: mol_type = other DNA

SEQ ID NO: 16706 - protein, 673 aa, synthetic construct
TAPLEEEYRLFLEAPIQNVTLLEQWKREIPKVWAEINPPGLASTQAPIHVQLLSTALPVRVRQYPITLEAKRSLRETIRKFRAAGILRPVHSPWNTPLLPVRKSGTSEYRMVQDLREVNKRVETIHPTVPNPYTLLSLLPPDRIWYSVLDLKDAFFCIPLAPESQLIFAFEWADAEEGESGQLTWTRLPQGFKNSPTLFNEALNRDLQGFRLDHPSVSLLQYVDDLLIAADTQAACLSATRDLLMTLAELGYRVSGKKAQLCQEEVTYLGFKIHKGSRSLSNSRTQAILQIPVPKTKRQVREFLGKIGYCRLFIPGFAELAQPLYAATRPGNDPLVWGEKEEEAFQSLKLALTQPPALALPSLDKPFQLFVEETSGAAKGVLTQALGPWKRPVAYLSKRLDPVAAGWPRCLRAIAAAALLTREASKLTFGQDIEITSSHNLESLLRSPPDKWLTNARITQYQVLLLDPPRVRFKQTAALNPATLLPETDDTLPIHHCLDTLDSLTSTRPDLTDQPLAQAEATLFTDGSSYIRDGKRYAGAAVVTLDSVIWAEPLPIGTSAQKAELIALTKALEWSKDKSVNIYTDSRYAFATLHVHGMIYRERGWLTAGGKAIKNAPEILALLTAVWLPKRVAVMHCKGHQKDDAPTSTGNRRADEVAREVAIRPLSTQATIS

SEQ ID NO: 16707 - protein, 671 aa, synthetic construct
TLNIEDEHRLHETSKEPDVSLGSTWLSDFPQAWAETGGMGLAVRQAPLIIPLKATSTPVSIKQYPMSQEARLGIKPHIQRLLDQGILVPCQSPWNTPLLPVKKPGTNDYRPVQDLREVNKRVEDIHPTVPNPYNLLSGLPPSHQWYTVLDLKDAFFCLRLHPTSQPLFAFEWRDPEMGISGQLTWTRLPQGFKNSPTLFNEALHRDLADFRIQHPDLILLQYVDDLLLAATSELDCQQGTRALLQTLGNLGYRASAKKAQICQKQVKYLGYLLKEGQRWLTEARKETVMGQPTPKTPRQLREFLGKAGFCRLFIPGFAEMAAPLYPLTKPGTLFNWGPDQQKAYQEIKQALLTAPALGLPDLTKPFELFVDEKQGYAKGVLTQKLGPWRRPVAYLSKKLDPVAAGWPPCLRMVAAIAVLTKDAGKLTMGQPLVILAPHAVEALVKQPPDRWLSNARMTHYQALLLDTDRVQFGPVVALNPATLLPLPEEGLQHNCLDILAEAHGTRPDLTDQPLPDADHTWYTDGSSLLQEGQRKAGAAVTTETEVIWAKALPAGTSAQRAELIALTQALKMAEGKKLNVYTDSRYAFATAHIHGEIYRRRGWLTSEGKEIKNKDEILALLKALFLPKRLSIIHCPGHQKGHSAEARGNRMADQAARKAAITETPDTSTLL

SEQ ID NO: 16708 - DNA, 96 bp, synthetic construct; identical to SEQ ID NO: 16701
  source 1..96: mol_type = other DNA

SEQ ID NO: 16709 - protein, 2122 aa, synthetic construct
MPAAKRVKLDGGDKKYSIGLDIGTNSVGWAVITDEYKVPSKKFKVLGNTDRHSIKKNLIGALLFDSGETAEATRLKRTARRRYTRRKNRICYLQEIFSNEMAKVDDSFFHRLEESFLVEEDKKHERHPIFGNIVDEVAYHEKYPTIYHLRKKLVDSTDKADLRLIYLALAHMIKFRGHFLIEGDLNPDNSDVDKLFIQLVQTYNQLFEENPINASGVDAKAILSARLSKSRRLENLIAQLPGEKKNGLFGNLIALSLGLTPNFKSNFDLAEDAKLQLSKDTYDDDLDNLLAQIGDQYADLFLAAKNLSDAILLSDILRVNTEITKAPLSASMIKRYDEHHQDLTLLKALVRQQLPEKYKEIFFDQSKNGYAGYIDGGASQEEFYKFIKPILEKMDGTEELLVKLNREDLLRKQRTFDNGSIPHQIHLGELHAILRRQEDFYPFLKDNREKIEKILTFRIPYYVGPLARGNSRFAWMTRKSEETITPWNFEEVVDKGASAQSFIERMTNFDKNLPNEKVLPKHSLLYEYFTVYNELTKVKYVTEGMRKPAFLSGEQKKAIVDLLFKTNRKVTVKQLKEDYFKKIECFDSVEISGVEDRFNASLGTYHDLLKIIKDKDFLDNEENEDILEDIVLTLTLFEDREMIEERLKTYAHLFDDKVMKQLKRRRYTGWGRLSRKLINGIRDKQSGKTILDFLKSDGFANRNFMQLIHDDSLTFKEDIQKAQVSGQGDSLHEHIANLAGSPAIKKGILQTVKVVDELVKVMGRHKPENIVIEMARENQTTQKGQKNSRERMKRIEEGIKELGSQILKEHPVENTQLQNEKLYLYYLQNGRDMYVDQELDINRLSDYDVDHIVPQSFLKDDSIDNKVLTRSDKARGKSDNVPSEEVVKKMKNYWRQLLNAKLITQRKFDNLTKAERGGLSELDKAGFIKRQLVETRQITKHVAQILDSRMNTKYDENDKLIREVKVITLKSKLVSDFRKDFQFYKVREINNYHHAHDAYLNAVVGTALIKKYPKLESEFVYGDYKVYDVRKMIAKSEQEIGKATAKYFFYSNIMNFFKTEITLANGEIRKRPLIETNGETGEIVWDKGRDFATVRKVLSMPQVNIVKKTEVQTGGFSKESILPKRNSDKLIARKKDWDPKKYGGFDSPTVAYSVLVVAKVEKGKSKKLKSVKELLGITIMERSSFEKNPIDFLEAKGYKEVKKDLIIKLPKYSLFELENGRKRMLASAGELQKGNELALPSKYVNFLYLASHYEKLKGSPEDNEQKQLFVEQHKHYLDEIIEQISEFSKRVILADANLDKVLSAYNKHRDKPIREQAENIIHLFTLTNLGAPAAFKYFDTTIDRKRYTSTKEVLDATLIHQSITGLYETRIDLSQLGGDSGGSSGGSSGSETPGTSESATPESSGGSSGGSSTLNIEDEYRLHETSKEPDVSLGSTWLSDFPQAWAETGGMGLAVRQAPLIIPLKATSTPVSIKQYPMSQEARLGIKPHIQRLLDQGILVPCQSPWNTPLLPVKKPGTNDYRPVQDLREVNKRVEDIHPTVPNPYNLLSGLPPSHQWYTVLDLKDAFFCLRLHPTSQPLFAFEWRDPEMGISGQLTWTRLPQGFKNSPTLFNEALHRDLADFRIQHPDLILLQYVDDLLLAATSELDCQQGTRALLQTLGNLGYRASAKKAQICQKQVKYLGYLLKEGQRWLTEARKETVMGQPTPKTPRQLREFLGKAGFCRLFIPGFAEMAAPLYPLTKPGTLFNWGPDQQKAYQEIKQALLTAPALGLPDLTKPFELFVDEKQGYAKGVLTQKLGPWRRPVAYLSKKLDPVAAGWPPCLRMVAAIAVLTKDAGKLTMGQPLVILAPHAVEALVKQPPDRWLSNARMTHYQALLLDTDRVQFGPVVALNPATLLPLPEEGLQHNCLDILAEAHGTRPDLTDQPLPDADHTWYTDGSSLLQEGQRKAGAAVTTETEVIWAKALPAGTSAQRAELIALTQALKMAEGKKLNVYTDSRYAFATAHIHGEIYRRRGWLTSEGKEIKNKDEILALLKALFLPKRLSIIHCPGHQKGHSAEARGNRMADQAARKAAITETPDTSTLLIENSSPSGGSKRTADGSEFEKRTADGSEFESPKKKAKVE

SEQ ID NO: 16710 - DNA, 156 bp, synthetic construct
  source 1..156: mol_type = other DNA
agaagtcgtgctgcttcatggttttagagctagaaatagcaagttaaaataaggctagtccgttatcaacttgaaaaagtggcaccgagtcggtgcaccctgacctacggcgtgcagtgcttcggccgctaccccgatcacatgaagcagcacgac

SEQ ID NO: 16711 - protein, 673 aa, synthetic construct; identical to SEQ ID NO: 16706

SEQ ID NO: 16712 - protein, 1367 aa, synthetic construct
DKKYSIGLDIGTNSVGWAVITDEYKVPSKKFKVLGNTDRHSIKKNLIGALLFDSGETAEATRLKRTARRRYTRRKNRICYLQEIFSNEMAKVDDSFFHRLEESFLVEEDKKHERHPIFGNIVDEVAYHEKYPTIYHLRKKLVDSTDKADLRLIYLALAHMIKFRGHFLIEGDLNPDNSDVDKLFIQLVQTYNQLFEENPINASGVDAKAILSARLSKSRRLENLIAQLPGEKKNGLFGNLIALSLGLTPNFKSNFDLAEDAKLQLSKDTYDDDLDNLLAQIGDQYADLFLAAKNLSDAILLSDILRVNTEITKAPLSASMIKRYDEHHQDLTLLKALVRQQLPEKYKEIFFDQSKNGYAGYIDGGASQEEFYKFIKPILEKMDGTEELLVKLNREDLLRKQRTFDNGSIPHQIHLGELHAILRRQEDFYPFLKDNREKIEKILTFRIPYYVGPLARGNSRFAWMTRKSEETITPWNFEEVVDKGASAQSFIERMTNFDKNLPNEKVLPKHSLLYEYFTVYNELTKVKYVTEGMRKPAFLSGEQKKAIVDLLFKTNRKVTVKQLKEDYFKKIECFDSVEISGVEDRFNASLGTYHDLLKIIKDKDFLDNEENEDILEDIVLTLTLFEDREMIEERLKTYAHLFDDKVMKQLKRRRYTGWGRLSRKLINGIRDKQSGKTILDFLKSDGFANRNFMQLIHDDSLTFKEDIQKAQVSGQGDSLHEHIANLAGSPAIKKGILQTVKVVDELVKVMGRHKPENIVIEMARENQTTQKGQKNSRERMKRIEEGIKELGSQILKEHPVENTQLQNEKLYLYYLQNGRDMYVDQELDINRLSDYDVDHIVPQSFLKDDSIDNKVLTRSDKARGKSDNVPSEEVVKKMKNYWRQLLNAKLITQRKFDNLTKAERGGLSELDKAGFIKRQLVETRQITKHVAQILDSRMNTKYDENDKLIREVKVITLKSKLVSDFRKDFQFYKVREINNYHHAHDAYLNAVVGTALIKKYPKLESEFVYGDYKVYDVRKMIAKSEQEIGKATAKYFFYSNIMNFFKTEITLANGEIRKRPLIETNGETGEIVWDKGRDFATVRKVLSMPQVNIVKKTEVQTGGFSKESILPKRNSDKLIARKKDWDPKKYGGFDSPTVAYSVLVVAKVEKGKSKKLKSVKELLGITIMERSSFEKNPIDFLEAKGYKEVKKDLIIKLPKYSLFELENGRKRMLASAGELQKGNELALPSKYVNFLYLASHYEKLKGSPEDNEQKQLFVEQHKHYLDEIIEQISEFSKRVILADANLDKVLSAYNKHRDKPIREQAENIIHLFTLTNLGAPAAFKYFDTTIDRKRYTSTKEVLDATLIHQSITGLYETRIDLSQLGGD

SEQ ID NO: 16713 - DNA, 122 bp, synthetic construct; identical to SEQ ID NO: 16704
  source 1..122: mol_type = other DNA

SEQ ID NO: 16714 - DNA, 96 bp, synthetic construct; identical to SEQ ID NO: 16701
  source 1..96: mol_type = other DNA

SEQ ID NO: 16715 - DNA, 96 bp, synthetic construct
  source 1..96: mol_type = other DNA
ccggcaagctgcccgtgcccgttttagagctagaaatagcaagttaaaataaggctagtccgttatcaacttgaaaaagtggcaccgagtcggtgc

SEQ ID NO: 16716-16800 - skipped (85 entries)

SEQ ID NO: 16801 - protein, 2403 aa, synthetic construct; identical to SEQ ID NO: 16152

SEQ ID NO: 16802 - protein, 2133 aa, synthetic construct; identical to SEQ ID NO: 1372

SEQ ID NO: 16803 - protein, 1413 aa, synthetic construct
MGKPIPNPLLGLDSTAPKKKRKVGIHGVPAADKKYSIGLDIGTNSVGWAVITDEYKVPSKKFKVLGNTDRHSIKKNLIGALLFDSGETAEATRLKRTARRRYTRRKNRICYLQEIFSNEMAKVDDSFFHRLEESFLVEEDKKHERHPIFGNIVDEVAYHEKYPTIYHLRKKLVDSTDKADLRLIYLALAHMIKFRGHFLIEGDLNPDNSDVDKLFIQLVQTYNQLFEENPINASGVDAKAILSARLSKSRRLENLIAQLPGEKKNGLFGNLIALSLGLTPNFKSNFDLAEDAKLQLSKDTYDDDLDNLLAQIGDQYADLFLAAKNLSDAILLSDILRVNTEITKAPLSASMIKRYDEHHQDLTLLKALVRQQLPEKYKEIFFDQSKNGYAGYIDGGASQEEFYKFIKPILEKMDGTEELLVKLNREDLLRKQRTFDNGSIPHQIHLGELHAILRRQEDFYPFLKDNREKIEKILTFRIPYYVGPLARGNSRFAWMTRKSEETITPWNFEEVVDKGASAQSFIERMTNFDKNLPNEKVLPKHSLLYEYFTVYNELTKVKYVTEGMRKPAFLSGEQKKAIVDLLFKTNRKVTVKQLKEDYFKKIECFDSVEISGVEDRFNASLGTYHDLLKIIKDKDFLDNEENEDILEDIVLTLTLFEDREMIEERLKTYAHLFDDKVMKQLKRRRYTGWGRLSRKLINGIRDKQSGKTILDFLKSDGFANRNFMQLIHDDSLTFKEDIQKAQVSGQGDSLHEHIANLAGSPAIKKGILQTVKVVDELVKVMGRHKPENIVIEMARENQTTQKGQKNSRERMKRIEEGIKELGSQILKEHPVENTQLQNEKLYLYYLQNGRDMYVDQELDINRLSDYDVDHIVPQSFLKDDSIDNKVLTRSDKARGKSDNVPSEEVVKKMKNYWRQLLNAKLITQRKFDNLTKAERGGLSELDKAGFIKRQLVETRQITKHVAQILDSRMNTKYDENDKLIREVKVITLKSKLVSDFRKDFQFYKVREINNYHHAHDAYLNAVVGTALIKKYPKLESEFVYGDYKVYDVRKMIAKSEQEIGKATAKYFFYSNIMNFFKTEITLANGEIRKRPLIETNGETGEIVWDKGRDFATVRKVLSMPQVNIVKKTEVQTGGFSKESILPKRNSDKLIARKKDWDPKKYGGFDSPTVAYSVLVVAKVEKGKSKKLKSVKELLGITIMERSSFEKNPIDFLEAKGYKEVKKDLIIKLPKYSLFELENGRKRMLASAGELQKGNELALPSKYVNFLYLASHYEKLKGSPEDNEQKQLFVEQHKHYLDEIIEQISEFSKRVILADANLDKVLSAYNKHRDKPIREQAENIIHLFTLTNLGAPAAFKYFDTTIDRKRYTSTKEVLDATLIHQSITGLYETRIDLSQLGGDSRADPKKKRKVEFSR

SEQ ID NO: 16804-16900 - skipped (97 entries)

SEQ ID NO: 16901 - protein, 8 aa, synthetic construct
EAAAKGSS

SEQ ID NO: 16902 - protein, 20 aa, synthetic construct
EAAAKEAAAKEAAAKEAAAK

SEQ ID NO: 16903 - protein, 8 aa, synthetic construct
PAPEAAAK

SEQ ID NO: 16904 - protein, 11 aa, synthetic construct
EAAAKPAPGGG

SEQ ID NO: 16905 - protein, 18 aa, synthetic construct
GSSGSSGSSGSSGSSGSS

SEQ ID NO: 16906 - protein, 11 aa, synthetic construct
PAPGGGEAAAK

SEQ ID NO: 16907 - protein, 46 aa, synthetic construct; identical to SEQ ID NO: 217

SEQ ID NO: 16908 - protein, 8 aa, synthetic construct
GSSEAAAK

SEQ ID NO: 16909 - protein, 11 aa, synthetic construct
EAAAKPAPGGS

SEQ ID NO: 16910 - protein, 18 aa, synthetic construct
GGSGGSGGSGGSGGSGGS

SEQ ID NO: 16911 - protein, 46 aa, synthetic construct; identical to SEQ ID NO: 217

SEQ ID NO: 16912 - protein, 46 aa, synthetic construct; identical to SEQ ID NO: 217

SEQ ID NO: 16913 - protein, 15 aa, synthetic construct
EAAAKEAAAKEAAAK

SEQ ID NO: 16914 - protein, 11 aa, synthetic construct
PAPEAAAKGSS

SEQ ID NO: 16915 - protein, 46 aa, synthetic construct; identical to SEQ ID NO: 217

SEQ ID NO: 16916 - protein, 15 aa, synthetic construct
EAAAKEAAAKEAAAK

SEQ ID NO: 16917 - protein, 46 aa, synthetic construct; identical to SEQ ID NO: 217

SEQ ID NO: 16918 - protein, 11 aa, synthetic construct
PAPAPAPAPAP

SEQ ID NO: 16919 - protein, 11 aa, synthetic construct
PAPAPAPAPAP

SEQ ID NO: 16920 - protein, 11 aa, synthetic construct
EAAAKGGSPAP

SEQ ID NO: 16921 - skipped

SEQ ID NO: 16922 - protein, 9 aa, synthetic construct
PAPGGGGSS

SEQ ID NO: 16923 - protein, 16 aa, synthetic construct
SGSETPGTSESATPES

SEQ ID NO: 16924 - protein, 11 aa, synthetic construct
PAPEAAAKGSS

SEQ ID NO: 16925 - protein, 11 aa, synthetic construct
EAAAKGGSGGG

SEQ ID NO: 16926 - protein, 10 aa, synthetic construct
GGGGSGGGGS

SEQ ID NO: 16927 - protein, 9 aa, synthetic construct
GGGPAPGSS

SEQ ID NO: 16928 - protein, 18 aa, synthetic construct
GGSGGSGGSGGSGGSGGS

SEQ ID NO: 16929 - protein, 30 aa, synthetic construct; identical to SEQ ID NO: 112

SEQ ID NO: 16930 - protein, 6 aa, synthetic construct
GSSPAP

SEQ ID NO: 16931 - protein, 11 aa, synthetic construct
EAAAKGSSPAP

SEQ ID NO: 16932 - protein, 11 aa, synthetic construct
GSSGGGEAAAK

SEQ ID NO: 16933 - protein, 18 aa, synthetic construct
GGSGGSGGSGGSGGSGGS

SEQ ID NO: 16934 - protein, 9 aa, synthetic construct
PAPAPAPAP

SEQ ID NO: 16935 - protein, 20 aa, synthetic construct
EAAAKEAAAKEAAAKEAAAK

SEQ ID NO: 16936 - protein, 11 aa, synthetic construct
EAAAKGGSPAP

SEQ ID NO: 16937 - protein, 11 aa, synthetic construct
PAPGGSEAAAK

SEQ ID NO: 16938 - protein, 30 aa, synthetic construct; identical to SEQ ID NO: 112

SEQ ID NO: 16939 - protein, 15 aa, synthetic construct
EAAAKGGGGSEAAAK

SEQ ID NO: 16940 - protein, 46 aa, synthetic construct; identical to SEQ ID NO: 217

SEQ ID NO: 16941 - skipped

SEQ ID NO: 16942 - protein, 12 aa, synthetic construct
GSSGSSGSSGSS

SEQ ID NO: 16943 - protein, 11 aa, synthetic construct
GSSPAPEAAAK

SEQ ID NO: 16944 - protein, 11 aa, synthetic construct
GGSPAPEAAAK

SEQ ID NO: 16945 - protein, 11 aa, synthetic construct
GGGEAAAKGGS

SEQ ID NO: 16946 - protein, 25 aa, synthetic construct
EAAAKEAAAKEAAAKEAAAKEAAAK

SEQ ID NO: 16947 - protein, 8 aa, synthetic construct
GGGGGGGG

SEQ ID NO: 16948 - protein, 6 aa, synthetic construct
GGGPAP

SEQ ID NO: 16949 - protein, 13 aa, synthetic construct
PAPAPAPAPAPAP

SEQ ID NO: 16950 - protein, 18 aa, synthetic construct
GGSGGSGGSGGSGGSGGS

SEQ ID NO: 16951 - skipped

SEQ ID NO: 16952 - protein, 18 aa, synthetic construct
GGSGGSGGSGGSGGSGGS

SEQ ID NO: 16953 - protein, 13 aa, synthetic construct
PAPAPAPAPAPAP

SEQ ID NO: 16954 - protein, 11 aa, synthetic construct
EAAAKPAPGSS

SEQ ID NO: 16955 - protein, 20 aa, synthetic construct
EAAAKEAAAKEAAAKEAAAK

SEQ ID NO: 16956 - protein, 8 aa, synthetic construct
EAAAKGGS

SEQ ID NO: 16957 - protein, 15 aa, synthetic construct
GGGGSEAAAKGGGGS

SEQ ID NO: 16958 - protein, 11 aa, synthetic construct
EAAAKPAPGSS

SEQ ID NO: 16959 - protein, 20 aa, synthetic construct
GGGGSGGGGSGGGGSGGGGS

SEQ ID NO: 16960 - protein, 11 aa, synthetic construct
EAAAKGGGGGS

SEQ ID NO: 16961 - protein, 6 aa, synthetic construct
GGSPAP

SEQ ID NO: 16962 - protein, 11 aa, synthetic construct
EAAAKGGGPAP

SEQ ID NO: 16963 - protein, 25 aa, synthetic construct
EAAAKEAAAKEAAAKEAAAKEAAAK

SEQ ID NO: 16964 - skipped

SEQ ID NO: 16965 - protein, 5 aa, synthetic construct
EAAAK

SEQ ID NO: 16966 - protein, 9 aa, synthetic construct
GGSGSSPAP

SEQ ID NO: 16967 - protein, 18 aa, synthetic construct
GSSGSSGSSGSSGSSGSS

SEQ ID NO: 16968 - protein, 11 aa, synthetic construct
GSSEAAAKGGG

SEQ ID NO: 16969 - protein, 11 aa, synthetic construct
GGGEAAAKGGS

SEQ ID NO: 16970 - protein, 15 aa, synthetic construct
EAAAKGGGGSEAAAK

SEQ ID NO: 16971 - protein, 15 aa, synthetic construct
GGGGSGGGGSGGGGS

SEQ ID NO: 16972 - protein, 20 aa, synthetic construct
GGGGSGGGGSGGGGSGGGGS

SEQ ID NO: 16973 - protein, 16 aa, synthetic construct
SGSETPGTSESATPES

SEQ ID NO: 16974 - protein, 11 aa, synthetic construct
GGGEAAAKPAP

SEQ ID NO: 16975 - protein, 11 aa, synthetic construct
EAAAKGSSGGG

SEQ ID NO: 16976 - protein, 25 aa, synthetic construct
EAAAKEAAAKEAAAKEAAAKEAAAK

SEQ ID NO: 16977 - protein, 12 aa, synthetic construct
GGSGGSGGSGGS

SEQ ID NO: 16978 - protein, 11 aa, synthetic construct
GGSEAAAKPAP

SEQ ID NO: 16979 - protein, 11 aa, synthetic construct
EAAAKGSSGGG

SEQ ID NO: 16980 - protein, 5 aa, synthetic construct
GGGGS

SEQ ID NO: 16981 - protein, 11 aa, synthetic construct
GGGEAAAKGSS

SEQ ID NO: 16982 - protein, 13 aa, synthetic construct
PAPAPAPAPAPAP

SEQ ID NO: 16983 - protein, 20 aa, synthetic construct
GGGGSGGGGSGGGGSGGGGS

SEQ ID NO: 16984 - protein, 11 aa, synthetic construct
GGGEAAAKGSS

SEQ ID NO: 16985 - protein, 9 aa, synthetic construct
PAPGGSGSS

SEQ ID NO: 16986 - protein, 12 aa, synthetic construct
GSAGSAAGSGEF

SEQ ID NO: 16987 - protein, 11 aa, synthetic construct
PAPGGSEAAAK

SEQ ID NO: 16988 - protein, 6 aa, synthetic construct
GGSGSS

SEQ ID NO: 16989 - protein, 9 aa, synthetic construct
PAPGGGGSS

SEQ ID NO: 16990 - protein, 9 aa, synthetic construct
GSSGSSGSS

SEQ ID NO: 16991 - protein, 46 aa, synthetic construct; identical to SEQ ID NO: 217

SEQ ID NO: 16992 - protein, 5 aa, synthetic construct
EAAAK

SEQ ID NO: 16993 - protein, 12 aa, synthetic construct
GSSGSSGSSGSS

SEQ ID NO: 16994 - protein, 9 aa, synthetic construct
PAPGGGGSS

SEQ ID NO: 16995 - protein, 11 aa, synthetic construct
GGGEAAAKGGS

SEQ ID NO: 16996 - protein, 11 aa, synthetic construct
PAPGGGEAAAK

SEQ ID NO: 16997 - protein, 9 aa, synthetic construct
GGGGGSPAP

SEQ ID NO: 16998 - protein, 8 aa, synthetic construct
EAAAKGGS

SEQ ID NO: 16999 - protein, 11 aa, synthetic construct
EAAAKGSSPAP

SEQ ID NO: 17000 - protein, 8 aa, synthetic construct
PAPEAAAK

SEQ ID NO: 17001 - protein, 12 aa, synthetic construct
GGSGGSGGSGGS

SEQ ID NO: 17002 - protein, 9 aa, synthetic construct
GGGPAPGGS

SEQ ID NO: 17003 - protein, 12 aa, synthetic construct
GSSGSSGSSGSS

SEQ ID NO: 17004 - protein, 11 aa, synthetic construct
EAAAKPAPGGS

SEQ ID NO: 17005 - protein, 6 aa, synthetic construct
GSSGSS

SEQ ID NO: 17006 - protein, 20 aa, synthetic construct
EAAAKEAAAKEAAAKEAAAK

SEQ ID NO: 17007 - protein, 20 aa, synthetic construct
EAAAKEAAAKEAAAKEAAAK

SEQ ID NO: 17008 - skipped

SEQ ID NO: 17009 - protein, 10 aa, synthetic construct
EAAAKEAAAK

SEQ ID NO: 17010 - protein, 11 aa, synthetic construct
PAPEAAAKGGG

SEQ ID NO: 17011 - protein, 11 aa, synthetic construct
GGSGSSEAAAK

SEQ ID NO: 17012 - protein, 25 aa, synthetic construct
EAAAKEAAAKEAAAKEAAAKEAAAK

SEQ ID NO: 17013 - protein, 11 aa, synthetic construct
GSSEAAAKPAP

SEQ ID NO: 17014 - protein, 25 aa, synthetic construct
EAAAKEAAAKEAAAKEAAAKEAAAK

SEQ ID NO: 17015 - protein, 8 aa, synthetic construct
EAAAKGGG

SEQ ID NO: 17016 - protein, 9 aa, synthetic construct
GSSPAPGGG

SEQ ID NO: 17017 - protein, 9 aa, synthetic construct
GGGPAPGSS

SEQ ID NO: 17018 - protein, 6 aa, synthetic construct
GGGGGS

SEQ ID NO: 17019 - protein, 30 aa, synthetic construct; identical to SEQ ID NO: 130

SEQ ID NO: 17020 - protein, 25 aa, synthetic construct
GGGGSGGGGSGGGGSGGGGSGGGGS

SEQ ID NO: 17021 - protein, 15 aa, synthetic construct
EAAAKEAAAKEAAAK

SEQ ID NO: 17022 - protein, 9 aa, synthetic construct
PAPAPAPAP

SEQ ID NO: 17023 - protein, 15 aa, synthetic construct
GSSGSSGSSGSSGSS

SEQ ID NO: 17024 - protein, 11 aa, synthetic construct
GGGGSSEAAAK

SEQ ID NO: 17025 - protein, 12 aa, synthetic construct
GGSGGSGGSGGS

SEQ ID NO: 17026 - protein, 11 aa, synthetic construct
PAPEAAAKGGS

SEQ ID NO: 17027 - protein, 30 aa, synthetic construct; identical to SEQ ID NO: 130

SEQ ID NO: 17028 - protein, 15 aa, synthetic construct
EAAAKGGGGSEAAAK

SEQ ID NO: 17029 - protein, 15 aa, synthetic construct
EAAAKGGGGSEAAAK

SEQ ID NO: 17030 - protein, 11 aa, synthetic construct
EAAAKGGGPAP

SEQ ID NO: 17031 - protein, 25 aa, synthetic construct
EAAAKEAAAKEAAAKEAAAKEAAAK

SEQ ID NO: 17032 - protein, 46 aa, synthetic construct; identical to SEQ ID NO: 217

SEQ ID NO: 17033 - protein, 11 aa, synthetic construct
GGSEAAAKGGG

SEQ ID NO: 17034 - protein, 30 aa, synthetic construct; identical to SEQ ID NO: 112

SEQ ID NO: 17035 - protein, 9 aa, synthetic construct
GGGPAPGGS

SEQ ID NO: 17036 - protein, 13 aa, synthetic construct
PAPAPAPAPAPAP

SEQ ID NO: 17037 - protein, 9 aa, synthetic construct
GGSGSSGGG

SEQ ID NO: 17038 - protein, 9 aa, synthetic construct
GGSGSSGGG

SEQ ID NO: 17039 - protein, 11 aa, synthetic construct
GGGEAAAKGGS

SEQ ID NO: 17040 - protein, 5 aa, synthetic construct
EAAAK

SEQ ID NO: 17041 - protein, 9 aa, synthetic construct
GGSPAPGSS

SEQ ID NO: 17042 - protein, 11 aa, synthetic construct
GGGGSSEAAAK

SEQ ID NO: 17043 - protein, 11 aa, synthetic construct
PAPAPAPAPAP

SEQ ID NO: 17044 - protein, 20 aa, synthetic construct
EAAAKEAAAKEAAAKEAAAK

SEQ ID NO: 17045 - protein, 9 aa, synthetic construct
GGGGGSGSS

SEQ ID NO: 17046 - protein, 11 aa, synthetic construct
EAAAKGSSPAP

SEQ ID NO: 17047 - protein, 13 aa, synthetic construct
PAPAPAPAPAPAP

SEQ ID NO: 17048 - protein, 9 aa, synthetic construct
GSSGGGGGS

SEQ ID NO: 17049 - protein, 9 aa, synthetic construct
PAPGSSGGG

SEQ ID NO: 17050 - protein, 9 aa, synthetic construct
GGSGGGPAP

SEQ ID NO: 17051 - protein, 7 aa, synthetic construct
GGGGGGG

SEQ ID NO: 17052 - protein, 18 aa, synthetic construct
GSSGSSGSSGSSGSSGSS

SEQ ID NO: 17053 - protein, 9 aa, synthetic construct
GGGPAPGGS

SEQ ID NO: 17054 - protein, 11 aa, synthetic construct
EAAAKGGSGGG

SEQ ID NO: 17055 - protein, 11 aa, synthetic construct
EAAAKGGGGSS

SEQ ID NO: 17056 - protein, 18 aa, synthetic construct
GSSGSSGSSGSSGSSGSS

SEQ ID NO: 17057 - protein, 20 aa, synthetic construct
GGGGSGGGGSGGGGSGGGGS

SEQ ID NO: 17058 - protein, 11 aa, synthetic construct
PAPAPAPAPAP

SEQ ID NO: 17059 - protein, 11 aa, synthetic construct
GGGEAAAKGGS

SEQ ID NO: 17060 - protein, 46 aa, synthetic construct; identical to SEQ ID NO: 217

SEQ ID NO: 17061 - protein, 12 aa, synthetic construct
GSAGSAAGSGEF

SEQ ID NO: 17062 - protein, 15 aa, synthetic construct
GSSGSSGSSGSSGSS

SEQ ID NO: 17063 - protein, 11 aa, synthetic construct
EAAAKGGSGSS

SEQ ID NO: 17064 - protein, 6 aa, synthetic construct
PAPGGG

SEQ ID NO: 17065 - protein, 9 aa, synthetic construct
GGGPAPGSS

SEQ ID NO: 17066 - protein, 11 aa, synthetic construct
PAPEAAAKGGS

SEQ ID NO: 17067 - protein, 11 aa, synthetic construct
PAPGGGEAAAK

SEQ ID NO: 17068 - protein, 11 aa, synthetic construct
GGGGSSEAAAK

SEQ ID NO: 17069 - protein, 5 aa, synthetic construct
EAAAK

SEQ ID NO: 17070 - protein, 30 aa, synthetic construct; identical to SEQ ID NO: 112

SEQ ID NO: 17071 - protein, 11 aa, synthetic construct
GGSGGGEAAAK

SEQ ID NO: 17072 - protein, 46 aa, synthetic construct; identical to SEQ ID NO: 217

SEQ ID NO: 17073 - protein, 9 aa, synthetic construct
GSSPAPGGS

SEQ ID NO: 17074 - protein, 9 aa, synthetic construct
GGSGGGPAP

SEQ ID NO: 17075 - protein, 5 aa, synthetic construct
EAAAK

SEQ ID NO: 17076 - skipped

SEQ ID NO: 17077 - protein, 9 aa, synthetic construct
GGSGGSGGS

SEQ ID NO: 17078 - protein, 20 aa, synthetic construct
EAAAKEAAAKEAAAKEAAAK

SEQ ID NO: 17079 - protein, 11 aa, synthetic construct
PAPEAAAKGGG

SEQ ID NO: 17080 - protein, 11 aa, synthetic construct
GGGGGSEAAAK

SEQ ID NO: 17081 - protein, 9 aa, synthetic construct
GGSGSSGGG

SEQ ID NO: 17082 - protein, 7 aa, synthetic construct
GGGGGGG

SEQ ID NO: 17083 - protein, 11 aa, synthetic construct
GSSEAAAKPAP

SEQ ID NO: 17084 - protein, 11 aa, synthetic construct
GGGGGSEAAAK

SEQ ID NO: 17085 - protein, 25 aa, synthetic construct
GGGGSGGGGSGGGGSGGGGSGGGGS

SEQ ID NO: 17086 - protein, 11 aa, synthetic construct
GGGEAAAKGGS

SEQ ID NO: 17087 - protein, 9 aa, synthetic construct
GGSPAPGGG

SEQ ID NO: 17088 - protein, 12 aa, synthetic construct
GSAGSAAGSGEF

SEQ ID NO: 17089 - protein, 5 aa, synthetic construct
EAAAK

SEQ ID NO: 17090 - protein, 11 aa, synthetic construct
EAAAKPAPGSS

SEQ ID NO: 17091 - protein, 30 aa, synthetic construct; identical to SEQ ID NO: 130

SEQ ID NO: 17092 - protein, 11 aa, synthetic construct
GGSEAAAKPAP

SEQ ID NO: 17093 - protein, 13 aa, synthetic construct
PAPAPAPAPAPAP

SEQ ID NO: 17094 - protein, 9 aa, synthetic construct
GGSPAPGGG

SEQ ID NO: 17095 - protein, 11 aa, synthetic construct
GGSEAAAKGGG

SEQ ID NO: 17096 - protein, 12 aa, synthetic construct
GGSGGSGGSGGS

SEQ ID NO: 17097 - protein, 30 aa, synthetic construct; identical to SEQ ID NO: 130

SEQ ID NO: 17098 - skipped

SEQ ID NO: 17099 - protein, 46 aa, synthetic construct; identical to SEQ ID NO: 217

SEQ ID NO: 17100 - protein, 12 aa, synthetic construct
GGSGGSGGSGGS

SEQ ID NO: 17101 - protein, 8 aa, synthetic construct
GGGEAAAK

SEQ ID NO: 17102 - protein, 18 aa, synthetic construct
GSSGSSGSSGSSGSSGSS

SEQ ID NO: 17103 - protein, 9 aa, synthetic construct
GSSGGGPAP

SEQ ID NO: 17104 - protein, 11 aa, synthetic construct
GSSEAAAKPAP

SEQ ID NO: 17105 - protein, 10 aa, synthetic construct
EAAAKEAAAK

SEQ ID NO: 17106 - protein, 30 aa, synthetic construct; identical to SEQ ID NO: 112

SEQ ID NO: 17107 - protein, 6 aa, synthetic construct
GGGGGG

SEQ ID NO: 17108 - protein, 9 aa, synthetic construct
GGSGSSGGG

SEQ ID NO: 17109 - protein, 11 aa, synthetic construct
GSSGGGEAAAK

SEQ ID NO: 17110 - protein, 11 aa, synthetic construct
PAPAPAPAPAP

SEQ ID NO: 17111 - protein, 30 aa, synthetic construct; identical to SEQ ID NO: 130

SEQ ID NO: 17112 - protein, 11 aa, synthetic construct
EAAAKGGSGGG

SEQ ID NO: 17113 - protein, 9 aa, synthetic construct
GGGGSSPAP

SEQ ID NO: 17114 - protein, 11 aa, synthetic construct
GGGEAAAKPAP

SEQ ID NO: 17115 - protein, 9 aa, synthetic construct
GGSGGGPAP

SEQ ID NO: 17116 - protein, 9 aa, synthetic construct
PAPGSSGGS

SEQ ID NO: 17117 - protein, 9 aa, synthetic construct
GGSGGGPAP

SEQ ID NO: 17118 - protein, 11 aa, synthetic construct
EAAAKGGSPAP

SEQ ID NO: 17119 - protein, 11 aa, synthetic construct
EAAAKGGSGGG

SEQ ID NO: 17120 - protein, 9 aa, synthetic construct
PAPGSSGGG

SEQ ID NO: 17121 - protein, 11 aa, synthetic construct
GSSEAAAKGGS

SEQ ID NO: 17122 - protein, 11 aa, synthetic construct
PAPGSSEAAAK

SEQ ID NO: 17123 - protein, 11 aa, synthetic construct
EAAAKGSSPAP

SEQ ID NO: 17124 - protein, 25 aa, synthetic construct
EAAAKEAAAKEAAAKEAAAKEAAAK

SEQ ID NO: 17125 - protein, 11 aa, synthetic construct
PAPGSSEAAAK

SEQ ID NO: 17126 - protein, 11 aa, synthetic construct
EAAAKGSSGGG

SEQ ID NO: 17127 - protein, 11 aa, synthetic construct
EAAAKGGGGGS

SEQ ID NO: 17128 - protein, 15 aa, synthetic construct
EAAAKEAAAKEAAAK

SEQ ID NO: 17129 - protein, 13 aa, synthetic construct
PAPAPAPAPAPAP

SEQ ID NO: 17130 - protein, 15 aa, synthetic construct
GGGGSGGGGSGGGGS

SEQ ID NO: 17131 - protein, 11 aa, synthetic construct
PAPGGSEAAAK

SEQ ID NO: 17132 - protein, 11 aa, synthetic construct
PAPGSSEAAAK

SEQ ID NO: 17133 - protein, 11 aa, synthetic construct
PAPEAAAKGSS

SEQ ID NO: 17134 - protein, 9 aa, synthetic construct
GGSPAPGSS

SEQ ID NO: 17135 - protein, 9 aa, synthetic construct
PAPGGSGGG

SEQ ID NO: 17136 - protein, 11 aa, synthetic construct
EAAAKGGSGSS

SEQ ID NO: 17137 - protein, 6 aa, synthetic construct
GGSGGG

SEQ ID NO: 17138 - protein, 11 aa, synthetic construct
GGSEAAAKGSS

SEQ ID NO: 17139 - protein, 46 aa, synthetic construct; identical to SEQ ID NO: 217

SEQ ID NO: 17140 - protein, 13 aa, synthetic construct
PAPAPAPAPAPAP

SEQ ID NO: 17141 - protein, 8 aa, synthetic construct
PAPEAAAK

SEQ ID NO: 17142 - protein, 11 aa, synthetic construct
GGSEAAAKGGG

SEQ ID NO: 17143 - protein, 6 aa, synthetic construct
GSSPAP

SEQ ID NO: 17144 - protein, 6 aa, synthetic construct
GGGGSS

SEQ ID NO: 17145 - protein, 11 aa, synthetic construct
GGGEAAAKPAP

SEQ ID NO: 17146 - protein, 11 aa, synthetic construct
EAAAKPAPGGS

SEQ ID NO: 17147 - protein, 11 aa, synthetic construct
EAAAKGGGPAP

SEQ ID NO: 17148 - protein, 11 aa, synthetic construct
PAPGGSEAAAK

SEQ ID NO: 17149 - protein, 9 aa, synthetic construct
PAPGGSGSS

SEQ ID NO: 17150 - protein, 9 aa, synthetic construct
PAPGGSGSS

SEQ ID NO: 17151 - protein, 9 aa, synthetic construct
GGSGGGPAP

SEQ ID NO: 17152 - protein, 20 aa, synthetic construct
EAAAKEAAAKEAAAKEAAAK

SEQ ID NO: 17153 - protein, 25 aa, synthetic construct
GGGGSGGGGSGGGGSGGGGSGGGGS

SEQ ID NO: 17154 - protein, 9 aa, synthetic construct
GGGGSSPAP

SEQ ID NO: 17155 - protein, 9 aa, synthetic construct
GSSGGGPAP

SEQ ID NO: 17156 - protein, 9 aa, synthetic construct
GGGGSSGGS

SEQ ID NO: 17157 - protein, 6 aa, synthetic construct
GGSGGG

SEQ ID NO: 17158 - protein, 9 aa, synthetic construct
GSSGGGGGS

SEQ ID NO: 17159 - protein, 33 aa, synthetic construct; identical to SEQ ID NO: 6

SEQ ID NO: 17160 - protein, 9 aa, synthetic construct
GGGGGSGSS

SEQ ID NO: 17161 - protein, 11 aa, synthetic construct
GGGEAAAKGGS

SEQ ID NO: 17162 - protein, 6 aa, synthetic construct
GGSGGG

SEQ ID NO: 17163 - protein, 7 aa, synthetic construct
PAPAPAP

SEQ ID NO: 17164 - protein, 46 aa, synthetic construct; identical to SEQ ID NO: 217

SEQ ID NO: 17165 - protein, 46 aa, synthetic construct; identical to SEQ ID NO: 217

SEQ ID NO: 17166 - protein, 15 aa, synthetic construct
GSSGSSGSSGSSGSS

SEQ ID NO: 17167 - protein, 11 aa, synthetic construct
GSSGGGEAAAK

SEQ ID NO: 17168 - protein, 11 aa, synthetic construct
GSSGGSEAAAK

SEQ ID NO: 17169 - skipped

SEQ ID NO: 17170 - protein, 15 aa, synthetic construct
EAAAKGGGGSEAAAK

SEQ ID NO: 17171 - protein, 5 aa, synthetic construct
PAPAP

SEQ ID NO: 17172 - skipped

SEQ ID NO: 17173 - protein, 6 aa, synthetic construct
GSSGGG

SEQ ID NO: 17174 - protein, 9 aa, synthetic construct
GSSPAPGGS

SEQ ID NO: 17175 - protein, 9 aa, synthetic construct
PAPAPAPAP

SEQ ID NO: 17176 - protein, 11 aa, synthetic construct
EAAAKGSSGGS

SEQ ID NO: 17177 - protein, 11 aa, synthetic construct
PAPEAAAKGGG

SEQ ID NO: 17178 - protein, 6 aa, synthetic construct
PAPGGS

SEQ ID NO: 17179 - protein, 8 aa, synthetic construct
EAAAKGGG

SEQ ID NO: 17180 - protein, 11 aa, synthetic construct
GSSEAAAKPAP

SEQ ID NO: 17181 - protein, 6 aa, synthetic construct
PAPGGS

SEQ ID NO: 17182 - protein, 8 aa, synthetic construct
EAAAKGGS

SEQ ID NO: 17183 - protein, 30 aa, synthetic construct; identical to SEQ ID NO: 130

SEQ ID NO: 17184 - protein, 11 aa, synthetic construct
PAPGGSEAAAK

SEQ ID NO: 17185 - skipped

SEQ ID NO: 17186 - protein, 12 aa, synthetic construct
GSSGSSGSSGSS

SEQ ID NO: 17187 - protein, 9 aa, synthetic construct
GSSGSSGSS

SEQ ID NO: 17188 - protein, 6 aa, synthetic construct
GSSGGG

SEQ ID NO: 17189 - protein, 5 aa, synthetic construct
EAAAK

SEQ ID NO: 17190 - protein, 11 aa, synthetic construct
GGSPAPEAAAK

SEQ ID NO: 17191 - protein, 6 aa, synthetic construct
GGSGSS

SEQ ID NO: 17192 - protein, 9 aa, synthetic construct
GSSPAPGGG

SEQ ID NO: 17193 - protein, 25 aa, synthetic construct
EAAAKEAAAKEAAAKEAAAKEAAAK

SEQ ID NO: 17194 - protein, 11 aa, synthetic construct
EAAAKGSSPAP

SEQ ID NO: 17195 - protein, 6 aa, synthetic construct
GGGGSS

SEQ ID NO: 17196 - protein, 9 aa, synthetic construct
GGSPAPGSS

SEQ ID NO: 17197 - protein, 25 aa, synthetic construct
EAAAKEAAAKEAAAKEAAAKEAAAK

SEQ ID NO: 17198 - protein, 11 aa, synthetic construct
PAPEAAAKGGG

SEQ ID NO: 17199 - protein, 11 aa, synthetic construct
EAAAKPAPGGS

SEQ ID NO: 17200 - protein, 5 aa, synthetic construct
PAPAP

SEQ ID NO: 17201 - protein, 20 aa, synthetic construct
EAAAKEAAAKEAAAKEAAAK

SEQ ID NO: 17202 - protein, 9 aa, synthetic construct
GSSPAPGGG

SEQ ID NO: 17203 - protein, 11 aa, synthetic construct
EAAAKGGGPAP

SEQ ID NO: 17204 - protein, 8 aa, synthetic construct
PAPEAAAK

SEQ ID NO: 17205 - protein, 11 aa, synthetic construct
PAPGGGEAAAK

SEQ ID NO: 17206 - protein, 11 aa, synthetic construct
EAAAKGSSGGS

SEQ ID NO: 17207 - protein, 15 aa, synthetic construct
EAAAKEAAAKEAAAK

SEQ ID NO: 17208 - protein, 8 aa, synthetic construct
GSSEAAAK

SEQ ID NO: 17209 - protein, 12 aa, synthetic construct
GSSGSSGSSGSS

SEQ ID NO: 17210 - protein, 20 aa, synthetic construct
GGGGSGGGGSGGGGSGGGGS

SEQ ID NO: 17211 - protein, 15 aa, synthetic construct
EAAAKGGGGSEAAAK

SEQ ID NO: 17212 - skipped

SEQ ID NO: 17213 - protein, 30 aa, synthetic construct; identical to SEQ ID NO: 112

SEQ ID NO: 17214 - protein, 9 aa, synthetic construct
GGSGSSPAP

SEQ ID NO: 17215 - protein, 15 aa, synthetic construct
GGGGSGGGGSGGGGS

SEQ ID NO: 17216 - protein, 11 aa, synthetic construct
PAPAPAPAPAP

SEQ ID NO: 17217 - protein, 11 aa, synthetic construct
PAPAPAPAPAP

SEQ ID NO: 17218 - protein, 20 aa, synthetic construct
EAAAKEAAAKEAAAKEAAAK

SEQ ID NO: 17219 - protein, 25 aa, synthetic construct
GGGGSGGGGSGGGGSGGGGSGGGGS

SEQ ID NO: 17220 - protein, 9 aa, synthetic construct
GGSGGSGGS

SEQ ID NO: 17221 - protein, 11 aa, synthetic construct
EAAAKPAPGSS

SEQ ID NO: 17222 - skipped

SEQ ID NO: 17223 - protein, 11 aa, synthetic construct
PAPEAAAKGGS

SEQ ID NO: 17224 - protein, 9 aa, synthetic construct
GGGPAPGGS

SEQ ID NO: 17225 - protein, 11 aa, synthetic construct
EAAAKGGGGSS

SEQ ID NO: 17226 - protein, 15 aa, synthetic construct
GSSGSSGSSGSSGSS

SEQ ID NO: 17227 - protein, 16 aa, synthetic construct
SGSETPGTSESATPES

SEQ ID NO: 17228 - protein, 11 aa, synthetic construct
GGSEAAAKGGG

SEQ ID NO: 17229 - protein, 18 aa, synthetic construct
GSSGSSGSSGSSGSSGSS

SEQ ID NO: 17230 - protein, 13 aa, synthetic construct
PAPAPAPAPAPAP

SEQ ID NO: 17231 - protein, 6 aa, synthetic construct
GGSGGS

SEQ ID NO: 17232 - protein, 11 aa, synthetic construct
PAPGSSEAAAK

SEQ ID NO: 17233 - protein, 11 aa, synthetic construct
GGSPAPEAAAK

SEQ ID NO: 17234 - protein, 11 aa, synthetic construct
EAAAKGGGGGS

SEQ ID NO: 17235 - protein, 12 aa, synthetic construct
GGSGGSGGSGGS

SEQ ID NO: 17236 - protein, 11 aa, synthetic construct
GGGGSSEAAAK

SEQ ID NO: 17237 - protein, 11 aa, synthetic construct
GSSEAAAKGGG

SEQ ID NO: 17238 - protein, 6 aa, synthetic construct
PAPGGS

SEQ ID NO: 17239 - protein, 11 aa, synthetic construct
EAAAKGGSGGG

SEQ ID NO: 17240 - protein, 8 aa, synthetic construct
EAAAKGGG

SEQ ID NO: 17241 - protein, 6 aa, synthetic construct
PAPGGS

SEQ ID NO: 17242 - protein, 9 aa, synthetic construct
GSSPAPGGG

SEQ ID NO: 17243 - protein, 11 aa, synthetic construct
PAPEAAAKGGG

SEQ ID NO: 17244 - protein, 11 aa, synthetic construct
GSSEAAAKGGG

SEQ ID NO: 17245 - protein, 11 aa, synthetic construct
PAPGGSEAAAK

SEQ ID NO: 17246 - protein, 6 aa, synthetic construct
GGGGGS

SEQ ID NO: 17247 - protein, 11 aa, synthetic construct
GGSPAPEAAAK

SEQ ID NO: 17248 - protein, 6 aa, synthetic construct
GGGPAP

SEQ ID NO: 17249 - protein, 9 aa, synthetic construct
PAPGSSGGG

SEQ ID NO: 17250 - protein, 9 aa, synthetic construct
PAPGSSGGG

SEQ ID NO: 17251 - protein, 11 aa, synthetic construct
GGGEAAAKGSS

SEQ ID NO: 17252 - protein, 11 aa, synthetic construct
GSSEAAAKGGS

SEQ ID NO: 17253 - protein, 9 aa, synthetic construct
PAPGGSGSS

SEQ ID NO: 17254 - protein, 15 aa, synthetic construct
EAAAKGGGGSEAAAK

SEQ ID NO: 17255 - protein, 7 aa, synthetic construct
PAPAPAP

SEQ ID NO: 17256 - protein, 6 aa, synthetic construct
GGGGGG

SEQ ID NO: 17257 - protein, 11 aa, synthetic construct
GSSPAPEAAAK

SEQ ID NO: 17258 - protein, 9 aa, synthetic construct
GGSGGSGGS

SEQ ID NO: 17259 - protein, 15 aa, synthetic construct
GSSGSSGSSGSSGSS

SEQ ID NO: 17260 - protein, 9 aa, synthetic construct
GGGPAPGGS

SEQ ID NO: 17261 - protein, 11 aa, synthetic construct
GGGPAPEAAAK

SEQ ID NO: 17262 - protein, 6 aa, synthetic construct
GGSGGG

SEQ ID NO: 17263 - protein, 16 aa, synthetic construct
SGSETPGTSESATPES

SEQ ID NO: 17264 - protein, 11 aa, synthetic construct
EAAAKGSSPAP

SEQ ID NO: 17265 - protein, 8 aa, synthetic construct
GSSEAAAK

SEQ ID NO: 17266 - protein, 9 aa, synthetic construct
GSSGGSGGG

SEQ ID NO: 17267 - protein, 25 aa, synthetic construct
EAAAKEAAAKEAAAKEAAAKEAAAK

SEQ ID NO: 17268 - protein, 15 aa, synthetic construct
GGGGSEAAAKGGGGS

SEQ ID NO: 17269 - protein, 9 aa, synthetic construct
PAPGGGGSS

SEQ ID NO: 17270 - protein, 16 aa, synthetic construct
SGSETPGTSESATPES

SEQ ID NO: 17271 - protein, 11 aa, synthetic construct
GGSPAPEAAAK

SEQ ID NO: 17272 - protein, 11 aa, synthetic construct
GSSEAAAKGGG

SEQ ID NO: 17273 - protein, 8 aa, synthetic construct
GSSEAAAK

SEQ ID NO: 17274 - protein, 15 aa, synthetic construct
GGGGSEAAAKGGGGS

SEQ ID NO: 17275 - skipped

SEQ ID NO: 17276 - protein, 11 aa, synthetic construct
PAPGGSEAAAK

SEQ ID NO: 17277 - protein, 5 aa, synthetic construct
GGGGS

SEQ ID NO: 17278 - protein, 6 aa, synthetic construct
GGGPAP

SEQ ID NO: 17279 - protein, 30 aa, synthetic construct; identical to SEQ ID NO: 130

SEQ ID NO: 17280 - protein, 11 aa, synthetic construct
EAAAKPAPGSS

SEQ ID NO: 17281 - protein, 11 aa, synthetic construct
EAAAKPAPGSS

SEQ ID NO: 17282 - protein, 6 aa, synthetic construct
GGGGGG

SEQ ID NO: 17283 - protein, 11 aa, synthetic construct
EAAAKPAPGGS

SEQ ID NO: 17284 - protein, 11 aa, synthetic construct
PAPGGGEAAAK

SEQ ID NO: 17285 - protein, 25 aa, synthetic construct
EAAAKEAAAKEAAAKEAAAKEAAAK

SEQ ID NO: 17286 - protein, 11 aa, synthetic construct
GSSEAAAKPAP

SEQ ID NO: 17287 - protein, 11 aa, synthetic construct
PAPGGSEAAAK

SEQ ID NO: 17288 - protein, 6 aa, synthetic construct
PAPGSS

SEQ ID NO: 17289 - protein, 8 aa, synthetic construct
EAAAKGGG

SEQ ID NO: 17290 - protein, 8 aa, synthetic construct
EAAAKPAP

SEQ ID NO: 17291 - protein, 11 aa, synthetic construct
PAPEAAAKGGS

SEQ ID NO: 17292 - protein, 9 aa, synthetic construct
GGSPAPGGG

SEQ ID NO: 17293 - protein, 9 aa, synthetic construct
PAPGGSGSS

SEQ ID NO: 17294 - protein, 30 aa, synthetic construct; identical to SEQ ID NO: 130

SEQ ID NO: 17295 - protein, 9 aa, synthetic construct
GGSGGGPAP

SEQ ID NO: 17296 - protein, 46 aa, synthetic construct; identical to SEQ ID NO: 217

SEQ ID NO: 17297 - protein, 11 aa, synthetic construct
PAPEAAAKGSS

SEQ ID NO: 17298 - protein, 8 aa, synthetic construct
EAAAKGSS

SEQ ID NO: 17299 - protein, 6 aa, synthetic construct
GGSGGS

SEQ ID NO: 17300 - protein, 25 aa, synthetic construct
EAAAKEAAAKEAAAKEAAAKEAAAK

SEQ ID NO: 17301 - protein, 15 aa, synthetic construct
GGGGSEAAAKGGGGS

SEQ ID NO: 17302 - protein, 11 aa, synthetic construct
GGSEAAAKGGG

SEQ ID NO: 17303 - protein, 15 aa, synthetic construct
GSSGSSGSSGSSGSS

SEQ ID NO: 17304 - protein, 30 aa, synthetic construct; identical to SEQ ID NO: 112

SEQ ID NO: 17305 - protein, 8 aa, synthetic construct
EAAAKGGG

SEQ ID NO: 17306 - protein, 11 aa, synthetic construct
GGGGGSEAAAK

SEQ ID NO: 17307 - protein, 11 aa, synthetic construct
EAAAKPAPGGS

SEQ ID NO: 17308 - protein, 9 aa, synthetic construct
GGGGGSGSS

SEQ ID NO: 17309 - protein, 11 aa, synthetic construct
PAPGSSEAAAK

SEQ ID NO: 17310 - protein, 11 aa, synthetic construct
GSSEAAAKPAP

SEQ ID NO: 17311 - protein, 11 aa, synthetic construct
EAAAKGSSPAP

SEQ ID NO: 17312 - protein, 9 aa, synthetic construct
GGGPAPGGS

SEQ ID NO: 17313 - protein, 6 aa, synthetic construct
GGSPAP

SEQ ID NO: 17314 - protein, 11 aa, synthetic construct
GGSEAAAKGGG

SEQ ID NO: 17315 - protein, 8 aa, synthetic construct
GGGGGGGG

SEQ ID NO: 17316 - protein, 30 aa, synthetic construct; identical to SEQ ID NO: 112

SEQ ID NO: 17317 - protein, 30 aa, synthetic construct; identical to SEQ ID NO: 112

SEQ ID NO: 17318 - protein, 9 aa, synthetic construct
GSSPAPGGG

SEQ ID NO: 17319 - protein, 6 aa, synthetic construct
GGGGGG

SEQ ID NO: 17320 - protein, 6 aa, synthetic construct
GSSGGS

SEQ ID NO: 17321 - protein, 9 aa, synthetic construct
GGSPAPGSS

SEQ ID NO: 17322 - protein, 11 aa, synthetic construct
PAPEAAAKGGG

SEQ ID NO: 17323 - protein, 11 aa, synthetic construct
EAAAKGGGPAP

SEQ ID NO: 17324 - protein, 11 aa, synthetic construct
GGGEAAAKGGS

SEQ ID NO: 17325 - protein, 9 aa, synthetic construct
GGSGSSPAP

SEQ ID NO: 17326 - protein, 16 aa, synthetic construct
SGSETPGTSESATPES

SEQ ID NO: 17327 - protein, 11 aa, synthetic construct
PAPGGSEAAAK

SEQ ID NO: 17328 - protein, 6 aa, synthetic construct
GGSGGG

SEQ ID NO: 17329 - protein, 9 aa, synthetic construct
GGGGSSPAP

SEQ ID NO: 17330 - protein, 11 aa, synthetic construct
GGGEAAAKGSS

SEQ ID NO: 17331 - protein, 13 aa, synthetic construct
PAPAPAPAPAPAP

SEQ ID NO: 17332 - protein, 15 aa, synthetic construct
EAAAKGGGGSEAAAK

SEQ ID NO: 17333 - protein, 25 aa, synthetic construct
EAAAKEAAAKEAAAKEAAAKEAAAK

SEQ ID NO: 17334 - protein, 11 aa, synthetic construct
GGGGGSEAAAK

SEQ ID NO: 17335 - protein, 11 aa, synthetic construct
PAPGSSEAAAK

SEQ ID NO: 17336 - protein, 12 aa, synthetic construct
GSAGSAAGSGEF

SEQ ID NO: 17337 - protein, 15 aa, synthetic construct
EAAAKGGGGSEAAAK

SEQ ID NO: 17338 - protein, 9 aa, synthetic construct
GGSPAPGGG

SEQ ID NO: 17339 - protein, 11 aa, synthetic construct
GSSEAAAKGGG

SEQ ID NO: 17340 - protein, 11 aa, synthetic construct
GGGEAAAKPAP

SEQ ID NO: 17341 - protein, 6 aa, synthetic construct
GGGPAP

SEQ ID NO: 17342 - protein, 8 aa, synthetic construct
GGSEAAAK

SEQ ID NO: 17343 - protein, 33 aa, synthetic construct; identical to SEQ ID NO: 6

SEQ ID NO: 17344 - protein, 11 aa, synthetic construct
EAAAKPAPGGS

SEQ ID NO: 17345 - protein, 46 aa, synthetic construct; identical to SEQ ID NO: 217

SEQ ID NO: 17346 - protein, 8 aa, synthetic construct
GGGGGGGG

SEQ ID NO: 17347 - protein, 6 aa, synthetic construct
PAPGSS

SEQ ID NO: 17348 - protein, 5 aa, synthetic construct
EAAAK

SEQ ID NO: 17349 - protein, 12 aa, synthetic construct
GSAGSAAGSGEF

SEQ ID NO: 17350 - protein, 11 aa, synthetic construct
PAPGGGEAAAK

SEQ ID NO: 17351 - protein, 11 aa, synthetic construct
EAAAKGSSGGS

SEQ ID NO: 17352 - protein, 15 aa, synthetic construct
GGGGSEAAAKGGGGS

SEQ ID NO: 17353 - protein, 15 aa, synthetic construct
GGGGSGGGGSGGGGS

SEQ ID NO: 17354 - protein, 15 aa, synthetic construct
EAAAKGGGGSEAAAK

SEQ ID NO: 17355 - protein, 11 aa, synthetic construct
PAPGGGEAAAK

SEQ ID NO: 17356 - protein, 11 aa, synthetic construct
GGSEAAAKPAP

SEQ ID NO: 17357 - protein, 5 aa, synthetic construct
PAPAP

SEQ ID NO: 17358 - protein, 5 aa, synthetic construct
PAPAP

SEQ ID NO: 17359 - protein, 6 aa, synthetic construct
GGSPAP

SEQ ID NO: 17360 - protein, 11 aa, synthetic construct
EAAAKGSSGGS

SEQ ID NO: 17361 - protein, 9 aa, synthetic construct
PAPGSSGGS

SEQ ID NO: 17362 - protein, 15 aa, synthetic construct
EAAAKGGGGSEAAAK

SEQ ID NO: 17363 - protein, 7 aa, synthetic construct
PAPAPAP

SEQ ID NO: 17364 - protein, 18 aa, synthetic construct
GGSGGSGGSGGSGGSGGS

SEQ ID NO: 17365 - protein, 9 aa, synthetic construct
GGGGGSGSS

SEQ ID NO: 17366 - protein, 11 aa, synthetic construct
PAPGSSEAAAK

SEQ ID NO: 17367 - protein, 11 aa, synthetic construct
GGSEAAAKPAP

SEQ ID NO: 17368 - protein, 20 aa, synthetic construct
EAAAKEAAAKEAAAKEAAAK

SEQ ID NO: 17369 - protein, 46 aa, synthetic construct; identical to SEQ ID NO: 217

SEQ ID NO: 17370 - protein, 11 aa, synthetic construct
GGSGGGEAAAK

SEQ ID NO: 17371 - protein, 8 aa, synthetic construct
GGGEAAAK

SEQ ID NO: 17372 - protein, 15 aa, synthetic construct
GGGGSGGGGSGGGGS

SEQ ID NO: 17373 - protein, 15 aa, synthetic construct
GGSGGSGGSGGSGGS

SEQ ID NO: 17374 - protein, 9 aa, synthetic construct
GSSGGGGGS

SEQ ID NO: 17375 - protein, 11 aa, synthetic construct
PAPGGSEAAAK

SEQ ID NO: 17376 - protein, 9 aa, synthetic construct
GSSGGSPAP

SEQ ID NO: 17377 - protein, 16 aa, synthetic construct
SGSETPGTSESATPES

SEQ ID NO: 17378 - protein, 10 aa, synthetic construct
GGGGSGGGGS

SEQ ID NO: 17379 - protein, 11 aa, synthetic construct
PAPAPAPAPAP

SEQ ID NO: 17380 - protein, 6 aa, synthetic construct
GSSGSS

SEQ ID NO: 17381 - protein, 11 aa, synthetic construct
GSSEAAAKPAP

SEQ ID NO: 17382 - protein, 9 aa, synthetic construct
GGSGSSGGG

SEQ ID NO: 17383 - protein, 10 aa, synthetic construct
EAAAKEAAAK

SEQ ID NO: 17384 - protein, 12 aa, synthetic construct
GSSGSSGSSGSS

SEQ ID NO: 17385 - protein, 9 aa, synthetic construct
GSSPAPGGG

SEQ ID NO: 17386 - protein, 15 aa, synthetic construct
EAAAKEAAAKEAAAK

SEQ ID NO: 17387 - protein, 46 aa, synthetic construct; identical to SEQ ID NO: 217

SEQ ID NO: 17388 - protein, 30 aa, synthetic construct; identical to SEQ ID NO: 112

SEQ ID NO: 17389 - protein, 12 aa, synthetic construct
GSAGSAAGSGEF

SEQ ID NO: 17390 - protein, 11 aa, synthetic construct
PAPGSSEAAAK

SEQ ID NO: 17391 - protein, 8 aa, synthetic construct
GGSEAAAK

SEQ ID NO: 17392 - protein, 15 aa, synthetic construct
GSSGSSGSSGSSGSS

SEQ ID NO: 17393 - protein, 11 aa, synthetic construct
GGSEAAAKPAP

SEQ ID NO: 17394 - protein, 9 aa, synthetic construct
GGSGGSGGS

SEQ ID NO: 17395 - protein, 11 aa, synthetic construct
EAAAKGGSGSS

SEQ ID NO: 17396 - protein, 25 aa, synthetic construct
GGGGSGGGGSGGGGSGGGGSGGGGS

SEQ ID NO: 17397 - protein, 20 aa, synthetic construct
EAAAKEAAAKEAAAKEAAAK

SEQ ID NO: 17398 - protein, 9 aa, synthetic construct
GGSGSSPAP

SEQ ID NO: 17399 - protein, 25 aa, synthetic construct
EAAAKEAAAKEAAAKEAAAKEAAAK

SEQ ID NO: 17400 - protein, 25 aa, synthetic construct
GGGGSGGGGSGGGGSGGGGSGGGGS

SEQ ID NO: 17401 - protein, 6 aa, synthetic construct
GGSGSS

SEQ ID NO: 17402 - protein, 8 aa, synthetic construct
PAPEAAAK

SEQ ID NO: 17403 - protein, 8 aa, synthetic construct
EAAAKPAP

SEQ ID NO: 17404 - protein, 6 aa, synthetic construct
GSSPAP

SEQ ID NO: 17405 - protein, 6 aa, synthetic construct
GGGPAP

SEQ ID NO: 17406 - protein, 11 aa, synthetic construct
EAAAKGGSGSS

SEQ ID NO: 17407 - protein, 15 aa, synthetic construct
EAAAKGGGGSEAAAK

SEQ ID NO: 17408 - protein, 6 aa, synthetic construct
GGSGGG

SEQ ID NO: 17409 - protein, 6 aa, synthetic construct
GSSPAP

SEQ ID NO: 17410 - protein, 11 aa, synthetic construct
GGSGSSEAAAK

SEQ ID NO: 17411 - protein, 9 aa, synthetic construct
PAPGSSGGS

SEQ ID NO: 17412 - protein, 6 aa, synthetic construct
GGGGGG

SEQ ID NO: 17413 - protein, 11 aa, synthetic construct
PAPGGSEAAAK

SEQ ID NO: 17414 - protein, 6 aa, synthetic construct
PAPGGS

SEQ ID NO: 17415 - protein, 12 aa, synthetic construct
GGSGGSGGSGGS

SEQ ID NO: 17416 - protein, 6 aa, synthetic construct
GSSPAP

SEQ ID NO: 17417 - protein, 9 aa, synthetic construct
PAPAPAPAP

SEQ ID NO: 17418 - protein, 6 aa, synthetic construct
GGGGGG

SEQ ID NO: 17419 - protein, 18 aa, synthetic construct
GSSGSSGSSGSSGSSGSS

SEQ ID NO: 17420 - protein, 11 aa, synthetic construct
GSSEAAAKGGS

SEQ ID NO: 17421 - protein, 8 aa, synthetic construct
GGSEAAAK

SEQ ID NO: 17422 - protein, 15 aa, synthetic construct
GGSGGSGGSGGSGGS

SEQ ID NO: 17423 - protein, 11 aa, synthetic construct
GSSPAPEAAAK

SEQ ID NO: 17424 - protein, 15 aa, synthetic construct
GSSGSSGSSGSSGSS

SEQ ID NO: 17425 - protein, 11 aa, synthetic construct
EAAAKPAPGGS

SEQ ID NO: 17426 - protein, 33 aa, synthetic construct; identical to SEQ ID NO: 6

SEQ ID NO: 17427 - protein, 11 aa, synthetic construct
GGSPAPEAAAK

SEQ ID NO: 17428 - protein, 11 aa, synthetic construct
EAAAKGGSGGG

SEQ ID NO: 17429 - protein, 20 aa, synthetic construct
EAAAKEAAAKEAAAKEAAAK

SEQ ID NO: 17430 - protein, 6 aa, synthetic construct
GSSPAP

SEQ ID NO: 17431 - protein, 9 aa, synthetic construct
PAPAPAPAP

SEQ ID NO: 17432 - protein, 11 aa, synthetic construct
PAPGGSEAAAK

SEQ ID NO: 17433 - protein, 11 aa, synthetic construct
GGSGSSEAAAK

SEQ ID NO: 17434 - protein, 6 aa, synthetic construct
GSSGGG

SEQ ID NO: 17435 - protein, 11 aa, synthetic construct
GGGEAAAKGSS

SEQ ID NO: 17436 - protein, 9 aa, synthetic construct
PAPGGSGGG

SEQ ID NO: 17437 - protein, 46 aa, synthetic construct; identical to SEQ ID NO: 217

SEQ ID NO: 17438 - protein, 9 aa, synthetic construct
PAPGGGGSS

SEQ ID NO: 17439 - protein, 8 aa, synthetic construct
EAAAKGGS

SEQ ID NO: 17440 - protein, 30 aa, synthetic construct; identical to SEQ ID NO: 130

SEQ ID NO: 17441 - protein, 9 aa, synthetic construct
GGSGGSGGS

SEQ ID NO: 17442 - protein, 5 aa, synthetic construct
PAPAP

SEQ ID NO: 17443 - protein, 11 aa, synthetic construct
GSSGGGEAAAK

SEQ ID NO: 17444 - protein, 11 aa, synthetic construct
GGGGSSEAAAK

SEQ ID NO: 17445 - protein, 11 aa, synthetic construct
EAAAKGSSGGS

SEQ ID NO: 17446 - protein, 15 aa, synthetic construct
EAAAKGGGGSEAAAK

SEQ ID NO: 17447 - protein, 8 aa, synthetic construct
GGGGGGGG

SEQ ID NO: 17448 - protein, 9 aa, synthetic construct
GSSGSSGSS

SEQ ID NO: 17449 - protein, 11 aa, synthetic construct
GGGEAAAKPAP

SEQ ID NO: 17450 - protein, 9 aa, synthetic construct
GGGGGSGSS

SEQ ID NO: 17451 - protein, 7 aa, synthetic construct
GGGGGGG

SEQ ID NO: 17452 - skipped

SEQ ID NO: 17453 - protein, 6 aa, synthetic construct
GSSGGG

SEQ ID NO: 17454 - protein, 11 aa, synthetic construct
EAAAKGGSGSS

SEQ ID NO: 17455 - protein, 11 aa, synthetic construct
PAPGSSEAAAK

SEQ ID NO: 17456 - protein, 11 aa, synthetic construct
GSSEAAAKPAP

SEQ ID NO: 17457 - protein, 9 aa, synthetic construct
GGSPAPGSS

SEQ ID NO: 17458 - protein, 12 aa, synthetic construct
GSAGSAAGSGEF

SEQ ID NO: 17459 - protein, 9 aa, synthetic construct
GGSPAPGGG

SEQ ID NO: 17460 - protein, 20 aa, synthetic construct
GGGGSGGGGSGGGGSGGGGS

SEQ ID NO: 17461 - protein, 9 aa, synthetic construct
GSSGSSGSS

SEQ ID NO: 17462 - protein, 30 aa, synthetic construct; identical to SEQ ID NO: 130

SEQ ID NO: 17463 - protein, 15 aa, synthetic construct
GGGGSEAAAKGGGGS

SEQ ID NO: 17464 - protein, 11 aa, synthetic construct
GGSEAAAKGSS

SEQ ID NO: 17465 - protein, 15 aa, synthetic construct
EAAAKGGGGSEAAAK

SEQ ID NO: 17466 - protein, 30 aa, synthetic construct; identical to SEQ ID NO: 130

SEQ ID NO: 17467 - protein, 11 aa, synthetic construct
PAPGGGEAAAK

SEQ ID NO: 17468 - protein, 11 aa, synthetic construct
GSSGGGEAAAK

SEQ ID NO: 17469 - protein, 6 aa, synthetic construct
GSSGSS

SEQ ID NO: 17470 - protein, 13 aa, synthetic construct
PAPAPAPAPAPAP

SEQ ID NO: 17471 - protein, 9 aa, synthetic construct
GGSPAPGGG

SEQ ID NO: 17472 - protein, 15 aa, synthetic construct
GGSGGSGGSGGSGGS

SEQ ID NO: 17473 - protein, 10 aa, synthetic construct
EAAAKEAAAK

SEQ ID NO: 17474 - protein, 46 aa, synthetic construct; identical to SEQ ID NO: 217

SEQ ID NO: 17475 - protein, 13 aa, synthetic construct
PAPAPAPAPAPAP

SEQ ID NO: 17476 - protein, 11 aa, synthetic construct
GGGEAAAKGGS

SEQ ID NO: 17477 - protein, 11 aa, synthetic construct
EAAAKGGGPAP

SEQ ID NO: 17478 - protein, 11 aa, synthetic construct
PAPEAAAKGSS

SEQ ID NO: 17479 - protein, 11 aa, synthetic construct
PAPEAAAKGSS

SEQ ID NO: 17480 - protein, 11 aa, synthetic construct
PAPGGSEAAAK

SEQ ID NO: 17481 - protein, 9 aa, synthetic construct
GSSPAPGGG

SEQ ID NO: 17482 - protein, 11 aa, synthetic construct
GGGEAAAKPAP

SEQ ID NO: 17483 - protein, 10 aa, synthetic construct
GGGGSGGGGS

SEQ ID NO: 17484 - protein, 11 aa, synthetic construct
GGGEAAAKGSS

SEQ ID NO: 17485 - protein, 9 aa, synthetic construct
PAPGGGGSS

SEQ ID NO: 17486 - protein, 8 aa, synthetic construct
GSSEAAAK

SEQ ID NO: 17487 - protein, 8 aa, synthetic construct
GGGGGGGG

SEQ ID NO: 17488 - protein, 9 aa, synthetic construct
PAPGSSGGS

SEQ ID NO: 17489 - protein, 20 aa, synthetic construct
GGGGSGGGGSGGGGSGGGGS

SEQ ID NO: 17490 - skipped

SEQ ID NO: 17491 - protein, 11 aa, synthetic construct
EAAAKGSSPAP

SEQ ID NO: 17492 - protein, 11 aa, synthetic construct
PAPEAAAKGGS

SEQ ID NO: 17493 - protein, 11 aa, synthetic construct
GSSGGGEAAAK

SEQ ID NO: 17494 - protein, 7 aa, synthetic construct
PAPAPAP

SEQ ID NO: 17495 - protein, 11 aa, synthetic construct
GGSEAAAKGGG

SEQ ID NO: 17496 - protein, 8 aa, synthetic construct
GSSEAAAK

SEQ ID NO: 17497 - protein, 4 aa, synthetic construct
GGGG

SEQ ID NO: 17498 - protein, 6 aa, synthetic construct
GGGGGS

SEQ ID NO: 17499 - protein, 11 aa, synthetic construct
GGGGSSEAAAK

SEQ ID NO: 17500 - protein, 30 aa, synthetic construct; identical to SEQ ID NO: 130

SEQ ID NO: 17501 - protein, 11 aa, synthetic construct
GGSEAAAKGSS

SEQ ID NO: 17502 - protein, 9 aa, synthetic construct
PAPGSSGGS

SEQ ID NO: 17503 - protein, 6 aa, synthetic construct
GGSPAP

SEQ ID NO: 17504 - protein, 11 aa, synthetic construct
GGGGSSEAAAK

SEQ ID NO: 17505 - protein, 12 aa, synthetic construct
GGSGGSGGSGGS

SEQ ID NO: 17506 - protein, 9 aa, synthetic construct
PAPGSSGGS

SEQ ID NO: 17507 - protein, 9 aa, synthetic construct
GSSPAPGGG

SEQ ID NO: 17508 - protein, 7 aa, synthetic construct
GGGGGGG

SEQ ID NO: 17509 - protein, 11 aa, synthetic construct
EAAAKGGGGGS

SEQ ID NO: 17510 - protein, 11 aa, synthetic construct
EAAAKGGSGGG

SEQ ID NO: 17511 - protein, 11 aa, synthetic construct
GGGGSSEAAAK

SEQ ID NO: 17512 - protein, 15 aa, synthetic construct
GGGGSEAAAKGGGGS

SEQ ID NO: 17513 - protein, 6 aa, synthetic construct
GSSGSS

SEQ ID NO: 17514 - protein, 6 aa, synthetic construct
GGSGGG

SEQ ID NO: 17515 - protein, 11 aa, synthetic construct
PAPEAAAKGGG

SEQ ID NO: 17516 - protein, 46 aa, synthetic construct; identical to SEQ ID NO: 217

SEQ ID NO: 17517 - protein, 9 aa, synthetic construct
GGGGGSGSS

SEQ ID NO: 17518 - protein, 15 aa, synthetic construct
GSSGSSGSSGSSGSS

SEQ ID NO: 17519 - protein, 15 aa, synthetic construct
GGGGSEAAAKGGGGS

SEQ ID NO: 17520 - protein, 9 aa, synthetic construct
GGGGGSPAP

SEQ ID NO: 17521 - protein, 8 aa, synthetic construct
GGGEAAAK

SEQ ID NO: 17522 - protein, 12 aa, synthetic construct
GGSGGSGGSGGS

SEQ ID NO: 17523 - skipped

SEQ ID NO: 17524 - protein, 11 aa, synthetic construct
GGSPAPEAAAK

SEQ ID NO: 17525 - protein, 10 aa, synthetic construct
EAAAKEAAAK

SEQ ID NO: 17526 - protein, 11 aa, synthetic construct
GGGEAAAKPAP

SEQ ID NO: 17527 - protein, 11 aa, synthetic construct
GGGEAAAKGGS

SEQ ID NO: 17528 - protein, 9 aa, synthetic construct
GGSGGSGGS

SEQ ID NO: 17529 - protein, 11 aa, synthetic construct
EAAAKGGGPAP

SEQ ID NO: 17530 - protein, 5 aa, synthetic construct
EAAAK

SEQ ID NO: 17531 - protein, 11 aa, synthetic construct
PAPEAAAKGGG

SEQ ID NO: 17532 - protein, 8 aa, synthetic construct
EAAAKGSS

SEQ ID NO: 17533 - protein, 11 aa, synthetic construct
GGSEAAAKGGG

SEQ ID NO: 17534 - protein, 20 aa, synthetic construct
GGGGSGGGGSGGGGSGGGGS

SEQ ID NO: 17535 - protein, 25 aa, synthetic construct
GGGGSGGGGSGGGGSGGGGSGGGGS

SEQ ID NO: 17536 - protein, 9 aa, synthetic construct
GGGGSSPAP

SEQ ID NO: 17537 - protein, 18 aa, synthetic construct
GGSGGSGGSGGSGGSGGS

SEQ ID NO: 17538 - protein, 11 aa, synthetic construct
GGGEAAAKPAP

SEQ ID NO: 17539 - protein, 10 aa, synthetic construct
EAAAKEAAAK

SEQ ID NO: 17540 - protein, 11 aa, synthetic construct
GGSGSSEAAAK

SEQ ID NO: 17541 - protein, 11 aa, synthetic construct
PAPEAAAKGSS

SEQ ID NO: 17542 - protein, 11 aa, synthetic construct
PAPAPAPAPAP

SEQ ID NO: 17543 - protein, 11 aa, synthetic construct
GSSGGGEAAAK

SEQ ID NO: 17544 - protein, 9 aa, synthetic construct
GSSPAPGGG

SEQ ID NO: 17545 - protein, 11 aa, synthetic construct
GGSPAPEAAAK

SEQ ID NO: 17546 - protein, 11 aa, synthetic construct
PAPGGSEAAAK

SEQ ID NO: 17547 - protein, 6 aa, synthetic construct
GGGGSS

SEQ ID NO: 17548 - protein, 9 aa, synthetic construct
GGSGSSGGG

SEQ ID NO: 17549 - protein, 11 aa, synthetic construct
GSSGGGEAAAK

SEQ ID NO: 17550 - protein, 8 aa, synthetic construct
EAAAKGGS

SEQ ID NO: 17551 - protein, 9 aa, synthetic construct
GGGPAPGGS

SEQ ID NO: 17552 - protein, 10 aa, synthetic construct
EAAAKEAAAK

SEQ ID NO: 17553 - protein, 9 aa, synthetic construct
GSSGSSGSS

SEQ ID NO: 17554 - protein, 11 aa, synthetic construct
GGGEAAAKPAP

SEQ ID NO: 17555 - protein, 16 aa, synthetic construct
SGSETPGTSESATPES

SEQ ID NO: 17556 - protein, 11 aa, synthetic construct
PAPAPAPAPAP

SEQ ID NO: 17557 - protein, 46 aa, synthetic construct; identical to SEQ ID NO: 217

SEQ ID NO: 17558 - protein, 9 aa, synthetic construct
PAPGSSGGG

SEQ ID NO: 17559 - protein, 11 aa, synthetic construct
GSSGGGEAAAK

SEQ ID NO: 17560 - protein, 25 aa, synthetic construct
GGGGSGGGGSGGGGSGGGGSGGGGS

SEQ ID NO: 17561 - protein, 9 aa, synthetic construct
GGGGSSPAP

SEQ ID NO: 17562 - protein, 9 aa, synthetic construct
GGSGGGPAP

SEQ ID NO: 17563 - skipped

SEQ ID NO: 17564 - protein, 11 aa, synthetic construct
EAAAKGSSPAP

SEQ ID NO: 17565 - protein, 8 aa, synthetic construct
EAAAKGGG

SEQ ID NO: 17566 - protein, 12 aa, synthetic construct
GSSGSSGSSGSS

SEQ ID NO: 17567 - protein, 11 aa, synthetic construct
PAPEAAAKGSS

SEQ ID NO: 17568 - protein, 8 aa, synthetic construct
GSSEAAAK

SEQ ID NO: 17569 - protein, 11 aa, synthetic construct
EAAAKGGSGSS

SEQ ID NO: 17570 - protein, 8 aa, synthetic construct
GSSEAAAK

SEQ ID NO: 17571 - protein, 11 aa, synthetic construct
GGSGSSEAAAK

SEQ ID NO: 17572 - protein, 11 aa, synthetic construct
GGSEAAAKGGG

SEQ ID NO: 17573 - protein, 20 aa, synthetic construct
GGGGSGGGGSGGGGSGGGGS

SEQ ID NO: 17574 - protein, 13 aa, synthetic construct
PAPAPAPAPAPAP

SEQ ID NO: 17575 - protein, 11 aa, synthetic construct
EAAAKPAPGSS

SEQ ID NO: 17576 - protein, 11 aa, synthetic construct
PAPGSSEAAAK

SEQ ID NO: 17577 - protein, 9 aa, synthetic construct
GGGGSSPAP

SEQ ID NO: 17578 - protein, 11 aa, synthetic construct
EAAAKGGGGGS

SEQ ID NO: 17579 - protein, 11 aa, synthetic construct
GGGEAAAKGGS

SEQ ID NO: 17580 - protein, 9 aa, synthetic construct
GGSGSSGGG

SEQ ID NO: 17581 - protein, 9 aa, synthetic construct
GGGPAPGGS

SEQ ID NO: 17582 - protein, 9 aa, synthetic construct
PAPGGGGGS

SEQ ID NO: 17583 - protein, 9 aa, synthetic construct
GGGPAPGSS

SEQ ID NO: 17584 - protein, 7 aa, synthetic construct
GGGGGGG

SEQ ID NO: 17585 - protein, 9 aa, synthetic construct
GGSGGGGSS

SEQ ID NO: 17586 - protein, 6 aa, synthetic construct
GGGGGG

SEQ ID NO: 17587 - protein, 11 aa, synthetic construct
GGSEAAAKGSS

SEQ ID NO: 17588 - protein, 9 aa, synthetic construct
GGSPAPGGG

SEQ ID NO: 17589 - protein, 9 aa, synthetic construct
GGSPAPGSS

SEQ ID NO: 17590 - protein, 12 aa, synthetic construct
GGSGGSGGSGGS

SEQ ID NO: 17591 - protein, 25 aa, synthetic construct
EAAAKEAAAKEAAAKEAAAKEAAAK

SEQ ID NO: 17592 - protein, 9 aa, synthetic construct
PAPGSSGGS

SEQ ID NO: 17593 - protein, 11 aa, synthetic construct
EAAAKGGGGSS

SEQ ID NO: 17594 - protein, 15 aa, synthetic construct
GGSGGSGGSGGSGGS

SEQ ID NO: 17595 - protein, 9 aa, synthetic construct
PAPGGSGGG

SEQ ID NO: 17596 - protein, 9 aa, synthetic construct
PAPGSSGGG

SEQ ID NO: 17597 - protein, 6 aa, synthetic construct
GSSGSS

SEQ ID NO: 17598 - protein, 8 aa, synthetic construct
EAAAKGSS

SEQ ID NO: 17599 - protein, 6 aa, synthetic construct
GGGPAP

SEQ ID NO: 17600 - protein, 11 aa, synthetic construct
EAAAKGGGGGS

SEQ ID NO: 17601 - protein, 11 aa, synthetic construct
EAAAKGGSPAP

SEQ ID NO: 17602 - protein, 30 aa, synthetic construct; identical to SEQ ID NO: 130

SEQ ID NO: 17603 - protein, 9 aa, synthetic construct
GSSPAPGGG

SEQ ID NO: 17604 - protein, 11 aa, synthetic construct
GGGEAAAKGSS

SEQ ID NO: 17605 - protein, 11 aa, synthetic construct
GGGGSSEAAAK

SEQ ID NO: 17606 - protein, 8 aa, synthetic construct
GGGGGGGG

SEQ ID NO: 17607 - protein, 11 aa, synthetic construct
PAPGSSEAAAK

SEQ ID NO: 17608 - protein, 8 aa, synthetic construct
EAAAKGSS

SEQ ID NO: 17609 - protein, 11 aa, synthetic construct
GSSEAAAKGGG

SEQ ID NO: 17610 - protein, 8 aa, synthetic construct
GGSEAAAK

SEQ ID NO: 17611 - protein, 11 aa, synthetic construct
GSSEAAAKGGG

SEQ ID NO: 17612 - protein, 9 aa, synthetic construct
PAPGGSGGG

SEQ ID NO: 17613 - protein, 9 aa, synthetic construct
GSSGGSGGG

SEQ ID NO: 17614 - protein, 11 aa, synthetic construct
EAAAKGSSGGG

SEQ ID NO: 17615 - protein, 8 aa, synthetic construct
GSSEAAAK

SEQ ID NO: 17616 - protein, 11 aa, synthetic construct
GSSGGGEAAAK

SEQ ID NO: 17617 - protein, 10 aa, synthetic construct
GGGGSGGGGS

SEQ ID NO: 17618 - protein, 15 aa, synthetic construct
EAAAKGGGGSEAAAK

SEQ ID NO: 17619 - protein, 8 aa, synthetic construct
EAAAKGGG

SEQ ID NO: 17620 - protein, 11 aa, synthetic construct
EAAAKGGSPAP

SEQ ID NO: 17621 - protein, 9 aa, synthetic construct
GGGPAPGGS

SEQ ID NO: 17622 - protein, 8 aa, synthetic construct
GSSEAAAK

SEQ ID NO: 17623 - protein, 11 aa, synthetic construct
GSSGGGEAAAK

SEQ ID NO: 17624 - protein, 16 aa, synthetic construct
SGSETPGTSESATPES

SEQ ID NO: 17625 - protein, 9 aa, synthetic construct
GGSGSSPAP

SEQ ID NO: 17626 - protein, 6 aa, synthetic construct
GGGGGG

SEQ ID NO: 17627 - protein, 9 aa, synthetic construct
GGSPAPGGG

SEQ ID NO: 17628 - protein, 6 aa, synthetic construct
GGSGSS

SEQ ID NO: 17629 - skipped

SEQ ID NO: 17630 - protein, 11 aa, synthetic construct
EAAAKPAPGSS

SEQ ID NO: 17631 - protein, 8 aa, synthetic construct
EAAAKGGG

SEQ ID NO: 17632 - protein, 11 aa, synthetic construct
GSSEAAAKPAP

SEQ ID NO: 17633 - protein, 6 aa, synthetic construct
GGGGSS

SEQ ID NO: 17634 - protein, 11 aa, synthetic construct
GGSGSSEAAAK

SEQ ID NO: 17635 - protein, 6 aa, synthetic construct
GGGGSS

SEQ ID NO: 17636 - protein, 5 aa, synthetic construct
PAPAP

SEQ ID NO: 17637 - protein, 11 aa, synthetic construct
PAPEAAAKGGG

SEQ ID NO: 17638 - protein, 8 aa, synthetic construct
EAAAKGGS

SEQ ID NO: 17639 - protein, 13 aa, synthetic construct
PAPAPAPAPAPAP

SEQ ID NO: 17640 - protein, 11 aa, synthetic construct
GGGGGSEAAAK

SEQ ID NO: 17641 - protein, 6 aa, synthetic construct
PAPGGS

SEQ ID NO: 17642 - protein, 6 aa, synthetic construct
GGGGSS

SEQ ID NO: 17643 - protein, 5 aa, synthetic construct
GGGGS

SEQ ID NO: 17644 - protein, 11 aa, synthetic construct
GSSPAPEAAAK

SEQ ID NO: 17645 - protein, 9 aa, synthetic construct
GGGGSSGGS

SEQ ID NO: 17646 - protein, 11 aa, synthetic construct
PAPEAAAKGSS

SEQ ID NO: 17647 - protein, 11 aa, synthetic construct
GGSGSSEAAAK

SEQ ID NO: 17648 - protein, 8 aa, synthetic construct
EAAAKGGG

SEQ ID NO: 17649 - protein, 11 aa, synthetic construct
PAPGSSEAAAK

SEQ ID NO: 17650 - protein, 11 aa, synthetic construct
EAAAKGSSGGG

SEQ ID NO: 17651 - protein, 8 aa, synthetic construct
PAPEAAAK

SEQ ID NO: 17652 - protein, 11 aa, synthetic construct
GGSPAPEAAAK

SEQ ID NO: 17653 - protein, 18 aa, synthetic construct
GGSGGSGGSGGSGGSGGS

SEQ ID NO: 17654 - protein, 11 aa, synthetic construct
GSSEAAAKPAP

SEQ ID NO: 17655 - protein, 46 aa, synthetic construct; identical to SEQ ID NO: 217

SEQ ID NO: 17656 - protein, 11 aa, synthetic construct
GSSGGGEAAAK

SEQ ID NO: 17657 - protein, 9 aa, synthetic construct
PAPGGSGGG

SEQ ID NO: 17658 - protein, 11 aa, synthetic construct
PAPGGSEAAAK

SEQ ID NO: 17659 - protein, 5 aa, synthetic construct
GGGGS

SEQ ID NO: 17660 - protein, 15 aa, synthetic construct
GGGGSGGGGSGGGGS

SEQ ID NO: 17661 - protein, 11 aa, synthetic construct
PAPAPAPAPAP

SEQ ID NO: 17662 - protein, 25 aa, synthetic construct
EAAAKEAAAKEAAAKEAAAKEAAAK

SEQ ID NO: 17663 - protein, 11 aa, synthetic construct
GSSGGSEAAAK

SEQ ID NO: 17664 - protein, 12 aa, synthetic construct
GGSGGSGGSGGS

SEQ ID NO: 17665 - protein, 11 aa, synthetic construct
EAAAKGSSGGG

SEQ ID NO: 17666 - protein, 8 aa, synthetic construct
EAAAKGGG

SEQ ID NO: 17667 - protein, 16 aa, synthetic construct
SGSETPGTSESATPES

SEQ ID NO: 17668 - protein, 9 aa, synthetic construct
PAPGSSGGS

SEQ ID NO: 17669 - protein, 11 aa, synthetic construct
PAPEAAAKGSS

SEQ ID NO: 17670 - protein, 8 aa, synthetic construct
PAPEAAAK

SEQ ID NO: 17671 - protein, 11 aa, synthetic construct
GSSEAAAKGGG

SEQ ID NO: 17672 - protein, 6 aa, synthetic construct
GSSPAP

SEQ ID NO: 17673 - protein, 20 aa, synthetic construct
EAAAKEAAAKEAAAKEAAAK

SEQ ID NO: 17674 - protein, 9 aa, synthetic construct
PAPGGSGSS

SEQ ID NO: 17675 - protein, 15 aa, synthetic construct
GGGGSGGGGSGGGGS

SEQ ID NO: 17676 - protein, 11 aa, synthetic construct
GSSGGSEAAAK

SEQ ID NO: 17677 - protein, 8 aa, synthetic construct
EAAAKGGS

SEQ ID NO: 17678 - protein, 8 aa, synthetic construct
EAAAKGGS

SEQ ID NO: 17679 - protein, 6 aa, synthetic construct
GGSPAP

SEQ ID NO: 17680 - protein, 6 aa, synthetic construct
GGSGSS

SEQ ID NO: 17681 - protein, 16 aa, synthetic construct
SGSETPGTSESATPES

SEQ ID NO: 17682 - protein, 7 aa, synthetic construct
GGGGGGG

SEQ ID NO: 17683 - protein, 9 aa, synthetic construct
GGSPAPGSS

SEQ ID NO: 17684 - protein, 9 aa, synthetic construct
GGGGSSGGS

SEQ ID NO: 17685 - protein, 6 aa, synthetic construct
PAPGGS

SEQ ID NO: 17686 - protein, 9 aa, synthetic construct
PAPGSSGGS

SEQ ID NO: 17687 - protein, 25 aa, synthetic construct
EAAAKEAAAKEAAAKEAAAKEAAAK

SEQ ID NO: 17688 - protein, 33 aa, synthetic construct; identical to SEQ ID NO: 6

SEQ ID NO: 17689 - protein, 15 aa, synthetic construct
GGSGGSGGSGGSGGS

SEQ ID NO: 17690 - protein, 8 aa, synthetic construct
GSSEAAAK

SEQ ID NO: 17691 - protein, 20 aa, synthetic construct
EAAAKEAAAKEAAAKEAAAK

SEQ ID NO: 17692 - protein, 15 aa, synthetic construct
GGSGGSGGSGGSGGS

SEQ ID NO: 17693 - protein, 13 aa, synthetic construct
PAPAPAPAPAPAP

SEQ ID NO: 17694 - protein, 11 aa, synthetic construct
GGSPAPEAAAK

SEQ ID NO: 17695 - protein, 5 aa, synthetic construct
EAAAK

SEQ ID NO: 17696 - protein, 11 aa, synthetic construct
EAAAKGSSGGS

SEQ ID NO: 17697 - protein, 9 aa, synthetic construct
GGSGGGGSS

SEQ ID NO: 17698 - protein, 11 aa, synthetic construct
GGGEAAAKPAP

SEQ ID NO: 17699 - protein, 11 aa, synthetic construct
EAAAKGGSGGG

SEQ ID NO: 17700 - protein, 11 aa, synthetic construct
GGGGGSEAAAK

SEQ ID NO: 17701 - protein, 6 aa, synthetic construct
GGGGGG

SEQ ID NO: 17702 - protein, 6 aa, synthetic construct
GGGGGG

SEQ ID NO: 17703 - protein, 7 aa, synthetic construct
GGGGGGG

SEQ ID NO: 17704 - protein, 46 aa, synthetic construct; identical to SEQ ID NO: 217

SEQ ID NO: 17705 - protein, 9 aa, synthetic construct
PAPGSSGGS

SEQ ID NO: 17706 - protein, 6 aa, synthetic construct
GGGGGS

SEQ ID NO: 17707 - protein, 8 aa, synthetic construct
EAAAKPAP

SEQ ID NO: 17708 - skipped

SEQ ID NO: 17709 - protein, 46 aa, synthetic construct; identical to SEQ ID NO: 217

SEQ ID NO: 17710 - protein, 11 aa, synthetic construct
EAAAKGSSPAP

SEQ ID NO: 17711 - protein, 16 aa, synthetic construct
SGSETPGTSESATPES

SEQ ID NO: 17712 - protein, 11 aa, synthetic construct
GGSPAPEAAAK

SEQ ID NO: 17713 - protein, 12 aa, synthetic construct
GSSGSSGSSGSS

SEQ ID NO: 17714 - protein, 46 aa, synthetic construct; identical to SEQ ID NO: 217

SEQ ID NO: 17715 - protein, 6 aa, synthetic construct
GGSPAP

SEQ ID NO: 17716 - protein, 11 aa, synthetic construct
GGGGGSEAAAK

SEQ ID NO: 17717 - protein, 5 aa, synthetic construct
GGGGG

SEQ ID NO: 17718 - protein, 8 aa, synthetic construct
GSSEAAAK

SEQ ID NO: 17719 - skipped

SEQ ID NO: 17720 - protein, 11 aa, synthetic construct
EAAAKGGSPAP

SEQ ID NO: 17721 - protein, 9 aa, synthetic construct
PAPAPAPAP

SEQ ID NO: 17722 - protein, 11 aa, synthetic construct
PAPGGGEAAAK

SEQ ID NO: 17723 - protein, 11 aa, synthetic construct
GGGGSSEAAAK

SEQ ID NO: 17724 - protein, 5 aa, synthetic construct
GGGGG

SEQ ID NO: 17725 - protein, 18 aa, synthetic construct
GGSGGSGGSGGSGGSGGS

SEQ ID NO: 17726 - protein, 5 aa, synthetic construct
GGGGG

SEQ ID NO: 17727 - protein, 11 aa, synthetic construct
PAPEAAAKGGG

SEQ ID NO: 17728 - protein, 9 aa, synthetic construct
GSSGGGPAP

SEQ ID NO: 17729 - protein, 18 aa, synthetic construct
GSSGSSGSSGSSGSSGSS

SEQ ID NO: 17730 - protein, 11 aa, synthetic construct
EAAAKGGSPAP

SEQ ID NO: 17731 - protein, 11 aa, synthetic construct
GSSGGSEAAAK

SEQ ID NO: 17732 - skipped

SEQ ID NO: 17733 - protein, 8 aa, synthetic construct
EAAAKGGS

SEQ ID NO: 17734 - protein, 9 aa, synthetic construct
GGGGGSPAP

SEQ ID NO: 17735 - protein, 8 aa, synthetic construct
EAAAKGSS

SEQ ID NO: 17736 - protein, 11 aa, synthetic construct
EAAAKGGGGSS

SEQ ID NO: 17737 - protein, 9 aa, synthetic construct
PAPGSSGGG

SEQ ID NO: 17738 - protein, 11 aa, synthetic construct
GGGGSSEAAAK

SEQ ID NO: 17739 - protein, 7 aa, synthetic construct
PAPAPAP

SEQ ID NO: 17740 - protein, 11 aa, synthetic construct
GSSGGSEAAAK

SEQ ID NO: 17741 - protein, 11 aa, synthetic construct
PAPEAAAKGSS

SEQ ID NO: 17742 - protein, 15 aa, synthetic construct
GGSGGSGGSGGSGGS

SEQ ID NO: 17743 - protein, 9 aa, synthetic construct
GGSGSSPAP

SEQ ID NO: 17744 - protein, 9 aa, synthetic construct
GGGGSSPAP

SEQ ID NO: 17745 - protein, 5 aa, synthetic construct
GGGGS

SEQ ID NO: 17746 - protein, 20 aa, synthetic construct
EAAAKEAAAKEAAAKEAAAK

SEQ ID NO: 17747 - protein, 10 aa, synthetic construct
EAAAKEAAAK

SEQ ID NO: 17748 - protein, 11 aa, synthetic construct
PAPGGGEAAAK

SEQ ID NO: 17749 - protein, 11 aa, synthetic construct
GSSGGSEAAAK

SEQ ID NO: 17750 - protein, 30 aa, synthetic construct; identical to SEQ ID NO: 130

SEQ ID NO: 17751 - protein, 11 aa, synthetic construct
GSSEAAAKPAP

SEQ ID NO: 17752 - protein, 11 aa, synthetic construct
EAAAKPAPGSS

SEQ ID NO: 17753 - protein, 9 aa, synthetic construct
GSSGGSPAP

SEQ ID NO: 17754 - protein, 11 aa, synthetic construct
GSSEAAAKGGG

SEQ ID NO: 17755 - protein, 11 aa, synthetic construct
GGGEAAAKGGS

SEQ ID NO: 17756 - protein, 11 aa, synthetic construct
GSSEAAAKGGG

SEQ ID NO: 17757 - protein, 7 aa, synthetic construct
PAPAPAP

SEQ ID NO: 17758 - protein, 11 aa, synthetic construct
EAAAKGGSPAP

SEQ ID NO: 17759 - protein, 11 aa, synthetic construct
PAPGGSEAAAK

SEQ ID NO: 17760 - protein, 5 aa, synthetic construct
GGGGS

SEQ ID NO: 17761 - protein, 11 aa, synthetic construct
EAAAKGSSGGG

SEQ ID NO: 17762 - protein, 11 aa, synthetic construct
EAAAKGGGPAP

SEQ ID NO: 17763 - protein, 8 aa, synthetic construct
EAAAKGSS

SEQ ID NO: 17764 - protein, 9 aa, synthetic construct
GGSPAPGGG

SEQ ID NO: 17765 - protein, 15 aa, synthetic construct
GGGGSEAAAKGGGGS

SEQ ID NO: 17766 - protein, 11 aa, synthetic construct
GGGEAAAKGGS

SEQ ID NO: 17767 - protein, 11 aa, synthetic construct
EAAAKGGGGSS

SEQ ID NO: 17768 - protein, 11 aa, synthetic construct
EAAAKGGGPAP

SEQ ID NO: 17769 - protein, 6 aa, synthetic construct
GSSPAP

SEQ ID NO: 17770 - protein, 8 aa, synthetic construct
EAAAKGGS

SEQ ID NO: 17771 - protein, 6 aa, synthetic construct
GGGGSS

SEQ ID NO: 17772 - protein, 11 aa, synthetic construct
EAAAKGSSPAP

SEQ ID NO: 17773 - protein, 6 aa, synthetic construct
GGGPAP

SEQ ID NO: 17774 - protein, 11 aa, synthetic construct
EAAAKGSSGGS

SEQ ID NO: 17775 - protein, 6 aa, synthetic construct
PAPGGG

SEQ ID NO: 17776 - protein, 11 aa, synthetic construct
GSSPAPEAAAK

SEQ ID NO: 17777 - protein, 6 aa, synthetic construct
GGGPAP

SEQ ID NO: 17778 - protein, 9 aa, synthetic construct
GSSGGGGGS

SEQ ID NO: 17779 - protein, 16 aa, synthetic construct
SGSETPGTSESATPES

SEQ ID NO: 17780 - protein, 6 aa, synthetic construct
GGGPAP

SEQ ID NO: 17781 - protein, 11 aa, synthetic construct
EAAAKGGGGSS

SEQ ID NO: 17782 - protein, 9 aa, synthetic construct
GGGGSSPAP

SEQ ID NO: 17783 - protein, 15 aa, synthetic construct
GGGGSEAAAKGGGGS

SEQ ID NO: 17784 - protein, 6 aa, synthetic construct
GSSPAP

SEQ ID NO: 17785 - protein, 11 aa, synthetic construct
GGSGSSEAAAK

SEQ ID NO: 17786 - protein, 16 aa, synthetic construct
SGSETPGTSESATPES

SEQ ID NO: 17787 - protein, 6 aa, synthetic construct
PAPGGG

SEQ ID NO: 17788 - protein, 11 aa, synthetic construct
GGGEAAAKPAP

SEQ ID NO: 17789 - protein, 11 aa, synthetic construct
EAAAKGGSGSS

SEQ ID NO: 17790 - protein, 9 aa, synthetic construct
GGSPAPGGG

SEQ ID NO: 17791 - protein, 9 aa, synthetic construct
PAPGGSGSS

SEQ ID NO: 17792 - protein, 9 aa, synthetic construct
GSSGGSPAP

SEQ ID NO: 17793 - protein, 11 aa, synthetic construct
EAAAKGSSGGG

SEQ ID NO: 17794 - protein, 10 aa, synthetic construct
GGGGSGGGGS

SEQ ID NO: 17795 - protein, 9 aa, synthetic construct
GSSGGGGGS

SEQ ID NO: 17796 - protein, 9 aa, synthetic construct
GGGGSSGGS

SEQ ID NO: 17797 - protein, 8 aa, synthetic construct
EAAAKGGS

SEQ ID NO: 17798 - protein, 12 aa, synthetic construct
GSSGSSGSSGSS

SEQ ID NO: 17799 - skipped

SEQ ID NO: 17800 - protein, 11 aa, synthetic construct
GSSGGSEAAAK

SEQ ID NO: 17801 - protein, 33 aa, synthetic construct; identical to SEQ ID NO: 6

SEQ ID NO: 17802 - protein, 5 aa, synthetic construct
GGGGG

SEQ ID NO: 17803 - protein, 11 aa, synthetic construct
PAPEAAAKGSS

SEQ ID NO: 17804 - protein, 6 aa, synthetic construct
GGGGGG

SEQ ID NO: 17805 - protein, 8 aa, synthetic construct
EAAAKGGG

SEQ ID NO: 17806 - protein, 6 aa, synthetic construct
GGGGSS

SEQ ID NO: 17807 - protein, 11 aa, synthetic construct
GSSGGGEAAAK

SEQ ID NO: 17808 - protein, 6 aa, synthetic construct
GGSGSS

SEQ ID NO: 17809 - protein, 8 aa, synthetic construct
EAAAKPAP

SEQ ID NO: 17810 - protein, 15 aa, synthetic construct
EAAAKEAAAKEAAAK

SEQ ID NO: 17811 - protein, 4 aa, synthetic construct
GGGG

SEQ ID NO: 17812 - protein, 9 aa, synthetic construct
GSSPAPGGS

SEQ ID NO: 17813 - protein, 9 aa, synthetic construct
GSSGGGGGS

SEQ ID NO: 17814 - protein, 9 aa, synthetic construct
GGGGSSGGS

SEQ ID NO: 17815 - skipped

SEQ ID NO: 17816 - protein, 5 aa, synthetic construct
GGGGG

SEQ ID NO: 17817 - protein, 18 aa, synthetic construct
GSSGSSGSSGSSGSSGSS

SEQ ID NO: 17818 - protein, 9 aa, synthetic construct
PAPGGGGSS

SEQ ID NO: 17819 - protein, 8 aa, synthetic construct
GGGGGGGG

SEQ ID NO: 17820 - protein, 16 aa, synthetic construct
SGSETPGTSESATPES

SEQ ID NO: 17821 - protein, 6 aa, synthetic construct
PAPGGG

SEQ ID NO: 17822 - protein, 9 aa, synthetic construct
GSSGSSGSS

SEQ ID NO: 17823 - protein, 6 aa, synthetic construct
GGSGSS

SEQ ID NO: 17824 - protein, 15 aa, synthetic construct
EAAAKGGGGSEAAAK

SEQ ID NO: 17825 - protein, 8 aa, synthetic construct
GGGGGGGG

SEQ ID NO: 17826 - protein, 6 aa, synthetic construct
GSSGSS

SEQ ID NO: 17827 - protein, 11 aa, synthetic construct
PAPEAAAKGGS

SEQ ID NO: 17828 - protein, 10 aa, synthetic construct
EAAAKEAAAK

SEQ ID NO: 17829 - protein, 15 aa, synthetic construct
GGGGSGGGGSGGGGS

SEQ ID NO: 17830 - protein, 11 aa, synthetic construct
EAAAKGSSPAP

SEQ ID NO: 17831 - protein, 11 aa, synthetic construct
GGGGSSEAAAK

SEQ ID NO: 17832 - protein, 11 aa, synthetic construct
GGGGSSEAAAK

SEQ ID NO: 17833 - protein, 9 aa, synthetic construct
PAPGGSGSS

SEQ ID NO: 17834 - protein, 11 aa, synthetic construct
GGSGGGEAAAK

SEQ ID NO: 17835 - protein, 11 aa, synthetic construct
PAPEAAAKGGS

SEQ ID NO: 17836 - protein, 9 aa, synthetic construct
GGGPAPGSS

SEQ ID NO: 17837 - protein, 9 aa, synthetic construct
PAPGGSGGG

SEQ ID NO: 17838 - protein, 8 aa, synthetic construct
GGGGGGGG

SEQ ID NO: 17839 - protein, 8 aa, synthetic construct
GSSEAAAK

SEQ ID NO: 17840 - protein, 15 aa, synthetic construct
GGGGSGGGGSGGGGS

SEQ ID NO: 17841 - protein, 8 aa, synthetic construct
EAAAKGGS

SEQ ID NO: 17842 - protein, 9 aa, synthetic construct
GGGGGSGSS

SEQ ID NO: 17843 - protein, 6 aa, synthetic construct
GGGPAP

SEQ ID NO: 17844 - protein, 11 aa, synthetic construct
EAAAKPAPGGG

SEQ ID NO: 17845 - protein, 9 aa, synthetic construct
GSSGGSPAP

SEQ ID NO: 17846 - protein, 33 aa, synthetic construct; identical to SEQ ID NO: 6

SEQ ID NO: 17847 - protein, 9 aa, synthetic construct
PAPAPAPAP

SEQ ID NO: 17848 - protein, 6 aa, synthetic construct
GSSGGS

SEQ ID NO: 17849 - protein, 11 aa, synthetic construct
GSSEAAAKGGG

SEQ ID NO: 17850 - protein, 9 aa, synthetic construct
GGSGSSPAP

SEQ ID NO: 17851 - protein, 11 aa, synthetic construct
GSSEAAAKGGS

SEQ ID NO: 17852 - protein, 25 aa, synthetic construct
EAAAKEAAAKEAAAKEAAAKEAAAK

SEQ ID NO: 17853 - protein, 9 aa, synthetic construct
PAPGGGGSS

SEQ ID NO: 17854 - protein, 8 aa, synthetic construct
EAAAKGSS

SEQ ID NO: 17855 - protein, 46 aa, synthetic construct; identical to SEQ ID NO: 217

SEQ ID NO: 17856 - protein, 18 aa, synthetic construct
GGSGGSGGSGGSGGSGGS

SEQ ID NO: 17857 - protein, 6 aa, synthetic construct
GGGGGG

SEQ ID NO: 17858 - protein, 8 aa, synthetic construct
PAPEAAAK

SEQ ID NO: 17859 - protein, 11 aa, synthetic construct
GGSGSSEAAAK

SEQ ID NO: 17860 - skipped

SEQ ID NO: 17861 - protein, 5 aa, synthetic construct
GGGGG

SEQ ID NO: 17862 - protein, 12 aa, synthetic construct
GGSGGSGGSGGS

SEQ ID NO: 17863 - protein, 18 aa, synthetic construct
GSSGSSGSSGSSGSSGSS

SEQ ID NO: 17864 - protein, 11 aa, synthetic construct
GSSEAAAKPAP

SEQ ID NO: 17865 - protein, 11 aa, synthetic construct
GGGEAAAKPAP

SEQ ID NO: 17866 - protein, 9 aa, synthetic construct
GSSGSSGSS

SEQ ID NO: 17867 - protein, 9 aa, synthetic construct
PAPAPAPAP

SEQ ID NO: 17868 - protein, 8 aa, synthetic construct
EAAAKGGG

SEQ ID NO: 17869 - protein, 13 aa, synthetic construct
PAPAPAPAPAPAP

SEQ ID NO: 17870 - protein, 11 aa, synthetic construct
EAAAKGGSGSS

SEQ ID NO: 17871 - protein, 6 aa, synthetic construct
GGGGGG

SEQ ID NO: 17872 - protein, 6 aa, synthetic construct
PAPGGG

SEQ ID NO: 17873 - protein, 9 aa, synthetic construct
GGGGGSGSS

SEQ ID NO: 17874 - protein, 20 aa, synthetic construct
GGGGSGGGGSGGGGSGGGGS

SEQ ID NO: 17875 - protein, 9 aa, synthetic construct
GGSGGSGGS

SEQ ID NO: 17876 - protein, 11 aa, synthetic construct
EAAAKPAPGGG

SEQ ID NO: 17877 - protein, 46 aa, synthetic construct; identical to SEQ ID NO: 217

SEQ ID NO: 17878 - protein, 30 aa, synthetic construct; identical to SEQ ID NO: 112

SEQ ID NO: 17879 - protein, 15 aa, synthetic construct
EAAAKGGGGSEAAAK

SEQ ID NO: 17880 - protein, 9 aa, synthetic construct
GGGPAPGSS

SEQ ID NO: 17881 - protein, 5 aa, synthetic construct
GGGGG

SEQ ID NO: 17882 - protein, 30 aa, synthetic construct; identical to SEQ ID NO: 112

SEQ ID NO: 17883 - protein, 10 aa, synthetic construct
GGGGSGGGGS

SEQ ID NO: 17884 - protein, 11 aa, synthetic construct
EAAAKGGSPAP

SEQ ID NO: 17885 - protein, 11 aa, synthetic construct
EAAAKGSSPAP

SEQ ID NO: 17886 - protein, 9 aa, synthetic construct
PAPGGSGSS

SEQ ID NO: 17887-17888 - skipped (2 entries)

SEQ ID NO: 17889 - protein, 9 aa, synthetic construct
GGGPAPGSS

SEQ ID NO: 17890 - protein, 8 aa, synthetic construct
EAAAKPAP

SEQ ID NO: 17891 - protein, 11 aa, synthetic construct
GSSPAPEAAAK

SEQ ID NO: 17892 - protein, 9 aa, synthetic construct
GGSPAPGSS

SEQ ID NO: 17893 - protein, 11 aa, synthetic construct
GGGGGSEAAAK

SEQ ID NO: 17894 - protein, 11 aa, synthetic construct
PAPEAAAKGGG

SEQ ID NO: 17895 - protein, 6 aa, synthetic construct
PAPGGG

SEQ ID NO: 17896 - protein, 11 aa, synthetic construct
GGSPAPEAAAK

SEQ ID NO: 17897 - protein, 9 aa, synthetic construct
GGSGGGGSS

SEQ ID NO: 17898 - protein, 11 aa, synthetic construct
EAAAKGGGGSS

SEQ ID NO: 17899 - protein, 11 aa, synthetic construct
EAAAKGGSPAP

SEQ ID NO: 17900 - protein, 9 aa, synthetic construct
GGSGGGGSS

SEQ ID NO: 17901 - protein, 11 aa, synthetic construct
PAPGSSEAAAK

SEQ ID NO: 17902 - protein, 8 aa, synthetic construct
GSSEAAAK

SEQ ID NO: 17903 - protein, 12 aa, synthetic construct
GSAGSAAGSGEF

SEQ ID NO: 17904 - protein, 11 aa, synthetic construct
EAAAKGGSGSS

SEQ ID NO: 17905 - protein, 11 aa, synthetic construct
GGSEAAAKPAP

SEQ ID NO: 17906 - protein, 25 aa, synthetic construct
GGGGSGGGGSGGGGSGGGGSGGGGS

SEQ ID NO: 17907 - protein, 11 aa, synthetic construct
PAPGSSEAAAK

SEQ ID NO: 17908 - protein, 9 aa, synthetic construct
GGGGSSPAP

SEQ ID NO: 17909 - protein, 7 aa, synthetic construct
PAPAPAP

SEQ ID NO: 17910 - protein, 11 aa, synthetic construct
EAAAKPAPGGG

SEQ ID NO: 17911 - protein, 9 aa, synthetic construct
GGGPAPGSS

SEQ ID NO: 17912 - skipped

SEQ ID NO: 17913 - protein, 9 aa, synthetic construct
PAPGGSGGG

SEQ ID NO: 17914 - protein, 15 aa, synthetic construct
GGSGGSGGSGGSGGS

SEQ ID NO: 17915 - protein, 9 aa, synthetic construct
PAPAPAPAP

SEQ ID NO: 17916 - protein, 9 aa, synthetic construct
GSSPAPGGG

SEQ ID NO: 17917 - protein, 9 aa, synthetic construct
GSSPAPGGG

SEQ ID NO: 17918 - protein, 6 aa, synthetic construct
PAPGGG

SEQ ID NO: 17919 - protein, 11 aa, synthetic construct
GGGEAAAKGSS

SEQ ID NO: 17920 - protein, 8 aa, synthetic construct
EAAAKGSS

SEQ ID NO: 17921 - protein, 8 aa, synthetic construct
EAAAKGGS

SEQ ID NO: 17922 - protein, 25 aa, synthetic construct
EAAAKEAAAKEAAAKEAAAKEAAAK

SEQ ID NO: 17923 - protein, 11 aa, synthetic construct
PAPEAAAKGGG

SEQ ID NO: 17924 - protein, 11 aa, synthetic construct
EAAAKGSSGGG

SEQ ID NO: 17925 - protein, 46 aa, synthetic construct; identical to SEQ ID NO: 217

SEQ ID NO: 17926 - protein, 30 aa, synthetic construct; identical to SEQ ID NO: 130

SEQ ID NO: 17927 - protein, 9 aa, synthetic construct
GSSGGSGGG

SEQ ID NO: 17928 - protein, 12 aa, synthetic construct
GSSGSSGSSGSS

SEQ ID NO: 17929 - protein, 9 aa, synthetic construct
GGSPAPGGG

SEQ ID NO: 17930 - skipped

SEQ ID NO: 17931 - protein, 9 aa, synthetic construct
GGGPAPGSS

SEQ ID NO: 17932 - protein, 6 aa, synthetic construct
GGGGSS

SEQ ID NO: 17933 - protein, 9 aa, synthetic construct
GSSGGSGGG

SEQ ID NO: 17934 - protein, 15 aa, synthetic construct
EAAAKEAAAKEAAAK

SEQ ID NO: 17935 - protein, 33 aa, synthetic construct; identical to SEQ ID NO: 6

SEQ ID NO: 17936 - protein, 9 aa, synthetic construct
PAPGGGGGS

SEQ ID NO: 17937 - protein, 11 aa, synthetic construct
PAPAPAPAPAP

SEQ ID NO: 17938 - protein, 5 aa, synthetic construct
EAAAK

SEQ ID NO: 17939 - skipped

SEQ ID NO: 17940 - protein, 11 aa, synthetic construct
GGSEAAAKGGG

SEQ ID NO: 17941 - protein, 9 aa, synthetic construct
GGGGGSGSS

SEQ ID NO: 17942 - protein, 11 aa, synthetic construct
EAAAKGSSPAP

SEQ ID NO: 17943 - protein, 9 aa, synthetic construct
GGSGGSGGS

SEQ ID NO: 17944 - protein, 11 aa, synthetic construct
EAAAKPAPGGG

SEQ ID NO: 17945 - protein, 11 aa, synthetic construct
GGGPAPEAAAK

SEQ ID NO: 17946 - protein, 11 aa, synthetic construct
GGSPAPEAAAK

SEQ ID NO: 17947 - protein, 15 aa, synthetic construct
GGSGGSGGSGGSGGS

SEQ ID NO: 17948 - protein, 11 aa, synthetic construct
EAAAKGGSGSS

SEQ ID NO: 17949 - protein, 11 aa, synthetic construct
GGGEAAAKGGS

SEQ ID NO: 17950 - protein, 9 aa, synthetic construct
PAPAPAPAP

SEQ ID NO: 17951 - protein, 20 aa, synthetic construct
EAAAKEAAAKEAAAKEAAAK

SEQ ID NO: 17952 - protein, 8 aa, synthetic construct
EAAAKPAP

SEQ ID NO: 17953 - protein, 10 aa, synthetic construct
EAAAKEAAAK

SEQ ID NO: 17954 - protein, 8 aa, synthetic construct
EAAAKGGG

SEQ ID NO: 17955 - protein, 8 aa, synthetic construct
EAAAKGSS

SEQ ID NO: 17956 - protein, 30 aa, synthetic construct; identical to SEQ ID NO: 130

SEQ ID NO: 17957 - protein, 9 aa, synthetic construct
GGGPAPGSS

SEQ ID NO: 17958 - protein, 4 aa, synthetic construct
GGGG

SEQ ID NO: 17959 - protein, 11 aa, synthetic construct
EAAAKGGSGSS

SEQ ID NO: 17960 - protein, 15 aa, synthetic construct
GGGGSGGGGSGGGGS

SEQ ID NO: 17961 - protein, 5 aa, synthetic construct
EAAAK

SEQ ID NO: 17962 - protein, 6 aa, synthetic construct
GGGGSS

SEQ ID NO: 17963 - protein, 11 aa, synthetic construct
PAPEAAAKGGS

SEQ ID NO: 17964 - skipped

SEQ ID NO: 17965 - protein, 12 aa, synthetic construct
GSAGSAAGSGEF

SEQ ID NO: 17966 - protein, 30 aa, synthetic construct; identical to SEQ ID NO: 130

SEQ ID NO: 17967 - protein, 10 aa, synthetic construct
GGGGSGGGGS

SEQ ID NO: 17968 - protein, 5 aa, synthetic construct
EAAAK

SEQ ID NO: 17969 - protein, 9 aa, synthetic construct
GGGPAPGGS

SEQ ID NO: 17970 - protein, 15 aa, synthetic construct
GGGGSGGGGSGGGGS

SEQ ID NO: 17971 - protein, 6 aa, synthetic construct
PAPGGG

SEQ ID NO: 17972 - protein, 11 aa, synthetic construct
GGGEAAAKPAP

SEQ ID NO: 17973 - protein, 11 aa, synthetic construct
EAAAKPAPGSS

SEQ ID NO: 17974 - protein, 6 aa, synthetic construct
PAPGSS

SEQ ID NO: 17975 - protein, 12 aa, synthetic construct
GSAGSAAGSGEF

SEQ ID NO: 17976 - protein, 9 aa, synthetic construct
PAPGGGGSS

SEQ ID NO: 17977 - protein, 11 aa, synthetic construct
GSSGGGEAAAK

SEQ ID NO: 17978 - skipped

SEQ ID NO: 17979 - protein, 12 aa, synthetic construct
GSSGSSGSSGSS

SEQ ID NO: 17980 - protein, 11 aa, synthetic construct
PAPEAAAKGGG

SEQ ID NO: 17981 - protein, 11 aa, synthetic construct
GGGPAPEAAAK

SEQ ID NO: 17982 - protein, 9 aa, synthetic construct
PAPGGGGGS

SEQ ID NO: 17983 - protein, 20 aa, synthetic construct
EAAAKEAAAKEAAAKEAAAK

SEQ ID NO: 17984 - protein, 9 aa, synthetic construct
GGGGGSPAP

SEQ ID NO: 17985 - protein, 15 aa, synthetic construct
GSSGSSGSSGSSGSS

SEQ ID NO: 17986 - protein, 11 aa, synthetic construct
GSSPAPEAAAK

SEQ ID NO: 17987 - protein, 18 aa, synthetic construct
GSSGSSGSSGSSGSSGSS

SEQ ID NO: 17988 - protein, 18 aa, synthetic construct
GSSGSSGSSGSSGSSGSS

SEQ ID NO: 17989 - protein, 11 aa, synthetic construct
GGSPAPEAAAK

SEQ ID NO: 17990 - protein, 6 aa, synthetic construct
GSSGGG

SEQ ID NO: 17991 - protein, 11 aa, synthetic construct
EAAAKGSSGGS

SEQ ID NO: 17992 - protein, 11 aa, synthetic construct
GGSGSSEAAAK

SEQ ID NO: 17993 - protein, 11 aa, synthetic construct
GGGPAPEAAAK

SEQ ID NO: 17994 - protein, 9 aa, synthetic construct
GGGPAPGGS

SEQ ID NO: 17995 - protein, 5 aa, synthetic construct
GGGGG

SEQ ID NO: 17996 - protein, 11 aa, synthetic construct
GGGEAAAKPAP

SEQ ID NO: 17997 - protein, 10 aa, synthetic construct
GGGGSGGGGS

SEQ ID NO: 17998 - protein, 11 aa, synthetic construct
GGGPAPEAAAK

SEQ ID NO: 17999 - protein, 11 aa, synthetic construct
GGSGSSEAAAK

SEQ ID NO: 18000 - protein, 11 aa, synthetic construct
EAAAKGGGPAP

SEQ ID NO: 18001 - protein, 15 aa, synthetic construct
GSSGSSGSSGSSGSS

SEQ ID NO: 18002 - protein, 5 aa, synthetic construct
PAPAP

SEQ ID NO: 18003 - protein, 9 aa, synthetic construct
GGSPAPGSS

SEQ ID NO: 18004 - protein, 9 aa, synthetic construct
GGSGGGPAP

SEQ ID NO: 18005 - protein, 6 aa, synthetic construct
GGSPAP

SEQ ID NO: 18006 - protein, 11 aa, synthetic construct
EAAAKGGSPAP

SEQ ID NO: 18007 - protein, 9 aa, synthetic construct
GSSPAPGGG

SEQ ID NO: 18008 - protein, 12 aa, synthetic construct
GSAGSAAGSGEF

SEQ ID NO: 18009 - protein, 6 aa, synthetic construct
GGSPAP

SEQ ID NO: 18010 - protein, 6 aa, synthetic construct
GSSGSS

SEQ ID NO: 18011 - protein, 9 aa, synthetic construct
GGGPAPGSS

SEQ ID NO: 18012 - protein, 46 aa, synthetic construct; identical to SEQ ID NO: 217

SEQ ID NO: 18013 - protein, 9 aa, synthetic construct
PAPGSSGGG

SEQ ID NO: 18014 - protein, 11 aa, synthetic construct
GGSEAAAKPAP

SEQ ID NO: 18015 - protein, 6 aa, synthetic construct
GGGGGS

SEQ ID NO: 18016 - protein, 11 aa, synthetic construct
PAPEAAAKGGS

SEQ ID NO: 18017 - protein, 30 aa, synthetic construct; identical to SEQ ID NO: 130

SEQ ID NO: 18018 - protein, 8 aa, synthetic construct
GGSEAAAK

SEQ ID NO: 18019 - protein, 11 aa, synthetic construct
GSSPAPEAAAK

SEQ ID NO: 18020 - protein, 6 aa, synthetic construct
PAPGGG

SEQ ID NO: 18021 - protein, 8 aa, synthetic construct
EAAAKPAP

SEQ ID NO: 18022 - protein, 15 aa, synthetic construct
GSSGSSGSSGSSGSS

SEQ ID NO: 18023 - protein, 6 aa, synthetic construct
PAPGGG

SEQ ID NO: 18024 - protein, 11 aa, synthetic construct
GGSGGGEAAAK

SEQ ID NO: 18025 - protein, 6 aa, synthetic construct
PAPGGS

SEQ ID NO: 18026 - protein, 12 aa, synthetic construct
GGSGGSGGSGGS

SEQ ID NO: 18027 - protein, 20 aa, synthetic construct
EAAAKEAAAKEAAAKEAAAK

SEQ ID NO: 18028 - protein, 11 aa, synthetic construct
GGSEAAAKGGG

SEQ ID NO: 18029 - protein, 6 aa, synthetic construct
GGGPAP

SEQ ID NO: 18030 - protein, 30 aa, synthetic construct; identical to SEQ ID NO: 112

SEQ ID NO: 18031 - protein, 9 aa, synthetic construct
GGSPAPGSS

SEQ ID NO: 18032 - protein, 9 aa, synthetic construct
GGGPAPGSS

SEQ ID NO: 18033 - protein, 9 aa, synthetic construct
GGGGSSGGS

SEQ ID NO: 18034 - protein, 11 aa, synthetic construct
GGGEAAAKGSS

SEQ ID NO: 18035 - protein, 5 aa, synthetic construct
PAPAP

SEQ ID NO: 18036 - protein, 9 aa, synthetic construct
GGSPAPGGG

SEQ ID NO: 18037 - protein, 6 aa, synthetic construct
PAPGSS

SEQ ID NO: 18038 - protein, 9 aa, synthetic construct
GSSGGSPAP

SEQ ID NO: 18039 - protein, 15 aa, synthetic construct
EAAAKGGGGSEAAAK

SEQ ID NO: 18040 - protein, 11 aa, synthetic construct
GSSEAAAKGGS

SEQ ID NO: 18041 - protein, 9 aa, synthetic construct
PAPAPAPAP

SEQ ID NO: 18042 - protein, 11 aa, synthetic construct
GGSEAAAKPAP

SEQ ID NO: 18043 - protein, 6 aa, synthetic construct
PAPGGS

SEQ ID NO: 18044 - protein, 11 aa, synthetic construct
EAAAKGGGPAP

SEQ ID NO: 18045 - protein, 9 aa, synthetic construct
GGSGSSGGG

SEQ ID NO: 18046 - protein, 11 aa, synthetic construct
EAAAKGGSGSS

SEQ ID NO: 18047 - protein, 33 aa, synthetic construct; identical to SEQ ID NO: 6

SEQ ID NO: 18048 - protein, 11 aa, synthetic construct
GSSEAAAKGGS

SEQ ID NO: 18049 - protein, 5 aa, synthetic construct
GGGGG

SEQ ID NO: 18050 - protein, 30 aa, synthetic construct; identical to SEQ ID NO: 112

SEQ ID NO: 18051 - protein, 11 aa, synthetic construct
GGGEAAAKGSS

SEQ ID NO: 18052 - protein, 15 aa, synthetic construct
EAAAKGGGGSEAAAK

SEQ ID NO: 18053 - protein, 8 aa, synthetic construct
EAAAKGGG

SEQ ID NO: 18054 - protein, 6 aa, synthetic construct
GGSGGG

SEQ ID NO: 18055 - protein, 9 aa, synthetic construct
GGSGSSGGG

SEQ ID NO: 18056 - protein, 30 aa, synthetic construct; identical to SEQ ID NO: 112

SEQ ID NO: 18057 - protein, 15 aa, synthetic construct
GGGGSEAAAKGGGGS

SEQ ID NO: 18058 - protein, 11 aa, synthetic construct
PAPAPAPAPAP

SEQ ID NO: 18059 - skipped

SEQ ID NO: 18060 - protein, 11 aa, synthetic construct
GGGGGSEAAAK

SEQ ID NO: 18061 - protein, 15 aa, synthetic construct
GSSGSSGSSGSSGSS

SEQ ID NO: 18062 - protein, 25 aa, synthetic construct
EAAAKEAAAKEAAAKEAAAKEAAAK

SEQ ID NO: 18063 - protein, 9 aa, synthetic construct
GGSGSSGGG

SEQ ID NO: 18064 - skipped

SEQ ID NO: 18065 - protein, 11 aa, synthetic construct
GSSPAPEAAAK

SEQ ID NO: 18066 - protein, 11 aa, synthetic construct
EAAAKGGGGSS

SEQ ID NO: 18067 - protein, 11 aa, synthetic construct
GGGEAAAKGGS

SEQ ID NO: 18068 - protein, 9 aa, synthetic construct
GGSGGGPAP

SEQ ID NO: 18069 - protein, 12 aa, synthetic construct
GSAGSAAGSGEF

SEQ ID NO: 18070 - protein, 8 aa, synthetic construct
GSSEAAAK

SEQ ID NO: 18071 - protein, 6 aa, synthetic construct
PAPGSS

SEQ ID NO: 18072 - protein, 15 aa, synthetic construct
EAAAKEAAAKEAAAK

SEQ ID NO: 18073 - protein, 12 aa, synthetic construct
GSAGSAAGSGEF

SEQ ID NO: 18074 - protein, 12 aa, synthetic construct
GSSGSSGSSGSS

SEQ ID NO: 18075 - protein, 46 aa, synthetic construct; identical to SEQ ID NO: 217

SEQ ID NO: 18076 - protein, 11 aa, synthetic construct
GGGGSSEAAAK

SEQ ID NO: 18077 - protein, 11 aa, synthetic construct
GSSGGGEAAAK

SEQ ID NO: 18078 - protein, 8 aa, synthetic construct
EAAAKPAP

SEQ ID NO: 18079 - protein, 9 aa, synthetic construct
GGSPAPGGG

SEQ ID NO: 18080 - protein, 8 aa, synthetic construct
PAPEAAAK

SEQ ID NO: 18081 - protein, 9 aa, synthetic construct
GSSGSSGSS

SEQ ID NO: 18082 - protein, 11 aa, synthetic construct
GSSGGGEAAAK

SEQ ID NO: 18083 - protein, 6 aa, synthetic construct
GGSPAP

SEQ ID NO: 18084 - protein, 12 aa, synthetic construct
GSAGSAAGSGEF

SEQ ID NO: 18085 - protein, 11 aa, synthetic construct
PAPGGSEAAAK

SEQ ID NO: 18086 - protein, 11 aa, synthetic construct
GGSPAPEAAAK

SEQ ID NO: 18087 - protein, 9 aa, synthetic construct
GGGGGSPAP

SEQ ID NO: 18088 - protein, 11 aa, synthetic construct
EAAAKGSSPAP

SEQ ID NO: 18089 - protein, 11 aa, synthetic construct
EAAAKGGGPAP

SEQ ID NO: 18090 - protein, 6 aa, synthetic construct
PAPGSS

SEQ ID NO: 18091 - protein, 9 aa, synthetic construct
GGSGSSGGG

SEQ ID NO: 18092-18100 - skipped (9 entries)

SEQ ID NO: 18101 - DNA, 50 bp, synthetic construct
  source 1..50: mol_type = other DNA
gggtcaggagcccccccctgaacccaggataaccctcaaagtcggggggc

SEQ ID NO: 18102 - protein, 33 aa, synthetic construct; identical to SEQ ID NO: 6

SEQ ID NO: 18103 - protein, 18 aa, synthetic construct
GGSGGSGGSGGSGGSGGS

SEQ ID NO: 18104 - protein, 9 aa, synthetic construct
GGSGGSGGS

SEQ ID NO: 18105 - protein, 5 aa, synthetic construct
GGGGG

SEQ ID NO: 18106 - protein, 6 aa, synthetic construct
GGGPAP

SEQ ID NO: 18107 - protein, 9 aa, synthetic construct
PAPGGSGGG

SEQ ID NO: 18108 - protein, 15 aa, synthetic construct
GGGGSEAAAKGGGGS

SEQ ID NO: 18109 - protein, 11 aa, synthetic construct
EAAAKGSSGGG

SEQ ID NO: 18110 - protein, 11 aa, synthetic construct
GSSGGSEAAAK

SEQ ID NO: 18111 - protein, 11 aa, synthetic construct
EAAAKGGSGSS

SEQ ID NO: 18112 - protein, 11 aa, synthetic construct
PAPAPAPAPAP

SEQ ID NO: 18113 - protein, 30 aa, synthetic construct; identical to SEQ ID NO: 112

SEQ ID NO: 18114 - protein, 7 aa, synthetic construct
GGGGGGG

SEQ ID NO: 18115 - protein, 5 aa, synthetic construct
EAAAK

SEQ ID NO: 18116 - protein, 11 aa, synthetic construct
GGGEAAAKGGS

SEQ ID NO: 18117 - protein, 11 aa, synthetic construct
GGGEAAAKGGS

SEQ ID NO: 18118 - protein, 9 aa, synthetic construct
GGGGGSPAP

SEQ ID NO: 18119 - protein, 20 aa, synthetic construct
GGGGSGGGGSGGGGSGGGGS

SEQ ID NO: 18120 - protein, 7 aa, synthetic construct
GGGGGGG

SEQ ID NO: 18121 - protein, 13 aa, synthetic construct
PAPAPAPAPAPAP

SEQ ID NO: 18122 - protein, 9 aa, synthetic construct
GSSPAPGGG

SEQ ID NO: 18123 - protein, 9 aa, synthetic construct
GGGGGSPAP

SEQ ID NO: 18124 - protein, 15 aa, synthetic construct
GGGGSGGGGSGGGGS

SEQ ID NO: 18125 - protein, 15 aa, synthetic construct
GGGGSGGGGSGGGGS

SEQ ID NO: 18126 - protein, 11 aa, synthetic construct
GSSEAAAKGGS

SEQ ID NO: 18127 - protein, 15 aa, synthetic construct
GSSGSSGSSGSSGSS

SEQ ID NO: 18128 - protein, 11 aa, synthetic construct
EAAAKGGGGGS

SEQ ID NO: 18129 - protein, 9 aa, synthetic construct
GSSGGGGGS

SEQ ID NO: 18130 - protein, 11 aa, synthetic construct
GGGEAAAKPAP

SEQ ID NO: 18131 - protein, 9 aa, synthetic construct
GSSGGSPAP

SEQ ID NO: 18132 - protein, 9 aa, synthetic construct
GSSGGGPAP

SEQ ID NO: 18133 - protein, 9 aa, synthetic construct
GGGGGSGSS

SEQ ID NO: 18134 - protein, 46 aa, synthetic construct; identical to SEQ ID NO: 217

SEQ ID NO: 18135 - protein, 8 aa, synthetic construct
PAPEAAAK

SEQ ID NO: 18136 - protein, 15 aa, synthetic construct
GGGGSGGGGSGGGGS

SEQ ID NO: 18137 - protein, 9 aa, synthetic construct
GGSGSSGGG

SEQ ID NO: 18138 - protein, 8 aa, synthetic construct
EAAAKGGS

SEQ ID NO: 18139 - protein, 11 aa, synthetic construct
EAAAKGSSPAP

SEQ ID NO: 18140 - protein, 11 aa, synthetic construct
EAAAKGGSGSS

SEQ ID NO: 18141 - protein, 6 aa, synthetic construct
GSSGSS

SEQ ID NO: 18142 - protein, 9 aa, synthetic construct
PAPAPAPAP

SEQ ID NO: 18143 - protein, 6 aa, synthetic construct
GGSGGG

SEQ ID NO: 18144 - protein, 11 aa, synthetic construct
GGSGSSEAAAK

SEQ ID NO: 18145 - protein, 11 aa, synthetic construct
PAPEAAAKGSS

SEQ ID NO: 18146 - protein, 6 aa, synthetic construct
GGSGGS

SEQ ID NO: 18147 - protein, 7 aa, synthetic construct
GGGGGGG

SEQ ID NO: 18148 - protein, 11 aa, synthetic construct
GGSPAPEAAAK

SEQ ID NO: 18149 - protein, 30 aa, synthetic construct; identical to SEQ ID NO: 130

SEQ ID NO: 18150 - protein, 6 aa, synthetic construct
GGSPAP

SEQ ID NO: 18151 - protein, 11 aa, synthetic construct
GGSEAAAKGGG

SEQ ID NO: 18152 - protein, 10 aa, synthetic construct
GGGGSGGGGS

SEQ ID NO: 18153 - protein, 8 aa, synthetic construct
GGGEAAAK

SEQ ID NO: 18154 - protein, 30 aa, synthetic construct; identical to SEQ ID NO: 112

SEQ ID NO: 18155 - protein, 11 aa, synthetic construct
GGSEAAAKPAP

SEQ ID NO: 18156 - protein, 11 aa, synthetic construct
GSSGGGEAAAK

SEQ ID NO: 18157 - protein, 11 aa, synthetic construct
GGGGGSEAAAK

SEQ ID NO: 18158 - protein, 11 aa, synthetic construct
EAAAKGGSGGG

SEQ ID NO: 18159 - protein, 9 aa, synthetic construct
GGGGSSPAP

SEQ ID NO: 18160 - protein, 10 aa, synthetic construct
EAAAKEAAAK

SEQ ID NO: 18161 - protein, 46 aa, synthetic construct; identical to SEQ ID NO: 217

SEQ ID NO: 18162 - protein, 15 aa, synthetic construct
GSSGSSGSSGSSGSS

SEQ ID NO: 18163 - protein, 6 aa, synthetic construct
GSSGGG

SEQ ID NO: 18164 - protein, 6 aa, synthetic construct
GSSGGS

SEQ ID NO: 18165 - protein, 10 aa, synthetic construct
GGGGSGGGGS

SEQ ID NO: 18166 - protein, 6 aa, synthetic construct
PAPGSS

SEQ ID NO: 18167 - protein, 11 aa, synthetic construct
GGGPAPEAAAK

SEQ ID NO: 18168 - protein, 8 aa, synthetic construct
EAAAKGGS

SEQ ID NO: 18169 - protein, 4 aa, synthetic construct
GGGG

SEQ ID NO: 18170 - protein, 11 aa, synthetic construct
GGGGGSEAAAK

SEQ ID NO: 18171 - protein, 15 aa, synthetic construct
GSSGSSGSSGSSGSS

SEQ ID NO: 18172 - protein, 9 aa, synthetic construct
PAPGGSGGG

SEQ ID NO: 18173 - protein, 6 aa, synthetic construct
GGGPAP

SEQ ID NO: 18174 - protein, 11 aa, synthetic construct
GGGPAPEAAAK

SEQ ID NO: 18175 - protein, 8 aa, synthetic construct
GGGEAAAK

SEQ ID NO: 18176 - protein, 11 aa, synthetic construct
EAAAKPAPGSS

SEQ ID NO: 18177 - protein, 11 aa, synthetic construct
GGSGSSEAAAK

SEQ ID NO: 18178 - protein, 8 aa, synthetic construct
EAAAKGSS

SEQ ID NO: 18179 - protein, 11 aa, synthetic construct
GGSGSSEAAAK

SEQ ID NO: 18180 - protein, 6 aa, synthetic construct
GGSGGG

SEQ ID NO: 18181 - protein, 6 aa, synthetic construct
GGGPAP

SEQ ID NO: 18182 - protein, 9 aa, synthetic construct
GGSPAPGGG

SEQ ID NO: 18183 - protein, 11 aa, synthetic construct
GGGGGSEAAAK

SEQ ID NO: 18184 - protein, 11 aa, synthetic construct
EAAAKGSSGGS

SEQ ID NO: 18185 - protein, 5 aa, synthetic construct
PAPAP

SEQ ID NO: 18186 - protein, 9 aa, synthetic construct
GSSPAPGGS

SEQ ID NO: 18187 - protein, 11 aa, synthetic construct
GSSEAAAKGGG

SEQ ID NO: 18188 - protein, 11 aa, synthetic construct
EAAAKGGGGGS

SEQ ID NO: 18189 - protein, 15 aa, synthetic construct
GSSGSSGSSGSSGSS

SEQ ID NO: 18190 - protein, 11 aa, synthetic construct
EAAAKGGGGSS

SEQ ID NO: 18191 - protein, 8 aa, synthetic construct
EAAAKGSS

SEQ ID NO: 18192 - protein, 30 aa, synthetic construct; identical to SEQ ID NO: 130

SEQ ID NO: 18193 - protein, 8 aa, synthetic construct
EAAAKGGS

SEQ ID NO: 18194 - protein, 11 aa, synthetic construct
GSSGGSEAAAK

SEQ ID NO: 18195 - protein, 11 aa, synthetic construct
EAAAKPAPGGS

SEQ ID NO: 18196 - protein, 6 aa, synthetic construct
GGSGGS

SEQ ID NO: 18197 - protein, 11 aa, synthetic construct
EAAAKGSSGGG

SEQ ID NO: 18198 - protein, 12 aa, synthetic construct
GGSGGSGGSGGS

SEQ ID NO: 18199 - protein, 8 aa, synthetic construct
GGGGGGGG

SEQ ID NO: 18200 - protein, 11 aa, synthetic construct
GGSGSSEAAAK

SEQ ID NO: 18201 - protein, 8 aa, synthetic construct
EAAAKGGG

SEQ ID NO: 18202 - protein, 15 aa, synthetic construct
GGGGSGGGGSGGGGS

SEQ ID NO: 18203 - protein, 12 aa, synthetic construct
GGSGGSGGSGGS

SEQ ID NO: 18204 - protein, 11 aa, synthetic construct
PAPAPAPAPAP

SEQ ID NO: 18205 - protein, 20 aa, synthetic construct
EAAAKEAAAKEAAAKEAAAK

SEQ ID NO: 18206 - protein, 9 aa, synthetic construct
GGSGGSGGS

SEQ ID NO: 18207 - protein, 9 aa, synthetic construct
PAPGGGGSS

SEQ ID NO: 18208 - protein, 11 aa, synthetic construct
GSSEAAAKGGS

SEQ ID NO: 18209 - protein, 9 aa, synthetic construct
GSSGGGPAP

SEQ ID NO: 18210 - protein, 6 aa, synthetic construct
GGSGSS

SEQ ID NO: 18211 - protein, 11 aa, synthetic construct
GGGGGSEAAAK

SEQ ID NO: 18212 - protein, 8 aa, synthetic construct
GSSEAAAK

SEQ ID NO: 18213 - protein, 9 aa, synthetic construct
GGGGGSGSS

SEQ ID NO: 18214 - protein, 11 aa, synthetic construct
EAAAKGGSGSS

SEQ ID NO: 18215 - protein, 5 aa, synthetic construct
GGGGG

SEQ ID NO: 18216 - protein, 5 aa, synthetic construct
EAAAK

SEQ ID NO: 18217 - protein, 13 aa, synthetic construct
PAPAPAPAPAPAP

SEQ ID NO: 18218 - protein, 20 aa, synthetic construct
EAAAKEAAAKEAAAKEAAAK

SEQ ID NO: 18219 - protein, 15 aa, synthetic construct
EAAAKGGGGSEAAAK

SEQ ID NO: 18220 - protein, 9 aa, synthetic construct
PAPGGSGGG

SEQ ID NO: 18221 - protein, 9 aa, synthetic construct
GGSGGGPAP

SEQ ID NO: 18222 - protein, 11 aa, synthetic construct
GGGGSSEAAAK

SEQ ID NO: 18223 - protein, 9 aa, synthetic construct
PAPGGGGSS

SEQ ID NO: 18224 - protein, 12 aa, synthetic construct
GGSGGSGGSGGS

SEQ ID NO: 18225 - protein, 9 aa, synthetic construct
PAPGGSGGG

SEQ ID NO: 18226 - protein, 9 aa, synthetic construct
GSSPAPGGS

SEQ ID NO: 18227 - protein, 9 aa, synthetic construct
GSSGSSGSS

SEQ ID NO: 18228 - protein, 9 aa, synthetic construct
PAPGGGGGS

SEQ ID NO: 18229 - protein, 6 aa, synthetic construct
GSSPAP

SEQ ID NO: 18230 - protein, 6 aa, synthetic construct
GGSGGG

SEQ ID NO: 18231 - protein, 15 aa, synthetic construct
EAAAKGGGGSEAAAK

SEQ ID NO: 18232 - protein, 11 aa, synthetic construct
GGSPAPEAAAK

SEQ ID NO: 18233 - protein, 8 aa, synthetic construct
EAAAKPAP

SEQ ID NO: 18234 - protein, 30 aa, synthetic construct; identical to SEQ ID NO: 112

SEQ ID NO: 18235 - protein, 11 aa, synthetic construct
EAAAKGGGGSS

SEQ ID NO: 18236 - protein, 10 aa, synthetic construct
EAAAKEAAAK

SEQ ID NO: 18237 - protein, 11 aa, synthetic construct
GSSEAAAKGGS

SEQ ID NO: 18238 - protein, 6 aa, synthetic construct
GGSPAP

SEQ ID NO: 18239 - protein, 20 aa, synthetic construct
EAAAKEAAAKEAAAKEAAAK

SEQ ID NO: 18240 - protein, 15 aa, synthetic construct
GSSGSSGSSGSSGSS

SEQ ID NO: 18241 - protein, 8 aa, synthetic construct
PAPEAAAK

SEQ ID NO: 18242 - protein, 9 aa, synthetic construct
GSSGGSPAP

SEQ ID NO: 18243 - protein, 9 aa, synthetic construct
GGGPAPGGS

SEQ ID NO: 18244 - protein, 11 aa, synthetic construct
EAAAKPAPGGS

SEQ ID NO: 18245 - protein, 10 aa, synthetic construct
GGGGSGGGGS

SEQ ID NO: 18246 - protein, 8 aa, synthetic construct
GGGEAAAK

SEQ ID NO: 18247 - protein, 11 aa, synthetic construct
EAAAKGGGGGS

SEQ ID NO: 18248 - protein, 9 aa, synthetic construct
GGSPAPGSS

SEQ ID NO: 18249 - protein, 11 aa, synthetic construct
GSSPAPEAAAK

SEQ ID NO: 18250 - protein, 12 aa, synthetic construct
GSAGSAAGSGEF

SEQ ID NO: 18251 - protein, 5 aa, synthetic construct
EAAAK

SEQ ID NO: 18252 - protein, 11 aa, synthetic construct
EAAAKGGGGSS

SEQ ID NO: 18253 - protein, 9 aa, synthetic construct
GGSGSSPAP

SEQ ID NO: 18254 - protein, 11 aa, synthetic construct
GGSEAAAKPAP

SEQ ID NO: 18255 - protein, 11 aa, synthetic construct
EAAAKGGSGSS

SEQ ID NO: 18256 - protein, 6 aa, synthetic construct
PAPGSS

SEQ ID NO: 18257 - protein, 11 aa, synthetic construct
PAPEAAAKGGG

SEQ ID NO: 18258 - protein, 46 aa, synthetic construct; identical to SEQ ID NO: 217

SEQ ID NO: 18259 - protein, 9 aa, synthetic construct
GSSGSSGSS

SEQ ID NO: 18260 - protein, 6 aa, synthetic construct
PAPGGG

SEQ ID NO: 18261 - protein, 6 aa, synthetic construct
PAPGGS

SEQ ID NO: 18262 - protein, 6 aa, synthetic construct
GSSGGG

SEQ ID NO: 18263 - protein, 18 aa, synthetic construct
GSSGSSGSSGSSGSSGSS

SEQ ID NO: 18264 - protein, 11 aa, synthetic construct
EAAAKGSSPAP

SEQ ID NO: 18265 - protein, 12 aa, synthetic construct
GSSGSSGSSGSS

SEQ ID NO: 18266 - protein, 25 aa, synthetic construct
GGGGSGGGGSGGGGSGGGGSGGGGS

SEQ ID NO: 18267 - protein, 5 aa, synthetic construct
GGGGS

SEQ ID NO: 18268 - protein, 11 aa, synthetic construct
EAAAKGSSGGG

SEQ ID NO: 18269 - protein, 6 aa, synthetic construct
GGGGGG

SEQ ID NO: 18270 - protein, 11 aa, synthetic construct
GGSGSSEAAAK

SEQ ID NO: 18271 - protein, 11 aa, synthetic construct
GSSPAPEAAAK

SEQ ID NO: 18272 - protein, 10 aa, synthetic construct
GGGGSGGGGS

SEQ ID NO: 18273 - protein, 9 aa, synthetic construct
GSSGGGGGS

SEQ ID NO: 18274 - protein, 12 aa, synthetic construct
GSAGSAAGSGEF

SEQ ID NO: 18275 - protein, 11 aa, synthetic construct
GGGEAAAKGSS

SEQ ID NO: 18276 - protein, 46 aa, synthetic construct; identical to SEQ ID NO: 217

SEQ ID NO: 18277 - protein, 9 aa, synthetic construct
PAPGGSGGG

SEQ ID NO: 18278 - protein, 25 aa, synthetic construct
EAAAKEAAAKEAAAKEAAAKEAAAK

SEQ ID NO: 18279 - protein, 9 aa, synthetic construct
GGSGSSPAP

SEQ ID NO: 18280 - protein, 6 aa, synthetic construct
GGGGGG

SEQ ID NO: 18281 - protein, 25 aa, synthetic construct
EAAAKEAAAKEAAAKEAAAKEAAAK

SEQ ID NO: 18282 - protein, 11 aa, synthetic construct
EAAAKGSSPAP

SEQ ID NO: 18283 - protein, 9 aa, synthetic construct
GGGPAPGGS

SEQ ID NO: 18284 - protein, 46 aa, synthetic construct; identical to SEQ ID NO: 217

SEQ ID NO: 18285 - protein, 8 aa, synthetic construct
EAAAKGGS

SEQ ID NO: 18286 - protein, 11 aa, synthetic construct
GSSGGSEAAAK

SEQ ID NO: 18287 - protein, 11 aa, synthetic construct
GGSGSSEAAAK

SEQ ID NO: 18288 - protein, 15 aa, synthetic construct
EAAAKEAAAKEAAAK

SEQ ID NO: 18289 - protein, 11 aa, synthetic construct
GGSGGGEAAAK

SEQ ID NO: 18290 - protein, 20 aa, synthetic construct
GGGGSGGGGSGGGGSGGGGS

SEQ ID NO: 18291 - protein, 8 aa, synthetic construct
EAAAKGSS

SEQ ID NO: 18292 - protein, 9 aa, synthetic construct
GSSGGGGGS

SEQ ID NO: 18293 - protein, 18 aa, synthetic construct
GSSGSSGSSGSSGSSGSS

SEQ ID NO: 18294 - protein, 6 aa, synthetic construct
GGSGSS

SEQ ID NO: 18295 - protein, 15 aa, synthetic construct
EAAAKGGGGSEAAAK

SEQ ID NO: 18296 - protein, 11 aa, synthetic construct
EAAAKGGGPAP

SEQ ID NO: 18297 - protein, 11 aa, synthetic construct
GGSEAAAKGGG

SEQ ID NO: 18298 - protein, 30 aa, synthetic construct; identical to SEQ ID NO: 130

SEQ ID NO: 18299 - protein, 30 aa, synthetic construct; identical to SEQ ID NO: 130

SEQ ID NO: 18300 - protein, 11 aa, synthetic construct
GSSPAPEAAAK

SEQ ID NO: 18301 - protein, 15 aa, synthetic construct
GGGGSEAAAKGGGGS

SEQ ID NO: 18302 - protein, 12 aa, synthetic construct
GSSGSSGSSGSS

SEQ ID NO: 18303 - protein, 8 aa, synthetic construct
GGSEAAAK

SEQ ID NO: 18304 - protein, 8 aa, synthetic construct
GGGGGGGG

SEQ ID NO: 18305 - protein, 6 aa, synthetic construct
GSSGGG

SEQ ID NO: 18306 - protein, 8 aa, synthetic construct
EAAAKGGS

SEQ ID NO: 18307 - protein, 5 aa, synthetic construct
GGGGS

SEQ ID NO: 18308 - protein, 11 aa, synthetic construct
GGSEAAAKGGG

SEQ ID NO: 18309 - protein, 9 aa, synthetic construct
GGSGSSGGG

SEQ ID NO: 18310 - protein, 11 aa, synthetic construct
GGSGSSEAAAK

SEQ ID NO: 18311 - protein, 11 aa, synthetic construct
EAAAKGGSGSS

SEQ ID NO: 18312 - protein, 9 aa, synthetic construct
GGGPAPGSS

SEQ ID NO: 18313 - protein, 15 aa, synthetic construct
GSSGSSGSSGSSGSS

SEQ ID NO: 18314 - protein, 11 aa, synthetic construct
GGGEAAAKPAP

SEQ ID NO: 18315 - protein, 6 aa, synthetic construct
GSSGGG

SEQ ID NO: 18316 - protein, 9 aa, synthetic construct
GGSPAPGSS

SEQ ID NO: 18317 - protein, 6 aa, synthetic construct
PAPGGS

SEQ ID NO: 18318 - protein, 11 aa, synthetic construct
PAPAPAPAPAP

SEQ ID NO: 18319 - protein, 6 aa, synthetic construct
GSSGGS

SEQ ID NO: 18320 - protein, 11 aa, synthetic construct
GSSGGSEAAAK

SEQ ID NO: 18321 - protein, 11 aa, synthetic construct
EAAAKGSSGGS

SEQ ID NO: 18322 - protein, 8 aa, synthetic construct
EAAAKGGG

SEQ ID NO: 18323 - protein, 9 aa, synthetic construct
PAPGGGGGS

SEQ ID NO: 18324 - protein, 15 aa, synthetic construct
GGGGSEAAAKGGGGS

SEQ ID NO: 18325 - protein, 30 aa, synthetic construct; identical to SEQ ID NO: 130

SEQ ID NO: 18326 - protein, 9 aa, synthetic construct
GSSGGSPAP

SEQ ID NO: 18327 - protein, 6 aa, synthetic construct
PAPGSS

SEQ ID NO: 18328 - protein, 11 aa, synthetic construct
GGSEAAAKGGG

SEQ ID NO: 18329 - protein, 11 aa, synthetic construct
GGSEAAAKPAP

SEQ ID NO: 18330 - protein, 9 aa, synthetic construct
GGGGSSPAP

SEQ ID NO: 18331 - protein, 25 aa, synthetic construct
EAAAKEAAAKEAAAKEAAAKEAAAK

SEQ ID NO: 18332 - protein, 4 aa, synthetic construct
GGGG

SEQ ID NO: 18333 - protein, 11 aa, synthetic construct
GGSEAAAKPAP

SEQ ID NO: 18334 - protein, 9 aa, synthetic construct
PAPGSSGGG

SEQ ID NO: 18335 - protein, 11 aa, synthetic construct
PAPEAAAKGGS

SEQ ID NO: 18336 - protein, 9 aa, synthetic construct
GGGGSSPAP

SEQ ID NO: 18337 - protein, 20 aa, synthetic construct
GGGGSGGGGSGGGGSGGGGS

SEQ ID NO: 18338 - protein, 8 aa, synthetic construct
GGGEAAAK

SEQ ID NO: 18339 - protein, 6 aa, synthetic construct
GGGGSS

SEQ ID NO: 18340 - protein, 9 aa, synthetic construct
GGSPAPGSS

SEQ ID NO: 18341 - protein, 5 aa, synthetic construct
GGGGS

SEQ ID NO: 18342 - protein, 11 aa, synthetic construct
EAAAKGSSGGS

SEQ ID NO: 18343 - protein, 4 aa, synthetic construct
GGGG

SEQ ID NO: 18344 - protein, 6 aa, synthetic construct
GSSGGS

SEQ ID NO: 18345 - protein, 12 aa, synthetic construct
GGSGGSGGSGGS

SEQ ID NO: 18346 - protein, 11 aa, synthetic construct
PAPEAAAKGGS

SEQ ID NO: 18347 - protein, 11 aa, synthetic construct
EAAAKGSSGGG

SEQ ID NO: 18348 - protein, 8 aa, synthetic construct
GSSEAAAK

SEQ ID NO: 18349 - protein, 12 aa, synthetic construct
GSAGSAAGSGEF

SEQ ID NO: 18350 - protein, 11 aa, synthetic construct
GGGGGSEAAAK

SEQ ID NO: 18351 - protein, 4 aa, synthetic construct
GGGG

SEQ ID NO: 18352 - protein, 11 aa, synthetic construct
GGGGSSEAAAK

SEQ ID NO: 18353 - protein, 6 aa, synthetic construct
PAPGGG

SEQ ID NO: 18354 - protein, 11 aa, synthetic construct
EAAAKGGSGGG

SEQ ID NO: 18355 - protein, 9 aa, synthetic construct
GGGPAPGGS

SEQ ID NO: 18356 - protein, 8 aa, synthetic construct
EAAAKPAP

SEQ ID NO: 18357 - protein, 9 aa, synthetic construct
GSSGSSGSS

SEQ ID NO: 18358 - protein, 9 aa, synthetic construct
GSSPAPGGS

SEQ ID NO: 18359 - protein, 9 aa, synthetic construct
GGGGGSPAP

SEQ ID NO: 18360 - protein, 9 aa, synthetic construct
GGSGSSGGG

SEQ ID NO: 18361 - protein, 11 aa, synthetic construct
GGGEAAAKGSS

SEQ ID NO: 18362 - protein, 8 aa, synthetic construct
GSSEAAAK

SEQ ID NO: 18363 - protein, 5 aa, synthetic construct
EAAAK

SEQ ID NO: 18364 - protein, 11 aa, synthetic construct
EAAAKGGSGSS

SEQ ID NO: 18365 - protein, 11 aa, synthetic construct
GSSEAAAKGGG

SEQ ID NO: 18366 - protein, 9 aa, synthetic construct
PAPGSSGGG

SEQ ID NO: 18367 - protein, 11 aa, synthetic construct
EAAAKGGGGGS

SEQ ID NO: 18368 - protein, 11 aa, synthetic construct
GGSEAAAKPAP

SEQ ID NO: 18369 - protein, 9 aa, synthetic construct
GGGPAPGGS

SEQ ID NO: 18370 - protein, 5 aa, synthetic construct
GGGGS

SEQ ID NO: 18371 - protein, 15 aa, synthetic construct
GGSGGSGGSGGSGGS

SEQ ID NO: 18372 - protein, 6 aa, synthetic construct
GGGPAP

SEQ ID NO: 18373 - protein, 8 aa, synthetic construct
EAAAKPAP

SEQ ID NO: 18374 - protein, 8 aa, synthetic construct
GGSEAAAK

SEQ ID NO: 18375 - protein, 11 aa, synthetic construct
GSSEAAAKPAP

SEQ ID NO: 18376 - protein, 6 aa, synthetic construct
GGSGSS

SEQ ID NO: 18377 - protein, 11 aa, synthetic construct
EAAAKPAPGGG

SEQ ID NO: 18378 - protein, 11 aa, synthetic construct
GGSPAPEAAAK

SEQ ID NO: 18379 - protein, 11 aa, synthetic construct
GGSEAAAKGGG

SEQ ID NO: 18380 - protein, 15 aa, synthetic construct
GGGGSEAAAKGGGGS

SEQ ID NO: 18381 - protein, 11 aa, synthetic construct
GSSGGGEAAAK

SEQ ID NO: 18382 - protein, 11 aa, synthetic construct
EAAAKGGGPAP

SEQ ID NO: 18383 - protein, 6 aa, synthetic construct
GSSPAP

SEQ ID NO: 18384 - protein, 46 aa, synthetic construct; identical to SEQ ID NO: 217

SEQ ID NO: 18385 - protein, 11 aa, synthetic construct
GGSEAAAKGSS

SEQ ID NO: 18386 - protein, 11 aa, synthetic construct
GSSGGSEAAAK

SEQ ID NO: 18387 - protein, 11 aa, synthetic construct
GGSEAAAKGSS

SEQ ID NO: 18388 - protein, 8 aa, synthetic construct
EAAAKGGG

SEQ ID NO: 18389 - protein, 11 aa, synthetic construct
GSSGGSEAAAK

SEQ ID NO: 18390 - protein, 15 aa, synthetic construct
GGGGSEAAAKGGGGS

SEQ ID NO: 18391 - protein, 11 aa, synthetic construct
PAPGSSEAAAK

SEQ ID NO: 18392 - protein, 8 aa, synthetic construct
PAPEAAAK

SEQ ID NO: 18393 - protein, 9 aa, synthetic construct
PAPGGSGSS

SEQ ID NO: 18394 - protein, 6 aa, synthetic construct
PAPGSS

SEQ ID NO: 18395 - protein, 9 aa, synthetic construct
PAPGGGGGS

SEQ ID NO: 18396 - protein, 11 aa, synthetic construct
EAAAKPAPGSS

SEQ ID NO: 18397 - protein, 9 aa, synthetic construct
GSSPAPGGS

SEQ ID NO: 18398 - protein, 11 aa, synthetic construct
GGSGSSEAAAK

SEQ ID NO: 18399 - protein, 6 aa, synthetic construct
GGGGGG

SEQ ID NO: 18400 - protein, 20 aa, synthetic construct
EAAAKEAAAKEAAAKEAAAK

SEQ ID NO: 18401 - protein, 9 aa, synthetic construct
GGSPAPGSS

SEQ ID NO: 18402 - protein, 11 aa, synthetic construct
PAPAPAPAPAP

SEQ ID NO: 18403 - protein, 9 aa, synthetic construct
GGSGSSPAP

SEQ ID NO: 18404 - protein, 11 aa, synthetic construct
EAAAKGGSGGG

SEQ ID NO: 18405 - protein, 15 aa, synthetic construct
GSSGSSGSSGSSGSS

SEQ ID NO: 18406 - protein, 46 aa, synthetic construct; identical to SEQ ID NO: 217

SEQ ID NO: 18407 - protein, 11 aa, synthetic construct
GSSGGGEAAAK

SEQ ID NO: 18408 - protein, 11 aa, synthetic construct
GSSGGSEAAAK

SEQ ID NO: 18409 - protein, 8 aa, synthetic construct
GGGGGGGG

SEQ ID NO: 18410 - protein, 11 aa, synthetic construct
PAPGGSEAAAK

SEQ ID NO: 18411 - protein, 9 aa, synthetic construct
GGGGSSPAP

SEQ ID NO: 18412 - protein, 9 aa, synthetic construct
PAPAPAPAP

SEQ ID NO: 18413 - protein, 11 aa, synthetic construct
GGSEAAAKPAP

SEQ ID NO: 18414 - protein, 9 aa, synthetic construct
PAPGGSGGG

SEQ ID NO: 18415 - protein, 30 aa, synthetic construct; identical to SEQ ID NO: 130

SEQ ID NO: 18416 - protein, 15 aa, synthetic construct
GGGGSGGGGSGGGGS

SEQ ID NO: 18417 - protein, 9 aa, synthetic construct
GGSGGGPAP

SEQ ID NO: 18418 - protein, 11 aa, synthetic construct
GGGPAPEAAAK

SEQ ID NO: 18419 - protein, 9 aa, synthetic construct
GGGGGSGSS

SEQ ID NO: 18420 - protein, 9 aa, synthetic construct
GGGGGSPAP

SEQ ID NO: 18421 - protein, 6 aa, synthetic construct
GGSPAP

SEQ ID NO: 18422 - protein, 9 aa, synthetic construct
GGGPAPGGS

SEQ ID NO: 18423 - protein, 9 aa, synthetic construct
PAPGSSGGG

SEQ ID NO: 18424 - protein, 9 aa, synthetic construct
PAPGSSGGG

SEQ ID NO: 18425 - protein, 6 aa, synthetic construct
PAPGGS

SEQ ID NO: 18426 - protein, 11 aa, synthetic construct
GGGEAAAKGSS

SEQ ID NO: 18427 - protein, 11 aa, synthetic construct
GGSEAAAKGSS

SEQ ID NO: 18428 - protein, 11 aa, synthetic construct
PAPGGSEAAAK

SEQ ID NO: 18429 - protein, 11 aa, synthetic construct
GGSEAAAKGGG

SEQ ID NO: 18430 - protein, 9 aa, synthetic construct
GGSGGGGSS

SEQ ID NO: 18431 - protein, 11 aa, synthetic construct
GGGEAAAKPAP

SEQ ID NO: 18432 - protein, 8 aa, synthetic construct
EAAAKGSS

SEQ ID NO: 18433 - protein, 11 aa, synthetic construct
PAPEAAAKGSS

SEQ ID NO: 18434 - protein, 12 aa, synthetic construct
GSAGSAAGSGEF

SEQ ID NO: 18435 - protein, 11 aa, synthetic construct
EAAAKGGGGGS

SEQ ID NO: 18436 - protein, 11 aa, synthetic construct
EAAAKGSSPAP

SEQ ID NO: 18437 - protein, 15 aa, synthetic construct
GGGGSEAAAKGGGGS

SEQ ID NO: 18438 - protein, 11 aa, synthetic construct
GSSEAAAKPAP

SEQ ID NO: 18439 - protein, 6 aa, synthetic construct
GGGGGG

SEQ ID NO: 18440 - protein, 6 aa, synthetic construct
PAPGGS

SEQ ID NO: 18441 - protein, 7 aa, synthetic construct
PAPAPAP

SEQ ID NO: 18442 - protein, 4 aa, synthetic construct
GGGG

SEQ ID NO: 18443 - protein, 11 aa, synthetic construct
GSSGGSEAAAK

SEQ ID NO: 18444 - protein, 9 aa, synthetic construct
GGSGGGGSS

SEQ ID NO: 18445 - protein, 9 aa, synthetic construct
GGGGSSGGS

SEQ ID NO: 18446 - protein, 9 aa, synthetic construct
GSSPAPGGG

SEQ ID NO: 18447 - protein, 11 aa, synthetic construct
GGSEAAAKPAP

SEQ ID NO: 18448 - protein, 6 aa, synthetic construct
GSSGGS

SEQ ID NO: 18449 - protein, 5 aa, synthetic construct
GGGGG

SEQ ID NO: 18450 - protein, 9 aa, synthetic construct
GSSGGGPAP

SEQ ID NO: 18451 - protein, 11 aa, synthetic construct
GSSEAAAKGGG

SEQ ID NO: 18452 - protein, 30 aa, synthetic construct; identical to SEQ ID NO: 130

SEQ ID NO: 18453 - protein, 11 aa, synthetic construct
GGSEAAAKPAP

SEQ ID NO: 18454 - protein, 13 aa, synthetic construct
PAPAPAPAPAPAP

SEQ ID NO: 18455 - protein, 15 aa, synthetic construct
GGGGSEAAAKGGGGS

SEQ ID NO: 18456 - protein, 11 aa, synthetic construct
EAAAKPAPGSS

SEQ ID NO: 18457 - protein, 15 aa, synthetic construct
GSSGSSGSSGSSGSS

SEQ ID NO: 18458 - protein, 11 aa, synthetic construct
PAPEAAAKGSS

SEQ ID NO: 18459 - protein, 46 aa, synthetic construct; identical to SEQ ID NO: 217

SEQ ID NO: 18460 - protein, 46 aa, synthetic construct; identical to SEQ ID NO: 217

SEQ ID NO: 18461 - protein, 11 aa, synthetic construct
GGSEAAAKGGG

SEQ ID NO: 18462 - protein, 9 aa, synthetic construct
GGSGGGGSS

SEQ ID NO: 18463 - protein, 11 aa, synthetic construct
PAPEAAAKGSS

SEQ ID NO: 18464 - protein, 11 aa, synthetic construct
GGSGGGEAAAK

SEQ ID NO: 18465 - protein, 11 aa, synthetic construct
EAAAKGGGGSS

SEQ ID NO: 18466 - protein, 9 aa, synthetic construct
GSSPAPGGG

SEQ ID NO: 18467 - protein, 11 aa, synthetic construct
EAAAKGSSGGG

SEQ ID NO: 18468 - protein, 11 aa, synthetic construct
GGSGGGEAAAK

SEQ ID NO: 18469 - protein, 15 aa, synthetic construct
GGSGGSGGSGGSGGS

SEQ ID NO: 18470 - protein, 11 aa, synthetic construct
EAAAKPAPGGS

SEQ ID NO: 18471 - protein, 11 aa, synthetic construct
GGGGGSEAAAK

SEQ ID NO: 18472 - protein, 6 aa, synthetic construct
GSSPAP

SEQ ID NO: 18473 - protein, 11 aa, synthetic construct
GGGEAAAKPAP

SEQ ID NO: 18474 - protein, 11 aa, synthetic construct
GSSGGSEAAAK

SEQ ID NO: 18475 - protein, 11 aa, synthetic construct
EAAAKPAPGGS

SEQ ID NO: 18476 - protein, 6 aa, synthetic construct
PAPGGG

SEQ ID NO: 18477 - protein, 11 aa, synthetic construct
EAAAKGSSPAP

SEQ ID NO: 18478 - protein, 11 aa, synthetic construct
GSSPAPEAAAK

SEQ ID NO: 18479 - protein, 11 aa, synthetic construct
GGSGGGEAAAK

SEQ ID NO: 18480 - protein, 9 aa, synthetic construct
GSSGSSGSS

SEQ ID NO: 18481 - protein, 8 aa, synthetic construct
EAAAKGGS

SEQ ID NO: 18482 - protein, 11 aa, synthetic construct
EAAAKPAPGGS

SEQ ID NO: 18483 - protein, 11 aa, synthetic construct
EAAAKPAPGGS

SEQ ID NO: 18484 - protein, 9 aa, synthetic construct
GSSGGGGGS

SEQ ID NO: 18485 - protein, 9 aa, synthetic construct
PAPGGGGSS

SEQ ID NO: 18486 - protein, 9 aa, synthetic construct
GSSGSSGSS

SEQ ID NO: 18487 - protein, 20 aa, synthetic construct
EAAAKEAAAKEAAAKEAAAK

SEQ ID NO: 18488 - protein, 11 aa, synthetic construct
EAAAKPAPGSS

SEQ ID NO: 18489 - protein, 8 aa, synthetic construct
EAAAKGGG

SEQ ID NO: 18490 - protein, 11 aa, synthetic construct
PAPGSSEAAAK

SEQ ID NO: 18491 - protein, 9 aa, synthetic construct
PAPGSSGGS

SEQ ID NO: 18492 - protein, 11 aa, synthetic construct
GSSPAPEAAAK

SEQ ID NO: 18493 - protein, 18 aa, synthetic construct
GSSGSSGSSGSSGSSGSS

SEQ ID NO: 18494 - protein, 5 aa, synthetic construct
GGGGS

SEQ ID NO: 18495 - protein, 6 aa, synthetic construct
GSSPAP

SEQ ID NO: 18496 - protein, 15 aa, synthetic construct
EAAAKGGGGSEAAAK

SEQ ID NO: 18497 - protein, 10 aa, synthetic construct
EAAAKEAAAK

SEQ ID NO: 18498 - protein, 9 aa, synthetic construct
GGGGSSGGS

SEQ ID NO: 18499 - protein, 11 aa, synthetic construct
PAPGGSEAAAK

SEQ ID NO: 18500 - protein, 11 aa, synthetic construct
EAAAKGGSPAP

SEQ ID NO: 18501 - protein, 9 aa, synthetic construct
GSSGGSGGG

SEQ ID NO: 18502 - protein, 6 aa, synthetic construct
GSSGGS

SEQ ID NO: 18503 - protein, 9 aa, synthetic construct
PAPGGSGSS

SEQ ID NO: 18504 - protein, 11 aa, synthetic construct
EAAAKGGSGSS

SEQ ID NO: 18505 - protein, 5 aa, synthetic construct
PAPAP

SEQ ID NO: 18506 - protein, 11 aa, synthetic construct
EAAAKGSSPAP

SEQ ID NO: 18507 - protein, 11 aa, synthetic construct
EAAAKPAPGGG

SEQ ID NO: 18508 - protein, 30 aa, synthetic construct; identical to SEQ ID NO: 112

SEQ ID NO: 18509 - protein, 11 aa, synthetic construct
EAAAKGGGGSS

SEQ ID NO: 18510 - protein, 8 aa, synthetic construct
PAPEAAAK

SEQ ID NO: 18511 - protein, 11 aa, synthetic construct
EAAAKPAPGSS

SEQ ID NO: 18512 - protein, 6 aa, synthetic construct
GGSPAP

SEQ ID NO: 18513 - protein, 6 aa, synthetic construct
GGSGGS

SEQ ID NO: 18514 - protein, 11 aa, synthetic construct
PAPEAAAKGSS

SEQ ID NO: 18515 - protein, 6 aa, synthetic construct
PAPGSS

SEQ ID NO: 18516 - protein, 11 aa, synthetic construct
PAPAPAPAPAP

SEQ ID NO: 18517 - protein, 6 aa, synthetic construct
GGGPAP

SEQ ID NO: 18518 - protein, 11 aa, synthetic construct
GSSPAPEAAAK

SEQ ID NO: 18519 - protein, 6 aa, synthetic construct
GGSPAP

SEQ ID NO: 18520 - protein, 11 aa, synthetic construct
PAPEAAAKGGS

SEQ ID NO: 18521 - protein, 9 aa, synthetic construct
PAPGSSGGS

SEQ ID NO: 18522 - protein, 13 aa, synthetic construct
PAPAPAPAPAPAP

SEQ ID NO: 18523 - protein, 15 aa, synthetic construct
EAAAKEAAAKEAAAK

SEQ ID NO: 18524 - protein, 15 aa, synthetic construct
GGSGGSGGSGGSGGS

SEQ ID NO: 18525 - protein, 11 aa, synthetic construct
EAAAKPAPGGS

SEQ ID NO: 18526 - protein, 6 aa, synthetic construct
GGSGGS

SEQ ID NO: 18527 - protein, 8 aa, synthetic construct
EAAAKPAP

SEQ ID NO: 18528 - protein, 8 aa, synthetic construct
GGSEAAAK

SEQ ID NO: 18529 - protein, 6 aa, synthetic construct
GGSGGG

SEQ ID NO: 18530 - protein, 11 aa, synthetic construct
GGSGGGEAAAK

SEQ ID NO: 18531 - protein, 11 aa, synthetic construct
PAPEAAAKGGG

SEQ ID NO: 18532 - protein, 5 aa, synthetic construct
PAPAP

SEQ ID NO: 18533 - protein, 11 aa, synthetic construct
EAAAKGSSGGG

SEQ ID NO: 18534 - protein, 9 aa, synthetic construct
GGSPAPGSS

SEQ ID NO: 18535 - protein, 8 aa, synthetic construct
PAPEAAAK

SEQ ID NO: 18536 - protein, 11 aa, synthetic construct
EAAAKGGSPAP

SEQ ID NO: 18537 - protein, 9 aa, synthetic construct
PAPAPAPAP

SEQ ID NO: 18538 - protein, 11 aa, synthetic construct
PAPGGSEAAAK

SEQ ID NO: 18539 - protein, 12 aa, synthetic construct
GGSGGSGGSGGS

SEQ ID NO: 18540 - protein, 9 aa, synthetic construct
GGGGGSGSS

SEQ ID NO: 18541 - protein, 9 aa, synthetic construct
PAPGGSGGG

SEQ ID NO: 18542 - protein, 5 aa, synthetic construct
EAAAK

SEQ ID NO: 18543 - protein, 11 aa, synthetic construct
GGGEAAAKGSS

SEQ ID NO: 18544 - protein, 9 aa, synthetic construct
GGSPAPGSS

SEQ ID NO: 18545 - protein, 11 aa, synthetic construct
GGSEAAAKPAP

SEQ ID NO: 18546 - protein, 25 aa, synthetic construct
GGGGSGGGGSGGGGSGGGGSGGGGS

SEQ ID NO: 18547 - protein, 6 aa, synthetic construct
GGSGSS

SEQ ID NO: 18548 - protein, 11 aa, synthetic construct
GGGEAAAKGSS

SEQ ID NO: 18549 - protein, 11 aa, synthetic construct
EAAAKGGSPAP

SEQ ID NO: 18550 - protein, 11 aa, synthetic construct
GSSPAPEAAAK

SEQ ID NO: 18551 - protein, 12 aa, synthetic construct
GGSGGSGGSGGS

SEQ ID NO: 18552 - protein, 11 aa, synthetic construct
GSSPAPEAAAK

SEQ ID NO: 18553 - protein, 12 aa, synthetic construct
GSSGSSGSSGSS

SEQ ID NO: 18554 - protein, 11 aa, synthetic construct
GGSGSSEAAAK

SEQ ID NO: 18555 - protein, 6 aa, synthetic construct
GGSGGG

SEQ ID NO: 18556 - protein, 9 aa, synthetic construct
GGSPAPGGG

SEQ ID NO: 18557 - protein, 9 aa, synthetic construct
GGSGGSGGS

SEQ ID NO: 18558 - protein, 11 aa, synthetic construct
GGGGSSEAAAK

SEQ ID NO: 18559 - protein, 9 aa, synthetic construct
GGSPAPGSS

SEQ ID NO: 18560 - protein, 11 aa, synthetic construct
EAAAKPAPGSS

SEQ ID NO: 18561 - protein, 9 aa, synthetic construct
GGGGSSGGS

SEQ ID NO: 18562 - protein, 11 aa, synthetic construct
GGSPAPEAAAK

SEQ ID NO: 18563 - protein, 8 aa, synthetic construct
GGSEAAAK

SEQ ID NO: 18564 - protein, 12 aa, synthetic construct
GSSGSSGSSGSS

SEQ ID NO: 18565 - protein, 25 aa, synthetic construct
EAAAKEAAAKEAAAKEAAAKEAAAK

SEQ ID NO: 18566 - protein, 5 aa, synthetic construct
GGGGG

SEQ ID NO: 18567 - protein, 11 aa, synthetic construct
GGSEAAAKGSS

SEQ ID NO: 18568 - protein, 6 aa, synthetic construct
GSSGGG

SEQ ID NO: 18569 - protein, 9 aa, synthetic construct
PAPGSSGGG

SEQ ID NO: 18570 - protein, 6 aa, synthetic construct
GGSGGS

SEQ ID NO: 18571 - protein, 11 aa, synthetic construct
EAAAKGGGGGS

SEQ ID NO: 18572 - protein, 9 aa, synthetic construct
GGSGSSPAP

SEQ ID NO: 18573 - protein, 9 aa, synthetic construct
PAPGSSGGG

SEQ ID NO: 18574 - protein, 9 aa, synthetic construct
PAPGGSGGG

SEQ ID NO: 18575 - protein, 4 aa, synthetic construct
GGGG

SEQ ID NO: 18576 - protein, 11 aa, synthetic construct
EAAAKGGSPAP

SEQ ID NO: 18577 - protein, 6 aa, synthetic construct
GSSGSS

SEQ ID NO: 18578 - protein, 11 aa, synthetic construct
GGSEAAAKPAP

SEQ ID NO: 18579 - protein, 11 aa, synthetic construct
EAAAKGSSGGS

SEQ ID NO: 18580 - protein, 46 aa, synthetic construct; identical to SEQ ID NO: 217

SEQ ID NO: 18581 - protein, 11 aa, synthetic construct
EAAAKGGSGSS

SEQ ID NO: 18582 - protein, 5 aa, synthetic construct
GGGGG

SEQ ID NO: 18583 - protein, 8 aa, synthetic construct
GGGEAAAK

SEQ ID NO: 18584 - protein, 12 aa, synthetic construct
GGSGGSGGSGGS

SEQ ID NO: 18585 - protein, 30 aa, synthetic construct; identical to SEQ ID NO: 130

SEQ ID NO: 18586 - protein, 11 aa, synthetic construct
PAPAPAPAPAP

SEQ ID NO: 18587 - protein, 10 aa, synthetic construct
EAAAKEAAAK

SEQ ID NO: 18588 - protein, 11 aa, synthetic construct
GSSGGSEAAAK

SEQ ID NO: 18589 - protein, 11 aa, synthetic construct
PAPGGSEAAAK

SEQ ID NO: 18590 - protein, 11 aa, synthetic construct
EAAAKGGGPAP

SEQ ID NO: 18591 - protein, 9 aa, synthetic construct
PAPGGSGSS

SEQ ID NO: 18592 - protein, 16 aa, synthetic construct
SGSETPGTSESATPES

SEQ ID NO: 18593 - protein, 6 aa, synthetic construct
GGSGGS

SEQ ID NO: 18594 - protein, 8 aa, synthetic construct
EAAAKGGS

SEQ ID NO: 18595 - protein, 9 aa, synthetic construct
GGSPAPGSS

SEQ ID NO: 18596 - protein, 20 aa, synthetic construct
EAAAKEAAAKEAAAKEAAAK

SEQ ID NO: 18597 - protein, 9 aa, synthetic construct
GSSGGSGGG

SEQ ID NO: 18598 - protein, 11 aa, synthetic construct
PAPGSSEAAAK

SEQ ID NO: 18599 - protein, 13 aa, synthetic construct
PAPAPAPAPAPAP

SEQ ID NO: 18600 - protein, 6 aa, synthetic construct
GGGGSS

SEQ ID NO: 18601 - protein, 15 aa, synthetic construct
GGGGSEAAAKGGGGS

SEQ ID NO: 18602 - protein, 11 aa, synthetic construct
GSSPAPEAAAK

SEQ ID NO: 18603 - protein, 11 aa, synthetic construct
PAPEAAAKGGG

SEQ ID NO: 18604 - protein, 10 aa, synthetic construct
EAAAKEAAAK

SEQ ID NO: 18605 - protein, 5 aa, synthetic construct
EAAAK

SEQ ID NO: 18606 - protein, 9 aa, synthetic construct
GSSGGSGGG

SEQ ID NO: 18607 - protein, 11 aa, synthetic construct
GGGEAAAKPAP

SEQ ID NO: 18608 - protein, 6 aa, synthetic construct
GGSGGS

SEQ ID NO: 18609 - protein, 30 aa, synthetic construct; identical to SEQ ID NO: 130

SEQ ID NO: 18610 - protein, 5 aa, synthetic construct
GGGGG

SEQ ID NO: 18611 - protein, 11 aa, synthetic construct
GSSGGSEAAAK

SEQ ID NO: 18612 - protein, 33 aa, synthetic construct; identical to SEQ ID NO: 6

SEQ ID NO: 18613 - protein, 9 aa, synthetic construct
GGSGGGPAP

SEQ ID NO: 18614 - protein, 6 aa, synthetic construct
GGSGSS

SEQ ID NO: 18615 - protein, 16 aa, synthetic construct
SGSETPGTSESATPES

SEQ ID NO: 18616 - protein, 11 aa, synthetic construct
EAAAKGGSPAP

SEQ ID NO: 18617 - protein, 5 aa, synthetic construct
PAPAP

SEQ ID NO: 18618 - protein, 46 aa, synthetic construct; identical to SEQ ID NO: 217

SEQ ID NO: 18619 - protein, 6 aa, synthetic construct
GGGGGS

SEQ ID NO: 18620 - protein, 10 aa, synthetic construct
EAAAKEAAAK

SEQ ID NO: 18621 - protein, 11 aa, synthetic construct
GSSGGSEAAAK

SEQ ID NO: 18622 - protein, 8 aa, synthetic construct
GGGEAAAK

SEQ ID NO: 18623 - protein, 11 aa, synthetic construct
GSSGGGEAAAK

SEQ ID NO: 18624 - protein, 15 aa, synthetic construct
GGGGSEAAAKGGGGS

SEQ ID NO: 18625 - protein, 4 aa, synthetic construct
GGGG

SEQ ID NO: 18626 - protein, 6 aa, synthetic construct
GGSGGS

SEQ ID NO: 18627 - protein, 9 aa, synthetic construct
GGSGGGGSS

SEQ ID NO: 18628 - protein, 9 aa, synthetic construct
GSSPAPGGS

SEQ ID NO: 18629 - protein, 11 aa, synthetic construct
GSSPAPEAAAK

SEQ ID NO: 18630 - protein, 8 aa, synthetic construct
EAAAKGGS

SEQ ID NO: 18631 - protein, 12 aa, synthetic construct
GGSGGSGGSGGS

SEQ ID NO: 18632 - protein, 11 aa, synthetic construct
GGGGSSEAAAK

SEQ ID NO: 18633 - protein, 13 aa, synthetic construct
PAPAPAPAPAPAP

SEQ ID NO: 18634 - protein, 11 aa, synthetic construct
EAAAKGSSGGG

SEQ ID NO: 18635 - protein, 5 aa, synthetic construct
GGGGG

SEQ ID NO: 18636 - protein, 46 aa, synthetic construct; identical to SEQ ID NO: 217

SEQ ID NO: 18637 - protein, 33 aa, synthetic construct; identical to SEQ ID NO: 6

SEQ ID NO: 18638 - protein, 9 aa, synthetic construct
GGSPAPGGG

SEQ ID NO: 18639 - protein, 11 aa, synthetic construct
GGGEAAAKGGS

SEQ ID NO: 18640 - protein, 8 aa, synthetic construct
GGGEAAAK

SEQ ID NO: 18641 - protein, 11 aa, synthetic construct
PAPEAAAKGGG

SEQ ID NO: 18642 - protein, 18 aa, synthetic construct
GSSGSSGSSGSSGSSGSS

SEQ ID NO: 18643 - protein, 46 aa, synthetic construct; identical to SEQ ID NO: 217

SEQ ID NO: 18644 - protein, 11 aa, synthetic construct
EAAAKGGSPAP

SEQ ID NO: 18645 - protein, 10 aa, synthetic construct
EAAAKEAAAK

SEQ ID NO: 18646 - protein, 30 aa, synthetic construct; identical to SEQ ID NO: 112

SEQ ID NO: 18647 - protein, 12 aa, synthetic construct
GGSGGSGGSGGS

SEQ ID NO: 18648 - protein, 25 aa, synthetic construct
EAAAKEAAAKEAAAKEAAAKEAAAK

SEQ ID NO: 18649 - protein, 18 aa, synthetic construct
GSSGSSGSSGSSGSSGSS

SEQ ID NO: 18650 - protein, 5 aa, synthetic construct
GGGGS

SEQ ID NO: 18651 - protein, 46 aa, synthetic construct; identical to SEQ ID NO: 217

SEQ ID NO: 18652 - protein, 10 aa, synthetic construct
GGGGSGGGGS

SEQ ID NO: 18653 - protein, 10 aa, synthetic construct
GGGGSGGGGS

SEQ ID NO: 18654 - protein, 6 aa, synthetic construct
GGSGSS

SEQ ID NO: 18655 - protein, 9 aa, synthetic construct
GSSPAPGGG

SEQ ID NO: 18656 - protein, 9 aa, synthetic construct
GSSGGSPAP

SEQ ID NO: 18657 - protein, 6 aa, synthetic construct
PAPGGS

SEQ ID NO: 18658 - protein, 11 aa, synthetic construct
GGSPAPEAAAK

SEQ ID NO: 18659 - protein, 9 aa, synthetic construct
GGGPAPGGS

SEQ ID NO: 18660 - protein, 9 aa, synthetic construct
PAPGSSGGG

SEQ ID NO: 18661 - protein, 11 aa, synthetic construct
GSSGGGEAAAK

SEQ ID NO: 18662 - protein, 6 aa, synthetic construct
GSSGGG

SEQ ID NO: 18663 - protein, 6 aa, synthetic construct
GSSGSS

SEQ ID NO: 18664 - protein, 6 aa, synthetic construct
GSSGGG

SEQ ID NO: 18665 - protein, 9 aa, synthetic construct
PAPGGGGGS

SEQ ID NO: 18666 - protein, 8 aa, synthetic construct
GSSEAAAK

SEQ ID NO: 18667 - protein, 6 aa, synthetic construct
PAPGGG

SEQ ID NO: 18668 - protein, 10 aa, synthetic construct
GGGGSGGGGS

SEQ ID NO: 18669 - protein, 6 aa, synthetic construct
GSSGGS

SEQ ID NO: 18670 - protein, 10 aa, synthetic construct
GGGGSGGGGS

SEQ ID NO: 18671 - protein, 11 aa, synthetic construct
EAAAKGGSGSS

SEQ ID NO: 18672 - protein, 11 aa, synthetic construct
GSSEAAAKGGS

SEQ ID NO: 18673 - protein, 11 aa, synthetic construct
PAPGSSEAAAK

SEQ ID NO: 18674 - protein, 10 aa, synthetic construct
GGGGSGGGGS

SEQ ID NO: 18675 - protein, 11 aa, synthetic construct
PAPGSSEAAAK

SEQ ID NO: 18676 - protein, 11 aa, synthetic construct
PAPGSSEAAAK

SEQ ID NO: 18677 - protein, 9 aa, synthetic construct
GGSPAPGGG

SEQ ID NO: 18678 - protein, 6 aa, synthetic construct
GGGGGS

SEQ ID NO: 18679 - protein, 9 aa, synthetic construct
GGGGSSGGS

SEQ ID NO: 18680 - protein, 9 aa, synthetic construct
PAPAPAPAP

SEQ ID NO: 18681 - protein, 6 aa, synthetic construct
GGSGGS

SEQ ID NO: 18682 - protein, 9 aa, synthetic construct
GGGPAPGGS

SEQ ID NO: 18683 - protein, 15 aa, synthetic construct
GGSGGSGGSGGSGGS

SEQ ID NO: 18684 - protein, 6 aa, synthetic construct
GGSGGG

SEQ ID NO: 18685 - protein, 10 aa, synthetic construct
EAAAKEAAAK

SEQ ID NO: 18686 - protein, 6 aa, synthetic construct
PAPGSS

SEQ ID NO: 18687 - protein, 8 aa, synthetic construct
GSSEAAAK

SEQ ID NO: 18688 - protein, 9 aa, synthetic construct
GGSPAPGGG

SEQ ID NO: 18689 - protein, 8 aa, synthetic construct
EAAAKGGG

SEQ ID NO: 18690 - protein, 11 aa, synthetic construct
GSSEAAAKGGS

SEQ ID NO: 18691 - protein, 9 aa, synthetic construct
GSSGGSPAP

SEQ ID NO: 18692 - protein, 6 aa, synthetic construct
GGGGGS

SEQ ID NO: 18693 - protein, 6 aa, synthetic construct
GSSGGG

SEQ ID NO: 18694 - protein, 6 aa, synthetic construct
GSSGSS

SEQ ID NO: 18695 - protein, 11 aa, synthetic construct
GGSEAAAKPAP

SEQ ID NO: 18696 - protein, 11 aa, synthetic construct
EAAAKGGGGSS

SEQ ID NO: 18697 - protein, 11 aa, synthetic construct
EAAAKPAPGGS

SEQ ID NO: 18698 - protein, 15 aa, synthetic construct
GSSGSSGSSGSSGSS

SEQ ID NO: 18699 - protein, 15 aa, synthetic construct
GGGGSEAAAKGGGGS

SEQ ID NO: 18700 - protein, 6 aa, synthetic construct
GGSGSS

SEQ ID NO: 18701 - protein, 5 aa, synthetic construct
PAPAP

SEQ ID NO: 18702 - protein, 8 aa, synthetic construct
EAAAKPAP

SEQ ID NO: 18703 - protein, 25 aa, synthetic construct
EAAAKEAAAKEAAAKEAAAKEAAAK

SEQ ID NO: 18704 - protein, 7 aa, synthetic construct
GGGGGGG

SEQ ID NO: 18705 - protein, 5 aa, synthetic construct
GGGGS

SEQ ID NO: 18706 - protein, 6 aa, synthetic construct
GSSGGG

SEQ ID NO: 18707 - protein, 11 aa, synthetic construct
PAPAPAPAPAP

SEQ ID NO: 18708 - protein, 15 aa, synthetic construct
EAAAKEAAAKEAAAK

SEQ ID NO: 18709 - protein, 6 aa, synthetic construct
GSSGGS

SEQ ID NO: 18710 - protein, 11 aa, synthetic construct
EAAAKPAPGGG

SEQ ID NO: 18711 - protein, 9 aa, synthetic construct
GSSPAPGGS

SEQ ID NO: 18712 - protein, 9 aa, synthetic construct
PAPGSSGGG

SEQ ID NO: 18713 - protein, 6 aa, synthetic construct
GSSGGG

SEQ ID NO: 18714 - protein, 9 aa, synthetic construct
PAPGGSGSS

SEQ ID NO: 18715 - protein, 6 aa, synthetic construct
PAPGSS

SEQ ID NO: 18716 - protein, 9 aa, synthetic construct
GGGGGSGSS

SEQ ID NO: 18717 - protein, 11 aa, synthetic construct
EAAAKGGGGSS

SEQ ID NO: 18718 - protein, 7 aa, synthetic construct
GGGGGGG

SEQ ID NO: 18719 - protein, 11 aa, synthetic construct
PAPEAAAKGSS

SEQ ID NO: 18720 - protein, 11 aa, synthetic construct
GGSGGGEAAAK

SEQ ID NO: 18721 - protein, 11 aa, synthetic construct
EAAAKGGGGGS

SEQ ID NO: 18722 - protein, 6 aa, synthetic construct
PAPGGS

SEQ ID NO: 18723 - protein, 4 aa, synthetic construct
GGGG

SEQ ID NO: 18724 - protein, 11 aa, synthetic construct
EAAAKGGSGSS

SEQ ID NO: 18725 - protein, 9 aa, synthetic construct
GGGGSSGGS

SEQ ID NO: 18726 - protein, 8 aa, synthetic construct
GGGGGGGG

SEQ ID NO: 18727 - protein, 9 aa, synthetic construct
GGSGSSGGG

SEQ ID NO: 18728 - protein, 11 aa, synthetic construct
GSSEAAAKGGS

SEQ ID NO: 18729 - protein, 11 aa, synthetic construct
EAAAKPAPGSS

SEQ ID NO: 18730 - protein, 9 aa, synthetic construct
GGSPAPGSS

SEQ ID NO: 18731 - protein, 9 aa, synthetic construct
PAPGSSGGG

SEQ ID NO: 18732 - protein, 11 aa, synthetic construct
EAAAKPAPGSS

SEQ ID NO: 18733 - protein, 11 aa, synthetic construct
GGSPAPEAAAK

SEQ ID NO: 18734 - protein, 6 aa, synthetic construct
GSSPAP

SEQ ID NO: 18735 - protein, 11 aa, synthetic construct
EAAAKPAPGGS

SEQ ID NO: 18736 - protein, 9 aa, synthetic construct
GGSGSSPAP

SEQ ID NO: 18737 - protein, 9 aa, synthetic construct
PAPGSSGGS

SEQ ID NO: 18738 - protein, 12 aa, synthetic construct
GSAGSAAGSGEF

SEQ ID NO: 18739 - protein, 11 aa, synthetic construct
GSSGGSEAAAK

SEQ ID NO: 18740 - protein, 6 aa, synthetic construct
GSSGGS

SEQ ID NO: 18741 - protein, 15 aa, synthetic construct
EAAAKGGGGSEAAAK

SEQ ID NO: 18742 - protein, 6 aa, synthetic construct
GSSGGS

SEQ ID NO: 18743 - protein, 11 aa, synthetic construct
GGSPAPEAAAK

SEQ ID NO: 18744 - protein, 11 aa, synthetic construct
GGSEAAAKGSS

SEQ ID NO: 18745 - protein, 11 aa, synthetic construct
GSSPAPEAAAK

SEQ ID NO: 18746 - protein, 9 aa, synthetic construct
GGSGSSGGG

SEQ ID NO: 18747 - protein, 4 aa, synthetic construct
GGGG

SEQ ID NO: 18748 - protein, 11 aa, synthetic construct
GGSEAAAKPAP

SEQ ID NO: 18749 - protein, 9 aa, synthetic construct
GSSGGSPAP

SEQ ID NO: 18750 - protein, 11 aa, synthetic construct
GSSGGSEAAAK

SEQ ID NO: 18751 - protein, 11 aa, synthetic construct
PAPEAAAKGGS

SEQ ID NO: 18752 - protein, 6 aa, synthetic construct
GGSPAP

SEQ ID NO: 18753 - protein, 8 aa, synthetic construct
GGSEAAAK

SEQ ID NO: 18754 - protein, 15 aa, synthetic construct
EAAAKGGGGSEAAAK

SEQ ID NO: 18755 - protein, 33 aa, synthetic construct; identical to SEQ ID NO: 6

SEQ ID NO: 18756 - protein, 8 aa, synthetic construct
GSSEAAAK

SEQ ID NO: 18757 - protein, 11 aa, synthetic construct
GGSEAAAKGSS

SEQ ID NO: 18758 - protein, 11 aa, synthetic construct
GGSEAAAKGSS

SEQ ID NO: 18759 - protein, 11 aa, synthetic construct
GGSPAPEAAAK

SEQ ID NO: 18760 - protein, 11 aa, synthetic construct
GGSGGGEAAAK

SEQ ID NO: 18761 - protein, 11 aa, synthetic construct
GGSEAAAKPAP

SEQ ID NO: 18762 - protein, 11 aa, synthetic construct
EAAAKGGSGSS

SEQ ID NO: 18763 - protein, 11 aa, synthetic construct
GGGEAAAKGGS

SEQ ID NO: 18764 - protein, 15 aa, synthetic construct
EAAAKGGGGSEAAAK

SEQ ID NO: 18765 - protein, 6 aa, synthetic construct
GGSPAP

SEQ ID NO: 18766 - protein, 9 aa, synthetic construct
GGGGSSGGS

SEQ ID NO: 18767 - protein, 10 aa, synthetic construct
GGGGSGGGGS

SEQ ID NO: 18768 - protein, 11 aa, synthetic construct
GGGEAAAKGGS

SEQ ID NO: 18769 - protein, 18 aa, synthetic construct
GSSGSSGSSGSSGSSGSS

SEQ ID NO: 18770 - protein, 6 aa, synthetic construct
PAPGSS

SEQ ID NO: 18771 - protein, 9 aa, synthetic construct
GGSGGSGGS

SEQ ID NO: 18772 - protein, 9 aa, synthetic construct
PAPGGSGGG

SEQ ID NO: 18773 - protein, 15 aa, synthetic construct
GGGGSGGGGSGGGGS

SEQ ID NO: 18774 - protein, 9 aa, synthetic construct
GGSGSSGGG

SEQ ID NO: 18775 - protein, 9 aa, synthetic construct
GGSGGSGGS

SEQ ID NO: 18776 - protein, 11 aa, synthetic construct
GGGEAAAKGGS

SEQ ID NO: 18777 - protein, 16 aa, synthetic construct
SGSETPGTSESATPES

SEQ ID NO: 18778 - protein, 11 aa, synthetic construct
EAAAKGGGGGS

SEQ ID NO: 18779 - protein, 11 aa, synthetic construct
EAAAKGSSPAP

SEQ ID NO: 18780 - protein, 4 aa, synthetic construct
GGGG

SEQ ID NO: 18781 - protein, 25 aa, synthetic construct
GGGGSGGGGSGGGGSGGGGSGGGGS

SEQ ID NO: 18782 - protein, 9 aa, synthetic construct
GSSGGSGGG

SEQ ID NO: 18783 - protein, 6 aa, synthetic construct
GGSGSS

SEQ ID NO: 18784 - protein, 8 aa, synthetic construct
EAAAKGGS

SEQ ID NO: 18785 - protein, 11 aa, synthetic construct
GSSEAAAKGGS

SEQ ID NO: 18786 - protein, 11 aa, synthetic construct
EAAAKPAPGGG

SEQ ID NO: 18787 - protein, 9 aa, synthetic construct
PAPGSSGGG

SEQ ID NO: 18788 - protein, 11 aa, synthetic construct
GGGGSSEAAAK

SEQ ID NO: 18789 - protein, 11 aa, synthetic construct
GSSEAAAKPAP

SEQ ID NO: 18790 - protein, 11 aa, synthetic construct
PAPGGGEAAAK

SEQ ID NO: 18791 - protein, 11 aa, synthetic construct
GGSGGGEAAAK

SEQ ID NO: 18792 - protein, 30 aa, synthetic construct; identical to SEQ ID NO: 112

SEQ ID NO: 18793 - protein, 11 aa, synthetic construct
EAAAKGGGGGS

SEQ ID NO: 18794 - protein, 9 aa, synthetic construct
GGSPAPGGG

SEQ ID NO: 18795 - protein, 9 aa, synthetic construct
GSSGSSGSS

SEQ ID NO: 18796 - protein, 5 aa, synthetic construct
EAAAK

SEQ ID NO: 18797 - protein, 9 aa, synthetic construct
GGGGSSGGS

SEQ ID NO: 18798 - protein, 9 aa, synthetic construct
GGSGSSPAP

SEQ ID NO: 18799 - protein, 20 aa, synthetic construct
EAAAKEAAAKEAAAKEAAAK

SEQ ID NO: 18800 - protein, 9 aa, synthetic construct
GGGPAPGSS

SEQ ID NO: 18801 - protein, 9 aa, synthetic construct
GSSPAPGGS

SEQ ID NO: 18802 - protein, 5 aa, synthetic construct
PAPAP

SEQ ID NO: 18803 - protein, 9 aa, synthetic construct
PAPAPAPAP

SEQ ID NO: 18804 - protein, 11 aa, synthetic construct
GGGGGSEAAAK

SEQ ID NO: 18805 - protein, 9 aa, synthetic construct
GGGGGSGSS

SEQ ID NO: 18806 - protein, 11 aa, synthetic construct
GGGEAAAKGSS

SEQ ID NO: 18807 - protein, 9 aa, synthetic construct
GGGGGSPAP

SEQ ID NO: 18808 - protein, 11 aa, synthetic construct
GGGGGSEAAAK

SEQ ID NO: 18809 - protein, 7 aa, synthetic construct
GGGGGGG

SEQ ID NO: 18810 - protein, 16 aa, synthetic construct
SGSETPGTSESATPES

SEQ ID NO: 18811 - protein, 11 aa, synthetic construct
EAAAKGGSGGG

SEQ ID NO: 18812 - protein, 5 aa, synthetic construct
GGGGS

SEQ ID NO: 18813 - protein, 11 aa, synthetic construct
EAAAKGSSGGG

SEQ ID NO: 18814 - protein, 11 aa, synthetic construct
EAAAKPAPGGS

SEQ ID NO: 18815 - protein, 33 aa, synthetic construct; identical to SEQ ID NO: 6

SEQ ID NO: 18816 - protein, 9 aa, synthetic construct
GGSPAPGGG

SEQ ID NO: 18817 - protein, 12 aa, synthetic construct
GSAGSAAGSGEF

SEQ ID NO: 18818 - protein, 9 aa, synthetic construct
GGGGSSGGS

SEQ ID NO: 18819 - protein, 7 aa, synthetic construct
GGGGGGG

SEQ ID NO: 18820 - protein, 8 aa, synthetic construct
GSSEAAAK

SEQ ID NO: 18821 - protein, 6 aa, synthetic construct
PAPGSS

SEQ ID NO: 18822 - protein, 6 aa, synthetic construct
GSSGGG

SEQ ID NO: 18823 - protein, 6 aa, synthetic construct
PAPGGG

SEQ ID NO: 18824 - protein, 9 aa, synthetic construct
GGGGGSPAP

SEQ ID NO: 18825 - protein, 8 aa, synthetic construct
GGSEAAAK

SEQ ID NO: 18826 - protein, 6 aa, synthetic construct
GSSGGG

SEQ ID NO: 18827 - protein, 12 aa, synthetic construct
GGSGGSGGSGGS

SEQ ID NO: 18828 - protein, 5 aa, synthetic construct
PAPAP

SEQ ID NO: 18829 - protein, 8 aa, synthetic construct
GGSEAAAK

SEQ ID NO: 18830 - protein, 5 aa, synthetic construct
GGGGS

SEQ ID NO: 18831 - protein, 4 aa, synthetic construct
GGGG

SEQ ID NO: 18832 - protein, 11 aa, synthetic construct
EAAAKGGGGSS

SEQ ID NO: 18833 - protein, 15 aa, synthetic construct
EAAAKEAAAKEAAAK

SEQ ID NO: 18834 - protein, 11 aa, synthetic construct
PAPGGGEAAAK

SEQ ID NO: 18835 - protein, 11 aa, synthetic construct
EAAAKGGSPAP

SEQ ID NO: 18836 - protein, 11 aa, synthetic construct
GGSGSSEAAAK

SEQ ID NO: 18837 - protein, 11 aa, synthetic construct
GGSPAPEAAAK

SEQ ID NO: 18838 - protein, 7 aa, synthetic construct
GGGGGGG

SEQ ID NO: 18839 - protein, 30 aa, synthetic construct; identical to SEQ ID NO: 130

SEQ ID NO: 18840 - protein, 11 aa, synthetic construct
EAAAKGSSGGS

SEQ ID NO: 18841 - protein, 11 aa, synthetic construct
GSSEAAAKPAP

SEQ ID NO: 18842 - protein, 6 aa, synthetic construct
GGGGSS

SEQ ID NO: 18843 - protein, 11 aa, synthetic construct
EAAAKGGSGGG

SEQ ID NO: 18844 - protein, 6 aa, synthetic construct
GGSGGS

SEQ ID NO: 18845 - protein, 9 aa, synthetic construct
GGGGGSPAP

SEQ ID NO: 18846 - protein, 15 aa, synthetic construct
EAAAKEAAAKEAAAK

SEQ ID NO: 18847 - protein, 11 aa, synthetic construct
PAPEAAAKGGS

SEQ ID NO: 18848 - protein, 11 aa, synthetic construct
GSSGGSEAAAK

SEQ ID NO: 18849 - protein, 11 aa, synthetic construct
EAAAKGGSGGG

SEQ ID NO: 18850 - protein, 9 aa, synthetic construct
GGSGGGPAP

SEQ ID NO: 18851 - protein, 11 aa, synthetic construct
GGSEAAAKPAP

SEQ ID NO: 18852 - protein, 8 aa, synthetic construct
EAAAKGGG

SEQ ID NO: 18853 - protein, 12 aa, synthetic construct
GSSGSSGSSGSS

SEQ ID NO: 18854 - protein, 9 aa, synthetic construct
GGSGSSPAP

SEQ ID NO: 18855 - protein, 8 aa, synthetic construct
GGGEAAAK

SEQ ID NO: 18856 - protein, 9 aa, synthetic construct
GSSPAPGGS

SEQ ID NO: 18857 - protein, 11 aa, synthetic construct
GSSEAAAKGGG

SEQ ID NO: 18858 - protein, 11 aa, synthetic construct
EAAAKPAPGGS

SEQ ID NO: 18859 - protein, 11 aa, synthetic construct
GGSGGGEAAAK

SEQ ID NO: 18860 - protein, 6 aa, synthetic construct
GGSGSS

SEQ ID NO: 18861 - protein, 11 aa, synthetic construct
GGSGGGEAAAK

SEQ ID NO: 18862 - protein, 18 aa, synthetic construct
GGSGGSGGSGGSGGSGGS

SEQ ID NO: 18863 - protein, 11 aa, synthetic construct
PAPEAAAKGSS

SEQ ID NO: 18864 - protein, 11 aa, synthetic construct
EAAAKGSSGGS

SEQ ID NO: 18865 - protein, 11 aa, synthetic construct
GGSGSSEAAAK

SEQ ID NO: 18866 - protein, 11 aa, synthetic construct
GGSGSSEAAAK

SEQ ID NO: 18867 - protein, 9 aa, synthetic construct
GSSGGSGGG

SEQ ID NO: 18868 - protein, 11 aa, synthetic construct
EAAAKGGSGGG

SEQ ID NO: 18869 - protein, 6 aa, synthetic construct
GGSGGS

SEQ ID NO: 18870 - protein, 12 aa, synthetic construct
GSAGSAAGSGEF

SEQ ID NO: 18871 - protein, 6 aa, synthetic construct
GGSGSS

SEQ ID NO: 18872 - protein, 4 aa, synthetic construct
GGGG

SEQ ID NO: 18873 - protein, 20 aa, synthetic construct
GGGGSGGGGSGGGGSGGGGS

SEQ ID NO: 18874 - protein, 16 aa, synthetic construct
SGSETPGTSESATPES

SEQ ID NO: 18875 - protein, 20 aa, synthetic construct
EAAAKEAAAKEAAAKEAAAK

SEQ ID NO: 18876 - protein, 11 aa, synthetic construct
GGGEAAAKGGS

SEQ ID NO: 18877 - protein, 11 aa, synthetic construct
GSSGGSEAAAK

SEQ ID NO: 18878 - protein, 11 aa, synthetic construct
EAAAKGGGGSS

SEQ ID NO: 18879 - protein, 11 aa, synthetic construct
PAPGGSEAAAK

SEQ ID NO: 18880 - protein, 5 aa, synthetic construct
EAAAK

SEQ ID NO: 18881 - protein, 18 aa, synthetic construct
GSSGSSGSSGSSGSSGSS

SEQ ID NO: 18882 - protein, 4 aa, synthetic construct
GGGG

SEQ ID NO: 18883 - protein, 6 aa, synthetic construct
GSSGSS

SEQ ID NO: 18884 - protein, 9 aa, synthetic construct
GSSGGSPAP

SEQ ID NO: 18885 - protein, 9 aa, synthetic construct
GGSGGSGGS

SEQ ID NO: 18886 - protein, 11 aa, synthetic construct
EAAAKGGGPAP

SEQ ID NO: 18887 - protein, 10 aa, synthetic construct
GGGGSGGGGS

SEQ ID NO: 18888 - protein, 11 aa, synthetic construct
GGSEAAAKGSS

SEQ ID NO: 18889 - protein, 30 aa, synthetic construct; identical to SEQ ID NO: 130

SEQ ID NO: 18890 - protein, 11 aa, synthetic construct
GGSGSSEAAAK

SEQ ID NO: 18891 - protein, 20 aa, synthetic construct
EAAAKEAAAKEAAAKEAAAK

SEQ ID NO: 18892 - protein, 11 aa, synthetic construct
GSSEAAAKGGS

SEQ ID NO: 18893 - protein, 6 aa, synthetic construct
GGSGSS

SEQ ID NO: 18894 - protein, 11 aa, synthetic construct
GGSGSSEAAAK

SEQ ID NO: 18895 - protein, 9 aa, synthetic construct
GSSGSSGSS

SEQ ID NO: 18896 - protein, 11 aa, synthetic construct
EAAAKGSSPAP

SEQ ID NO: 18897 - protein, 8 aa, synthetic construct
EAAAKPAP

SEQ ID NO: 18898 - protein, 11 aa, synthetic construct
GGSGSSEAAAK

SEQ ID NO: 18899 - protein, 30 aa, synthetic construct; identical to SEQ ID NO: 112

SEQ ID NO: 18900 - protein, 15 aa, synthetic construct
GGGGSGGGGSGGGGS

SEQ ID NO: 18901 - protein, 7 aa, synthetic construct
GGGGGGG

SEQ ID NO: 18902 - protein, 8 aa, synthetic construct
EAAAKGSS

SEQ ID NO: 18903 - protein, 11 aa, synthetic construct
EAAAKGGGPAP

SEQ ID NO: 18904 - protein, 6 aa, synthetic construct
GSSGSS

SEQ ID NO: 18905 - protein, 11 aa, synthetic construct
EAAAKGGGGGS

SEQ ID NO: 18906 - protein, 11 aa, synthetic construct
GGSGGGEAAAK

SEQ ID NO: 18907 - protein, 6 aa, synthetic construct
PAPGSS

SEQ ID NO: 18908 - protein, 6 aa, synthetic construct
PAPGSS

SEQ ID NO: 18909 - protein, 9 aa, synthetic construct
GGSPAPGSS

SEQ ID NO: 18910 - protein, 11 aa, synthetic construct
GGGGSSEAAAK

SEQ ID NO: 18911 - protein, 9 aa, synthetic construct
GSSGGGGGS

SEQ ID NO: 18912 - protein, 11 aa, synthetic construct
EAAAKGSSPAP

SEQ ID NO: 18913 - protein, 9 aa, synthetic construct
GSSPAPGGS

SEQ ID NO: 18914 - protein, 6 aa, synthetic construct
GGGGGG

SEQ ID NO: 18915 - protein, 11 aa, synthetic construct
EAAAKGGGGSS

SEQ ID NO: 18916 - protein, 11 aa, synthetic construct
PAPGGSEAAAK

SEQ ID NO: 18917 - protein, 33 aa, synthetic construct; identical to SEQ ID NO: 6

SEQ ID NO: 18918 - protein, 12 aa, synthetic construct
GSSGSSGSSGSS

SEQ ID NO: 18919 - protein, 11 aa, synthetic construct
EAAAKGSSGGG

SEQ ID NO: 18920 - protein, 11 aa, synthetic construct
GGSEAAAKPAP

SEQ ID NO: 18921 - protein, 15 aa, synthetic construct
GSSGSSGSSGSSGSS

SEQ ID NO: 18922 - protein, 11 aa, synthetic construct
GGGEAAAKPAP

SEQ ID NO: 18923 - protein, 9 aa, synthetic construct
PAPGSSGGG

SEQ ID NO: 18924 - protein, 6 aa, synthetic construct
GSSGSS

SEQ ID NO: 18925 - protein, 8 aa, synthetic construct
PAPEAAAK

SEQ ID NO: 18926 - protein, 9 aa, synthetic construct
GGGPAPGSS

SEQ ID NO: 18927 - protein, 9 aa, synthetic construct
GSSGGSPAP

SEQ ID NO: 18928 - protein, 6 aa, synthetic construct
GGGGSS

SEQ ID NO: 18929 - protein, 11 aa, synthetic construct
PAPEAAAKGSS

SEQ ID NO: 18930 - protein, 9 aa, synthetic construct
GGSGGGPAP

SEQ ID NO: 18931 - protein, 6 aa, synthetic construct
PAPGGS

SEQ ID NO: 18932 - protein, 11 aa, synthetic construct
EAAAKGGGGGS

SEQ ID NO: 18933 - protein, 9 aa, synthetic construct
GSSGGSPAP

SEQ ID NO: 18934 - protein, 9 aa, synthetic construct
GSSGGGGGS

SEQ ID NO: 18935 - protein, 11 aa, synthetic construct
GGGEAAAKGGS

SEQ ID NO: 18936 - protein, 11 aa, synthetic construct
GGGEAAAKGSS

SEQ ID NO: 18937 - protein, 11 aa, synthetic construct
PAPEAAAKGSS

SEQ ID NO: 18938 - protein, 15 aa, synthetic construct
GSSGSSGSSGSSGSS

SEQ ID NO: 18939 - protein, 9 aa, synthetic construct
GGSPAPGSS

SEQ ID NO: 18940 - protein, 11 aa, synthetic construct
EAAAKGSSPAP

SEQ ID NO: 18941 - protein, 18 aa, synthetic construct
GGSGGSGGSGGSGGSGGS

SEQ ID NO: 18942 - protein, 11 aa, synthetic construct
GGGGSSEAAAK

SEQ ID NO: 18943 - protein, 9 aa, synthetic construct
GGGGSSPAP

SEQ ID NO: 18944 - protein, 9 aa, synthetic construct
GSSGGSPAP

SEQ ID NO: 18945 - protein, 9 aa, synthetic construct
GGGPAPGSS

SEQ ID NO: 18946 - protein, 9 aa, synthetic construct
PAPGSSGGS

SEQ ID NO: 18947 - protein, 9 aa, synthetic construct
GGGGGSPAP

SEQ ID NO: 18948 - protein, 16 aa, synthetic construct
SGSETPGTSESATPES

SEQ ID NO: 18949 - protein, 15 aa, synthetic construct
GSSGSSGSSGSSGSS

SEQ ID NO: 18950 - protein, 9 aa, synthetic construct
GSSPAPGGG

SEQ ID NO: 18951 - protein, 13 aa, synthetic construct
PAPAPAPAPAPAP

SEQ ID NO: 18952 - protein, 9 aa, synthetic construct
GGGPAPGGS

SEQ ID NO: 18953 - protein, 11 aa, synthetic construct
PAPGGSEAAAK

SEQ ID NO: 18954 - protein, 11 aa, synthetic construct
GGGGSSEAAAK

SEQ ID NO: 18955 - protein, 9 aa, synthetic construct
GGSPAPGGG

SEQ ID NO: 18956 - protein, 11 aa, synthetic construct
GSSPAPEAAAK

SEQ ID NO: 18957 - protein, 8 aa, synthetic construct
GGGEAAAK

SEQ ID NO: 18958 - protein, 11 aa, synthetic construct
PAPEAAAKGGG

SEQ ID NO: 18959 - protein, 9 aa, synthetic construct
GGSPAPGGG

SEQ ID NO: 18960 - protein, 9 aa, synthetic construct
GGSGGGGSS

SEQ ID NO: 18961 - protein, 11 aa, synthetic construct
GSSPAPEAAAK

SEQ ID NO: 18962 - protein, 9 aa, synthetic construct
GGSPAPGGG

SEQ ID NO: 18963 - protein, 9 aa, synthetic construct
PAPGGSGSS

SEQ ID NO: 18964 - protein, 6 aa, synthetic construct
GSSPAP

SEQ ID NO: 18965 - protein, 16 aa, synthetic construct
SGSETPGTSESATPES

SEQ ID NO: 18966 - protein, 9 aa, synthetic construct
GSSGSSGSS

SEQ ID NO: 18967 - protein, 9 aa, synthetic construct
PAPGSSGGS

SEQ ID NO: 18968 - protein, 6 aa, synthetic construct
PAPGGS

SEQ ID NO: 18969 - protein, 11 aa, synthetic construct
PAPEAAAKGGG

SEQ ID NO: 18970 - protein, 9 aa, synthetic construct
GGSGGSGGS

SEQ ID NO: 18971 - protein, 6 aa, synthetic construct
PAPGGS

SEQ ID NO: 18972 - protein, 9 aa, synthetic construct
GSSGGSPAP

SEQ ID NO: 18973 - protein, 9 aa, synthetic construct
GSSGGGGGS

SEQ ID NO: 18974 - protein, 9 aa, synthetic construct
GGGGGSPAP

SEQ ID NO: 18975 - protein, 11 aa, synthetic construct
EAAAKPAPGSS

SEQ ID NO: 18976 - protein, 11 aa, synthetic construct
EAAAKGGSPAP

SEQ ID NO: 18977 - protein, 11 aa, synthetic construct
GGGPAPEAAAK

SEQ ID NO: 18978 - protein, 11 aa, synthetic construct
GGSEAAAKGSS

SEQ ID NO: 18979 - protein, 11 aa, synthetic construct
PAPEAAAKGSS

SEQ ID NO: 18980 - protein, 11 aa, synthetic construct
PAPEAAAKGGS

SEQ ID NO: 18981 - protein, 6 aa, synthetic construct
GSSGGG

SEQ ID NO: 18982 - protein, 11 aa, synthetic construct
EAAAKGGGGSS

SEQ ID NO: 18983 - protein, 11 aa, synthetic construct
EAAAKGGSPAP

SEQ ID NO: 18984 - protein, 9 aa, synthetic construct
GGGGSSGGS

SEQ ID NO: 18985 - protein, 11 aa, synthetic construct
PAPEAAAKGSS

SEQ ID NO: 18986 - protein, 11 aa, synthetic construct
EAAAKGGGGGS

SEQ ID NO: 18987 - protein, 9 aa, synthetic construct
GSSGGGGGS

SEQ ID NO: 18988 - protein, 9 aa, synthetic construct
PAPAPAPAP

SEQ ID NO: 18989 - protein, 12 aa, synthetic construct
GGSGGSGGSGGS

SEQ ID NO: 18990 - protein, 9 aa, synthetic construct
PAPAPAPAP

SEQ ID NO: 18991 - protein, 11 aa, synthetic construct
GSSEAAAKPAP

SEQ ID NO: 18992 - protein, 11 aa, synthetic construct
GGSGGGEAAAK

SEQ ID NO: 18993 - protein, 9 aa, synthetic construct
GSSGGSGGG

SEQ ID NO: 18994 - protein, 9 aa, synthetic construct
GGGGGSPAP

SEQ ID NO: 18995 - protein, 11 aa, synthetic construct
GGGEAAAKGSS

SEQ ID NO: 18996 - protein, 9 aa, synthetic construct
GGGGSSPAP

SEQ ID NO: 18997 - protein, 6 aa, synthetic construct
GGSGGG

SEQ ID NO: 18998 - protein, 6 aa, synthetic construct
GGGGSS

SEQ ID NO: 18999 - protein, 11 aa, synthetic construct
EAAAKGSSGGS

SEQ ID NO: 19000 - protein, 9 aa, synthetic construct
GSSGGGGGS

SEQ ID NO: 19001 - protein, 11 aa, synthetic construct
EAAAKGSSGGS

SEQ ID NO: 19002 - protein, 10 aa, synthetic construct
EAAAKEAAAK

SEQ ID NO: 19003 - protein, 11 aa, synthetic construct
GSSGGGEAAAK

SEQ ID NO: 19004 - protein, 9 aa, synthetic construct
GSSPAPGGG

SEQ ID NO: 19005 - protein, 15 aa, synthetic construct
GGGGSGGGGSGGGGS

SEQ ID NO: 19006 - protein, 20 aa, synthetic construct
EAAAKEAAAKEAAAKEAAAK

SEQ ID NO: 19007 - protein, 11 aa, synthetic construct
EAAAKGGSGSS

SEQ ID NO: 19008 - protein, 8 aa, synthetic construct
PAPEAAAK

SEQ ID NO: 19009 - protein, 6 aa, synthetic construct
GSSGGG

SEQ ID NO: 19010 - protein, 11 aa, synthetic construct
GGSGGGEAAAK

SEQ ID NO: 19011 - protein, 5 aa, synthetic construct
EAAAK

SEQ ID NO: 19012 - protein, 9 aa, synthetic construct
GGGGSSPAP

SEQ ID NO: 19013 - protein, 11 aa, synthetic construct
PAPEAAAKGSS

SEQ ID NO: 19014 - protein, 9 aa, synthetic construct
GGGGGSPAP

SEQ ID NO: 19015 - protein, 9 aa, synthetic construct
GSSGSSGSS

SEQ ID NO: 19016 - protein, 20 aa, synthetic construct
GGGGSGGGGSGGGGSGGGGS

SEQ ID NO: 19017 - protein, 11 aa, synthetic construct
GGGGSSEAAAK

SEQ ID NO: 19018 - protein, 20 aa, synthetic construct
GGGGSGGGGSGGGGSGGGGS

SEQ ID NO: 19019 - protein, 11 aa, synthetic construct
PAPGSSEAAAK

SEQ ID NO: 19020 - protein, 9 aa, synthetic construct
GGGGGSGSS

SEQ ID NO: 19021 - protein, 11 aa, synthetic construct
GGSEAAAKGGG

SEQ ID NO: 19022 - protein, 9 aa, synthetic construct
PAPGSSGGG

SEQ ID NO: 19023 - protein, 11 aa, synthetic construct
EAAAKGGSGSS

SEQ ID NO: 19024 - protein, 8 aa, synthetic construct
GGGEAAAK

SEQ ID NO: 19025 - protein, 11 aa, synthetic construct
GGSEAAAKPAP

SEQ ID NO: 19026 - protein, 16 aa, synthetic construct
SGSETPGTSESATPES

SEQ ID NO: 19027 - protein, 11 aa, synthetic construct
EAAAKPAPGGS

SEQ ID NO: 19028 - protein, 11 aa, synthetic construct
EAAAKGGGGGS

SEQ ID NO: 19029 - protein, 5 aa, synthetic construct
GGGGS

SEQ ID NO: 19030 - protein, 11 aa, synthetic construct
GGSEAAAKGSS

SEQ ID NO: 19031 - protein, 11 aa, synthetic construct
GGSEAAAKGGG

SEQ ID NO: 19032 - protein, 18 aa, synthetic construct
GGSGGSGGSGGSGGSGGS

SEQ ID NO: 19033 - protein, 11 aa, synthetic construct
GGSEAAAKGSS

SEQ ID NO: 19034 - protein, 11 aa, synthetic construct
GGGEAAAKPAP

SEQ ID NO: 19035 - protein, 8 aa, synthetic construct
GGSEAAAK

SEQ ID NO: 19036 - protein, 9 aa, synthetic construct
GGSPAPGSS

SEQ ID NO: 19037 - protein, 11 aa, synthetic construct
GSSPAPEAAAK

SEQ ID NO: 19038 - protein, 6 aa, synthetic construct
GGSGSS

SEQ ID NO: 19039 - protein, 9 aa, synthetic construct
PAPGGGGGS

SEQ ID NO: 19040 - protein, 11 aa, synthetic construct
PAPEAAAKGSS

SEQ ID NO: 19041 - protein, 11 aa, synthetic construct
GGSGGGEAAAK

SEQ ID NO: 19042 - protein, 6 aa, synthetic construct
PAPGGG

SEQ ID NO: 19043 - protein, 8 aa, synthetic construct
EAAAKGGG

SEQ ID NO: 19044 - protein, 12 aa, synthetic construct
GSSGSSGSSGSS

SEQ ID NO: 19045 - protein, 11 aa, synthetic construct
EAAAKGGSGGG

SEQ ID NO: 19046 - protein, 9 aa, synthetic construct
GSSPAPGGS

SEQ ID NO: 19047 - protein, 9 aa, synthetic construct
GSSPAPGGS

SEQ ID NO: 19048 - protein, 6 aa, synthetic construct
GGGPAP

SEQ ID NO: 19049 - protein, 6 aa, synthetic construct
GGGPAP

SEQ ID NO: 19050 - protein, 9 aa, synthetic construct
GGSPAPGSS

SEQ ID NO: 19051 - protein, 5 aa, synthetic construct
PAPAP

SEQ ID NO: 19052 - protein, 7 aa, synthetic construct
GGGGGGG

SEQ ID NO: 19053 - protein, 5 aa, synthetic construct
GGGGG

SEQ ID NO: 19054 - protein, 12 aa, synthetic construct
GSAGSAAGSGEF

SEQ ID NO: 19055 - protein, 5 aa, synthetic construct
PAPAP

SEQ ID NO: 19056 - protein, 11 aa, synthetic construct
GGSEAAAKGGG

SEQ ID NO: 19057 - protein, 5 aa, synthetic construct
PAPAP

SEQ ID NO: 19058 - protein, 15 aa, synthetic construct
GGGGSGGGGSGGGGS

SEQ ID NO: 19059 - protein, 6 aa, synthetic construct
PAPGGS

SEQ ID NO: 19060 - protein, 11 aa, synthetic construct
GGGEAAAKPAP

SEQ ID NO: 19061 - protein, 6 aa, synthetic construct
GGGGGS

SEQ ID NO: 19062 - protein, 11 aa, synthetic construct
GSSEAAAKGGG

SEQ ID NO: 19063 - protein, 11 aa, synthetic construct
EAAAKGGGGSS

SEQ ID NO: 19064 - protein, 6 aa, synthetic construct
GSSGGS

SEQ ID NO: 19065 - protein, 6 aa, synthetic construct
GSSGGG

SEQ ID NO: 19066 - protein, 7 aa, synthetic construct
PAPAPAP

SEQ ID NO: 19067 - protein, 4 aa, synthetic construct
GGGG

SEQ ID NO: 19068 - protein, 11 aa, synthetic construct
EAAAKPAPGGS

SEQ ID NO: 19069 - protein, 10 aa, synthetic construct
GGGGSGGGGS

SEQ ID NO: 19070 - protein, 8 aa, synthetic construct
EAAAKGGG

SEQ ID NO: 19071 - protein, 9 aa, synthetic construct
GGGGSSPAP

SEQ ID NO: 19072 - protein, 11 aa, synthetic construct
GSSEAAAKGGG

SEQ ID NO: 19073 - protein, 5 aa, synthetic construct
GGGGG

SEQ ID NO: 19074 - protein, 11 aa, synthetic construct
GGGEAAAKGSS

SEQ ID NO: 19075 - protein, 9 aa, synthetic construct
GSSGSSGSS

SEQ ID NO: 19076 - protein, 9 aa, synthetic construct
GSSGGSPAP

SEQ ID NO: 19077 - protein, 8 aa, synthetic construct
EAAAKGGS

SEQ ID NO: 19078 - protein, 11 aa, synthetic construct
GGSPAPEAAAK

SEQ ID NO: 19079 - protein, 8 aa, synthetic construct
GGSEAAAK

SEQ ID NO: 19080 - protein, 6 aa, synthetic construct
GSSGGS

SEQ ID NO: 19081 - protein, 11 aa, synthetic construct
GGGPAPEAAAK

SEQ ID NO: 19082 - protein, 6 aa, synthetic construct
PAPGSS

SEQ ID NO: 19083 - protein, 11 aa, synthetic construct
GGSEAAAKGSS

SEQ ID NO: 19084 - protein, 25 aa, synthetic construct
EAAAKEAAAKEAAAKEAAAKEAAAK

SEQ ID NO: 19085 - protein, 11 aa, synthetic construct
GSSEAAAKGGG

SEQ ID NO: 19086 - protein, 15 aa, synthetic construct
GGGGSEAAAKGGGGS

SEQ ID NO: 19087 - protein, 9 aa, synthetic construct
GGSGGSGGS

SEQ ID NO: 19088 - protein, 9 aa, synthetic construct
GGGGGSGSS

SEQ ID NO: 19089 - protein, 20 aa, synthetic construct
GGGGSGGGGSGGGGSGGGGS

SEQ ID NO: 19090 - protein, 8 aa, synthetic construct
EAAAKGGG

SEQ ID NO: 19091 - protein, 11 aa, synthetic construct
GGSEAAAKGGG

SEQ ID NO: 19092 - protein, 9 aa, synthetic construct
GSSGGSGGG

SEQ ID NO: 19093 - protein, 6 aa, synthetic construct
GGGGGS

SEQ ID NO: 19094 - protein, 12 aa, synthetic construct
GSAGSAAGSGEF

SEQ ID NO: 19095 - protein, 11 aa, synthetic construct
PAPEAAAKGSS

SEQ ID NO: 19096 - protein, 9 aa, synthetic construct
GSSPAPGGG

SEQ ID NO: 19097 - protein, 9 aa, synthetic construct
GGGGSSPAP

SEQ ID NO: 19098 - protein, 9 aa, synthetic construct
PAPGGSGGG

SEQ ID NO: 19099 - protein, 6 aa, synthetic construct
GSSPAP

SEQ ID NO: 19100 - protein, 6 aa, synthetic construct
PAPGSS

SEQ ID NO: 19101 - protein, 9 aa, synthetic construct
GGSGGGGSS

SEQ ID NO: 19102 - protein, 6 aa, synthetic construct
GSSGGS

SEQ ID NO: 19103 - protein, 11 aa, synthetic construct
EAAAKGGGGGS

SEQ ID NO: 19104 - protein, 5 aa, synthetic construct
GGGGG

SEQ ID NO: 19105 - protein, 8 aa, synthetic construct
EAAAKGSS

SEQ ID NO: 19106 - protein, 25 aa, synthetic construct
EAAAKEAAAKEAAAKEAAAKEAAAK

SEQ ID NO: 19107 - protein, 20 aa, synthetic construct
EAAAKEAAAKEAAAKEAAAK

SEQ ID NO: 19108 - protein, 12 aa, synthetic construct
GSAGSAAGSGEF

SEQ ID NO: 19109 - protein, 9 aa, synthetic construct
GGGPAPGGS

SEQ ID NO: 19110 - protein, 11 aa, synthetic construct
GGSEAAAKGGG

SEQ ID NO: 19111 - protein, 11 aa, synthetic construct
PAPGGGEAAAK

SEQ ID NO: 19112 - protein, 11 aa, synthetic construct
EAAAKPAPGSS

SEQ ID NO: 19113 - protein, 8 aa, synthetic construct
GGSEAAAK

SEQ ID NO: 19114 - protein, 6 aa, synthetic construct
GGSGSS

SEQ ID NO: 19115 - protein, 11 aa, synthetic construct
GGSPAPEAAAK

SEQ ID NO: 19116 - protein, 5 aa, synthetic construct
GGGGS

SEQ ID NO: 19117 - protein, 9 aa, synthetic construct
GGSPAPGGG

SEQ ID NO: 19118 - protein, 11 aa, synthetic construct
EAAAKPAPGGS

SEQ ID NO: 19119 - protein, 6 aa, synthetic construct
GSSPAP

SEQ ID NO: 19120 - protein, 9 aa, synthetic construct
GGSGSSGGG

SEQ ID NO: 19121 - protein, 6 aa, synthetic construct
PAPGGG

SEQ ID NO: 19122 - protein, 11 aa, synthetic construct
GSSGGSEAAAK

SEQ ID NO: 19123 - protein, 8 aa, synthetic construct
GGSEAAAK

SEQ ID NO: 19124 - protein, 9 aa, synthetic construct
GGGPAPGGS

SEQ ID NO: 19125 - protein, 12 aa, synthetic construct
GSAGSAAGSGEF

SEQ ID NO: 19126 - protein, 11 aa, synthetic construct
EAAAKPAPGGS

SEQ ID NO: 19127 - protein, 6 aa, synthetic construct
PAPGGG

SEQ ID NO: 19128 - protein, 11 aa, synthetic construct
GSSPAPEAAAK

SEQ ID NO: 19129 - protein, 8 aa, synthetic construct
PAPEAAAK

SEQ ID NO: 19130 - protein, 9 aa, synthetic construct
PAPGGGGGS

SEQ ID NO: 19131 - protein, 11 aa, synthetic construct
GGSEAAAKPAP

SEQ ID NO: 19132 - protein, 8 aa, synthetic construct
EAAAKGSS

SEQ ID NO: 19133 - protein, 8 aa, synthetic construct
GGGEAAAK

SEQ ID NO: 19134 - protein, 15 aa, synthetic construct
EAAAKEAAAKEAAAK

SEQ ID NO: 19135 - protein, 11 aa, synthetic construct
PAPEAAAKGGG

SEQ ID NO: 19136 - protein, 7 aa, synthetic construct
PAPAPAP

SEQ ID NO: 19137 - protein, 11 aa, synthetic construct
EAAAKPAPGGS

SEQ ID NO: 19138 - protein, 10 aa, synthetic construct
GGGGSGGGGS

SEQ ID NO: 19139 - protein, 15 aa, synthetic construct
GGGGSEAAAKGGGGS

SEQ ID NO: 19140 - protein, 5 aa, synthetic construct
EAAAK

SEQ ID NO: 19141 - protein, 7 aa, synthetic construct
PAPAPAP

SEQ ID NO: 19142 - protein, 15 aa, synthetic construct
GGGGSEAAAKGGGGS

SEQ ID NO: 19143 - protein, 11 aa, synthetic construct
GGSPAPEAAAK

SEQ ID NO: 19144 - protein, 9 aa, synthetic construct
GGSGSSGGG

SEQ ID NO: 19145 - protein, 9 aa, synthetic construct
GGSPAPGSS

SEQ ID NO: 19146 - protein, 33 aa, synthetic construct; identical to SEQ ID NO: 6

SEQ ID NO: 19147 - protein, 11 aa, synthetic construct
EAAAKGGGPAP

SEQ ID NO: 19148 - protein, 11 aa, synthetic construct
GSSGGSEAAAK

SEQ ID NO: 19149 - protein, 16 aa, synthetic construct
SGSETPGTSESATPES

SEQ ID NO: 19150 - protein, 25 aa, synthetic construct
EAAAKEAAAKEAAAKEAAAKEAAAK

SEQ ID NO: 19151 - protein, 9 aa, synthetic construct
GSSGSSGSS

SEQ ID NO: 19152 - protein, 9 aa, synthetic construct
GSSPAPGGG

SEQ ID NO: 19153 - protein, 11 aa, synthetic construct
GSSGGGEAAAK

SEQ ID NO: 19154 - protein, 9 aa, synthetic construct
GGSGGGGSS

SEQ ID NO: 19155 - protein, 11 aa, synthetic construct
GSSGGGEAAAK

SEQ ID NO: 19156 - protein, 11 aa, synthetic construct
GSSEAAAKGGG

SEQ ID NO: 19157 - protein, 9 aa, synthetic construct
GGSGGGGSS

SEQ ID NO: 19158 - protein, 9 aa, synthetic construct
GGSGSSPAP

SEQ ID NO: 19159 - protein, 6 aa, synthetic construct
GSSPAP

SEQ ID NO: 19160 - protein, 11 aa, synthetic construct
GGGGSSEAAAK

SEQ ID NO: 19161 - protein, 10 aa, synthetic construct
EAAAKEAAAK

SEQ ID NO: 19162 - protein, 9 aa, synthetic construct
PAPAPAPAP

SEQ ID NO: 19163 - protein, 11 aa, synthetic construct
GGSEAAAKGGG

SEQ ID NO: 19164 - protein, 6 aa, synthetic construct
PAPGGG

SEQ ID NO: 19165 - protein, 8 aa, synthetic construct
EAAAKGSS

SEQ ID NO: 19166 - protein, 10 aa, synthetic construct
GGGGSGGGGS

SEQ ID NO: 19167 - protein, 9 aa, synthetic construct
GGSGGSGGS

SEQ ID NO: 19168 - protein, 5 aa, synthetic construct
EAAAK

SEQ ID NO: 19169 - protein, 9 aa, synthetic construct
GGGGSSGGS

SEQ ID NO: 19170 - protein, 11 aa, synthetic construct
GGGPAPEAAAK

SEQ ID NO: 19171 - protein, 15 aa, synthetic construct
EAAAKEAAAKEAAAK

SEQ ID NO: 19172 - protein, 11 aa, synthetic construct
GSSEAAAKGGG

SEQ ID NO: 19173 - protein, 9 aa, synthetic construct
GGGPAPGGS

SEQ ID NO: 19174 - protein, 11 aa, synthetic construct
GGSEAAAKGGG

SEQ ID NO: 19175 - protein, 11 aa, synthetic construct
EAAAKGGGGGS

SEQ ID NO: 19176 - protein, 11 aa, synthetic construct
EAAAKGGSGGG

SEQ ID NO: 19177 - protein, 11 aa, synthetic construct
GGSEAAAKGGG

SEQ ID NO: 19178 - protein, 5 aa, synthetic construct
GGGGS

SEQ ID NO: 19179 - protein, 6 aa, synthetic construct
GSSGGS

SEQ ID NO: 19180 - protein, 6 aa, synthetic construct
GSSGSS

SEQ ID NO: 19181 - protein, 9 aa, synthetic construct
GGSPAPGGG

SEQ ID NO: 19182 - protein, 9 aa, synthetic construct
GSSGGGGGS

SEQ ID NO: 19183 - protein, 9 aa, synthetic construct
PAPAPAPAP

SEQ ID NO: 19184 - protein, 5 aa, synthetic construct
PAPAP

SEQ ID NO: 19185 - protein, 9 aa, synthetic construct
PAPGSSGGS

SEQ ID NO: 19186 - protein, 9 aa, synthetic construct
PAPGSSGGG

SEQ ID NO: 19187 - protein, 8 aa, synthetic construct
GGGEAAAK

SEQ ID NO: 19188 - protein, 15 aa, synthetic construct
GGSGGSGGSGGSGGS

SEQ ID NO: 19189 - protein, 6 aa, synthetic construct
GGSGGG

SEQ ID NO: 19190 - protein, 11 aa, synthetic construct
PAPEAAAKGGG

SEQ ID NO: 19191 - protein, 9 aa, synthetic construct
PAPGGSGSS

SEQ ID NO: 19192 - protein, 30 aa, synthetic construct; identical to SEQ ID NO: 130

SEQ ID NO: 19193 - protein, 12 aa, synthetic construct
GSSGSSGSSGSS

SEQ ID NO: 19194 - protein, 15 aa, synthetic construct
GSSGSSGSSGSSGSS

SEQ ID NO: 19195 - protein, 11 aa, synthetic construct
GGGEAAAKPAP

SEQ ID NO: 19196 - protein, 9 aa, synthetic construct
PAPGSSGGG

SEQ ID NO: 19197 - protein, 9 aa, synthetic construct
PAPGGSGSS

SEQ ID NO: 19198 - protein, 11 aa, synthetic construct
PAPAPAPAPAP

SEQ ID NO: 19199 - protein, 11 aa, synthetic construct
GGSGGGEAAAK

SEQ ID NO: 19200 - protein, 6 aa, synthetic construct
GSSPAP

SEQ ID NO: 19201 - protein, 8 aa, synthetic construct
EAAAKPAP

SEQ ID NO: 19202 - protein, 20 aa, synthetic construct
GGGGSGGGGSGGGGSGGGGS

SEQ ID NO: 19203 - protein, 6 aa, synthetic construct
GGSGGG

SEQ ID NO: 19204 - protein, 9 aa, synthetic construct
GGSGGSGGS

SEQ ID NO: 19205 - protein, 8 aa, synthetic construct
GGGGGGGG

SEQ ID NO: 19206 - protein, 6 aa, synthetic construct
GGGGSS

SEQ ID NO: 19207 - protein, 9 aa, synthetic construct
GSSGGGGGS

SEQ ID NO: 19208 - protein, 30 aa, synthetic construct; identical to SEQ ID NO: 130

SEQ ID NO: 19209 - protein, 9 aa, synthetic construct
GSSGSSGSS

SEQ ID NO: 19210 - protein, 9 aa, synthetic construct
GSSPAPGGS

SEQ ID NO: 19211 - protein, 7 aa, synthetic construct
PAPAPAP

SEQ ID NO: 19212 - protein, 20 aa, synthetic construct
EAAAKEAAAKEAAAKEAAAK

SEQ ID NO: 19213 - protein, 9 aa, synthetic construct
PAPAPAPAP

SEQ ID NO: 19214 - protein, 6 aa, synthetic construct
GGGGSS

SEQ ID NO: 19215 - protein, 15 aa, synthetic construct
GSSGSSGSSGSSGSS

SEQ ID NO: 19216 - protein, 6 aa, synthetic construct
PAPGGS

SEQ ID NO: 19217 - protein, 11 aa, synthetic construct
GSSEAAAKGGG

SEQ ID NO: 19218 - protein, 9 aa, synthetic construct
GSSGGSPAP

SEQ ID NO: 19219 - protein, 18 aa, synthetic construct
GSSGSSGSSGSSGSSGSS

SEQ ID NO: 19220 - protein, 9 aa, synthetic construct
GGSGSSGGG

SEQ ID NO: 19221 - protein, 9 aa, synthetic construct
GGGPAPGSS

SEQ ID NO: 19222 - protein, 11 aa, synthetic construct
GSSEAAAKGGS

SEQ ID NO: 19223 - protein, 11 aa, synthetic construct
GSSEAAAKGGG

SEQ ID NO: 19224 - protein, 9 aa, synthetic construct
GGSGGGPAP

SEQ ID NO: 19225 - protein, 6 aa, synthetic construct
GSSGSS

SEQ ID NO: 19226 - protein, 9 aa, synthetic construct
PAPGGGGGS

SEQ ID NO: 19227 - protein, 11 aa, synthetic construct
EAAAKPAPGGS

SEQ ID NO: 19228 - protein, 6 aa, synthetic construct
GSSGSS

SEQ ID NO: 19229 - protein, 11 aa, synthetic construct
EAAAKPAPGGS

SEQ ID NO: 19230 - protein, 11 aa, synthetic construct
GGGPAPEAAAK

SEQ ID NO: 19231 - protein, 11 aa, synthetic construct
GSSEAAAKGGG

SEQ ID NO: 19232 - protein, 11 aa, synthetic construct
GGGEAAAKGGS

SEQ ID NO: 19233 - protein, 6 aa, synthetic construct
GSSGSS

SEQ ID NO: 19234 - protein, 15 aa, synthetic construct
EAAAKEAAAKEAAAK

SEQ ID NO: 19235 - protein, 9 aa, synthetic construct
PAPGSSGGS

SEQ ID NO: 19236 - protein, 11 aa, synthetic construct
PAPAPAPAPAP

SEQ ID NO: 19237 - protein, 8 aa, synthetic construct
GSSEAAAK

SEQ ID NO: 19238 - protein, 11 aa, synthetic construct
GGSEAAAKGGG

SEQ ID NO: 19239 - protein, 9 aa, synthetic construct
GGSGGGPAP

SEQ ID NO: 19240 - protein, 6 aa, synthetic construct
GSSGSS

SEQ ID NO: 19241 - protein, 8 aa, synthetic construct
GGSEAAAK

SEQ ID NO: 19242 - protein, 11 aa, synthetic construct
GSSEAAAKGGS

SEQ ID NO: 19243 - protein, 9 aa, synthetic construct
PAPGGGGGS

SEQ ID NO: 19244 - protein, 6 aa, synthetic construct
GSSGGG

SEQ ID NO: 19245 - protein, 6 aa, synthetic construct
GSSGGS

SEQ ID NO: 19246 - protein, 6 aa, synthetic construct
PAPGGG

SEQ ID NO: 19247 - protein, 9 aa, synthetic construct
PAPGSSGGG

SEQ ID NO: 19248 - protein, 8 aa, synthetic construct
GGSEAAAK

SEQ ID NO: 19249 - protein, 11 aa, synthetic construct
GSSPAPEAAAK

SEQ ID NO: 19250 - protein, 9 aa, synthetic construct
GSSGGSPAP

SEQ ID NO: 19251 - protein, 9 aa, synthetic construct
GGSPAPGSS

SEQ ID NO: 19252 - protein, 9 aa, synthetic construct
GGSGGSGGS

SEQ ID NO: 19253 - protein, 9 aa, synthetic construct
GGSGGGPAP

SEQ ID NO: 19254 - protein, 11 aa, synthetic construct
GGGPAPEAAAK

SEQ ID NO: 19255 - protein, 5 aa, synthetic construct
GGGGS

SEQ ID NO: 19256 - protein, 9 aa, synthetic construct
GSSGGSGGG

SEQ ID NO: 19257 - protein, 11 aa, synthetic construct
EAAAKGGGGSS

SEQ ID NO: 19258 - protein, 9 aa, synthetic construct
GGSGSSGGG

SEQ ID NO: 19259 - protein, 9 aa, synthetic construct
GGSGGSGGS

SEQ ID NO: 19260 - protein, 11 aa, synthetic construct
GGGPAPEAAAK

SEQ ID NO: 19261 - protein, 11 aa, synthetic construct
GSSGGGEAAAK

SEQ ID NO: 19262 - protein, 12 aa, synthetic construct
GSAGSAAGSGEF

SEQ ID NO: 19263 - protein, 9 aa, synthetic construct
GSSGGGPAP

SEQ ID NO: 19264 - protein, 6 aa, synthetic construct
GGGGSS

SEQ ID NO: 19265 - protein, 11 aa, synthetic construct
GGGGSSEAAAK

SEQ ID NO: 19266 - protein, 9 aa, synthetic construct
PAPGGSGGG

SEQ ID NO: 19267 - protein, 15 aa, synthetic construct
GSSGSSGSSGSSGSS

SEQ ID NO: 19268 - protein, 9 aa, synthetic construct
GSSGGSPAP

SEQ ID NO: 19269 - protein, 8 aa, synthetic construct
GGSEAAAK

SEQ ID NO: 19270 - protein, 10 aa, synthetic construct
GGGGSGGGGS

SEQ ID NO: 19271 - protein, 11 aa, synthetic construct
GSSEAAAKGGG

SEQ ID NO: 19272 - protein, 11 aa, synthetic construct
EAAAKPAPGGG

SEQ ID NO: 19273 - protein, 11 aa, synthetic construct
EAAAKGGSPAP

SEQ ID NO: 19274 - protein, 11 aa, synthetic construct
GSSEAAAKPAP

SEQ ID NO: 19275 - protein, 9 aa, synthetic construct
GGGPAPGGS

SEQ ID NO: 19276 - protein, 15 aa, synthetic construct
EAAAKGGGGSEAAAK

SEQ ID NO: 19277 - protein, 9 aa, synthetic construct
GGSGSSGGG

SEQ ID NO: 19278 - protein, 12 aa, synthetic construct
GSAGSAAGSGEF

SEQ ID NO: 19279 - protein, 8 aa, synthetic construct
GGGEAAAK

SEQ ID NO: 19280 - protein, 11 aa, synthetic construct
PAPEAAAKGGS

SEQ ID NO: 19281 - protein, 13 aa, synthetic construct
PAPAPAPAPAPAP

SEQ ID NO: 19282 - protein, 9 aa, synthetic construct
GGSGGGGSS

SEQ ID NO: 19283 - protein, 9 aa, synthetic construct
PAPGSSGGS

SEQ ID NO: 19284 - protein, 8 aa, synthetic construct
PAPEAAAK

SEQ ID NO: 19285 - protein, 18 aa, synthetic construct
GSSGSSGSSGSSGSSGSS

SEQ ID NO: 19286 - protein, 9 aa, synthetic construct
GGGGGSGSS

SEQ ID NO: 19287 - protein, 8 aa, synthetic construct
GGGGGGGG

SEQ ID NO: 19288 - protein, 6 aa, synthetic construct
GGGGGG

SEQ ID NO: 19289 - protein, 9 aa, synthetic construct
GSSGGSGGG

SEQ ID NO: 19290 - protein, 6 aa, synthetic construct
GGGGSS

SEQ ID NO: 19291 - protein, 9 aa, synthetic construct
GGSGGGPAP

SEQ ID NO: 19292 - protein, 6 aa, synthetic construct
GSSGSS

SEQ ID NO: 19293 - protein, 25 aa, synthetic construct
EAAAKEAAAKEAAAKEAAAKEAAAK

SEQ ID NO: 19294 - protein, 10 aa, synthetic construct
EAAAKEAAAK

SEQ ID NO: 19295 - protein, 11 aa, synthetic construct
GSSPAPEAAAK

SEQ ID NO: 19296 - protein, 11 aa, synthetic construct
GGSEAAAKPAP

SEQ ID NO: 19297 - protein, 11 aa, synthetic construct
GGSGGGEAAAK

SEQ ID NO: 19298 - protein, 11 aa, synthetic construct
EAAAKGSSPAP

SEQ ID NO: 19299 - protein, 11 aa, synthetic construct
GGSGSSEAAAK

SEQ ID NO: 19300 - protein, 9 aa, synthetic construct
GGGGGSGSS

SEQ ID NO: 19301 - protein, 11 aa, synthetic construct
GGSGGGEAAAK

SEQ ID NO: 19302 - protein, 9 aa, synthetic construct
GSSGGSGGG

SEQ ID NO: 19303 - protein, 11 aa, synthetic construct
EAAAKPAPGGG

SEQ ID NO: 19304 - protein, 9 aa, synthetic construct
PAPGGSGGG

SEQ ID NO: 19305 - protein, 7 aa, synthetic construct
PAPAPAP

SEQ ID NO: 19306 - protein, 11 aa, synthetic construct
GSSEAAAKPAP

SEQ ID NO: 19307 - protein, 33 aa, synthetic construct; identical to SEQ ID NO: 6

SEQ ID NO: 19308 - protein, 9 aa, synthetic construct
GSSGGSGGG

SEQ ID NO: 19309 - protein, 18 aa, synthetic construct
GSSGSSGSSGSSGSSGSS

SEQ ID NO: 19310 - protein, 9 aa, synthetic construct
GSSGGGPAP

SEQ ID NO: 19311 - protein, 13 aa, synthetic construct
PAPAPAPAPAPAP

SEQ ID NO: 19312 - protein, 9 aa, synthetic construct
GGGGGSPAP

SEQ ID NO: 19313 - protein, 6 aa, synthetic construct
PAPGSS

SEQ ID NO: 19314 - protein, 11 aa, synthetic construct
PAPEAAAKGGS

SEQ ID NO: 19315 - protein, 9 aa, synthetic construct
GGGGSSPAP

SEQ ID NO: 19316 - protein, 8 aa, synthetic construct
GGSEAAAK

SEQ ID NO: 19317 - protein, 11 aa, synthetic construct
EAAAKPAPGGS

SEQ ID NO: 19318 - protein, 6 aa, synthetic construct
PAPGSS

SEQ ID NO: 19319 - protein, 9 aa, synthetic construct
PAPGSSGGG

SEQ ID NO: 19320 - protein, 15 aa, synthetic construct
EAAAKEAAAKEAAAK

SEQ ID NO: 19321 - protein, 5 aa, synthetic construct
GGGGS

SEQ ID NO: 19322 - protein, 9 aa, synthetic construct
GGSGGGGSS

SEQ ID NO: 19323 - protein, 6 aa, synthetic construct
GGSGGG

SEQ ID NO: 19324 - protein, 11 aa, synthetic construct
GGGEAAAKPAP

SEQ ID NO: 19325 - protein, 25 aa, synthetic construct
EAAAKEAAAKEAAAKEAAAKEAAAK

SEQ ID NO: 19326 - protein, 9 aa, synthetic construct
PAPGGSGGG

SEQ ID NO: 19327 - protein, 18 aa, synthetic construct
GSSGSSGSSGSSGSSGSS

SEQ ID NO: 19328 - protein, 11 aa, synthetic construct
GGGEAAAKPAP

SEQ ID NO: 19329 - protein, 9 aa, synthetic construct
GSSGGSPAP

SEQ ID NO: 19330 - protein, 11 aa, synthetic construct
PAPAPAPAPAP

SEQ ID NO: 19331 - protein, 11 aa, synthetic construct
GSSGGSEAAAK

SEQ ID NO: 19332 - protein, 9 aa, synthetic construct
GGSPAPGSS

SEQ ID NO: 19333 - protein, 9 aa, synthetic construct
GGSGGSGGS

SEQ ID NO: 19334 - protein, 11 aa, synthetic construct
PAPEAAAKGSS

SEQ ID NO: 19335 - protein, 8 aa, synthetic construct
EAAAKGGS

SEQ ID NO: 19336 - protein, 15 aa, synthetic construct
EAAAKGGGGSEAAAK

SEQ ID NO: 19337 - protein, 9 aa, synthetic construct
GGGGSSPAP

SEQ ID NO: 19338 - protein, 5 aa, synthetic construct
EAAAK

SEQ ID NO: 19339 - protein, 11 aa, synthetic construct
EAAAKGGGGSS

SEQ ID NO: 19340 - protein, 11 aa, synthetic construct
GGGGGSEAAAK

SEQ ID NO: 19341 - protein, 4 aa, synthetic construct
GGGG

SEQ ID NO: 19342 - protein, 11 aa, synthetic construct
GGGGGSEAAAK

SEQ ID NO: 19343 - protein, 11 aa, synthetic construct
EAAAKGGGPAP

SEQ ID NO: 19344 - protein, 20 aa, synthetic construct
GGGGSGGGGSGGGGSGGGGS

SEQ ID NO: 19345 - protein, 9 aa, synthetic construct
GSSGGSGGG

SEQ ID NO: 19346 - protein, 15 aa, synthetic construct
GGGGSGGGGSGGGGS

SEQ ID NO: 19347 - protein, 11 aa, synthetic construct
GGSGGGEAAAK

SEQ ID NO: 19348 - protein, 11 aa, synthetic construct
PAPEAAAKGGG

SEQ ID NO: 19349 - protein, 10 aa, synthetic construct
GGGGSGGGGS

SEQ ID NO: 19350 - protein, 11 aa, synthetic construct
GSSGGGEAAAK

SEQ ID NO: 19351 - protein, 5 aa, synthetic construct
GGGGG

SEQ ID NO: 19352 - protein, 6 aa, synthetic construct
GGSGSS

SEQ ID NO: 19353 - protein, 13 aa, synthetic construct
PAPAPAPAPAPAP

SEQ ID NO: 19354 - protein, 11 aa, synthetic construct
GGSEAAAKPAP

SEQ ID NO: 19355 - protein, 6 aa, synthetic construct
GGGGGG

SEQ ID NO: 19356 - protein, 11 aa, synthetic construct
GSSGGGEAAAK

SEQ ID NO: 19357 - protein, 33 aa, synthetic construct; identical to SEQ ID NO: 6

SEQ ID NO: 19358 - protein, 9 aa, synthetic construct
GGSPAPGSS

SEQ ID NO: 19359 - protein, 9 aa, synthetic construct
GGGGSSPAP

SEQ ID NO: 19360 - protein, 15 aa, synthetic construct
GGGGSEAAAKGGGGS

SEQ ID NO: 19361 - protein, 8 aa, synthetic construct
GGGGGGGG

SEQ ID NO: 19362 - protein, 5 aa, synthetic construct
PAPAP

SEQ ID NO: 19363 - protein, 8 aa, synthetic construct
GGGEAAAK

SEQ ID NO: 19364 - protein, 9 aa, synthetic construct
GSSPAPGGG

SEQ ID NO: 19365 - protein, 15 aa, synthetic construct
GGSGGSGGSGGSGGS

SEQ ID NO: 19366 - protein, 6 aa, synthetic construct
GGGGGS

SEQ ID NO: 19367 - protein, 9 aa, synthetic construct
PAPGGGGSS

SEQ ID NO: 19368 - protein, 8 aa, synthetic construct
GGGEAAAK

SEQ ID NO: 19369 - protein, 11 aa, synthetic construct
PAPEAAAKGGG

SEQ ID NO: 19370 - protein, 8 aa, synthetic construct
GSSEAAAK

SEQ ID NO: 19371 - protein, 10 aa, synthetic construct
EAAAKEAAAK

SEQ ID NO: 19372 - protein, 11 aa, synthetic construct
EAAAKGGGGGS

SEQ ID NO: 19373 - protein, 11 aa, synthetic construct
GGGEAAAKGGS

SEQ ID NO: 19374 - protein, 11 aa, synthetic construct
PAPAPAPAPAP

SEQ ID NO: 19375 - protein, 11 aa, synthetic construct
PAPGSSEAAAK

SEQ ID NO: 19376 - protein, 15 aa, synthetic construct
EAAAKEAAAKEAAAK

SEQ ID NO: 19377 - protein, 9 aa, synthetic construct
GGSPAPGSS

SEQ ID NO: 19378 - protein, 9 aa, synthetic construct
PAPGSSGGS

SEQ ID NO: 19379 - protein, 20 aa, synthetic construct
EAAAKEAAAKEAAAKEAAAK

SEQ ID NO: 19380 - protein, 8 aa, synthetic construct
EAAAKGGG

SEQ ID NO: 19381 - protein, 11 aa, synthetic construct
EAAAKGGSGGG

SEQ ID NO: 19382 - protein, 6 aa, synthetic construct
GGGGGS

SEQ ID NO: 19383 - protein, 9 aa, synthetic construct
PAPGGSGGG

SEQ ID NO: 19384 - protein, 9 aa, synthetic construct
GGGPAPGGS

SEQ ID NO: 19385 - protein, 9 aa, synthetic construct
GGSGGSGGS

SEQ ID NO: 19386 - protein, 5 aa, synthetic construct
GGGGS

SEQ ID NO: 19387 - protein, 4 aa, synthetic construct
GGGG

SEQ ID NO: 19388 - protein, 11 aa, synthetic construct
GGSEAAAKPAP

SEQ ID NO: 19389 - protein, 9 aa, synthetic construct
PAPAPAPAP

SEQ ID NO: 19390 - protein, 15 aa, synthetic construct
EAAAKEAAAKEAAAK

SEQ ID NO: 19391 - protein, 8 aa, synthetic construct
EAAAKGSS

SEQ ID NO: 19392 - protein, 8 aa, synthetic construct
EAAAKGGG

SEQ ID NO: 19393 - protein, 11 aa, synthetic construct
PAPEAAAKGGG

SEQ ID NO: 19394 - protein, 11 aa, synthetic construct
GSSGGGEAAAK

SEQ ID NO: 19395 - protein, 11 aa, synthetic construct
PAPGGGEAAAK

SEQ ID NO: 19396 - protein, 20 aa, synthetic construct
GGGGSGGGGSGGGGSGGGGS

SEQ ID NO: 19397 - protein, 6 aa, synthetic construct
GSSGGG

SEQ ID NO: 19398 - protein, 20 aa, synthetic construct
GGGGSGGGGSGGGGSGGGGS

SEQ ID NO: 19399 - protein, 6 aa, synthetic construct
GGSGSS

SEQ ID NO: 19400 - protein, 11 aa, synthetic construct
GGSGSSEAAAK

SEQ ID NO: 19401 - protein, 7 aa, synthetic construct
PAPAPAP

SEQ ID NO: 19402 - protein, 9 aa, synthetic construct
GSSGGSPAP

SEQ ID NO: 19403 - protein, 6 aa, synthetic construct
GGSPAP

SEQ ID NO: 19404 - protein, 9 aa, synthetic construct
GGSGGGPAP

SEQ ID NO: 19405 - protein, 8 aa, synthetic construct
GSSEAAAK

SEQ ID NO: 19406 - protein, 9 aa, synthetic construct
GSSGGGPAP

SEQ ID NO: 19407 - protein, 11 aa, synthetic construct
GGGGSSEAAAK

SEQ ID NO: 19408 - protein, 11 aa, synthetic construct
GGSEAAAKPAP

SEQ ID NO: 19409 - protein, 9 aa, synthetic construct
GGSGGGPAP

SEQ ID NO: 19410 - protein, 20 aa, synthetic construct
GGGGSGGGGSGGGGSGGGGS

SEQ ID NO: 19411 - protein, 9 aa, synthetic construct
GGGGSSPAP

SEQ ID NO: 19412 - protein, 8 aa, synthetic construct
EAAAKGGS

SEQ ID NO: 19413 - protein, 11 aa, synthetic construct
GGSEAAAKGSS

SEQ ID NO: 19414 - protein, 11 aa, synthetic construct
GGGGSSEAAAK

SEQ ID NO: 19415 - protein, 11 aa, synthetic construct
EAAAKGGSGGG

SEQ ID NO: 19416 - protein, 6 aa, synthetic construct
GGSGGS

SEQ ID NO: 19417 - protein, 8 aa, synthetic construct
EAAAKGGG

SEQ ID NO: 19418 - protein, 15 aa, synthetic construct
GSSGSSGSSGSSGSS

SEQ ID NO: 19419 - protein, 9 aa, synthetic construct
GSSGGGPAP

SEQ ID NO: 19420 - protein, 11 aa, synthetic construct
PAPGGSEAAAK

SEQ ID NO: 19421 - protein, 6 aa, synthetic construct
GGSPAP

SEQ ID NO: 19422 - protein, 11 aa, synthetic construct
EAAAKPAPGSS

SEQ ID NO: 19423 - protein, 16 aa, synthetic construct
SGSETPGTSESATPES

SEQ ID NO: 19424 - protein, 6 aa, synthetic construct
GSSPAP

SEQ ID NO: 19425 - protein, 9 aa, synthetic construct
GSSPAPGGG

SEQ ID NO: 19426 - protein, 11 aa, synthetic construct
GGGEAAAKGSS

SEQ ID NO: 19427 - protein, 9 aa, synthetic construct
GGGPAPGGS

SEQ ID NO: 19428 - protein, 8 aa, synthetic construct
EAAAKGGG

SEQ ID NO: 19429 - protein, 6 aa, synthetic construct
GSSGGG

SEQ ID NO: 19430 - protein, 11 aa, synthetic construct
GGSPAPEAAAK

SEQ ID NO: 19431 - protein, 11 aa, synthetic construct
EAAAKGSSPAP

SEQ ID NO: 19432 - protein, 15 aa, synthetic construct
EAAAKGGGGSEAAAK

SEQ ID NO: 19433 - protein, 15 aa, synthetic construct
GSSGSSGSSGSSGSS

SEQ ID NO: 19434 - protein, 11 aa, synthetic construct
EAAAKGGSPAP

SEQ ID NO: 19435 - protein, 6 aa, synthetic construct
GGSGGS

SEQ ID NO: 19436 - protein, 11 aa, synthetic construct
EAAAKGSSGGS

SEQ ID NO: 19437 - protein, 9 aa, synthetic construct
GSSGGGPAP

SEQ ID NO: 19438 - protein, 11 aa, synthetic construct
PAPEAAAKGGS

SEQ ID NO: 19439 - protein, 11 aa, synthetic construct
EAAAKPAPGGG

SEQ ID NO: 19440 - protein, 6 aa, synthetic construct
GGSPAP

SEQ ID NO: 19441 - protein, 10 aa, synthetic construct
GGGGSGGGGS

SEQ ID NO: 19442 - protein, 6 aa, synthetic construct
GGGGSS

SEQ ID NO: 19443 - protein, 9 aa, synthetic construct
GGSPAPGGG

SEQ ID NO: 19444 - protein, 11 aa, synthetic construct
EAAAKPAPGSS

SEQ ID NO: 19445 - protein, 8 aa, synthetic construct
EAAAKPAP

SEQ ID NO: 19446 - protein, 11 aa, synthetic construct
PAPEAAAKGSS

SEQ ID NO: 19447 - protein, 11 aa, synthetic construct
EAAAKGGSGSS

SEQ ID NO: 19448 - protein, 11 aa, synthetic construct
GGGEAAAKGSS

SEQ ID NO: 19449 - protein, 15 aa, synthetic construct
GGGGSEAAAKGGGGS

SEQ ID NO: 19450 - protein, 9 aa, synthetic construct
PAPGGSGSS

SEQ ID NO: 19451 - protein, 11 aa, synthetic construct
GGSEAAAKPAP

SEQ ID NO: 19452 - protein, 15 aa, synthetic construct
GGSGGSGGSGGSGGS

SEQ ID NO: 19453 - protein, 11 aa, synthetic construct
GSSGGSEAAAK

SEQ ID NO: 19454 - protein, 11 aa, synthetic construct
PAPGGSEAAAK

SEQ ID NO: 19455 - protein, 11 aa, synthetic construct
PAPEAAAKGGS

SEQ ID NO: 19456 - protein, 9 aa, synthetic construct
GGSGSSPAP

SEQ ID NO: 19457 - protein, 6 aa, synthetic construct
GSSPAP

SEQ ID NO: 19458 - protein, 8 aa, synthetic construct
GGGEAAAK

SEQ ID NO: 19459 - protein, 6 aa, synthetic construct
GGGGSS

SEQ ID NO: 19460 - protein, 9 aa, synthetic construct
GGSPAPGSS

SEQ ID NO: 19461 - protein, 6 aa, synthetic construct
PAPGGS

SEQ ID NO: 19462 - protein, 11 aa, synthetic construct
EAAAKGSSPAP

SEQ ID NO: 19463 - protein, 9 aa, synthetic construct
GGGGSSGGS

SEQ ID NO: 19464 - protein, 13 aa, synthetic construct
PAPAPAPAPAPAP

SEQ ID NO: 19465 - protein, 11 aa, synthetic construct
GGSEAAAKGGG

SEQ ID NO: 19466 - protein, 6 aa, synthetic construct
GGSGGS

SEQ ID NO: 19467 - protein, 9 aa, synthetic construct
GSSGGGGGS

SEQ ID NO: 19468 - protein, 11 aa, synthetic construct
EAAAKGGGPAP

SEQ ID NO: 19469 - protein, 20 aa, synthetic construct
EAAAKEAAAKEAAAKEAAAK

SEQ ID NO: 19470 - protein, 9 aa, synthetic construct
GGGPAPGSS

SEQ ID NO: 19471 - protein, 20 aa, synthetic construct
GGGGSGGGGSGGGGSGGGGS

SEQ ID NO: 19472 - protein, 20 aa, synthetic construct
EAAAKEAAAKEAAAKEAAAK

SEQ ID NO: 19473 - protein, 9 aa, synthetic construct
PAPGSSGGS

SEQ ID NO: 19474 - protein, 11 aa, synthetic construct
PAPGSSEAAAK

SEQ ID NO: 19475 - protein, 11 aa, synthetic construct
GSSPAPEAAAK

SEQ ID NO: 19476 - protein, 15 aa, synthetic construct
EAAAKGGGGSEAAAK

SEQ ID NO: 19477 - protein, 6 aa, synthetic construct
GGSPAP

SEQ ID NO: 19478 - protein, 11 aa, synthetic construct
GGSGSSEAAAK

SEQ ID NO: 19479 - protein, 11 aa, synthetic construct
GGSEAAAKGGG

SEQ ID NO: 19480 - protein, 9 aa, synthetic construct
PAPGGGGSS

SEQ ID NO: 19481 - protein, 12 aa, synthetic construct
GGSGGSGGSGGS

SEQ ID NO: 19482 - protein, 9 aa, synthetic construct
GGGGSSGGS

SEQ ID NO: 19483 - protein, 33 aa, synthetic construct; identical to SEQ ID NO: 6

SEQ ID NO: 19484 - protein, 6 aa, synthetic construct
GGGPAP

SEQ ID NO: 19485 - protein, 20 aa, synthetic construct
GGGGSGGGGSGGGGSGGGGS

SEQ ID NO: 19486 - protein, 8 aa, synthetic construct
GSSEAAAK

SEQ ID NO: 19487 - protein, 11 aa, synthetic construct
GGSPAPEAAAK

SEQ ID NO: 19488 - protein, 11 aa, synthetic construct
GGGGGSEAAAK

SEQ ID NO: 19489 - protein, 9 aa, synthetic construct
GSSPAPGGS

SEQ ID NO: 19490 - protein, 8 aa, synthetic construct
EAAAKPAP

SEQ ID NO: 19491 - protein, 8 aa, synthetic construct
EAAAKGGG

SEQ ID NO: 19492 - protein, 8 aa, synthetic construct
GGGEAAAK

SEQ ID NO: 19493 - protein, 9 aa, synthetic construct
PAPGSSGGG

SEQ ID NO: 19494 - protein, 11 aa, synthetic construct
EAAAKGGSPAP

SEQ ID NO: 19495 - protein, 9 aa, synthetic construct
GSSGGSGGG

SEQ ID NO: 19496 - protein, 11 aa, synthetic construct
GSSGGGEAAAK

SEQ ID NO: 19497 - protein, 9 aa, synthetic construct
GGGPAPGSS

SEQ ID NO: 19498 - protein, 11 aa, synthetic construct
PAPGGGEAAAK

SEQ ID NO: 19499 - protein, 12 aa, synthetic construct
GSSGSSGSSGSS

SEQ ID NO: 19500 - protein, 8 aa, synthetic construct
GGSEAAAK

SEQ ID NO: 19501 - protein, 11 aa, synthetic construct
GGGEAAAKPAP

SEQ ID NO: 19502 - protein, 11 aa, synthetic construct
EAAAKGGGPAP

SEQ ID NO: 19503 - protein, 9 aa, synthetic construct
GGGGSSPAP

SEQ ID NO: 19504 - protein, 11 aa, synthetic construct
EAAAKPAPGSS

SEQ ID NO: 19505 - protein, 9 aa, synthetic construct
GGGGSSPAP

SEQ ID NO: 19506 - protein, 6 aa, synthetic construct
GSSGSS

SEQ ID NO: 19507 - protein, 25 aa, synthetic construct
GGGGSGGGGSGGGGSGGGGSGGGGS

SEQ ID NO: 19508 - protein, 9 aa, synthetic construct
GGGGSSGGS

SEQ ID NO: 19509 - protein, 11 aa, synthetic construct
EAAAKGGSGSS

SEQ ID NO: 19510 - protein, 8 aa, synthetic construct
EAAAKPAP

SEQ ID NO: 19511 - protein, 11 aa, synthetic construct
GSSGGGEAAAK

SEQ ID NO: 19512 - protein, 9 aa, synthetic construct
PAPGGSGGG

SEQ ID NO: 19513 - protein, 11 aa, synthetic construct
EAAAKGGGPAP

SEQ ID NO: 19514 - protein, 9 aa, synthetic construct
GSSGSSGSS

SEQ ID NO: 19515 - protein, 6 aa, synthetic construct
GSSGGS

SEQ ID NO: 19516 - protein, 11 aa, synthetic construct
GGSEAAAKGGG

SEQ ID NO: 19517 - protein, 8 aa, synthetic construct
EAAAKGGS

SEQ ID NO: 19518 - protein, 9 aa, synthetic construct
GGSGSSGGG

SEQ ID NO: 19519 - protein, 5 aa, synthetic construct
EAAAK

SEQ ID NO: 19520 - protein, 9 aa, synthetic construct
GSSGGSPAP

SEQ ID NO: 19521 - protein, 9 aa, synthetic construct
GGGGSSGGS

SEQ ID NO: 19522 - protein, 9 aa, synthetic construct
PAPGGSGGG

SEQ ID NO: 19523 - protein, 9 aa, synthetic construct
GGGPAPGGS

SEQ ID NO: 19524 - protein, 11 aa, synthetic construct
GSSPAPEAAAK

SEQ ID NO: 19525 - protein, 9 aa, synthetic construct
GGSGSSPAP

SEQ ID NO: 19526 - protein, 11 aa, synthetic construct
GSSEAAAKGGS

SEQ ID NO: 19527 - protein, 6 aa, synthetic construct
PAPGGG

SEQ ID NO: 19528 - protein, 16 aa, synthetic construct
SGSETPGTSESATPES

SEQ ID NO: 19529 - protein, 5 aa, synthetic construct
GGGGS

SEQ ID NO: 19530 - protein, 11 aa, synthetic construct
GSSGGGEAAAK

SEQ ID NO: 19531 - protein, 15 aa, synthetic construct
EAAAKGGGGSEAAAK

SEQ ID NO: 19532 - protein, 11 aa, synthetic construct
GSSEAAAKPAP

SEQ ID NO: 19533 - protein, 6 aa, synthetic construct
GGGGGG

SEQ ID NO: 19534 - protein, 15 aa, synthetic construct
EAAAKEAAAKEAAAK

SEQ ID NO: 19535 - protein, 11 aa, synthetic construct
EAAAKPAPGSS

SEQ ID NO: 19536 - protein, 11 aa, synthetic construct
GGSGSSEAAAK

SEQ ID NO: 19537 - protein, 8 aa, synthetic construct
GGSEAAAK

SEQ ID NO: 19538 - protein, 11 aa, synthetic construct
GGSPAPEAAAK

SEQ ID NO: 19539 - protein, 9 aa, synthetic construct
GGGPAPGSS

SEQ ID NO: 19540 - protein, 11 aa, synthetic construct
GGGGGSEAAAK

SEQ ID NO: 19541 - protein, 11 aa, synthetic construct
EAAAKPAPGSS

SEQ ID NO: 19542 - protein, 12 aa, synthetic construct
GSSGSSGSSGSS

SEQ ID NO: 19543 - protein, 8 aa, synthetic construct
EAAAKPAP

SEQ ID NO: 19544 - protein, 8 aa, synthetic construct
GGGEAAAK

SEQ ID NO: 19545 - protein, 6 aa, synthetic construct
GGSGGS

SEQ ID NO: 19546 - protein, 11 aa, synthetic construct
EAAAKGSSGGS

SEQ ID NO: 19547 - protein, 16 aa, synthetic construct
SGSETPGTSESATPES

SEQ ID NO: 19548 - protein, 11 aa, synthetic construct
EAAAKGSSGGG

SEQ ID NO: 19549 - protein, 30 aa, synthetic construct; identical to SEQ ID NO: 130

SEQ ID NO: 19550 - protein, 9 aa, synthetic construct
GGSGGGPAP

SEQ ID NO: 19551 - protein, 9 aa, synthetic construct
PAPAPAPAP

SEQ ID NO: 19552 - protein, 11 aa, synthetic construct
GGGEAAAKGGS

SEQ ID NO: 19553 - protein, 9 aa, synthetic construct
GSSGGSGGG

SEQ ID NO: 19554 - protein, 11 aa, synthetic construct
PAPEAAAKGGS

SEQ ID NO: 19555 - protein, 11 aa, synthetic construct
GGGEAAAKGSS

SEQ ID NO: 19556 - protein, 20 aa, synthetic construct
GGGGSGGGGSGGGGSGGGGS

SEQ ID NO: 19557 - protein, 9 aa, synthetic construct
PAPGSSGGG

SEQ ID NO: 19558 - protein, 9 aa, synthetic construct
GGSGSSGGG

SEQ ID NO: 19559 - protein, 11 aa, synthetic construct
EAAAKPAPGSS

SEQ ID NO: 19560 - protein, 11 aa, synthetic construct
GSSEAAAKGGG

SEQ ID NO: 19561 - protein, 15 aa, synthetic construct
GGSGGSGGSGGSGGS

SEQ ID NO: 19562 - protein, 11 aa, synthetic construct
GGSEAAAKPAP

SEQ ID NO: 19563 - protein, 11 aa, synthetic construct
EAAAKGGSPAP

SEQ ID NO: 19564 - protein, 11 aa, synthetic construct
EAAAKGGGGGS

SEQ ID NO: 19565 - protein, 11 aa, synthetic construct
GSSPAPEAAAK

SEQ ID NO: 19566 - protein, 5 aa, synthetic construct
PAPAP

SEQ ID NO: 19567 - protein, 11 aa, synthetic construct
PAPGGSEAAAK

SEQ ID NO: 19568 - protein, 6 aa, synthetic construct
GGSGSS

SEQ ID NO: 19569 - protein, 11 aa, synthetic construct
GGSEAAAKPAP

SEQ ID NO: 19570 - protein, 33 aa, synthetic construct; identical to SEQ ID NO: 6

SEQ ID NO: 19571 - protein, 11 aa, synthetic construct
PAPGGGEAAAK

SEQ ID NO: 19572 - protein, 9 aa, synthetic construct
PAPGGGGGS

SEQ ID NO: 19573 - protein, 9 aa, synthetic construct
PAPGGSGSS

SEQ ID NO: 19574 - protein, 11 aa, synthetic construct
GSSGGGEAAAK

SEQ ID NO: 19575 - protein, 11 aa, synthetic construct
GGSEAAAKPAP

SEQ ID NO: 19576 - protein, 5 aa, synthetic construct
GGGGG

SEQ ID NO: 19577 - protein, 11 aa, synthetic construct
GGGEAAAKGSS

SEQ ID NO: 19578 - protein, 15 aa, synthetic construct
GSSGSSGSSGSSGSS

SEQ ID NO: 19579 - protein, 16 aa, synthetic construct
SGSETPGTSESATPES

SEQ ID NO: 19580 - protein, 9 aa, synthetic construct
PAPGSSGGG

SEQ ID NO: 19581 - protein, 9 aa, synthetic construct
GGGGSSPAP

SEQ ID NO: 19582 - protein, 8 aa, synthetic construct
GGGEAAAK

SEQ ID NO: 19583 - protein, 6 aa, synthetic construct
GGSGGG

SEQ ID NO: 19584 - protein, 11 aa, synthetic construct
EAAAKGSSGGG

SEQ ID NO: 19585 - protein, 11 aa, synthetic construct
GSSPAPEAAAK

SEQ ID NO: 19586 - protein, 9 aa, synthetic construct
GGGPAPGSS

SEQ ID NO: 19587 - protein, 11 aa, synthetic construct
EAAAKGSSGGG

SEQ ID NO: 19588 - protein, 11 aa, synthetic construct
GGGGGSEAAAK

SEQ ID NO: 19589 - protein, 11 aa, synthetic construct
EAAAKPAPGGS

SEQ ID NO: 19590 - protein, 11 aa, synthetic construct
EAAAKGSSPAP

SEQ ID NO: 19591 - protein, 7 aa, synthetic construct
GGGGGGG

SEQ ID NO: 19592 - protein, 15 aa, synthetic construct
EAAAKEAAAKEAAAK

SEQ ID NO: 19593 - protein, 9 aa, synthetic construct
GSSPAPGGS

SEQ ID NO: 19594 - protein, 11 aa, synthetic construct
GGGGSSEAAAK

SEQ ID NO: 19595 - protein, 11 aa, synthetic construct
GGSEAAAKGSS

SEQ ID NO: 19596 - protein, 11 aa, synthetic construct
GGSEAAAKGSS

SEQ ID NO: 19597 - protein, 11 aa, synthetic construct
EAAAKPAPGGG

SEQ ID NO: 19598 - protein, 18 aa, synthetic construct
GSSGSSGSSGSSGSSGSS

SEQ ID NO: 19599 - protein, 15 aa, synthetic construct
GGGGSEAAAKGGGGS

SEQ ID NO: 19600 - protein, 9 aa, synthetic construct
GSSPAPGGS

SEQ ID NO: 19601 - protein, 10 aa, synthetic construct
GGGGSGGGGS

SEQ ID NO: 19602 - protein, 9 aa, synthetic construct
GSSGGSPAP

SEQ ID NO: 19603 - protein, 6 aa, synthetic construct
GGSGGS

SEQ ID NO: 19604 - protein, 11 aa, synthetic construct
PAPGSSEAAAK

SEQ ID NO: 19605 - protein, 9 aa, synthetic construct
PAPGGGGSS

SEQ ID NO: 19606 - protein, 9 aa, synthetic construct
GGGGSSGGS

SEQ ID NO: 19607 - protein, 10 aa, synthetic construct
GGGGSGGGGS

SEQ ID NO: 19608 - protein, 20 aa, synthetic construct
GGGGSGGGGSGGGGSGGGGS

SEQ ID NO: 19609 - protein, 11 aa, synthetic construct
GGSGSSEAAAK

SEQ ID NO: 19610 - protein, 9 aa, synthetic construct
GGSGGGGSS

SEQ ID NO: 19611 - protein, 11 aa, synthetic construct
GGSEAAAKPAP

SEQ ID NO: 19612 - protein, 11 aa, synthetic construct
EAAAKGGSPAP

SEQ ID NO: 19613 - protein, 9 aa, synthetic construct
PAPAPAPAP

SEQ ID NO: 19614 - protein, 9 aa, synthetic construct
GSSGGSPAP

SEQ ID NO: 19615 - protein, 9 aa, synthetic construct
GGGGGSPAP

SEQ ID NO: 19616 - protein, 11 aa, synthetic construct
EAAAKGGGPAP

SEQ ID NO: 19617 - protein, 9 aa, synthetic construct
GSSGGSPAP

SEQ ID NO: 19618 - protein, 5 aa, synthetic construct
GGGGG

SEQ ID NO: 19619 - protein, 6 aa, synthetic construct
GGGGGS

SEQ ID NO: 19620 - protein, 15 aa, synthetic construct
EAAAKEAAAKEAAAK

SEQ ID NO: 19621 - protein, 6 aa, synthetic construct
PAPGGG

SEQ ID NO: 19622 - protein, 11 aa, synthetic construct
GSSGGSEAAAK

SEQ ID NO: 19623 - protein, 9 aa, synthetic construct
GGSPAPGGG

SEQ ID NO: 19624 - protein, 18 aa, synthetic construct
GSSGSSGSSGSSGSSGSS

SEQ ID NO: 19625 - protein, 11 aa, synthetic construct
GGSPAPEAAAK

SEQ ID NO: 19626 - protein, 9 aa, synthetic construct
PAPGGGGSS

SEQ ID NO: 19627 - protein, 11 aa, synthetic construct
GGGGSSEAAAK

SEQ ID NO: 19628 - protein, 6 aa, synthetic construct
PAPGGS

SEQ ID NO: 19629 - protein, 15 aa, synthetic construct
GGSGGSGGSGGSGGS

SEQ ID NO: 19630 - protein, 12 aa, synthetic construct
GSAGSAAGSGEF

SEQ ID NO: 19631 - protein, 6 aa, synthetic construct
GSSGGS

SEQ ID NO: 19632 - protein, 9 aa, synthetic construct
GGSGGGGSS

SEQ ID NO: 19633 - protein, 9 aa, synthetic construct
GGSGGGGSS

SEQ ID NO: 19634 - protein, 11 aa, synthetic construct
PAPEAAAKGSS

SEQ ID NO: 19635 - protein, 12 aa, synthetic construct
GSSGSSGSSGSS

SEQ ID NO: 19636 - protein, 13 aa, synthetic construct
PAPAPAPAPAPAP

SEQ ID NO: 19637 - protein, 9 aa, synthetic construct
PAPGSSGGG

SEQ ID NO: 19638 - protein, 9 aa, synthetic construct
GGSGSSPAP

SEQ ID NO: 19639 - protein, 9 aa, synthetic construct
GGSGGGPAP

SEQ ID NO: 19640 - protein, 9 aa, synthetic construct
PAPGGGGGS

SEQ ID NO: 19641 - protein, 11 aa, synthetic construct
EAAAKGSSPAP

SEQ ID NO: 19642 - protein, 9 aa, synthetic construct
GGSGSSPAP

SEQ ID NO: 19643 - protein, 8 aa, synthetic construct
EAAAKGSS

SEQ ID NO: 19644 - protein, 11 aa, synthetic construct
GGGGGSEAAAK

SEQ ID NO: 19645 - protein, 8 aa, synthetic construct
GGGGGGGG

SEQ ID NO: 19646 - protein, 10 aa, synthetic construct
EAAAKEAAAK

SEQ ID NO: 19647 - protein, 11 aa, synthetic construct
GGGEAAAKGGS

SEQ ID NO: 19648 - protein, 11 aa, synthetic construct
EAAAKGGSPAP

SEQ ID NO: 19649 - protein, 8 aa, synthetic construct
GSSEAAAK

SEQ ID NO: 19650 - protein, 11 aa, synthetic construct
PAPGGGEAAAK

SEQ ID NO: 19651 - protein, 6 aa, synthetic construct
GGSPAP

SEQ ID NO: 19652 - protein, 9 aa, synthetic construct
GSSPAPGGG

SEQ ID NO: 19653 - protein, 9 aa, synthetic construct
GGSGSSPAP

SEQ ID NO: 19654 - protein, 9 aa, synthetic construct
GGSGGGGSS

SEQ ID NO: 19655 - protein, 20 aa, synthetic construct
GGGGSGGGGSGGGGSGGGGS

SEQ ID NO: 19656 - protein, 11 aa, synthetic construct
EAAAKGGGPAP

SEQ ID NO: 19657 - protein, 11 aa, synthetic construct
GSSGGGEAAAK

SEQ ID NO: 19658 - protein, 33 aa, synthetic construct; identical to SEQ ID NO: 6

SEQ ID NO: 19659 - protein, 46 aa, synthetic construct; identical to SEQ ID NO: 217

SEQ ID NO: 19660 - protein, 10 aa, synthetic construct
EAAAKEAAAK

SEQ ID NO: 19661 - protein, 11 aa, synthetic construct
GSSPAPEAAAK

SEQ ID NO: 19662 - protein, 11 aa, synthetic construct
EAAAKPAPGGS

SEQ ID NO: 19663 - protein, 9 aa, synthetic construct
GSSGGSPAP

SEQ ID NO: 19664 - protein, 11 aa, synthetic construct
GGGPAPEAAAK

SEQ ID NO: 19665 - protein, 11 aa, synthetic construct
GGGEAAAKPAP

SEQ ID NO: 19666 - protein, 11 aa, synthetic construct
GGGGGSEAAAK

SEQ ID NO: 19667 - protein, 9 aa, synthetic construct
GGGPAPGSS

SEQ ID NO: 19668 - protein, 11 aa, synthetic construct
GGSEAAAKPAP

SEQ ID NO: 19669 - protein, 18 aa, synthetic construct
GSSGSSGSSGSSGSSGSS

SEQ ID NO: 19670 - protein, 11 aa, synthetic construct
EAAAKGSSGGS

SEQ ID NO: 19671 - protein, 6 aa, synthetic construct
GGGGGG

SEQ ID NO: 19672 - protein, 9 aa, synthetic construct
GSSPAPGGS

SEQ ID NO: 19673 - protein, 9 aa, synthetic construct
GGSGSSPAP

SEQ ID NO: 19674 - protein, 11 aa, synthetic construct
GGGPAPEAAAK

SEQ ID NO: 19675 - protein, 11 aa, synthetic construct
GGSGGGEAAAK

SEQ ID NO: 19676 - protein, 12 aa, synthetic construct
GSAGSAAGSGEF

SEQ ID NO: 19677 - protein, 11 aa, synthetic construct
GSSGGGEAAAK

SEQ ID NO: 19678 - protein, 9 aa, synthetic construct
PAPGSSGGS

SEQ ID NO: 19679 - protein, 9 aa, synthetic construct
GGGGSSPAP

SEQ ID NO: 19680 - protein, 33 aa, synthetic construct; identical to SEQ ID NO: 6

SEQ ID NO: 19681 - protein, 7 aa, synthetic construct
GGGGGGG

SEQ ID NO: 19682 - protein, 11 aa, synthetic construct
PAPAPAPAPAP

SEQ ID NO: 19683 - protein, 20 aa, synthetic construct
GGGGSGGGGSGGGGSGGGGS

SEQ ID NO: 19684 - protein, 9 aa, synthetic construct
GGSGGGPAP

SEQ ID NO: 19685 - protein, 6 aa, synthetic construct
GGGGGG

SEQ ID NO: 19686 - protein, 11 aa, synthetic construct
EAAAKPAPGSS

SEQ ID NO: 19687 - protein, 9 aa, synthetic construct
GGGGSSGGS

SEQ ID NO: 19688 - protein, 11 aa, synthetic construct
PAPGSSEAAAK

SEQ ID NO: 19689 - protein, 9 aa, synthetic construct
GGGGSSPAP

SEQ ID NO: 19690 - protein, 9 aa, synthetic construct
PAPGSSGGS

SEQ ID NO: 19691 - protein, 46 aa, synthetic construct; identical to SEQ ID NO: 217

SEQ ID NO: 19692 - protein, 7 aa, synthetic construct
PAPAPAP

SEQ ID NO: 19693 - protein, 9 aa, synthetic construct
PAPGGGGGS

SEQ ID NO: 19694 - protein, 6 aa, synthetic construct
GGGGSS

SEQ ID NO: 19695 - protein, 20 aa, synthetic construct
EAAAKEAAAKEAAAKEAAAK

SEQ ID NO: 19696 - protein, 15 aa, synthetic construct
GGSGGSGGSGGSGGS

SEQ ID NO: 19697 - protein, 7 aa, synthetic construct
GGGGGGG

SEQ ID NO: 19698 - protein, 11 aa, synthetic construct
PAPGGGEAAAK

SEQ ID NO: 19699 - protein, 6 aa, synthetic construct
PAPGSS

SEQ ID NO: 19700 - protein, 10 aa, synthetic construct
GGGGSGGGGS

SEQ ID NO: 19701 - protein, 9 aa, synthetic construct
GSSGGSGGG

SEQ ID NO: 19702 - protein, 30 aa, synthetic construct; identical to SEQ ID NO: 112

SEQ ID NO: 19703 - protein, 11 aa, synthetic construct
GSSEAAAKGGG

SEQ ID NO: 19704 - protein, 11 aa, synthetic construct
GGSEAAAKPAP

SEQ ID NO: 19705 - protein, 9 aa, synthetic construct
GSSGGSGGG

SEQ ID NO: 19706 - protein, 11 aa, synthetic construct
EAAAKGGGGSS

SEQ ID NO: 19707 - protein, 6 aa, synthetic construct
GGGGGG

SEQ ID NO: 19708 - protein, 5 aa, synthetic construct
GGGGG

SEQ ID NO: 19709 - protein, 11 aa, synthetic construct
PAPEAAAKGGG

SEQ ID NO: 19710 - protein, 11 aa, synthetic construct
EAAAKGGSPAP

SEQ ID NO: 19711 - protein, 11 aa, synthetic construct
GGGEAAAKPAP

SEQ ID NO: 19712 - protein, 18 aa, synthetic construct
GSSGSSGSSGSSGSSGSS

SEQ ID NO: 19713 - protein, 20 aa, synthetic construct
EAAAKEAAAKEAAAKEAAAK

SEQ ID NO: 19714 - protein, 11 aa, synthetic construct
PAPGSSEAAAK

SEQ ID NO: 19715 - protein, 9 aa, synthetic construct
GSSGSSGSS

SEQ ID NO: 19716 - protein, 9 aa, synthetic construct
GSSGGGPAP

SEQ ID NO: 19717 - protein, 11 aa, synthetic construct
GGGPAPEAAAK

SEQ ID NO: 19718 - protein, 8 aa, synthetic construct
GGGEAAAK

SEQ ID NO: 19719 - protein, 12 aa, synthetic construct
GSSGSSGSSGSS

SEQ ID NO: 19720 - protein, 11 aa, synthetic construct
PAPAPAPAPAP

SEQ ID NO: 19721 - protein, 11 aa, synthetic construct
GGSPAPEAAAK

SEQ ID NO: 19722 - protein, 18 aa, synthetic construct
GSSGSSGSSGSSGSSGSS

SEQ ID NO: 19723 - protein, 25 aa, synthetic construct
EAAAKEAAAKEAAAKEAAAKEAAAK

SEQ ID NO: 19724 - protein, 11 aa, synthetic construct
GGGPAPEAAAK

SEQ ID NO: 19725 - protein, 9 aa, synthetic construct
PAPGGSGGG

SEQ ID NO: 19726 - protein, 9 aa, synthetic construct
PAPGGSGGG

SEQ ID NO: 19727 - protein, 11 aa, synthetic construct
GGGEAAAKGGS

SEQ ID NO: 19728 - protein, 12 aa, synthetic construct
GSAGSAAGSGEF

SEQ ID NO: 19729 - protein, 9 aa, synthetic construct
GSSPAPGGG

SEQ ID NO: 19730 - protein, 18 aa, synthetic construct
GSSGSSGSSGSSGSSGSS

SEQ ID NO: 19731 - protein, 9 aa, synthetic construct
GGSGGGGSS

SEQ ID NO: 19732 - protein, 11 aa, synthetic construct
PAPEAAAKGSS

SEQ ID NO: 19733 - protein, 11 aa, synthetic construct
EAAAKGGGGSS

SEQ ID NO: 19734 - protein, 30 aa, synthetic construct; identical to SEQ ID NO: 130

SEQ ID NO: 19735 - protein, 30 aa, synthetic construct; identical to SEQ ID NO: 112

SEQ ID NO: 19736 - protein, 11 aa, synthetic construct
GGGEAAAKGGS

SEQ ID NO: 19737 - protein, 6 aa, synthetic construct
GSSGSS

SEQ ID NO: 19738 - protein, 9 aa, synthetic construct
GSSGGGGGS

SEQ ID NO: 19739 - protein, 11 aa, synthetic construct
GGGGSSEAAAK

SEQ ID NO: 19740 - protein, 11 aa, synthetic construct
EAAAKGSSGGS

SEQ ID NO: 19741 - protein, 11 aa, synthetic construct
GSSEAAAKGGS

SEQ ID NO: 19742 - protein, 11 aa, synthetic construct
EAAAKGSSPAP

SEQ ID NO: 19743 - protein, 11 aa, synthetic construct
EAAAKPAPGSS

SEQ ID NO: 19744 - protein, 9 aa, synthetic construct
PAPGSSGGG

SEQ ID NO: 19745 - protein, 30 aa, synthetic construct; identical to SEQ ID NO: 112

SEQ ID NO: 19746 - protein, 25 aa, synthetic construct
EAAAKEAAAKEAAAKEAAAKEAAAK

SEQ ID NO: 19747 - protein, 11 aa, synthetic construct
GGGGSSEAAAK

SEQ ID NO: 19748 - protein, 11 aa, synthetic construct
EAAAKGGSPAP

SEQ ID NO: 19749 - protein, 11 aa, synthetic construct
PAPEAAAKGSS

SEQ ID NO: 19750 - protein, 9 aa, synthetic construct
GSSGGGGGS

SEQ ID NO: 19751 - protein, 9 aa, synthetic construct
GGGGSSPAP

SEQ ID NO: 19752 - protein, 11 aa, synthetic construct
EAAAKGGGGSS

SEQ ID NO: 19753 - protein, 9 aa, synthetic construct
PAPAPAPAP

SEQ ID NO: 19754 - protein, 11 aa, synthetic construct
GGSEAAAKGSS

SEQ ID NO: 19755 - protein, 9 aa, synthetic construct
GSSPAPGGG

SEQ ID NO: 19756 - protein, 6 aa, synthetic construct
GGGGGG

SEQ ID NO: 19757 - protein, 9 aa, synthetic construct
GGSGGSGGS

SEQ ID NO: 19758 - protein, 13 aa, synthetic construct
PAPAPAPAPAPAP

SEQ ID NO: 19759 - protein, 6 aa, synthetic construct
GSSPAP

SEQ ID NO: 19760 - protein, 9 aa, synthetic construct
GGGGGSGSS

SEQ ID NO: 19761 - protein, 11 aa, synthetic construct
EAAAKGSSGGS

SEQ ID NO: 19762 - protein, 5 aa, synthetic construct
EAAAK

SEQ ID NO: 19763 - protein, 8 aa, synthetic construct
PAPEAAAK

SEQ ID NO: 19764 - protein, 11 aa, synthetic construct
EAAAKGGSGSS

SEQ ID NO: 19765 - protein, 9 aa, synthetic construct
GGSGGSGGS

SEQ ID NO: 19766 - protein, 11 aa, synthetic construct
GSSGGGEAAAK

SEQ ID NO: 19767 - protein, 33 aa, synthetic construct; identical to SEQ ID NO: 6

SEQ ID NO: 19768 - protein, 18 aa, synthetic construct
GGSGGSGGSGGSGGSGGS

SEQ ID NO: 19769 - protein, 8 aa, synthetic construct
GGGEAAAK

SEQ ID NO: 19770 - protein, 9 aa, synthetic construct
GGGGGSGSS

SEQ ID NO: 19771 - protein, 9 aa, synthetic construct
GSSPAPGGS

SEQ ID NO: 19772 - protein, 8 aa, synthetic construct
EAAAKGSS

SEQ ID NO: 19773 - protein, 9 aa, synthetic construct
GSSGGSGGG

SEQ ID NO: 19774 - protein, 9 aa, synthetic construct
GGSGGGGSS

SEQ ID NO: 19775 - protein, 9 aa, synthetic construct
GGSPAPGSS

SEQ ID NO: 19776 - protein, 18 aa, synthetic construct
GGSGGSGGSGGSGGSGGS

SEQ ID NO: 19777 - protein, 11 aa, synthetic construct
GSSEAAAKGGG

SEQ ID NO: 19778 - protein, 9 aa, synthetic construct
GGSGGSGGS

SEQ ID NO: 19779 - protein, 18 aa, synthetic construct
GSSGSSGSSGSSGSSGSS

SEQ ID NO: 19780 - protein, 15 aa, synthetic construct
GSSGSSGSSGSSGSS

SEQ ID NO: 19781 - protein, 8 aa, synthetic construct
PAPEAAAK

SEQ ID NO: 19782 - protein, 15 aa, synthetic construct
GSSGSSGSSGSSGSS

SEQ ID NO: 19783 - protein, 15 aa, synthetic construct
EAAAKGGGGSEAAAK

SEQ ID NO: 19784 - protein, 11 aa, synthetic construct
GGSPAPEAAAK

SEQ ID NO: 19785 - protein, 6 aa, synthetic construct
GSSGSS

SEQ ID NO: 19786 - protein, 15 aa, synthetic construct
GGGGSGGGGSGGGGS

SEQ ID NO: 19787 - protein, 30 aa, synthetic construct; identical to SEQ ID NO: 130

SEQ ID NO: 19788 - protein, 9 aa, synthetic construct
GGSGSSPAP

SEQ ID NO: 19789 - protein, 8 aa, synthetic construct
GGGGGGGG

SEQ ID NO: 19790 - protein, 11 aa, synthetic construct
PAPGSSEAAAK

SEQ ID NO: 19791 - protein, 9 aa, synthetic construct
GGGGSSPAP

SEQ ID NO: 19792 - protein, 9 aa, synthetic construct
GSSGGSPAP

SEQ ID NO: 19793 - protein, 9 aa, synthetic construct
GSSGGGGGS

SEQ ID NO: 19794 - protein, 25 aa, synthetic construct
EAAAKEAAAKEAAAKEAAAKEAAAK

SEQ ID NO: 19795 - protein, 9 aa, synthetic construct
GSSGGGGGS

SEQ ID NO: 19796 - protein, 15 aa, synthetic construct
GGGGSEAAAKGGGGS

SEQ ID NO: 19797 - protein, 11 aa, synthetic construct
GGGEAAAKPAP

SEQ ID NO: 19798 - protein, 11 aa, synthetic construct
PAPGGGEAAAK

SEQ ID NO: 19799 - protein, 11 aa, synthetic construct
GGSGGGEAAAK

SEQ ID NO: 19800 - protein, 6 aa, synthetic construct
GSSGGG

SEQ ID NO: 19801 - protein, 11 aa, synthetic construct
EAAAKGSSGGS

SEQ ID NO: 19802 - protein, 5 aa, synthetic construct
GGGGG

SEQ ID NO: 19803 - protein, 6 aa, synthetic construct
GGGPAP

SEQ ID NO: 19804 - protein, 11 aa, synthetic construct
GSSGGSEAAAK

SEQ ID NO: 19805 - protein, 33 aa, synthetic construct; identical to SEQ ID NO: 6

SEQ ID NO: 19806 - protein, 11 aa, synthetic construct
GSSGGGEAAAK

SEQ ID NO: 19807 - protein, 15 aa, synthetic construct
GSSGSSGSSGSSGSS

SEQ ID NO: 19808 - protein, 11 aa, synthetic construct
GGSEAAAKPAP

SEQ ID NO: 19809 - protein, 10 aa, synthetic construct
GGGGSGGGGS

SEQ ID NO: 19810 - protein, 11 aa, synthetic construct
GSSEAAAKPAP

SEQ ID NO: 19811 - protein, 15 aa, synthetic construct
GGGGSEAAAKGGGGS

SEQ ID NO: 19812 - protein, 11 aa, synthetic construct
PAPGSSEAAAK

SEQ ID NO: 19813 - protein, 11 aa, synthetic construct
EAAAKGGSGGG

SEQ ID NO: 19814 - protein, 9 aa, synthetic construct
GGGPAPGGS

SEQ ID NO: 19815 - protein, 11 aa, synthetic construct
GSSEAAAKGGS

SEQ ID NO: 19816 - protein, 11 aa, synthetic construct
EAAAKGGSGGG

SEQ ID NO: 19817 - protein, 9 aa, synthetic construct
GSSGGSPAP

SEQ ID NO: 19818 - protein, 5 aa, synthetic construct
PAPAP

SEQ ID NO: 19819 - protein, 9 aa, synthetic construct
PAPGGSGSS

SEQ ID NO: 19820 - protein, 11 aa, synthetic construct
EAAAKGGGGGS

SEQ ID NO: 19821 - protein, 11 aa, synthetic construct
PAPEAAAKGGS

SEQ ID NO: 19822 - protein, 11 aa, synthetic construct
GSSEAAAKPAP

SEQ ID NO: 19823 - protein, 6 aa, synthetic construct
GGSGGS

SEQ ID NO: 19824 - protein, 11 aa, synthetic construct
GSSEAAAKGGG

SEQ ID NO: 19825 - protein, 5 aa, synthetic construct
EAAAK

SEQ ID NO: 19826 - protein, 6 aa, synthetic construct
GSSPAP

SEQ ID NO: 19827 - protein, 11 aa, synthetic construct
EAAAKPAPGGG

SEQ ID NO: 19828 - protein, 15 aa, synthetic construct
GGGGSEAAAKGGGGS

SEQ ID NO: 19829 - protein, 11 aa, synthetic construct
EAAAKGSSGGS

SEQ ID NO: 19830 - protein, 12 aa, synthetic construct
GSAGSAAGSGEF

SEQ ID NO: 19831 - protein, 11 aa, synthetic construct
PAPEAAAKGGS

SEQ ID NO: 19832 - protein, 30 aa, synthetic construct; identical to SEQ ID NO: 130

SEQ ID NO: 19833 - protein, 11 aa, synthetic construct
GGSEAAAKPAP

SEQ ID NO: 19834 - protein, 11 aa, synthetic construct
EAAAKGSSGGG

SEQ ID NO: 19835 - protein, 11 aa, synthetic construct
GGSEAAAKGGG

SEQ ID NO: 19836 - protein, 6 aa, synthetic construct
GGSGGS

SEQ ID NO: 19837 - protein, 11 aa, synthetic construct
GSSEAAAKGGS

SEQ ID NO: 19838 - protein, 11 aa, synthetic construct
PAPAPAPAPAP

SEQ ID NO: 19839 - protein, 11 aa, synthetic construct
GGSEAAAKGGG

SEQ ID NO: 19840 - protein, 9 aa, synthetic construct
PAPAPAPAP

SEQ ID NO: 19841 - protein, 25 aa, synthetic construct
GGGGSGGGGSGGGGSGGGGSGGGGS

SEQ ID NO: 19842 - protein, 11 aa, synthetic construct
PAPGGSEAAAK

SEQ ID NO: 19843 - protein, 9 aa, synthetic construct
GGSGGGPAP

SEQ ID NO: 19844 - protein, 18 aa, synthetic construct
GSSGSSGSSGSSGSSGSS

SEQ ID NO: 19845 - protein, 11 aa, synthetic construct
GGSEAAAKPAP

SEQ ID NO: 19846 - protein, 11 aa, synthetic construct
GGGEAAAKGSS

SEQ ID NO: 19847 - protein, 9 aa, synthetic construct
GGGPAPGGS

SEQ ID NO: 19848 - protein, 6 aa, synthetic construct
PAPGGG

SEQ ID NO: 19849 - protein, 11 aa, synthetic construct
GGSEAAAKGSS

SEQ ID NO: 19850 - protein, 11 aa, synthetic construct
GGGEAAAKGSS

SEQ ID NO: 19851 - protein, 11 aa, synthetic construct
GGGEAAAKGSS

SEQ ID NO: 19852 - protein, 20 aa, synthetic construct
EAAAKEAAAKEAAAKEAAAK

SEQ ID NO: 19853 - protein, 11 aa, synthetic construct
EAAAKGGGPAP

SEQ ID NO: 19854 - protein, 11 aa, synthetic construct
EAAAKGGGGSS

SEQ ID NO: 19855 - protein, 25 aa, synthetic construct
EAAAKEAAAKEAAAKEAAAKEAAAK

SEQ ID NO: 19856 - protein, 9 aa, synthetic construct
GSSGGGGGS

SEQ ID NO: 19857 - protein, 7 aa, synthetic construct
PAPAPAP

SEQ ID NO: 19858 - protein, 12 aa, synthetic construct
GGSGGSGGSGGS

SEQ ID NO: 19859 - protein, 8 aa, synthetic construct
GGGEAAAK

SEQ ID NO: 19860 - protein, 6 aa, synthetic construct
GGGGGS

SEQ ID NO: 19861 - protein, 6 aa, synthetic construct
GGSGGS

SEQ ID NO: 19862 - protein, 8 aa, synthetic construct
EAAAKGGS

SEQ ID NO: 19863 - protein, 6 aa, synthetic construct
GGGGSS

SEQ ID NO: 19864 - protein, 5 aa, synthetic construct
PAPAP

SEQ ID NO: 19865 - protein, 6 aa, synthetic construct
PAPGGG

SEQ ID NO: 19866 - protein, 11 aa, synthetic construct
EAAAKGGGGSS

SEQ ID NO: 19867 - protein, 11 aa, synthetic construct
PAPAPAPAPAP

SEQ ID NO: 19868 - protein, 6 aa, synthetic construct
GGGPAP

SEQ ID NO: 19869 - protein, 9 aa, synthetic construct
GSSGGSGGG

SEQ ID NO: 19870 - protein, 11 aa, synthetic construct
EAAAKGGGPAP

SEQ ID NO: 19871 - protein, 12 aa, synthetic construct
GSSGSSGSSGSS

SEQ ID NO: 19872 - protein, 10 aa, synthetic construct
GGGGSGGGGS

SEQ ID NO: 19873 - protein, 9 aa, synthetic construct
GSSGGSGGG

SEQ ID NO: 19874 - protein, 11 aa, synthetic construct
GGGEAAAKPAP

SEQ ID NO: 19875 - protein, 8 aa, synthetic construct
PAPEAAAK

SEQ ID NO: 19876 - protein, 12 aa, synthetic construct
GSSGSSGSSGSS

SEQ ID NO: 19877 - protein, 11 aa, synthetic construct
GSSEAAAKPAP

SEQ ID NO: 19878 - protein, 11 aa, synthetic construct
PAPEAAAKGGG

SEQ ID NO: 19879 - protein, 11 aa, synthetic construct
GGSEAAAKGSS

SEQ ID NO: 19880 - protein, 11 aa, synthetic construct
EAAAKPAPGGS

SEQ ID NO: 19881 - protein, 11 aa, synthetic construct
GSSGGSEAAAK

SEQ ID NO: 19882 - protein, 30 aa, synthetic construct; identical to SEQ ID NO: 112

SEQ ID NO: 19883 - protein, 11 aa, synthetic construct
EAAAKGGGGSS

SEQ ID NO: 19884 - protein, 9 aa, synthetic construct
GGGGGSGSS

SEQ ID NO: 19885 - protein, 5 aa, synthetic construct
PAPAP

SEQ ID NO: 19886 - protein, 9 aa, synthetic construct
GGGGGSPAP

SEQ ID NO: 19887 - protein, 6 aa, synthetic construct
GGGPAP

SEQ ID NO: 19888 - protein, 15 aa, synthetic construct
EAAAKGGGGSEAAAK

SEQ ID NO: 19889 - protein, 11 aa, synthetic construct
GGSEAAAKGGG

SEQ ID NO: 19890 - protein, 9 aa, synthetic construct
GSSPAPGGS

SEQ ID NO: 19891 - protein, 7 aa, synthetic construct
GGGGGGG

SEQ ID NO: 19892 - protein, 8 aa, synthetic construct
EAAAKGSS

SEQ ID NO: 19893 - protein, 15 aa, synthetic construct
EAAAKGGGGSEAAAK

SEQ ID NO: 19894 - protein, 15 aa, synthetic construct
GGGGSEAAAKGGGGS

SEQ ID NO: 19895 - protein, 11 aa, synthetic construct
EAAAKGGGGSS

SEQ ID NO: 19896 - protein, 11 aa, synthetic construct
GGGEAAAKGGS

SEQ ID NO: 19897 - protein, 11 aa, synthetic construct
PAPEAAAKGGG

SEQ ID NO: 19898 - protein, 9 aa, synthetic construct
GGGGSSGGS

SEQ ID NO: 19899 - protein, 6 aa, synthetic construct
GGSGSS

SEQ ID NO: 19900 - protein, 13 aa, synthetic construct
PAPAPAPAPAPAP

SEQ ID NO: 19901 - protein, 8 aa, synthetic construct
EAAAKGGG

SEQ ID NO: 19902 - protein, 13 aa, synthetic construct
PAPAPAPAPAPAP

SEQ ID NO: 19903 - protein, 15 aa, synthetic construct
GSSGSSGSSGSSGSS

SEQ ID NO: 19904 - protein, 6 aa, synthetic construct
GGGGSS

SEQ ID NO: 19905 - protein, 11 aa, synthetic construct
PAPGGGEAAAK

SEQ ID NO: 19906 - protein, 11 aa, synthetic construct
GGSGGGEAAAK

SEQ ID NO: 19907 - protein, 11 aa, synthetic construct
PAPAPAPAPAP

SEQ ID NO: 19908 - protein, 11 aa, synthetic construct
GGGEAAAKGGS

SEQ ID NO: 19909 - protein, 11 aa, synthetic construct
GGGEAAAKGSS

SEQ ID NO: 19910 - protein, 11 aa, synthetic construct
GSSPAPEAAAK

SEQ ID NO: 19911 - protein, 25 aa, synthetic construct
EAAAKEAAAKEAAAKEAAAKEAAAK

SEQ ID NO: 19912 - protein, 6 aa, synthetic construct
PAPGGG

SEQ ID NO: 19913 - protein, 11 aa, synthetic construct
GSSEAAAKGGG

SEQ ID NO: 19914 - protein, 11 aa, synthetic construct
GGGGSSEAAAK

SEQ ID NO: 19915 - protein, 9 aa, synthetic construct
PAPGSSGGS

SEQ ID NO: 19916 - protein, 18 aa, synthetic construct
GSSGSSGSSGSSGSSGSS

SEQ ID NO: 19917 - protein, 11 aa, synthetic construct
EAAAKGSSGGG

SEQ ID NO: 19918 - protein, 9 aa, synthetic construct
PAPGGGGSS

SEQ ID NO: 19919 - protein, 6 aa, synthetic construct
GGSPAP

SEQ ID NO: 19920 - protein, 15 aa, synthetic construct
GGSGGSGGSGGSGGS

SEQ ID NO: 19921 - protein, 9 aa, synthetic construct
PAPAPAPAP

SEQ ID NO: 19922 - protein, 5 aa, synthetic construct
GGGGG

SEQ ID NO: 19923 - protein, 12 aa, synthetic construct
GGSGGSGGSGGS

SEQ ID NO: 19924 - protein, 15 aa, synthetic construct
GSSGSSGSSGSSGSS

SEQ ID NO: 19925 - protein, 11 aa, synthetic construct
PAPGGSEAAAK

SEQ ID NO: 19926 - protein, 9 aa, synthetic construct
PAPAPAPAP

SEQ ID NO: 19927 - protein, 9 aa, synthetic construct
PAPGGGGSS

SEQ ID NO: 19928 - protein, 6 aa, synthetic construct
GGSGSS

SEQ ID NO: 19929 - protein, 20 aa, synthetic construct
EAAAKEAAAKEAAAKEAAAK

SEQ ID NO: 19930 - protein, 11 aa, synthetic construct
EAAAKGGSGGG

SEQ ID NO: 19931 - protein, 9 aa, synthetic construct
PAPGGGGSS

SEQ ID NO: 19932 - protein, 11 aa, synthetic construct
EAAAKGGGGGS

SEQ ID NO: 19933 - protein, 6 aa, synthetic construct
GGGGGS

SEQ ID NO: 19934 - protein, 11 aa, synthetic construct
GGGEAAAKGGS

SEQ ID NO: 19935 - protein, 11 aa, synthetic construct
EAAAKPAPGGG

SEQ ID NO: 19936 - protein, 9 aa, synthetic construct
GGSGGGPAP

SEQ ID NO: 19937 - protein, 11 aa, synthetic construct
GSSEAAAKPAP

SEQ ID NO: 19938 - protein, 13 aa, synthetic construct
PAPAPAPAPAPAP

SEQ ID NO: 19939 - protein, 9 aa, synthetic construct
GGSPAPGGG

SEQ ID NO: 19940 - protein, 11 aa, synthetic construct
GGSGGGEAAAK

SEQ ID NO: 19941 - protein, 5 aa, synthetic construct
PAPAP

SEQ ID NO: 19942 - protein, 8 aa, synthetic construct
GSSEAAAK

SEQ ID NO: 19943 - protein, 15 aa, synthetic construct
GGGGSGGGGSGGGGS

SEQ ID NO: 19944 - protein, 9 aa, synthetic construct
GSSGSSGSS

SEQ ID NO: 19945 - protein, 11 aa, synthetic construct
EAAAKGGSGGG

SEQ ID NO: 19946 - protein, 6 aa, synthetic construct
GSSPAP

SEQ ID NO: 19947 - protein, 8 aa, synthetic construct
GGGEAAAK

SEQ ID NO: 19948 - protein, 46 aa, synthetic construct; identical to SEQ ID NO: 217

SEQ ID NO: 19949 - protein, 6 aa, synthetic construct
PAPGGS

SEQ ID NO: 19950 - protein, 9 aa, synthetic construct
PAPGSSGGS

SEQ ID NO: 19951 - protein, 8 aa, synthetic construct
PAPEAAAK

SEQ ID NO: 19952 - protein, 5 aa, synthetic construct
PAPAP

SEQ ID NO: 19953 - protein, 8 aa, synthetic construct
EAAAKGGS

SEQ ID NO: 19954 - protein, 15 aa, synthetic construct
GGGGSEAAAKGGGGS

SEQ ID NO: 19955 - protein, 11 aa, synthetic construct
EAAAKGSSGGS

SEQ ID NO: 19956 - protein, 9 aa, synthetic construct
PAPGGSGSS

SEQ ID NO: 19957 - protein, 11 aa, synthetic construct
PAPGGSEAAAK

SEQ ID NO: 19958 - protein, 11 aa, synthetic construct
PAPGSSEAAAK

SEQ ID NO: 19959 - protein, 9 aa, synthetic construct
PAPGSSGGG

SEQ ID NO: 19960 - protein, 11 aa, synthetic construct
GSSGGGEAAAK

SEQ ID NO: 19961 - protein, 6 aa, synthetic construct
GGGGGG

SEQ ID NO: 19962 - protein, 11 aa, synthetic construct
PAPEAAAKGGG

SEQ ID NO: 19963 - protein, 11 aa, synthetic construct
GGGEAAAKGGS

SEQ ID NO: 19964 - protein, 11 aa, synthetic construct
PAPAPAPAPAP

SEQ ID NO: 19965 - protein, 18 aa, synthetic construct
GSSGSSGSSGSSGSSGSS

SEQ ID NO: 19966 - protein, 11 aa, synthetic construct
EAAAKGGGPAP

SEQ ID NO: 19967 - protein, 11 aa, synthetic construct
PAPAPAPAPAP

SEQ ID NO: 19968 - protein, 11 aa, synthetic construct
PAPGGSEAAAK

SEQ ID NO: 19969 - protein, 9 aa, synthetic construct
GSSGGGPAP

SEQ ID NO: 19970 - protein, 9 aa, synthetic construct
GGGGGSPAP

SEQ ID NO: 19971 - protein, 9 aa, synthetic construct
GSSGGSGGG

SEQ ID NO: 19972 - protein, 5 aa, synthetic construct
PAPAP

SEQ ID NO: 19973 - protein, 9 aa, synthetic construct
GSSGGGPAP

SEQ ID NO: 19974 - protein, 6 aa, synthetic construct
GGSGSS

SEQ ID NO: 19975 - protein, 11 aa, synthetic construct
GGSPAPEAAAK

SEQ ID NO: 19976 - protein, 11 aa, synthetic construct
EAAAKGGSGGG

SEQ ID NO: 19977 - protein, 11 aa, synthetic construct
GGGGSSEAAAK

SEQ ID NO: 19978 - protein, 9 aa, synthetic construct
GGGGGSGSS

SEQ ID NO: 19979 - protein, 9 aa, synthetic construct
GGGGSSGGS

SEQ ID NO: 19980 - protein, 15 aa, synthetic construct
EAAAKGGGGSEAAAK

SEQ ID NO: 19981 - protein, 11 aa, synthetic construct
PAPGGGEAAAK

SEQ ID NO: 19982 - protein, 11 aa, synthetic construct
PAPEAAAKGGG

SEQ ID NO: 19983 - protein, 46 aa, synthetic construct; identical to SEQ ID NO: 217

SEQ ID NO: 19984 - protein, 11 aa, synthetic construct
GSSGGSEAAAK

SEQ ID NO: 19985 - protein, 6 aa, synthetic construct
GGSPAP

SEQ ID NO: 19986 - protein, 8 aa, synthetic construct
GSSEAAAK

SEQ ID NO: 19987 - protein, 8 aa, synthetic construct
GSSEAAAK

SEQ ID NO: 19988 - protein, 11 aa, synthetic construct
EAAAKGSSGGS

SEQ ID NO: 19989 - protein, 11 aa, synthetic construct
GGGEAAAKPAP

SEQ ID NO: 19990 - protein, 11 aa, synthetic construct
EAAAKGGSPAP

SEQ ID NO: 19991 - protein, 11 aa, synthetic construct
GSSEAAAKPAP

SEQ ID NO: 19992 - protein, 9 aa, synthetic construct
GSSGSSGSS

SEQ ID NO: 19993 - protein, 20 aa, synthetic construct
EAAAKEAAAKEAAAKEAAAK

SEQ ID NO: 19994 - protein, 5 aa, synthetic construct
EAAAK

SEQ ID NO: 19995 - protein, 6 aa, synthetic construct
PAPGSS

SEQ ID NO: 19996 - protein, 6 aa, synthetic construct
PAPGGS

SEQ ID NO: 19997 - protein, 6 aa, synthetic construct
GGSGGS

SEQ ID NO: 19998 - protein, 33 aa, synthetic construct; identical to SEQ ID NO: 6

SEQ ID NO: 19999 - protein, 11 aa, synthetic construct
GGSGGGEAAAK

SEQ ID NO: 20000 - protein, 9 aa, synthetic construct
PAPGSSGGG

SEQ ID NO: 20001 - protein, 6 aa, synthetic construct
GGSGGS

SEQ ID NO: 20002 - protein, 6 aa, synthetic construct
GSSGSS

SEQ ID NO: 20003 - protein, 11 aa, synthetic construct
PAPGGSEAAAK

SEQ ID NO: 20004 - protein, 12 aa, synthetic construct
GSAGSAAGSGEF

SEQ ID NO: 20005 - protein, 6 aa, synthetic construct
PAPGGG

SEQ ID NO: 20006 - protein, 11 aa, synthetic construct
EAAAKGGSGSS

SEQ ID NO: 20007 - protein, 11 aa, synthetic construct
GSSGGGEAAAK

SEQ ID NO: 20008 - protein, 9 aa, synthetic construct
GGSGGGPAP

SEQ ID NO: 20009 - protein, 13 aa, synthetic construct
PAPAPAPAPAPAP

SEQ ID NO: 20010 - protein, 16 aa, synthetic construct
SGSETPGTSESATPES

SEQ ID NO: 20011 - protein, 9 aa, synthetic construct
GGSGGSGGS

SEQ ID NO: 20012 - protein, 6 aa, synthetic construct
GGGGSS

SEQ ID NO: 20013 - protein, 11 aa, synthetic construct
GGGGGSEAAAK

SEQ ID NO: 20014 - protein, 16 aa, synthetic construct
SGSETPGTSESATPES

SEQ ID NO: 20015 - protein, 7 aa, synthetic construct
PAPAPAP

SEQ ID NO: 20016 - protein, 11 aa, synthetic construct
PAPEAAAKGSS

SEQ ID NO: 20017 - protein, 15 aa, synthetic construct
GSSGSSGSSGSSGSS

SEQ ID NO: 20018 - protein, 9 aa, synthetic construct
GGGPAPGSS

SEQ ID NO: 20019 - protein, 9 aa, synthetic construct
GGSGGGGSS

SEQ ID NO: 20020 - protein, 16 aa, synthetic construct
SGSETPGTSESATPES

SEQ ID NO: 20021 - protein, 11 aa, synthetic construct
EAAAKGSSGGS

SEQ ID NO: 20022 - protein, 11 aa, synthetic construct
GSSPAPEAAAK

SEQ ID NO: 20023 - protein, 11 aa, synthetic construct
GSSPAPEAAAK

SEQ ID NO: 20024 - protein, 9 aa, synthetic construct
GGGGSSPAP

SEQ ID NO: 20025 - protein, 11 aa, synthetic construct
PAPGGGEAAAK

SEQ ID NO: 20026 - protein, 11 aa, synthetic construct
PAPEAAAKGGS

SEQ ID NO: 20027 - protein, 18 aa, synthetic construct
GSSGSSGSSGSSGSSGSS

SEQ ID NO: 20028 - protein, 9 aa, synthetic construct
GGSPAPGSS

SEQ ID NO: 20029 - protein, 9 aa, synthetic construct
GGGPAPGGS

SEQ ID NO: 20030 - protein, 9 aa, synthetic construct
GGGPAPGSS

SEQ ID NO: 20031 - protein, 8 aa, synthetic construct
EAAAKPAP

SEQ ID NO: 20032 - protein, 15 aa, synthetic construct
EAAAKEAAAKEAAAK

SEQ ID NO: 20033 - protein, 11 aa, synthetic construct
GSSGGSEAAAK

SEQ ID NO: 20034 - protein, 9 aa, synthetic construct
PAPGGGGGS

SEQ ID NO: 20035 - protein, 8 aa, synthetic construct
GGGEAAAK

SEQ ID NO: 20036 - protein, 11 aa, synthetic construct
EAAAKGGGPAP

SEQ ID NO: 20037 - protein, 9 aa, synthetic construct
GGSGSSGGG

SEQ ID NO: 20038 - protein, 11 aa, synthetic construct
PAPEAAAKGSS

SEQ ID NO: 20039 - protein, 9 aa, synthetic construct
PAPGGGGGS

SEQ ID NO: 20040 - protein, 11 aa, synthetic construct
EAAAKGGGGGS

SEQ ID NO: 20041 - protein, 6 aa, synthetic construct
GGGGGS

SEQ ID NO: 20042 - protein, 25 aa, synthetic construct
GGGGSGGGGSGGGGSGGGGSGGGGS

SEQ ID NO: 20043 - protein, 11 aa, synthetic construct
EAAAKGGSPAP

SEQ ID NO: 20044 - protein, 9 aa, synthetic construct
GGGGSSPAP

SEQ ID NO: 20045 - protein, 9 aa, synthetic construct
GGGGSSGGS

SEQ ID NO: 20046 - protein, 9 aa, synthetic construct
PAPGSSGGS

SEQ ID NO: 20047 - protein, 6 aa, synthetic construct
GGGGGS

SEQ ID NO: 20048 - protein, 9 aa, synthetic construct
GGSGSSGGG

SEQ ID NO: 20049 - protein, 11 aa, synthetic construct
GSSGGSEAAAK

SEQ ID NO: 20050 - protein, 20 aa, synthetic construct
EAAAKEAAAKEAAAKEAAAK

SEQ ID NO: 20051 - protein, 11 aa, synthetic construct
GGSEAAAKGGG

SEQ ID NO: 20052 - protein, 33 aa, synthetic construct; identical to SEQ ID NO: 6

SEQ ID NO: 20053 - protein, 11 aa, synthetic construct
GSSEAAAKGGS

SEQ ID NO: 20054 - protein, 30 aa, synthetic construct; identical to SEQ ID NO: 112

SEQ ID NO: 20055 - protein, 8 aa, synthetic construct
GGGEAAAK

SEQ ID NO: 20056 - protein, 9 aa, synthetic construct
PAPAPAPAP

SEQ ID NO: 20057 - protein, 9 aa, synthetic construct
PAPGSSGGG

SEQ ID NO: 20058 - protein, 15 aa, synthetic construct
GSSGSSGSSGSSGSS

SEQ ID NO: 20059 - protein, 6 aa, synthetic construct
GGSPAP

SEQ ID NO: 20060 - protein, 30 aa, synthetic construct; identical to SEQ ID NO: 112

SEQ ID NO: 20061 - protein, 8 aa, synthetic construct
PAPEAAAK

SEQ ID NO: 20062 - protein, 9 aa, synthetic construct
PAPGSSGGG

SEQ ID NO: 20063 - protein, 11 aa, synthetic construct
GGGGGSEAAAK

SEQ ID NO: 20064 - protein, 11 aa, synthetic construct
PAPAPAPAPAP

SEQ ID NO: 20065 - protein, 11 aa, synthetic construct
EAAAKGGSGSS

SEQ ID NO: 20066 - protein, 20 aa, synthetic construct
EAAAKEAAAKEAAAKEAAAK

SEQ ID NO: 20067 - protein, 9 aa, synthetic construct
PAPAPAPAP

SEQ ID NO: 20068 - protein, 9 aa, synthetic construct
GGGPAPGSS

SEQ ID NO: 20069 - protein, 11 aa, synthetic construct
PAPEAAAKGSS

SEQ ID NO: 20070 - protein, 9 aa, synthetic construct
GGSPAPGGG

SEQ ID NO: 20071 - protein, 20 aa, synthetic construct
GGGGSGGGGSGGGGSGGGGS

SEQ ID NO: 20072 - protein, 8 aa, synthetic construct
EAAAKGGS

SEQ ID NO: 20073 - protein, 9 aa, synthetic construct
PAPGSSGGS

SEQ ID NO: 20074 - protein, 10 aa, synthetic construct
GGGGSGGGGS

SEQ ID NO: 20075 - protein, 6 aa, synthetic construct
GGSGGS

SEQ ID NO: 20076 - protein, 15 aa, synthetic construct
EAAAKGGGGSEAAAK

SEQ ID NO: 20077 - protein, 20 aa, synthetic construct
EAAAKEAAAKEAAAKEAAAK

SEQ ID NO: 20078 - protein, 11 aa, synthetic construct
PAPGGGEAAAK

SEQ ID NO: 20079 - protein, 6 aa, synthetic construct
GSSGSS

SEQ ID NO: 20080 - protein, 11 aa, synthetic construct
EAAAKGGGGGS

SEQ ID NO: 20081 - protein, 11 aa, synthetic construct
GSSPAPEAAAK

SEQ ID NO: 20082 - protein, 8 aa, synthetic construct
GGGEAAAK

SEQ ID NO: 20083 - protein, 11 aa, synthetic construct
PAPEAAAKGSS

SEQ ID NO: 20084 - protein, 11 aa, synthetic construct
GGGGSSEAAAK

SEQ ID NO: 20085 - protein, 9 aa, synthetic construct
PAPGSSGGS

SEQ ID NO: 20086 - protein, 11 aa, synthetic construct
EAAAKGGGGGS

SEQ ID NO: 20087 - protein, 20 aa, synthetic construct
GGGGSGGGGSGGGGSGGGGS

SEQ ID NO: 20088 - protein, 11 aa, synthetic construct
EAAAKGGGGSS

SEQ ID NO: 20089 - protein, 11 aa, synthetic construct
GGGEAAAKGGS

SEQ ID NO: 20090 - protein, 9 aa, synthetic construct
GGGGGSPAP

SEQ ID NO: 20091 - protein, 11 aa, synthetic construct
GGSGGGEAAAK

SEQ ID NO: 20092 - protein, 9 aa, synthetic construct
PAPGGGGGS

SEQ ID NO: 20093 - protein, 15 aa, synthetic construct
EAAAKGGGGSEAAAK

SEQ ID NO: 20094 - protein, 11 aa, synthetic construct
PAPEAAAKGSS

SEQ ID NO: 20095 - protein, 11 aa, synthetic construct
GGSEAAAKGGG

SEQ ID NO: 20096 - protein, 15 aa, synthetic construct
GGSGGSGGSGGSGGS

SEQ ID NO: 20097 - protein, 15 aa, synthetic construct
GGSGGSGGSGGSGGS

SEQ ID NO: 20098 - protein, 6 aa, synthetic construct
GGGGGG

SEQ ID NO: 20099 - protein, 9 aa, synthetic construct
GGGGGSGSS

SEQ ID NO: 20100 - protein, 11 aa, synthetic construct
GGSEAAAKPAP

SEQ ID NO: 20101 - protein, 9 aa, synthetic construct
GGGPAPGSS

SEQ ID NO: 20102 - protein, 6 aa, synthetic construct
GGGGGS

SEQ ID NO: 20103 - protein, 11 aa, synthetic construct
GGSPAPEAAAK

SEQ ID NO: 20104 - protein, 11 aa, synthetic construct
PAPEAAAKGGS

SEQ ID NO: 20105 - protein, 11 aa, synthetic construct
EAAAKGGSGSS

SEQ ID NO: 20106 - protein, 11 aa, synthetic construct
GGGPAPEAAAK

SEQ ID NO: 20107 - protein, 9 aa, synthetic construct
PAPGGGGSS

SEQ ID NO: 20108 - protein, 9 aa, synthetic construct
GSSPAPGGG

SEQ ID NO: 20109 - protein, 9 aa, synthetic construct
GGGGSSGGS

SEQ ID NO: 20110 - protein, 11 aa, synthetic construct
EAAAKGGGGGS

SEQ ID NO: 20111 - protein, 11 aa, synthetic construct
GGSEAAAKGSS

SEQ ID NO: 20112 - protein, 6 aa, synthetic construct
GSSGGG

SEQ ID NO: 20113 - protein, 12 aa, synthetic construct
GGSGGSGGSGGS

SEQ ID NO: 20114 - protein, 8 aa, synthetic construct
EAAAKPAP

SEQ ID NO: 20115 - protein, 9 aa, synthetic construct
GGGGSSGGS

SEQ ID NO: 20116 - protein, 6 aa, synthetic construct
GGSGGS

SEQ ID NO: 20117 - protein, 11 aa, synthetic construct
EAAAKGGGGGS

SEQ ID NO: 20118 - protein, 30 aa, synthetic construct; identical to SEQ ID NO: 112

SEQ ID NO: 20119 - protein, 9 aa, synthetic construct
GGSGGSGGS

SEQ ID NO: 20120 - protein, 11 aa, synthetic construct
GGGGGSEAAAK

SEQ ID NO: 20121 - protein, 9 aa, synthetic construct
GGSGSSPAP

SEQ ID NO: 20122 - protein, 15 aa, synthetic construct
EAAAKEAAAKEAAAK

SEQ ID NO: 20123 - protein, 11 aa, synthetic construct
PAPEAAAKGGS

SEQ ID NO: 20124 - protein, 11 aa, synthetic construct
GGSGSSEAAAK

SEQ ID NO: 20125 - protein, 9 aa, synthetic construct
GGGGGSGSS

SEQ ID NO: 20126 - protein, 9 aa, synthetic construct
GGGPAPGGS

SEQ ID NO: 20127 - protein, 16 aa, synthetic construct
SGSETPGTSESATPES

SEQ ID NO: 20128 - protein, 9 aa, synthetic construct
GSSPAPGGS

SEQ ID NO: 20129 - protein, 15 aa, synthetic construct
GSSGSSGSSGSSGSS

SEQ ID NO: 20130 - protein, 11 aa, synthetic construct
EAAAKGGGPAP

SEQ ID NO: 20131 - protein, 6 aa, synthetic construct
GSSGGG

SEQ ID NO: 20132 - protein, 11 aa, synthetic construct
GGGEAAAKPAP

SEQ ID NO: 20133 - protein, 9 aa, synthetic construct
PAPGGSGGG

SEQ ID NO: 20134 - protein, 9 aa, synthetic construct
GSSGGSGGG

SEQ ID NO: 20135 - protein, 6 aa, synthetic construct
GGSGGG

SEQ ID NO: 20136 - protein, 11 aa, synthetic construct
EAAAKGGSPAP

SEQ ID NO: 20137 - protein, 11 aa, synthetic construct
GGSPAPEAAAK

SEQ ID NO: 20138 - protein, 11 aa, synthetic construct
GSSGGSEAAAK

SEQ ID NO: 20139 - protein, 12 aa, synthetic construct
GSAGSAAGSGEF

SEQ ID NO: 20140 - protein, 9 aa, synthetic construct
PAPGGSGSS

SEQ ID NO: 20141 - protein, 11 aa, synthetic construct
GGSEAAAKGGG

SEQ ID NO: 20142 - protein, 9 aa, synthetic construct
GGSPAPGSS

SEQ ID NO: 20143 - protein, 9 aa, synthetic construct
GSSGGSGGG

SEQ ID NO: 20144 - protein, 11 aa, synthetic construct
PAPEAAAKGGG

SEQ ID NO: 20145 - protein, 11 aa, synthetic construct
GGGEAAAKPAP

SEQ ID NO: 20146 - protein, 8 aa, synthetic construct
GGSEAAAK

SEQ ID NO: 20147 - protein, 11 aa, synthetic construct
GGGEAAAKGSS

SEQ ID NO: 20148 - protein, 11 aa, synthetic construct
GGGGGSEAAAK

SEQ ID NO: 20149 - protein, 11 aa, synthetic construct
PAPAPAPAPAP

SEQ ID NO: 20150 - protein, 11 aa, synthetic construct
PAPAPAPAPAP

SEQ ID NO: 20151 - protein, 9 aa, synthetic construct
GGGGSSGGS

SEQ ID NO: 20152 - protein, 11 aa, synthetic construct
PAPGGSEAAAK

SEQ ID NO: 20153 - protein, 11 aa, synthetic construct
PAPAPAPAPAP

SEQ ID NO: 20154 - protein, 11 aa, synthetic construct
EAAAKPAPGGG

SEQ ID NO: 20155 - protein, 8 aa, synthetic construct
GGSEAAAK

SEQ ID NO: 20156 - protein, 11 aa, synthetic construct
GGGEAAAKGSS

SEQ ID NO: 20157 - protein, 9 aa, synthetic construct
GGSPAPGSS

SEQ ID NO: 20158 - protein, 11 aa, synthetic construct
GGSEAAAKPAP

SEQ ID NO: 20159 - protein, 11 aa, synthetic construct
PAPEAAAKGGG

SEQ ID NO: 20160 - protein, 11 aa, synthetic construct
GSSEAAAKPAP

SEQ ID NO: 20161 - protein, 15 aa, synthetic construct
GGGGSEAAAKGGGGS

SEQ ID NO: 20162 - protein, 11 aa, synthetic construct
GSSEAAAKGGS

SEQ ID NO: 20163 - protein, 15 aa, synthetic construct
GSSGSSGSSGSSGSS

SEQ ID NO: 20164 - protein, 9 aa, synthetic construct
GGGGGSPAP

SEQ ID NO: 20165 - protein, 8 aa, synthetic construct
GGSEAAAK

SEQ ID NO: 20166 - protein, 11 aa, synthetic construct
GSSPAPEAAAK

SEQ ID NO: 20167 - protein, 9 aa, synthetic construct
GGGPAPGGS

SEQ ID NO: 20168 - protein, 11 aa, synthetic construct
GGSPAPEAAAK

SEQ ID NO: 20169 - protein, 11 aa, synthetic construct
GGSEAAAKPAP

SEQ ID NO: 20170 - protein, 9 aa, synthetic construct
PAPAPAPAP

SEQ ID NO: 20171 - protein, 9 aa, synthetic construct
GSSPAPGGG

SEQ ID NO: 20172 - protein, 12 aa, synthetic construct
GSSGSSGSSGSS

SEQ ID NO: 20173 - protein, 11 aa, synthetic construct
GGSEAAAKGSS

SEQ ID NO: 20174 - protein, 9 aa, synthetic construct
GGSGSSGGG

SEQ ID NO: 20175 - protein, 18 aa, synthetic construct
GSSGSSGSSGSSGSSGSS

SEQ ID NO: 20176 - protein, 11 aa, synthetic construct
GGSEAAAKPAP

SEQ ID NO: 20177 - protein, 9 aa, synthetic construct
GSSGGSGGG

SEQ ID NO: 20178 - protein, 46 aa, synthetic construct; identical to SEQ ID NO: 217

SEQ ID NO: 20179 - protein, 11 aa, synthetic construct
GGSPAPEAAAK

SEQ ID NO: 20180 - protein, 11 aa, synthetic construct
GGGGSSEAAAK

SEQ ID NO: 20181 - protein, 11 aa, synthetic construct
GGSGGGEAAAK

SEQ ID NO: 20182 - protein, 15 aa, synthetic construct
GGGGSEAAAKGGGGS

SEQ ID NO: 20183 - protein, 11 aa, synthetic construct
GGSGSSEAAAK

SEQ ID NO: 20184 - protein, 11 aa, synthetic construct
GGSEAAAKPAP

SEQ ID NO: 20185 - protein, 11 aa, synthetic construct
GSSGGGEAAAK

SEQ ID NO: 20186 - protein, 6 aa, synthetic construct
GSSGGS

SEQ ID NO: 20187 - protein, 11 aa, synthetic construct
GGSEAAAKPAP

SEQ ID NO: 20188 - protein, 11 aa, synthetic construct
GSSGGSEAAAK

SEQ ID NO: 20189 - protein, 11 aa, synthetic construct
GSSPAPEAAAK

SEQ ID NO: 20190 - protein, 18 aa, synthetic construct
GGSGGSGGSGGSGGSGGS

SEQ ID NO: 20191 - protein, 15 aa, synthetic construct
GSSGSSGSSGSSGSS

SEQ ID NO: 20192 - protein, 11 aa, synthetic construct
EAAAKGGGGSS

SEQ ID NO: 20193 - protein, 11 aa, synthetic construct
GGGEAAAKGSS

SEQ ID NO: 20194 - DNA, 16 bp, synthetic construct
  source 1..16: mol_type = other DNA
gcgcgctcgctcgctc

SEQ ID NO: 20195 - protein, 673 aa, Reticuloendotheliosis virus
TAPLEEEYRLFLEAPIQNVTLLEQWKREIPKVWAEINPPGLASTQAPIHVQLLSTALPVRVRQYPITLEAKRSLRETIRKFRAAGILRPVHSPWNTPLLPVRKSGTSEYRMVQDLREVNKRVETIHPTVPNPYTLLSLLPPDRIWYSVLDLKDAFFCIPLAPESQLIFAFEWADAEEGESGQLTWTRLPQGFKNSPTLFDEALNRDLQGFRLDHPSVSLLQYVDDLLIAADTQAACLSATRDLLMTLAELGYRVSGKKAQLCQEEVTYLGFKIHKGSRSLSNSRTQAILQIPVPKTKRQVREFLGTIGYCRLWIPGFAELAQPLYAATRGGNDPLVWGEKEEEAFQSLKLALTQPPALALPSLDKPFQLFVEETSGAAKGVLTQALGPWKRPVAYLSKRLDPVAAGWPRCLRAIAAAALLTREASKLTFGQDIEITSSHNLESLLRSPPDKWLTNARITQYQVLLLDPPRVRFKQTAALNPATLLPETDDTLPIHHCLDTLDSLTSTRPDLTDQPLAQAEATLFTDGSSYIRDGKRYAGAAVVTLDSVIWAEPLPIGTSAQKAELIALTKALEWSKDKSVNIYTDSRYAFATLHVHGMIYRERGLLTAGGKAIKNAPEILALLTAVWLPKRVAVMHCKGHQKDDAPTSTGNRRADEVAREVAIRPLSTQATIS

SEQ ID NO: 20196 - protein, 673 aa, synthetic construct
TAPLEEEYRLFLEAPIQNVTLLEQWKREIPKVWAEINPPGLASTQAPIHVQLLSTALPVRVRQYPITLEAKRSLRETIRKFRAAGILRPVHSPWNTPLLPVRKSGTSEYRMVQDLREVNKRVETIHPTVPNPYTLLSLLPPDRIWYSVLDLKDAFFCIPLAPESQLIFAFEWADAEEGESGQLTWTRLPQGFKNSPTLFNEALNRDLQGFRLDHPSVSLLQYVDDLLIAADTQAACLSATRDLLMTLAELGYRVSGKKAQLCQEEVTYLGFKIHKGSRSLSNSRTQAILQIPVPKTKRQVREFLGTIGYCRLWIPGFAELAQPLYAATRPGNDPLVWGEKEEEAFQSLKLALTQPPALALPSLDKPFQLFVEETSGAAKGVLTQALGPWKRPVAYLSKRLDPVAAGWPRCLRAIAAAALLTREASKLTFGQDIEITSSHNLESLLRSPPDKWLTNARITQYQVLLLDPPRVRFKQTAALNPATLLPETDDTLPIHHCLDTLDSLTSTRPDLTDQPLAQAEATLFTDGSSYIRDGKRYAGAAVVTLDSVIWAEPLPIGTSAQKAELIALTKALEWSKDKSVNIYTDSRYAFATLHVHGMIYRERGWLTAGGKAIKNAPEILALLTAVWLPKRVAVMHCKGHQKDDAPTSTGNRRADEVAREVAIRPLSTQATIS

SEQ ID NO: 20197 - protein, 677 aa, Baboon endogenous virus
TVSLQDEHRLFDIPVTTSLPDVWLQDFPQAWAETGGLGRAKCQAPIIIDLKPTAVPVSIKQYPMSLEAHMGIRQHIIKFLELGVLRPCRSPWNTPLLPVKKPGTQDYRPVQDLREINKRTVDIHPTVPNPYNLLSTLKPDYSWYTVLDLKDAFFCLPLAPQSQELFAFEWKDPERGISGQLTWTRLPQGFKNSPTLFDEALHRDLTDFRTQHPEVTLLQYVDDLLLAAPTKKACTQGTRHLLQELGEKGYRASAKKAQICQTKVTYLGYILSEGKRWLTPGRIETVARIPPPRNPREVREFLGTAGFCRLWIPGFAELAAPLYALTKESTPFTWQTEHQLAFEALKKALLSAPALGLPDTSKPFTLFLDERQGIAKGVLTQKLGPWKRPVAYLSKKLDPVAAGWPPCLRIMAATAMLVKDSAKLTLGQPLTVITPHTLEAIVRQPPDRWITNARLTHYQALLLDTDRVQFGPPVTLNPATLLPVPENQPSPHDCRQVLAETHGTREDLKDQELPDADHTWYTDGSSYLDSGTRRAGAAVVDGHNTIWAQSLPPGTSAQKAELIALTKALELSKGKKANIYTDSRYAFATAHTHGSIYERRGLLTSEGKEIKNKAEIIALLKALFLPQEVAIIHCPGHQKGQDPVAVGNRQADRVARQAAMAEVLTLATEPDNTSHIT

SEQ ID NO: 20198 - protein, 677 aa, synthetic construct
TVSLQDEHRLFDIPVTTSLPDVWLQDFPQAWAETGGLGRAKCQAPIIIDLKPTAVPVSIKQYPMSLEAHMGIRQHIIKFLELGVLRPCRSPWNTPLLPVKKPGTQDYRPVQDLREINKRTVDIHPTVPNPYNLLSTLKPDYSWYTVLDLKDAFFCLPLAPQSQELFAFEWKDPERGISGQLTWTRLPQGFKNSPTLFNEALHRDLTDFRTQHPEVTLLQYVDDLLLAAPTKKACTQGTRHLLQELGEKGYRASAKKAQICQTKVTYLGYILSEGKRWLTPGRIETVARIPPPRNPREVREFLGTAGFCRLWIPGFAELAAPLYALTKPSTPFTWQTEHQLAFEALKKALLSAPALGLPDTSKPFTLFLDERQGIAKGVLTQKLGPWKRPVAYLSKKLDPVAAGWPPCLRIMAATAMLVKDSAKLTLGQPLTVITPHTLEAIVRQPPDRWITNARLTHYQALLLDTDRVQFGPPVTLNPATLLPVPENQPSPHDCRQVLAETHGTREDLKDQELPDADHTWYTDGSSYLDSGTRRAGAAVVDGHNTIWAQSLPPGTSAQKAELIALTKALELSKGKKANIYTDSRYAFATAHTHGSIYERRGWLTSEGKEIKNKAEIIALLKALFLPQEVAIIHCPGHQKGQDPVAVGNRQADRVARQAAMAEVLTLATEPDNTSHIT

SEQ ID NO: 20199 - protein, 677 aa, synthetic construct
TVSLQDEHRLFDIPVTTSLPDVWLQDFPQAWAETGGLGRAKCQAPIIIDLKPTAVPVSIKQYPMSLEAHMGIRQHIIKFLELGVLRPCRSPWNTPLLPVKKPGTQDYRPVQDLREINKRTVDIHPTVPNPYNLLSTLKPDYSWYTVLDLKDAFFCLPLAPQSQELFAFEWKDPERGISGQLTWTRLPQGFKNSPTLFNEALHRDLTDFRTQHPEVTLLQYVDDLLLAAPTKKACTQGTRHLLQELGEKGYRASAKKAQICQTKVTYLGYILSEGKRWLTPGRIETVARIPPPRNPREVREFLGKAGFCRLFIPGFAELAAPLYALTKPSTPFTWQTEHQLAFEALKKALLSAPALGLPDTSKPFTLFLDERQGIAKGVLTQKLGPWKRPVAYLSKKLDPVAAGWPPCLRIMAATAMLVKDSAKLTLGQPLTVITPHTLEAIVRQPPDRWITNARLTHYQALLLDTDRVQFGPPVTLNPATLLPVPENQPSPHDCRQVLAETHGTREDLKDQELPDADHTWYTDGSSYLDSGTRRAGAAVVDGHNTIWAQSLPPGTSAQKAELIALTKALELSKGKKANIYTDSRYAFATAHTHGSIYERRGWLTSEGKEIKNKAEIIALLKALFLPQEVAIIHCPGHQKGQDPVAVGNRQADRVARQAAMAEVLTLATEPDNTSHIT

SEQ ID NO: 20200 - protein, 576 aa, Bovine leukemia virus
GVLDAPPSHIGLEHLPPPPEVPQFPLNLERLQALQDLVHRSLEAGYISPWDGPGNNPVFPVRKPNGAWRFVHDLRVTNALTKPIPALSPGPPDLTAIPTHLPHIICLDLKDAFFQIPVEDRFRSYFAFTLPTPGGLQPHRRFAWRVLPQGFINSPALFERALQEPLRQVSAAFSQSLLVSYMDDILYVSPTEEQRLQCYQTMAAHLRDLGFQVASEKTRQTPSPVPFLGQMVHERMVTYQSLPTLQISSPISLHQLQTVLGDLQWVSRGTPTTRRPLQLLYSSLKGIDDPRAIIHLSPEQQQGIAELRQALSHNARSRYNEQEPLLAYVHLTRAGSTLVLFQKGAQFPLAYFQTPLTDNQASPWGLLLLLGCQYLQAQALSSYAKTILKYYHNLPKTSLDNWIQSSEDPRVQELLQLWPQISSQGIQPPGPWKTLVTRAEVFLTPQFSPEPIPAALCLFSDGAARRGAYCLWKDHLLDFQAVPAPESAQKGELAGLLAGLAAAPPEPLNIWVDSKYLYSLLRTLVLGAWLQPDPVPSYALLYKSLLRHPAIFVGHVRSHSSASHPIASLNNYVDQL

SEQ ID NO: 20201 - protein, 576 aa, synthetic construct
GVLDAPPSHIGLEHLPPPPEVPQFPLNLERLQALQDLVHRSLEAGYISPWDGPGNNPVFPVRKPNGAWRFVHDLRVTNALTKPIPALSPGPPDLTAIPTHLPHIICLDLKDAFFQIPVEDRFRSYFAFTLPTPGGLQPHRRFAWRVLPQGFINSPALFQRALQEPLRQVSAAFSQSLLVSYMDDILYVSPTEEQRLQCYQTMAAHLRDLGFQVASEKTRQTPSPVPFLGQMVHERMVTYQSLPTLQISSPISLHQLQTVLGDLQWVSRGTPTTRRPLQLLYSSLKPIDDPRAIIHLSPEQQQGIAELRQALSHNARSRYNEQEPLLAYVHLTRAGSTLVLFQKGAQFPLAYFQTPLTDNQASPWGLLLLLGCQYLQAQALSSYAKTILKYYHNLPKTSLDNWIQSSEDPRVQELLQLWPQISSQGIQPPGPWKTLVTRAEVFLTPQFSPEPIPAALCLFSDGAARRGAYCLWKDHLLDFQAVPAPESAQKGELAGLLAGLAAAPPEPLNIWVDSKYLYSLLRTLVLGAWLQPDPVPSYALLYKSLLRHPAIFVGHVRSHSSASHPIASLNNYVDQL

SEQ ID NO: 20202 - protein, 576 aa, Bovine leukemia virus
GVLDTPPSHIGLEHLPPPPEVPQFPLNLERLQALQDLVHRSLEAGYISPWDGPGNNPVFPVRKPNGAWRFVHDLRATNALTKPIPALSPGPPDLTAIPTHPPHIICLDLKDAFFQIPVEDRFRFYLSFTLPSPGGLQPHRRFAWRVLPQGFINSPALFERALQEPLRQVSAAFSQSLLVSYMDDILYASPTEEQRSQCYQALAARLRDLGFQVASEKTSQTPSPVPFLGQMVHEQIVTYQSLPTLQISSPISLHQLQAVLGDLQWVSRGTPTTRRPLQLLYSSLKRHHDPRAIIQLSPEQLQGIAELRQALSHNARSRYNEQEPLLAYVHLTRAGSTLVLFQKGAQFPLAYFQTPLTDNQASPWGLLLLLGCQYLQTQALSSYAKPILKYYHNLPKTSLDNWIQSSEDPRVQELLQLWPQISSQGIQPPGPWKTLITRAEVFLTPQFSPDPIPAALCLFSDGATGRGAYCLWKDHLLDFQAVPAPESAQKGELAGLLAGLAAAPPEPVNIWVDSKYLYSLLRTLVLGAWLQPDPVPSYALLYKSLLRHPAIVVGHVRSHSSASHPIASLNNYVDQL

SEQ ID NO: 20203 - protein, 576 aa, synthetic construct
GVLDTPPSHIGLEHLPPPPEVPQFPLNLERLQALQDLVHRSLEAGYISPWDGPGNNPVFPVRKPNGAWRFVHDLRATNALTKPIPALSPGPPDLTAIPTHPPHIICLDLKDAFFQIPVEDRFRFYLSFTLPSPGGLQPHRRFAWRVLPQGFINSPALFNRALQEPLRQVSAAFSQSLLVSYMDDILYASPTEEQRSQCYQALAARLRDLGFQVASEKTSQTPSPVPFLGQMVHEQIVTYQSLPTLQISSPISLHQLQAVLGDLQWVSRGTPTTRRPLQLLYSSLKRHHDPRAIIQLSPEQLQGIAELRQALSHNARSRYNEQEPLLAYVHLTRAGSTLVLFQKGAQFPLAYFQTPLTDNQASPWGLLLLLGCQYLQTQALSSYAKPILKYYHNLPKTSLDNWIQSSEDPRVQELLQLWPQISSQGIQPPGPWKTLITRAEVFLTPQFSPDPIPAALCLFSDGATGRGAYCLWKDHLLDFQAVPAPESAQKGELAGLLAGLAAAPPEPVNIWVDSKYLYSLLRTWVLGAWLQPDPVPSYALLYKSLLRHPAIVVGHVRSHSSASHPIASLNNYVDQL

SEQ ID NO: 20204 - protein, 576 aa, synthetic construct
GVLDTPPSHIGLEHLPPPPEVPQFPLNLERLQALQDLVHRSLEAGYISPWDGPGNNPVFPVRKPNGAWRFVHDLRATNALTKPIPALSPGPPDLTAPPTHPPHIICLDLKDAFFQIPVEDRFRFYLSFTLPSPGGLQPHRRFAWRVLPQGFINSPALFQRALQEPLRQVSAAFSQSLLVSYMDDILYASPTEEQRSQCYQALAARLRDLGFQVASEKTSQTPSPVPFLGQMVHEQIVTYQSLPTLQISSPISLHQLQAVLGDLQWVSRGTPTTRRPLQLLYSSLKRHHDPRAIIQLSPEQLQGIAELRQALSHNARSRYNEQEPLLAYVHLTRAGSTLVLFQKGAQFPLAYFQTPLTDNQASPWGLLLLLGCQYLQTQALSSYAKPILKYYHNLPKTSLDNWIQSSEDPRVQELLQLWPQISSQGIQPPGPWKTLITRAEVFLTPQFSPDPIPAALCLFSDGATGRGAYCLWKDHLLDFQAVPAPESAQKGELAGLLAGLAAAPPEPVNIWVDSKYLYSLLRTWVLGAWLQPDPVPSYALLYKSLLRHPAIVVGHVRSHSSASHPIASLNNYVDQL

SEQ ID NO: 20205 - protein, 748 aa, Feline foamy virus
MDLLKPLTVERKGVKIKGYWNSQADITCVPKDLLQGEEPVRQQNVTTIHGTQEGDVYYVNLKIDGRRINTEVIGTTLDYAIITPGDVPWILKKPLELTIKLDLEEQQGTLLNNSILSKKGKEELKQLFEKYSALWQSWENQVGHRRIRPHKIATGTVKPTPQKQYHINPKAKPDIQIVINDLLKQGVLIQKESTMNTPVYPVPKPNGRWRMVLDYRAVNKVTPLIAVQNQHSYGILGSLFKGRYKTTIDLSNGFWAHPIVPEDYWITAFTWQGKQYCWTVLPQGFLNSPGLFTGDVVDLLQGIPNVEVYVDDVYISHDSEKEHLEYLDILFNRLKEAGYIISLKKSNIANSIVDFLGFQITNEGRGLTDTFKEKLENITAPTTLKQLQSILGLLNFARNFIPDFTELIAPLYALIPKSTKNYVPWQIEHSTTLETLITKLNGAEYLQGRKGDKTLIMKVNASYTTGYIRYYNEGEKKPISYVSIVFSKTELKFTELEKLLTTVHKGLLKALDLSMGQNIHVYSPIVSMQNIQKTPQTAKKALASRWLSWLSYLEDPRIRFFYDPQMPALKDLPAVDTGKDNKKHPSNFQHIFYTDGSAITSPTKEGHLNAGMGIVYFINKDGNLQKQQEWSISLGNHTAQFAEIAAFEFALKKCLPLGGNILVVTDSNYVAKAYNEELDVWASNGFVNNRKKPLKHISKWKSVADLKRLRPDVVVTHEPGHQKLDSSPHAYGNNLADQLATQASFKVH

SEQ ID NO: 20206 - protein, 748 aa, synthetic construct
MDLLKPLTVERKGVKIKGYWNSQADITCVPKDLLQGEEPVRQQNVTTIHGTQEGDVYYVNLKIDGRRINTEVIGTTLDYAIITPGDVPWILKKPLELTIKLDLEEQQGTLLNNSILSKKGKEELKQLFEKYSALWQSWENQVGHRRIRPHKIATGTVKPTPQKQYHINPKAKPDIQIVINDLLKQGVLIQKESTMNTPVYPVPKPNGRWRMVLDYRAVNKVTPLIAVQNQHSYGILGSLFKGRYKTTIDLSNGFWAHPIVPEDYWITAFTWQGKQYCWTVLPQGFLNSPGLFNGDVVDLLQGIPNVEVYVDDVYISHDSEKEHLEYLDILFNRLKEAGYIISLKKSNIANSIVDFLGFQITNEGRGLTDTFKEKLENITAPTTLKQLQSILGLLNFARNFIPDFTELIAPLYALIPKSPKNYVPWQIEHSTTLETLITKLNGAEYLQGRKGDKTLIMKVNASYTTGYIRYYNEGEKKPISYVSIVFSKTELKFTELEKLLTTVHKGLLKALDLSMGQNIHVYSPIVSMQNIQKTPQTAKKALASRWLSWLSYLEDPRIRFFYDPQMPALKDLPAVDTGKDNKKHPSNFQHIFYTDGSAITSPTKEGHLNAGMGIVYFINKDGNLQKQQEWSISLGNHTAQFAEIAAFEFALKKCLPLGGNILVVTDSNYVAKAYNEELDVWASNGFVNNRKKPLKHISKWKSVADLKRLRPDVVVTHEPGHQKLDSSPHAYGNNLADQLATQASFKVH

SEQ ID NO: 20207 - protein, 748 aa, synthetic construct
MDLLKPLTVERKGVKIKGYWNSQADITCVPKDLLQGEEPVRQQNVTTIHGTQEGDVYYVNLKIDGRRINTEVIGTTLDYAIITPGDVPWILKKPLELTIKLDLEEQQGTLLNNSILSKKGKEELKQLFEKYSALWQSWENQVGHRRIRPHKIATGTVKPTPQKQYHINPKAKPDIQIVINDLLKQGVLIQKESTMNTPVYPVPKPNGRWRMVLDYRAVNKVTPLIAVQNQHSYGILGSLFKGRYKTTIDLSNGFWAHPIVPEDYWITAFTWQGKQYCWTVLPQGFLNSPGLFNGDVVDLLQGIPNVEVYVDDVYISHDSEKEHLEYLDILFNRLKEAGYIISLKKSNIANSIVDFLGFQITNEGRGLTDTFKEKLENITAPTTLKQLQSILGKLNFARNFIPDFTELIAPLYALIPKSPKNYVPWQIEHSTTLETLITKLNGAEYLQGRKGDKTLIMKVNASYTTGYIRYYNEGEKKPISYVSIVFSKTELKFTELEKLLTTVHKGLLKALDLSMGQNIHVYSPIVSMQNIQKTPQTAKKALASRWLSWLSYLEDPRIRFFYDPQMPALKDLPAVDTGKDNKKHPSNFQHIFYTDGSAITSPTKEGHLNAGMGIVYFINKDGNLQKQQEWSISLGNHTAQFAEIAAFEFALKKCLPLGGNILVVTDSNYVAKAYNEELDVWASNGFVNNRKKPLKHISKWKSVADLKRLRPDVVVTHEPGHQKLDSSPHAYGNNLADQLATQASFKVH

SEQ ID NO: 20208 - protein, 662 aa, Feline foamy virus
VPWILKKPLELTIKLDLEEQQGTLLNNSILSKKGKEELKQLFEKYSALWQSWENQVGHRRIRPHKIATGTVKPTPQKQYHINPKAKPDIQIVINDLLKQGVLIQKESTMNTPVYPVPKPNGRWRMVLDYRAVNKVTPLIAVQNQHSYGILGSLFKGRYKTTIDLSNGFWAHPIVPEDYWITAFTWQGKQYCWTVLPQGFLNSPGLFTGDVVDLLQGIPNVEVYVDDVYISHDSEKEHLEYLDILFNRLKEAGYIISLKKSNIANSIVDFLGFQITNEGRGLTDTFKEKLENITAPTTLKQLQSILGLLNFARNFIPDFTELIAPLYALIPKSTKNYVPWQIEHSTTLETLITKLNGAEYLQGRKGDKTLIMKVNASYTTGYIRYYNEGEKKPISYVSIVFSKTELKFTELEKLLTTVHKGLLKALDLSMGQNIHVYSPIVSMQNIQKTPQTAKKALASRWLSWLSYLEDPRIRFFYDPQMPALKDLPAVDTGKDNKKHPSNFQHIFYTDGSAITSPTKEGHLNAGMGIVYFINKDGNLQKQQEWSISLGNHTAQFAEIAAFEFALKKCLPLGGNILVVTDSNYVAKAYNEELDVWASNGFVNNRKKPLKHISKWKSVADLKRLRPDVVVTHEPGHQKLDSSPHAYGNNLADQLATQASFKVH

SEQ ID NO: 20209 - protein, 662 aa, synthetic construct
VPWILKKPLELTIKLDLEEQQGTLLNNSILSKKGKEELKQLFEKYSALWQSWENQVGHRRIRPHKIATGTVKPTPQKQYHINPKAKPDIQIVINDLLKQGVLIQKESTMNTPVYPVPKPNGRWRMVLDYRAVNKVTPLIAVQNQHSYGILGSLFKGRYKTTIDLSNGFWAHPIVPEDYWITAFTWQGKQYCWTVLPQGFLNSPGLFNGDVVDLLQGIPNVEVYVDDVYISHDSEKEHLEYLDILFNRLKEAGYIISLKKSNIANSIVDFLGFQITNEGRGLTDTFKEKLENITAPTTLKQLQSILGLLNFARNFIPDFTELIAPLYALIPKSPKNYVPWQIEHSTTLETLITKLNGAEYLQGRKGDKTLIMKVNASYTTGYIRYYNEGEKKPISYVSIVFSKTELKFTELEKLLTTVHKGLLKALDLSMGQNIHVYSPIVSMQNIQKTPQTAKKALASRWLSWLSYLEDPRIRFFYDPQMPALKDLPAVDTGKDNKKHPSNFQHIFYTDGSAITSPTKEGHLNAGMGIVYFINKDGNLQKQQEWSISLGNHTAQFAEIAAFEFALKKCLPLGGNILVVTDSNYVAKAYNEELDVWASNGFVNNRKKPLKHISKWKSVADLKRLRPDVVVTHEPGHQKLDSSPHAYGNNLADQLATQASFKVH

SEQ ID NO: 20210 - protein, 662 aa, synthetic construct
VPWILKKPLELTIKLDLEEQQGTLLNNSILSKKGKEELKQLFEKYSALWQSWENQVGHRRIRPHKIATGTVKPTPQKQYHINPKAKPDIQIVINDLLKQGVLIQKESTMNTPVYPVPKPNGRWRMVLDYRAVNKVTPLIAVQNQHSYGILGSLFKGRYKTTIDLSNGFWAHPIVPEDYWITAFTWQGKQYCWTVLPQGFLNSPGLFNGDVVDLLQGIPNVEVYVDDVYISHDSEKEHLEYLDILFNRLKEAGYIISLKKSNIANSIVDFLGFQITNEGRGLTDTFKEKLENITAPTTLKQLQSILGKLNFARNFIPDFTELIAPLYALIPKSPKNYVPWQIEHSTTLETLITKLNGAEYLQGRKGDKTLIMKVNASYTTGYIRYYNEGEKKPISYVSIVFSKTELKFTELEKLLTTVHKGLLKALDLSMGQNIHVYSPIVSMQNIQKTPQTAKKALASRWLSWLSYLEDPRIRFFYDPQMPALKDLPAVDTGKDNKKHPSNFQHIFYTDGSAITSPTKEGHLNAGMGIVYFINKDGNLQKQQEWSISLGNHTAQFAEIAAFEFALKKCLPLGGNILVVTDSNYVAKAYNEELDVWASNGFVNNRKKPLKHISKWKSVADLKRLRPDVVVTHEPGHQKLDSSPHAYGNNLADQLATQASFKVH

SEQ ID NO: 20211 - protein, 670 aa, Feline leukemia virus
TLQLEEEYRLFEPESTQKQEMDIWLKNFPQAWAETGGMGTAHCQAPVLIQLKATATPISIRQYPMPHEAYQGIKPHIRRMLDQGILKPCQSPWNTPLLPVKKPGTEDYRPVQDLREVNKRVEDIHPTVPNPYNLLSTLPPSHPWYTVLDLKDAFFCLRLHSESQLLFAFEWRDPEIGLSGQLTWTRLPQGFKNSPTLFDEALHSDLADFRVRYPALVLLQYVDDLLLAAATRTECLEGTKALLETLGNKGYRASAKKAQICLQEVTYLGYSLKDGQRWLTKARKEAILSIPVPKNSRQVREFLGTAGYCRLWIPGFAELAAPLYPLTRPGTLFQWGTEQQLAFEDIKKALLSSPALGLPDITKPFELFIDENSGFAKGVLVQKLGPWKRPVAYLSKKLDTVASGWPPCLRMVAAIAILVKDAGKLTLGQPLTILTSHPVEALVRQPPNKWLSNARMTHYQAMLLDAERVHFGPTVSLNPATLLPLPSGGNHHDCLQILAETHGTRPDLTDQPLPDADLTWYTDGSSFIRNGEREAGAAVTTESEVIWAAPLPPGTSAQRAELIALTQALKMAEGKKLTVYTDSRYAFATTHVHGEIYRRRGLLTSEGKEIKNKNEILALLEALFLPKRLSIIHCPGHQKGDSPQAKGNRLADDTAKKAATETHSSLTVLP

SEQ ID NO: 20212 - protein, 670 aa, synthetic construct
TLQLEEEYRLFEPESTQKQEMDIWLKNFPQAWAETGGMGTAHCQAPVLIQLKATATPISIRQYPMPHEAYQGIKPHIRRMLDQGILKPCQSPWNTPLLPVKKPGTEDYRPVQDLREVNKRVEDIHPTVPNPYNLLSTLPPSHPWYTVLDLKDAFFCLRLHSESQLLFAFEWRDPEIGLSGQLTWTRLPQGFKNSPTLFNEALHSDLADFRVRYPALVLLQYVDDLLLAAATRTECLEGTKALLETLGNKGYRASAKKAQICLQEVTYLGYSLKDGQRWLTKARKEAILSIPVPKNSRQVREFLGTAGYCRLWIPGFAELAAPLYPLTRPGTLFQWGTEQQLAFEDIKKALLSSPALGLPDITKPFELFIDENSGFAKGVLVQKLGPWKRPVAYLSKKLDTVASGWPPCLRMVAAIAILVKDAGKLTLGQPLTILTSHPVEALVRQPPNKWLSNARMTHYQAMLLDAERVHFGPTVSLNPATLLPLPSGGNHHDCLQILAETHGTRPDLTDQPLPDADLTWYTDGSSFIRNGEREAGAAVTTESEVIWAAPLPPGTSAQRAELIALTQALKMAEGKKLTVYTDSRYAFATTHVHGEIYRRRGWLTSEGKEIKNKNEILALLEALFLPKRLSIIHCPGHQKGDSPQAKGNRLADDTAKKAATETHSSLTVLP

SEQ ID NO: 20213 - protein, 670 aa, synthetic construct
TLQLEEEYRLFEPESTQKQEMDIWLKNFPQAWAETGGMGTAHCQAPVLIQLKATATPISIRQYPMPHEAYQGIKPHIRRMLDQGILKPCQSPWNTPLLPVKKPGTEDYRPVQDLREVNKRVEDIHPTVPNPYNLLSTLPPSHPWYTVLDLKDAFFCLRLHSESQLLFAFEWRDPEIGLSGQLTWTRLPQGFKNSPTLFNEALHSDLADFRVRYPALVLLQYVDDLLLAAATRTECLEGTKALLETLGNKGYRASAKKAQICLQEVTYLGYSLKDGQRWLTKARKEAILSIPVPKNSRQVREFLGKAGYCRLFIPGFAELAAPLYPLTRPGTLFQWGTEQQLAFEDIKKALLSSPALGLPDITKPFELFIDENSGFAKGVLVQKLGPWKRPVAYLSKKLDTVASGWPPCLRMVAAIAILVKDAGKLTLGQPLTILTSHPVEALVRQPPNKWLSNARMTHYQAMLLDAERVHFGPTVSLNPATLLPLPSGGNHHDCLQILAETHGTRPDLTDQPLPDADLTWYTDGSSFIRNGEREAGAAVTTESEVIWAAPLPPGTSAQRAELIALTQALKMAEGKKLTVYTDSRYAFATTHVHGEIYRRRGWLTSEGKEIKNKNEILALLEALFLPKRLSIIHCPGHQKGDSPQAKGNRLADDTAKKAATETHSSLTVLP

SEQ ID NO: 20214 - protein, 751 aa, unidentified
MNPLQLLQPLPAEIKGTKLLAHWNSGATITCIPESFLEDEQPIKKTLIKTIHGEKQQNVYYVTFKVKGRKVEAEVIASPYEYILLSPTDVPWLTQQPLQLTILVPLQEYQEKILSKTALPEDQKQQLKTLFVKYDNLWQHWENQVGHRKIRPHNIATGDYPPRPQKQYPINPKAKPSIQIVIDDLLKQGVLTPQNSTMNTPVYPVPKPDGRWRMVLDYREVNKTIPLTAAQNQHSAGILATIVRQKYKTTLDLANGFWAHPITPESYWLTAFTWQGKQYCWTRLPQGFLNSPALFTADVVDLLKEIPNVQVYVDDIYLSHDDPKEHVQQLEKVFQILLQAGYVVSLKKSEIGQKTVEFLGFNITKEGRGLTDTFKTKLLNITPPKDLKQLQSILGLLNFARNFIPNFAELVQPLYNLIASAKGKYIEWSEENTKQLNMVIEALNTASNLEERLPEQRLVIKVNTSPSAGYVRYYNETGKKPIMYLNYVFSKAELKFSMLEKLLTTMHKALIKAMDLAMGQEILVYSPIVSMTKIQKTPLPERKALPIRWITWMTYLEDPRIQFHYDKTLPELKHIPDVYTSSQSPVKHPSQYEGVFYTDGSAIKSPDPTKSNNAGMGIVHATYKPEYQVLNQWSIPLGNHTAQMAEIAAVEFACKKALKIPGPVLVITDSFYVAESANKELPYWKSNGFVNNKKKPLKHISKWKSIAECLSMKPDITIQHEKGISLQIPVFILKGNALADKLATQGSYVVN

SEQ ID NO: 20215 - protein, 751 aa, synthetic construct
MNPLQLLQPLPAEIKGTKLLAHWNSGATITCIPESFLEDEQPIKKTLIKTIHGEKQQNVYYVTFKVKGRKVEAEVIASPYEYILLSPTDVPWLTQQPLQLTILVPLQEYQEKILSKTALPEDQKQQLKTLFVKYDNLWQHWENQVGHRKIRPHNIATGDYPPRPQKQYPINPKAKPSIQIVIDDLLKQGVLTPQNSTMNTPVYPVPKPDGRWRMVLDYREVNKTIPLTAAQNQHSAGILATIVRQKYKTTLDLANGFWAHPITPESYWLTAFTWQGKQYCWTRLPQGFLNSPALFNADVVDLLKEIPNVQVYVDDIYLSHDDPKEHVQQLEKVFQILLQAGYVVSLKKSEIGQKTVEFLGFNITKEGRGLTDTFKTKLLNITPPKDLKQLQSILGLLNFARNFIPNFAELVQPLYNLIAPAKGKYIEWSEENTKQLNMVIEALNTASNLEERLPEQRLVIKVNTSPSAGYVRYYNETGKKPIMYLNYVFSKAELKFSMLEKLLTTMHKALIKAMDLAMGQEILVYSPIVSMTKIQKTPLPERKALPIRWITWMTYLEDPRIQFHYDKTLPELKHIPDVYTSSQSPVKHPSQYEGVFYTDGSAIKSPDPTKSNNAGMGIVHATYKPEYQVLNQWSIPLGNHTAQMAEIAAVEFACKKALKIPGPVLVITDSFYVAESANKELPYWKSNGFVNNKKKPLKHISKWKSIAECLSMKPDITIQHEKGISLQIPVFILKGNALADKLATQGSYVVN

SEQ ID NO: 20216 - protein, 751 aa, synthetic construct
MNPLQLLQPLPAEIKGTKLLAHWNSGATITCIPESFLEDEQPIKKTLIKTIHGEKQQNVYYVTFKVKGRKVEAEVIASPYEYILLSPTDVPWLTQQPLQLTILVPLQEYQEKILSKTALPEDQKQQLKTLFVKYDNLWQHWENQVGHRKIRPHNIATGDYPPRPQKQYPINPKAKPSIQIVIDDLLKQGVLTPQNSTMNTPVYPVPKPDGRWRMVLDYREVNKTIPLTAAQNQHSAGILATIVRQKYKTTLDLANGFWAHPITPESYWLTAFTWQGKQYCWTRLPQGFLNSPALFNADVVDLLKEIPNVQVYVDDIYLSHDDPKEHVQQLEKVFQILLQAGYVVSLKKSEIGQKTVEFLGFNITKEGRGLTDTFKTKLLNITPPKDLKQLQSILGKLNFARNFIPNFAELVQPLYNLIAPAKGKYIEWSEENTKQLNMVIEALNTASNLEERLPEQRLVIKVNTSPSAGYVRYYNETGKKPIMYLNYVFSKAELKFSMLEKLLTTMHKALIKAMDLAMGQEILVYSPIVSMTKIQKTPLPERKALPIRWITWMTYLEDPRIQFHYDKTLPELKHIPDVYTSSQSPVKHPSQYEGVFYTDGSAIKSPDPTKSNNAGMGIVHATYKPEYQVLNQWSIPLGNHTAQMAEIAAVEFACKKALKIPGPVLVITDSFYVAESANKELPYWKSNGFVNNKKKPLKHISKWKSIAECLSMKPDITIQHEKGISLQIPVFILKGNALADKLATQGSYVVN

SEQ ID NO: 20217 - protein, 662 aa, unidentified
VPWLTQQPLQLTILVPLQEYQEKILSKTALPEDQKQQLKTLFVKYDNLWQHWENQVGHRKIRPHNIATGDYPPRPQKQYPINPKAKPSIQIVIDDLLKQGVLTPQNSTMNTPVYPVPKPDGRWRMVLDYREVNKTIPLTAAQNQHSAGILATIVRQKYKTTLDLANGFWAHPITPESYWLTAFTWQGKQYCWTRLPQGFLNSPALFTADVVDLLKEIPNVQVYVDDIYLSHDDPKEHVQQLEKVFQILLQAGYVVSLKKSEIGQKTVEFLGFNITKEGRGLTDTFKTKLLNITPPKDLKQLQSILGLLNFARNFIPNFAELVQPLYNLIASAKGKYIEWSEENTKQLNMVIEALNTASNLEERLPEQRLVIKVNTSPSAGYVRYYNETGKKPIMYLNYVFSKAELKFSMLEKLLTTMHKALIKAMDLAMGQEILVYSPIVSMTKIQKTPLPERKALPIRWITWMTYLEDPRIQFHYDKTLPELKHIPDVYTSSQSPVKHPSQYEGVFYTDGSAIKSPDPTKSNNAGMGIVHATYKPEYQVLNQWSIPLGNHTAQMAEIAAVEFACKKALKIPGPVLVITDSFYVAESANKELPYWKSNGFVNNKKKPLKHISKWKSIAECLSMKPDITIQHEKGISLQIPVFILKGNALADKLATQGSYVVN

SEQ ID NO: 20218 - protein, 662 aa, synthetic construct
VPWLTQQPLQLTILVPLQEYQEKILSKTALPEDQKQQLKTLFVKYDNLWQHWENQVGHRKIRPHNIATGDYPPRPQKQYPINPKAKPSIQIVIDDLLKQGVLTPQNSTMNTPVYPVPKPDGRWRMVLDYREVNKTIPLTAAQNQHSAGILATIVRQKYKTTLDLANGFWAHPITPESYWLTAFTWQGKQYCWTRLPQGFLNSPALFNADVVDLLKEIPNVQVYVDDIYLSHDDPKEHVQQLEKVFQILLQAGYVVSLKKSEIGQKTVEFLGFNITKEGRGLTDTFKTKLLNITPPKDLKQLQSILGLLNFARNFIPNFAELVQPLYNLIAPAKGKYIEWSEENTKQLNMVIEALNTASNLEERLPEQRLVIKVNTSPSAGYVRYYNETGKKPIMYLNYVFSKAELKFSMLEKLLTTMHKALIKAMDLAMGQEILVYSPIVSMTKIQKTPLPERKALPIRWITWMTYLEDPRIQFHYDKTLPELKHIPDVYTSSQSPVKHPSQYEGVFYTDGSAIKSPDPTKSNNAGMGIVHATYKPEYQVLNQWSIPLGNHTAQMAEIAAVEFACKKALKIPGPVLVITDSFYVAESANKELPYWKSNGFVNNKKKPLKHISKWKSIAECLSMKPDITIQHEKGISLQIPVFILKGNALADKLATQGSYVVN

SEQ ID NO: 20219 - protein, 662 aa, synthetic construct
VPWLTQQPLQLTILVPLQEYQEKILSKTALPEDQKQQLKTLFVKYDNLWQHWENQVGHRKIRPHNIATGDYPPRPQKQYPINPKAKPSIQIVIDDLLKQGVLTPQNSTMNTPVYPVPKPDGRWRMVLDYREVNKTIPLTAAQNQHSAGILATIVRQKYKTTLDLANGFWAHPITPESYWLTAFTWQGKQYCWTRLPQGFLNSPALFNADVVDLLKEIPNVQVYVDDIYLSHDDPKEHVQQLEKVFQILLQAGYVVSLKKSEIGQKTVEFLGFNITKEGRGLTDTFKTKLLNITPPKDLKQLQSILGKLNFARNFIPNFAELVQPLYNLIAPAKGKYIEWSEENTKQLNMVIEALNTASNLEERLPEQRLVIKVNTSPSAGYVRYYNETGKKPIMYLNYVFSKAELKFSMLEKLLTTMHKALIKAMDLAMGQEILVYSPIVSMTKIQKTPLPERKALPIRWITWMTYLEDPRIQFHYDKTLPELKHIPDVYTSSQSPVKHPSQYEGVFYTDGSAIKSPDPTKSNNAGMGIVHATYKPEYQVLNQWSIPLGNHTAQMAEIAAVEFACKKALKIPGPVLVITDSFYVAESANKELPYWKSNGFVNNKKKPLKHISKWKSIAECLSMKPDITIQHEKGISLQIPVFILKGNALADKLATQGSYVVN

SEQ ID NO: 20220 - protein, 669 aa, Gibbon ape leukemia virus
VLNLEEEYRLHEKPVPSSIDPSWLQLFPTVWAERAGMGLANQVPPVVVELRSGASPVAVRQYPMSKEAREGIRPHIQKFLDLGVLVPCRSPWNTPLLPVKKPGTNDYRPVQDLREINKRVQDIHPTVPNPYNLLSSLPPSYTWYSVLDLKDAFFCLRLHPNSQPLFAFEWKDPEKGNTGQLTWTRLPQGFKNSPTLFDEALHRDLAPFRALNPQVVLLQYVDDLLVAAPTYEDCKKGTQKLLQELSKLGYRVSAKKAQLCQREVTYLGYLLKEGKRWLTPARKATVMKIPVPTTPRQVREFLGTAGFCRLWIPGFASLAAPLYPLTKESIPFIWTEEHQQAFDHIKKALLSAPALALPDLTKPFTLYIDERAGVARGVLTQTLGPWRRPVAYLSKKLDPVASGWPTCLKAVAAVALLLKDADKLTLGQNVTVIASHSLESIVRQPPDRWMTNARMTHYQSLLLNERVSFAPPAVLNPATLLPVESEATPVHRCSEILAEETGTRRDLEDQPLPGVPTWYTDGSSFITEGKRRAGAPIVDGKRTVWASSLPEGTSAQKAELVALTQALRLAEGKNINIYTDSRYAFATAHIHGAIYKQRGLLTSAGKDIKNKEEILALLEAIHLPRRVAIIHCPGHQRGSNPVATGNRRADEAAKQAALSTRVLAGTTKP

SEQ ID NO: 20221 - protein, 669 aa, synthetic construct
VLNLEEEYRLHEKPVPSSIDPSWLQLFPTVWAERAGMGLANQVPPVVVELRSGASPVAVRQYPMSKEAREGIRPHIQKFLDLGVLVPCRSPWNTPLLPVKKPGTNDYRPVQDLREINKRVQDIHPTVPNPYNLLSSLPPSYTWYSVLDLKDAFFCLRLHPNSQPLFAFEWKDPEKGNTGQLTWTRLPQGFKNSPTLFNEALHRDLAPFRALNPQVVLLQYVDDLLVAAPTYEDCKKGTQKLLQELSKLGYRVSAKKAQLCQREVTYLGYLLKEGKRWLTPARKATVMKIPVPTTPRQVREFLGTAGFCRLWIPGFASLAAPLYPLTKPSIPFIWTEEHQQAFDHIKKALLSAPALALPDLTKPFTLYIDERAGVARGVLTQTLGPWRRPVAYLSKKLDPVASGWPTCLKAVAAVALLLKDADKLTLGQNVTVIASHSLESIVRQPPDRWMTNARMTHYQSLLLNERVSFAPPAVLNPATLLPVESEATPVHRCSEILAEETGTRRDLEDQPLPGVPTWYTDGSSFITEGKRRAGAPIVDGKRTVWASSLPEGTSAQKAELVALTQALRLAEGKNINIYTDSRYAFATAHIHGAIYKQRGWLTSAGKDIKNKEEILALLEAIHLPRRVAIIHCPGHQRGSNPVATGNRRADEAAKQAALSTRVLAGTTKP

SEQ ID NO: 20222 - protein, 669 aa, synthetic construct
VLNLEEEYRLHEKPVPSSIDPSWLQLFPTVWAERAGMGLANQVPPVVVELRSGASPVAVRQYPMSKEAREGIRPHIQKFLDLGVLVPCRSPWNTPLLPVKKPGTNDYRPVQDLREINKRVQDIHPTVPNPYNLLSSLPPSYTWYSVLDLKDAFFCLRLHPNSQPLFAFEWKDPEKGNTGQLTWTRLPQGFKNSPTLFNEALHRDLAPFRALNPQVVLLQYVDDLLVAAPTYEDCKKGTQKLLQELSKLGYRVSAKKAQLCQREVTYLGYLLKEGKRWLTPARKATVMKIPVPTTPRQVREFLGKAGFCRLFIPGFASLAAPLYPLTKPSIPFIWTEEHQQAFDHIKKALLSAPALALPDLTKPFTLYIDERAGVARGVLTQTLGPWRRPVAYLSKKLDPVASGWPTCLKAVAAVALLLKDADKLTLGQNVTVIASHSLESIVRQPPDRWMTNARMTHYQSLLLNERVSFAPPAVLNPATLLPVESEATPVHRCSEILAEETGTRRDLEDQPLPGVPTWYTDGSSFITEGKRRAGAPIVDGKRTVWASSLPEGTSAQKAELVALTQALRLAEGKNINIYTDSRYAFATAHIHGAIYKQRGWLTSAGKDIKNKEEILALLEAIHLPRRVAIIHCPGHQRGSNPVATGNRRADEAAKQAALSTRVLAGTTKP

SEQ ID NO: 20223 - protein, 588 aa, unidentified
AVLGLEHLPRPPQISQFPLNPERLQALQHLVRKALEAGHIEPYTGPGNNPVFPVKKANGTWRFIHDLRATNSLTIDLSSSSPGPPDLSSLPTTLAHLQTIDLRDAFFQIPLPKQFQPYFAFTVPQQCNYGPGTRYAWKVLPQGFKNSPTLFEMQLAHILQPIRQAFPQCTILQYMDDILLASPSHEDLLLLSEATMASLISHGLPVSENKTQQTPGTIKFLGQIISPNHLTYDAVPTVPIRSRWALPELQALLGEIQWVSKGTPTLRQPLHSLYCALQRHTDPRDQIYLNPSQVQSLVQLRQALSQNCRSRLVQTLPLLGAIMLTLTGTTTVVFQSKEQWPLVWLHAPLPHTSQCPWGQLLASAVLLLDKYTLQSYGLLCQTIHHNISTQTFNQFIQTSDHPSVPILLHHSHRFKNLGAQTGELWNTFLKTAAPLAPVKALMPVFTLSPVIINTAPCLFSDGSTSRAAYILWDKQILSQRSFPLPPPHKSAQRAELLGLLHGLSSARSWRCLNIFLDSKYLYHYLRTLALGTFQGRSSQAPFQALLPRLLSRKVVYLHHVRSHTNLPDPISRLNALTDALLITPVLQL

SEQ ID NO: 20224 - protein, 588 aa, synthetic construct
AVLGLEHLPRPPQISQFPLNPERLQALQHLVRKALEAGHIEPYTGPGNNPVFPVKKANGTWRFIHDLRATNSLTIDLSSSSPGPPDLSSLPTTLAHLQTIDLRDAFFQIPLPKQFQPYFAFTVPQQCNYGPGTRYAWKVLPQGFKNSPTLFQMQLAHILQPIRQAFPQCTILQYMDDILLASPSHEDLLLLSEATMASLISHGLPVSENKTQQTPGTIKFLGQIISPNHLTYDAVPTVPIRSRWALPELQALLGEIQWVSKGTPTLRQPLHSLYCALQPHTDPRDQIYLNPSQVQSLVQLRQALSQNCRSRLVQTLPLLGAIMLTLTGTTTVVFQSKEQWPLVWLHAPLPHTSQCPWGQLLASAVLLLDKYTLQSYGLLCQTIHHNISTQTFNQFIQTSDHPSVPILLHHSHRFKNLGAQTGELWNTFLKTAAPLAPVKALMPVFTLSPVIINTAPCLFSDGSTSRAAYILWDKQILSQRSFPLPPPHKSAQRAELLGLLHGLSSARSWRCLNIFLDSKYLYHYLRTLALGTFQGRSSQAPFQALLPRLLSRKVVYLHHVRSHTNLPDPISRLNALTDALLITPVLQL

SEQ ID NO: 20225 - protein, 588 aa, synthetic construct
AVLGLEHLPRPPQISQFPLNPERLQALQHLVRKALEAGHIEPYTGPGNNPVFPVKKANGTWRFIHDLRATNSLTIDLSSSSPGPPDLSSPPTTLAHLQTIDLRDAFFQIPLPKQFQPYFAFTVPQQCNYGPGTRYAWKVLPQGFKNSPTLFQMQLAHILQPIRQAFPQCTILQYMDDILLASPSHEDLLLLSEATMASLISHGLPVSENKTQQTPGTIKFLGQIISPNHLTYDAVPTVPIRSRWALPELQALLGEIQWVSKGTPTLRQPLHSLYCALQPHTDPRDQIYLNPSQVQSLVQLRQALSQNCRSRLVQTLPLLGAIMLTLTGTTTVVFQSKEQWPLVWLHAPLPHTSQCPWGQLLASAVLLLDKYTLQSYGLLCQTIHHNISTQTFNQFIQTSDHPSVPILLHHSHRFKNLGAQTGELWNTFLKTAAPLAPVKALMPVFTLSPVIINTAPCLFSDGSTSRAAYILWDKQILSQRSFPLPPPHKSAQRAELLGLLHGLSSARSWRCLNIFLDSKYLYHYLRTLALGTFQGRSSQAPFQALLPRLLSRKVVYLHHVRSHTNLPDPISRLNALTDALLITPVLQL

SEQ ID NO: 20226 - protein, 588 aa, unidentified
AVLGLEHLPRPPEISQFPLNPERLQALQHLVRKALEAGHIEPYTGPGNNPVFPVKKANGTWRFIHDLRATNSLTIDLSSSSPGPPDLSSLPTTLAHLQTIDLKDAFFQIPLPKQFQPYFAFTVPQQCNYGPGTRYAWRVLPQGFKNSPTLFEMQLAHILQPIRQAFPQCTILQYMDDILLASPSHADLQLLSEATMASLISHGLPVSENKTQQTPGTIKFLGQIISPNHLTYDAVPKVPIRSRWALPELQALLGEIQWVSKGTPTLRQPLHSLYCALQRHTDPRDQIYLNPSQVQSLVQLRQALSQNCRSRLVQTLPLLGAIMLTLTGTTTVVFQSKQQWPLVWLHAPLPHTSQCPWGQLLASAVLLLDKYTLQSYGLLCQTIHHNISTQTFNQFIQTSDHPSVPILLHHSHRFKNLGAQTGELWNTFLKTTAPLAPVKALMPVFTLSPVIINTAPCLFSDGSTSQAAYILWDKHILSQRSFPLPPPHKSAQRAELLGLLHGLSSARSWRCLNIFLDSKYLYHYLRTLALGTFQGRSSQAPFQALLPRLLSRKVVYLHHVRSHTNLPDPISRLNALTDALLITPVLQL

SEQ ID NO: 20227 - protein, 588 aa, synthetic construct
AVLGLEHLPRPPEISQFPLNPERLQALQHLVRKALEAGHIEPYTGPGNNPVFPVKKANGTWRFIHDLRATNSLTIDLSSSSPGPPDLSSLPTTLAHLQTIDLKDAFFQIPLPKQFQPYFAFTVPQQCNYGPGTRYAWRVLPQGFKNSPTLFQMQLAHILQPIRQAFPQCTILQYMDDILLASPSHADLQLLSEATMASLISHGLPVSENKTQQTPGTIKFLGQIISPNHLTYDAVPKVPIRSRWALPELQALLGEIQWVSKGTPTLRQPLHSLYCALQPHTDPRDQIYLNPSQVQSLVQLRQALSQNCRSRLVQTLPLLGAIMLTLTGTTTVVFQSKQQWPLVWLHAPLPHTSQCPWGQLLASAVLLLDKYTLQSYGLLCQTIHHNISTQTFNQFIQTSDHPSVPILLHHSHRFKNLGAQTGELWNTFLKTTAPLAPVKALMPVFTLSPVIINTAPCLFSDGSTSQAAYILWDKHILSQRSFPLPPPHKSAQRAELLGLLHGLSSARSWRCLNIFLDSKYLYHYLRTLALGTFQGRSSQAPFQALLPRLLSRKVVYLHHVRSHTNLPDPISRLNALTDALLITPVLQL

SEQ ID NO: 20228 - protein, 583 aa, unidentified
GLEHLPRPPEISQFPLNPERLQALQHLVRKALEAGHIEPYTGPGNNPVFPVKKANGTWRFIHDLRATNSLTVDLSSSSPGPPDLSSLPTTLAHLQTIDLKDAFFQIPLPKQFQPYFAFTVPQQCNYGPGTRYAWKVLPQGFKNSPTLFEMQLASILQPIRQAFPQCVILQYMDDILLASPSPEDLQQLSEATMASLISHGLPVSQDKTQQTPGTIKFLGQIISPNHITYDAVPTVPIRSRWALPELQALLGEIQWVSKGTPTLRQPLHSLYCALQGHTDPRDQIYLNPSQVQSLMQLQQALSQNCRSRLAQTLPLLGAIMLTLTGTTTVVFQSKQQWPLVWLHAPLPHTSQCPWGQLLASAVLLLDKYTLQSYGLLCQTIHHNISIQTFNQFIQTSDHPSVPILLHHSHRFKNLGAQTGELWNTFLKTAAPLAPVKALTPVFTLSPIIINTAPCLFSDGSTSQAAYILWDKHILSQRSFPLPPPHKSAQQAELLGLLHGLSSARSWHCLNIFLDSKYLYHYLRTLALGTFQGKSSQAPFQALLPRLLAHKVIYLHHVRSHTNLPDPISKLNALTDALLITPIL

SEQ ID NO: 20229 - protein, 583 aa, synthetic construct
GLEHLPRPPEISQFPLNPERLQALQHLVRKALEAGHIEPYTGPGNNPVFPVKKANGTWRFIHDLRATNSLTVDLSSSSPGPPDLSSLPTTLAHLQTIDLKDAFFQIPLPKQFQPYFAFTVPQQCNYGPGTRYAWKVLPQGFKNSPTLFQMQLASILQPIRQAFPQCVILQYMDDILLASPSPEDLQQLSEATMASLISHGLPVSQDKTQQTPGTIKFLGQIISPNHITYDAVPTVPIRSRWALPELQALLGEIQWVSKGTPTLRQPLHSLYCALQGHTDPRDQIYLNPSQVQSLMQLQQALSQNCRSRLAQTLPLLGAIMLTLTGTTTVVFQSKQQWPLVWLHAPLPHTSQCPWGQLLASAVLLLDKYTLQSYGLLCQTIHHNISIQTFNQFIQTSDHPSVPILLHHSHRFKNLGAQTGELWNTFLKTAAPLAPVKALTPVFTLSPIIINTAPCLFSDGSTSQAAYILWDKHILSQRSFPLPPPHKSAQQAELLGLLHGLSSARSWHCLNIFLDSKYLYHYLRTLAWGTFQGKSSQAPFQALLPRLLAHKVIYLHHVRSHTNLPDPISKLNALTDALLITPIL

SEQ ID NO: 20230 - protein, 583 aa, synthetic construct
GLEHLPRPPEISQFPLNPERLQALQHLVRKALEAGHIEPYTGPGNNPVFPVKKANGTWRFIHDLRATNSLTVDLSSSSPGPPDLSSPPTTLAHLQTIDLKDAFFQIPLPKQFQPYFAFTVPQQCNYGPGTRYAWKVLPQGFKNSPTLFQMQLASILQPIRQAFPQCVILQYMDDILLASPSPEDLQQLSEATMASLISHGLPVSQDKTQQTPGTIKFLGQIISPNHITYDAVPTVPIRSRWALPELQALLGEIQWVSKGTPTLRQPLHSLYCALQGHTDPRDQIYLNPSQVQSLMQLQQALSQNCRSRLAQTLPLLGAIMLTLTGTTTVVFQSKQQWPLVWLHAPLPHTSQCPWGQLLASAVLLLDKYTLQSYGLLCQTIHHNISIQTFNQFIQTSDHPSVPILLHHSHRFKNLGAQTGELWNTFLKTAAPLAPVKALTPVFTLSPIIINTAPCLFSDGSTSQAAYILWDKHILSQRSFPLPPPHKSAQQAELLGLLHGLSSARSWHCLNIFLDSKYLYHYLRTLAWGTFQGKSSQAPFQALLPRLLAHKVIYLHHVRSHTNLPDPISKLNALTDALLITPIL

SEQ ID NO: 20231 - protein, 584 aa, unidentified
GLEHLPPPPEVSQFPLNPERLQALTDLVSRALEAKHIEPYQGPGNNPIFPVKKPNGKWRFIHDLRATNSVTRDLASPSPGPPDLTSLPQGLPHLRTIDLTDAFFQIPLPTIFQPYFAFTLPQPNNYGPGTRYSWRVLPQGFKNSPTLFEQQLSHILTPVRKTFPNSLIIQYMDDILLASPAPGELAALTDKVTNALTKEGLPLSPEKTQATPGPIHFLGQVISQDCITYETLPSINVKSTWSLAELQSMLGELQWVSKGTPVLRSSLHQLYLALRGHRDPRDTIKLTSIQVQALRTIQKALTLNCRSRLVNQLPILALIMLRPTGTTAVLFQTKQKWPLVWLHTPHPATSLRPWGQLLANAVIILDKYSLQHYGQVCKSFHHNISNQALTYYLHTSDQSSVAILLQHSHRFHNLGAQPSGPWRSLLQMPQIFQNIDVLRPPFTISPVVINHAPCLFSDGSASKAAFIIWDRQVIHQQVLSLPSTCSAQAGELFGLLAGLQKSQPWVALNIFLDSKFLIGHLRRMALGAFPGPSTQCELHTQLLPLLQGKTVYVHHVRSHTLLQDPISRLNEATDALMLAPLLPL

SEQ ID NO: 20232 - protein, 584 aa, synthetic construct
GLEHLPPPPEVSQFPLNPERLQALTDLVSRALEAKHIEPYQGPGNNPIFPVKKPNGKWRFIHDLRATNSVTRDLASPSPGPPDLTSLPQGLPHLRTIDLTDAFFQIPLPTIFQPYFAFTLPQPNNYGPGTRYSWRVLPQGFKNSPTLFQQQLSHILTPVRKTFPNSLIIQYMDDILLASPAPGELAALTDKVTNALTKEGLPLSPEKTQATPGPIHFLGQVISQDCITYETLPSINVKSTWSLAELQSMLGELQWVSKGTPVLRSSLHQLYLALRGHRDPRDTIKLTSIQVQALRTIQKALTLNCRSRLVNQLPILALIMLRPTGTTAVLFQTKQKWPLVWLHTPHPATSLRPWGQLLANAVIILDKYSLQHYGQVCKSFHHNISNQALTYYLHTSDQSSVAILLQHSHRFHNLGAQPSGPWRSLLQMPQIFQNIDVLRPPFTISPVVINHAPCLFSDGSASKAAFIIWDRQVIHQQVLSLPSTCSAQAGELFGLLAGLQKSQPWVALNIFLDSKFLIGHLRRMAWGAFPGPSTQCELHTQLLPLLQGKTVYVHHVRSHTLLQDPISRLNEATDALMLAPLLPL

SEQ ID NO: 20233 - protein, 584 aa, synthetic construct
GLEHLPPPPEVSQFPLNPERLQALTDLVSRALEAKHIEPYQGPGNNPIFPVKKPNGKWRFIHDLRATNSVTRDLASPSPGPPDLTSPPQGLPHLRTIDLTDAFFQIPLPTIFQPYFAFTLPQPNNYGPGTRYSWRVLPQGFKNSPTLFQQQLSHILTPVRKTFPNSLIIQYMDDILLASPAPGELAALTDKVTNALTKEGLPLSPEKTQATPGPIHFLGQVISQDCITYETLPSINVKSTWSLAELQSMLGELQWVSKGTPVLRSSLHQLYLALRGHRDPRDTIKLTSIQVQALRTIQKALTLNCRSRLVNQLPILALIMLRPTGTTAVLFQTKQKWPLVWLHTPHPATSLRPWGQLLANAVIILDKYSLQHYGQVCKSFHHNISNQALTYYLHTSDQSSVAILLQHSHRFHNLGAQPSGPWRSLLQMPQIFQNIDVLRPPFTISPVVINHAPCLFSDGSASKAAFIIWDRQVIHQQVLSLPSTCSAQAGELFGLLAGLQKSQPWVALNIFLDSKFLIGHLRRMAWGAFPGPSTQCELHTQLLPLLQGKTVYVHHVRSHTLLQDPISRLNEATDALMLAPLLPL

SEQ ID NO: 20234 - protein, 584 aa, unidentified
GLEHLPPPPEVSQFPLNPERLQALTDLVSRALEAKHIEPYQGPGNNPIFPVKKPNGKWRFIHDLRATNSLTRDLASPSPGPPDLTSLPQDLPHLRTIDLTDAFFQIPLPAVFQPYFAFTLPQPNNHGPGTRYSWRVLPQGFKNSPTLFEQQLSHILAPVRKAFPNSLIIQYMDDILLASPALRELTALTDKVTNALTKEGLPMSLEKTQATPGSIHFLGQVISPDCITYETLPSIHVKSIWSLAELQSMLGELQWVSKGTPVLRSSLHQLYLALRGHRDPRDTIELTSTQVQALKTIQKALALNCRSRLVSQLPILALIILRPTGTTAVLFQTKQKWPLVWLHTPHPATSLRPWGQLLANAIITLDKYSLQHYGQICKSFHHNISNQALTYYLHTSDQSSVAILLQHSHRFHNLGAQPSGPWRSLLQVPQIFQNIDVLRPPFIISPVVIDHAPCLFSDGATSKAAFILWDKQVIHQQVLPLPSTCSAQAGELFGLLAGLQKSKPWPALNIFLDSKFLIGHLRRMALGAFLGPSTQCDLHARLFPLLQGKTVYVHHVRSHTLLQDPISRLNEATDALMLAPLLPL

SEQ ID NO: 20235 - protein, 584 aa, synthetic construct
GLEHLPPPPEVSQFPLNPERLQALTDLVSRALEAKHIEPYQGPGNNPIFPVKKPNGKWRFIHDLRATNSLTRDLASPSPGPPDLTSLPQDLPHLRTIDLTDAFFQIPLPAVFQPYFAFTLPQPNNHGPGTRYSWRVLPQGFKNSPTLFQQQLSHILAPVRKAFPNSLIIQYMDDILLASPALRELTALTDKVTNALTKEGLPMSLEKTQATPGSIHFLGQVISPDCITYETLPSIHVKSIWSLAELQSMLGELQWVSKGTPVLRSSLHQLYLALRGHRDPRDTIELTSTQVQALKTIQKALALNCRSRLVSQLPILALIILRPTGTTAVLFQTKQKWPLVWLHTPHPATSLRPWGQLLANAIITLDKYSLQHYGQICKSFHHNISNQALTYYLHTSDQSSVAILLQHSHRFHNLGAQPSGPWRSLLQVPQIFQNIDVLRPPFIISPVVIDHAPCLFSDGATSKAAFILWDKQVIHQQVLPLPSTCSAQAGELFGLLAGLQKSKPWPALNIFLDSKFLIGHLRRMAWGAFLGPSTQCDLHARLFPLLQGKTVYVHHVRSHTLLQDPISRLNEATDALMLAPLLPL

SEQ ID NO: 20236 - protein, 584 aa, synthetic construct
GLEHLPPPPEVSQFPLNPERLQALTDLVSRALEAKHIEPYQGPGNNPIFPVKKPNGKWRFIHDLRATNSLTRDLASPSPGPPDLTSPPQDLPHLRTIDLTDAFFQIPLPAVFQPYFAFTLPQPNNHGPGTRYSWRVLPQGFKNSPTLFQQQLSHILAPVRKAFPNSLIIQYMDDILLASPALRELTALTDKVTNALTKEGLPMSLEKTQATPGSIHFLGQVISPDCITYETLPSIHVKSIWSLAELQSMLGELQWVSKGTPVLRSSLHQLYLALRGHRDPRDTIELTSTQVQALKTIQKALALNCRSRLVSQLPILALIILRPTGTTAVLFQTKQKWPLVWLHTPHPATSLRPWGQLLANAIITLDKYSLQHYGQICKSFHHNISNQALTYYLHTSDQSSVAILLQHSHRFHNLGAQPSGPWRSLLQVPQIFQNIDVLRPPFIISPVVIDHAPCLFSDGATSKAAFILWDKQVIHQQVLPLPSTCSAQAGELFGLLAGLQKSKPWPALNIFLDSKFLIGHLRRMAWGAFLGPSTQCDLHARLFPLLQGKTVYVHHVRSHTLLQDPISRLNEATDALMLAPLLPL

SEQ ID NO: 20237 - protein, 584 aa, synthetic construct
HLPPPPQVDQFPLNLPERLQALNDLVSKALEAGHIEPYSGPGNNPVFPVKKPNGKWRFIHDLRATNAITTTLTSPSPGPPDLTSLPTALPHLQTIDLTDAFFQIPLPKQYQPYFAFTIPQPCNYGPGTRYAWTVLPQGFKNSPTLFQQQLAAVLNPMRKMFPTSTIVQYMDDILLASPTNEELQQLSQLTLQALTTHGLPISQEKTQQTPGQIRFLGQVISPNHITYESTPTIPIKSQWTLTELQVILGEIQWVSKGTPILRKHLQSLYSALHPYRDPRACITLTPQQLHALHAIQQALQHNCRGRLNPALPLLGLISLSTSGTTSVIFQPKQNWPLAWLHTPHPPTSLCPWGHLLACTILTLDKYTLQHYGQLCQSFHHNMSKQALCDFLRNSPHPSVGILIHHMGRFHNLGSQPSGPWKTLLHLPTLLQEPRLLRPIFTLSPVVLDTAPCLFSDGSPQKAAYVLWDQTILQQDITPLPSHETHSAQKGELLALICGLRAAKPWPSLNIFLDSKYLIKYLHSLAIGAFLGTSAHQTLQAALPPLLQGKTIYLHHVRSHTNLPDPISTFNEYTDSLILAPLVPL

SEQ ID NO: 20238 - protein, 581 aa, Jaagsiekte sheep retrovirus
PLGTSDSPVTHADPIDWKSEEPVWVDQWPLTQEKLSAAQQLVQEQLRLGHIEPSTSAWNSPIFVIKKKSGKWRLLQDLRKVNETMMHMGALQPGLPTPSAIPDKSYIIVIDLKDCFYTIPLAPQDCKRFAFSLPSVNFKEPMQRYQWRVLPQGMTNSPTLCQKFVATAIAPVRQRFPQLYLVHYMDDILLAHTDEHLLYQAFSILKQHLSLNGLVIADEKIQTHFPYNYLGFSLYPRVYNTQLVKLQTDHLKTLNDFQKLLGDINWIRPYLKLPTYTLQPLFDILKGDSDPASPRTLSLEGRTALQSIEEAIRQQQITYCDYQRSWGLYILPTPRAPTGVLYQDKPLRWIYLSATPTKHLLPYYELVAKIIAKGRHEAIQYFGMEPPFICVPYALEQQDWLFQFSDNWSIAFANYPGQITHHYPSDKLLQFASSHAFIFPKIVRRQPIPEATLIFTDGSSNGTAALIINHQTYYAQTSFSSAQVVELFAVHQALLTVPTSFNLFTDSSYVVGALQMIETVPIIGTTSPEVLNLFTLIQQVLHCRQHPCFFGHIRAHSTLPGALVQGNHTADVLTKQVFFQS

SEQ ID NO: 20239 - protein, 581 aa, synthetic construct
PLGTSDSPVTHADPIDWKSEEPVWVDQWPLTQEKLSAAQQLVQEQLRLGHIEPSTSAWNSPIFVIKKKSGKWRLLQDLRKVNETMMHMGALQPGLPTPSPIPDKSYIIVIDLKDCFYTIPLAPQDCKRFAFSLPSVNFKEPMQRYQWRVLPQGMTNSPTLCQKFVATAIAPVRQRFPQLYLVHYMDDILLAHTDEHLLYQAFSILKQHLSLNGLVIADEKIQTHFPYNYLGFSLYPRVYNTQLVKLQTDHLKTLNDFQKLLGDINWIRPYLKLPTYTLQPLFDILKGDSDPASPRTLSLEGRTALQSIEEAIRQQQITYCDYQRSWGLYILPTPRAPTGVLYQDKPLRWIYLSATPTKHLLPYYELVAKIIAKGRHEAIQYFGMEPPFICVPYALEQQDWLFQFSDNWSIAFANYPGQITHHYPSDKLLQFASSHAFIFPKIVRRQPIPEATLIFTDGSSNGTAALIINHQTYYAQTSFSSAQVVELFAVHQALLTVPTSFNLFTDSSYVVGALQMIETVPIIGTTSPEVLNLFTLIQQVLHCRQHPCFFGHIRAHSTLPGALVQGNHTADVLTKQVFFQS

SEQ ID NO: 20240 - protein, 793 aa, Koala retrovirus
TLGDQGSRGSDPLPEPRVTLTVEGIPTEFLVNTGAEHSVLTKPMGKMGSKRTVVAGATGSKVYPWTTKRLLKIGQKQVTHSFLVIPECPAPLLGRDLLTKLKAQIQFSTEGPQVTWEDRPAMCLVLNLEEEYRLHEKPVPPSIDPSWLQLFPMVWAEKAGMGLANQVPPVVVELKSDASPVAVRQYPMSKEAREGIRPHIQRFLDLGILVPCQSPWNTPLLPVKKPGTNDYRPVQDLREVNKRVQDIHPTVPNPYNLLSSLPPSHTWYSVLDLKDAFFCLKLHPNSQPLFAFEWRDPEKGNTGQLTWTRLPQGFKNSPTLFDEALHRDLASFRALNPQVVMLQYVDDLLVAAPTYRDCKEGTRRLLQELSKLGYRVSAKKAQLCREEVTYLGYLLKGGKRWLTPARKATVMKIPTPTTPRQVREFLGTAGFCRLWIPGFASLAAPLYPLTREKVPFTWTEAHQEAFGRIKEALLSAPALALPDLTKPFALYVDEKEGVARGVLTQTLGPWRRPVAYLSKKLDPVASGWPTCLKAIAAVALLLKDADKLTLGQNVLVIAPHNLESIVRQPPDRWMTNARMTHYQSLLLNERVSFAPPAILNPATLLPVESDDTPIHICSEILAEETGTRPDLRDQPLPGVPAWYTDGSSFIMDGRRQAGAAIVDNKRTVWASNLPEGTSAQKAELIALTQALRLAEGKSINIYTDSRYAFATAHVHGAIYKQRGLLTSAGKDIKNKEEILALLEAIHLPKRVAIIHCPGHQRGTDPVATGNRKADEAAKQAAQSTRILTETTKN

SEQ ID NO: 20241 - protein, 793 aa, synthetic construct
TLGDQGSRGSDPLPEPRVTLTVEGIPTEFLVNTGAEHSVLTKPMGKMGSKRTVVAGATGSKVYPWTTKRLLKIGQKQVTHSFLVIPECPAPLLGRDLLTKLKAQIQFSTEGPQVTWEDRPAMCLVLNLEEEYRLHEKPVPPSIDPSWLQLFPMVWAEKAGMGLANQVPPVVVELKSDASPVAVRQYPMSKEAREGIRPHIQRFLDLGILVPCQSPWNTPLLPVKKPGTNDYRPVQDLREVNKRVQDIHPTVPNPYNLLSSLPPSHTWYSVLDLKDAFFCLKLHPNSQPLFAFEWRDPEKGNTGQLTWTRLPQGFKNSPTLFNEALHRDLASFRALNPQVVMLQYVDDLLVAAPTYRDCKEGTRRLLQELSKLGYRVSAKKAQLCREEVTYLGYLLKGGKRWLTPARKATVMKIPTPTTPRQVREFLGTAGFCRLWIPGFASLAAPLYPLTRPKVPFTWTEAHQEAFGRIKEALLSAPALALPDLTKPFALYVDEKEGVARGVLTQTLGPWRRPVAYLSKKLDPVASGWPTCLKAIAAVALLLKDADKLTLGQNVLVIAPHNLESIVRQPPDRWMTNARMTHYQSLLLNERVSFAPPAILNPATLLPVESDDTPIHICSEILAEETGTRPDLRDQPLPGVPAWYTDGSSFIMDGRRQAGAAIVDNKRTVWASNLPEGTSAQKAELIALTQALRLAEGKSINIYTDSRYAFATAHVHGAIYKQRGWLTSAGKDIKNKEEILALLEAIHLPKRVAIIHCPGHQRGTDPVATGNRKADEAAKQAAQSTRILTETTKN

SEQ ID NO: 20242 - protein, 793 aa, synthetic construct
TLGDQGSRGSDPLPEPRVTLTVEGIPTEFLVNTGAEHSVLTKPMGKMGSKRTVVAGATGSKVYPWTTKRLLKIGQKQVTHSFLVIPECPAPLLGRDLLTKLKAQIQFSTEGPQVTWEDRPAMCLVLNLEEEYRLHEKPVPPSIDPSWLQLFPMVWAEKAGMGLANQVPPVVVELKSDASPVAVRQYPMSKEAREGIRPHIQRFLDLGILVPCQSPWNTPLLPVKKPGTNDYRPVQDLREVNKRVQDIHPTVPNPYNLLSSLPPSHTWYSVLDLKDAFFCLKLHPNSQPLFAFEWRDPEKGNTGQLTWTRLPQGFKNSPTLFNEALHRDLASFRALNPQVVMLQYVDDLLVAAPTYRDCKEGTRRLLQELSKLGYRVSAKKAQLCREEVTYLGYLLKGGKRWLTPARKATVMKIPTPTTPRQVREFLGKAGFCRLFIPGFASLAAPLYPLTRPKVPFTWTEAHQEAFGRIKEALLSAPALALPDLTKPFALYVDEKEGVARGVLTQTLGPWRRPVAYLSKKLDPVASGWPTCLKAIAAVALLLKDADKLTLGQNVLVIAPHNLESIVRQPPDRWMTNARMTHYQSLLLNERVSFAPPAILNPATLLPVESDDTPIHICSEILAEETGTRPDLRDQPLPGVPAWYTDGSSFIMDGRRQAGAAIVDNKRTVWASNLPEGTSAQKAELIALTQALRLAEGKSINIYTDSRYAFATAHVHGAIYKQRGWLTSAGKDIKNKEEILALLEAIHLPKRVAIIHCPGHQRGTDPVATGNRKADEAAKQAAQSTRILTETTKN

SEQ ID NO: 20243 - protein, 702 aa, Koala retrovirus
LLGRDLLTKLKAQIQFSTEGPQVTWEDRPAMCLVLNLEEEYRLHEKPVPPSIDPSWLQLFPMVWAEKAGMGLANQVPPVVVELKSDASPVAVRQYPMSKEAREGIRPHIQRFLDLGILVPCQSPWNTPLLPVKKPGTNDYRPVQDLREVNKRVQDIHPTVPNPYNLLSSLPPSHTWYSVLDLKDAFFCLKLHPNSQPLFAFEWRDPEKGNTGQLTWTRLPQGFKNSPTLFDEALHRDLASFRALNPQVVMLQYVDDLLVAAPTYRDCKEGTRRLLQELSKLGYRVSAKKAQLCREEVTYLGYLLKGGKRWLTPARKATVMKIPTPTTPRQVREFLGTAGFCRLWIPGFASLAAPLYPLTREKVPFTWTEAHQEAFGRIKEALLSAPALALPDLTKPFALYVDEKEGVARGVLTQTLGPWRRPVAYLSKKLDPVASGWPTCLKAIAAVALLLKDADKLTLGQNVLVIAPHNLESIVRQPPDRWMTNARMTHYQSLLLNERVSFAPPAILNPATLLPVESDDTPIHICSEILAEETGTRPDLRDQPLPGVPAWYTDGSSFIMDGRRQAGAAIVDNKRTVWASNLPEGTSAQKAELIALTQALRLAEGKSINIYTDSRYAFATAHVHGAIYKQRGLLTSAGKDIKNKEEILALLEAIHLPKRVAIIHCPGHQRGTDPVATGNRKADEAAKQAAQSTRILTETTKN

SEQ ID NO: 20244 - protein, 702 aa, synthetic construct
LLGRDLLTKLKAQIQFSTEGPQVTWEDRPAMCLVLNLEEEYRLHEKPVPPSIDPSWLQLFPMVWAEKAGMGLANQVPPVVVELKSDASPVAVRQYPMSKEAREGIRPHIQRFLDLGILVPCQSPWNTPLLPVKKPGTNDYRPVQDLREVNKRVQDIHPTVPNPYNLLSSLPPSHTWYSVLDLKDAFFCLKLHPNSQPLFAFEWRDPEKGNTGQLTWTRLPQGFKNSPTLFNEALHRDLASFRALNPQVVMLQYVDDLLVAAPTYRDCKEGTRRLLQELSKLGYRVSAKKAQLCREEVTYLGYLLKGGKRWLTPARKATVMKIPTPTTPRQVREFLGTAGFCRLWIPGFASLAAPLYPLTRPKVPFTWTEAHQEAFGRIKEALLSAPALALPDLTKPFALYVDEKEGVARGVLTQTLGPWRRPVAYLSKKLDPVASGWPTCLKAIAAVALLLKDADKLTLGQNVLVIAPHNLESIVRQPPDRWMTNARMTHYQSLLLNERVSFAPPAILNPATLLPVESDDTPIHICSEILAEETGTRPDLRDQPLPGVPAWYTDGSSFIMDGRRQAGAAIVDNKRTVWASNLPEGTSAQKAELIALTQALRLAEGKSINIYTDSRYAFATAHVHGAIYKQRGWLTSAGKDIKNKEEILALLEAIHLPKRVAIIHCPGHQRGTDPVATGNRKADEAAKQAAQSTRILTETTKN

SEQ ID NO: 20245 - protein, 702 aa, synthetic construct
LLGRDLLTKLKAQIQFSTEGPQVTWEDRPAMCLVLNLEEEYRLHEKPVPPSIDPSWLQLFPMVWAEKAGMGLANQVPPVVVELKSDASPVAVRQYPMSKEAREGIRPHIQRFLDLGILVPCQSPWNTPLLPVKKPGTNDYRPVQDLREVNKRVQDIHPTVPNPYNLLSSLPPSHTWYSVLDLKDAFFCLKLHPNSQPLFAFEWRDPEKGNTGQLTWTRLPQGFKNSPTLFNEALHRDLASFRALNPQVVMLQYVDDLLVAAPTYRDCKEGTRRLLQELSKLGYRVSAKKAQLCREEVTYLGYLLKGGKRWLTPARKATVMKIPTPTTPRQVREFLGKAGFCRLFIPGFASLAAPLYPLTRPKVPFTWTEAHQEAFGRIKEALLSAPALALPDLTKPFALYVDEKEGVARGVLTQTLGPWRRPVAYLSKKLDPVASGWPTCLKAIAAVALLLKDADKLTLGQNVLVIAPHNLESIVRQPPDRWMTNARMTHYQSLLLNERVSFAPPAILNPATLLPVESDDTPIHICSEILAEETGTRPDLRDQPLPGVPAWYTDGSSFIMDGRRQAGAAIVDNKRTVWASNLPEGTSAQKAELIALTQALRLAEGKSINIYTDSRYAFATAHVHGAIYKQRGWLTSAGKDIKNKEEILALLEAIHLPKRVAIIHCPGHQRGTDPVATGNRKADEAAKQAAQSTRILTETTKN

SEQ ID NO: 20246 - protein, 671 aa, unidentified
TLNLEDEYRLYETSAEPEVSPGSTWLSDFPQAWAETGGMGLAVRQAPLIIPLKATSTPVSIKQYPMSQEAKLGIKPHIQRLLDQGILVPCQSPWNTPLLPVKKPGTNDYRPVQDLREVNKRVEDIHPTVPNPYNLLSGLPPSHRWYTVLDLKDAFFCLRLHPTSQPLFAFEWRDPGMGISGQLTWTRLPQGFKNSPTLFDEALHRDLADFRIQHPDLILLQYVDDILLAATSELDCQQGTRALLLTLGNLGYRASAKKAQLCQKQVKYLGYLLKEGQRWLTEARKETVMGQPTPKTPRQLREFLGTAGFCRLWIPGFAEMAAPLYPLTKTGTLFNWGPDQQKAYQEIKQALLTAPALGLPDLTKPFELFVDEKQGYAKGVLTQKLGPWRRPVAYLSKKLDPVAAGWPPCLRMVAAIAVLRKDAGKLTMGQPLVILAPHAVEALVKQPPDRWLSNARMTHYQAMLLDTDRVQFGPVVALNPATLLPLPEEGAPHDCLEILAETHGTRPDLTDQPIPDADHTWYTDGSSFLQEGQRKAGAAVTTETEVIWARALPAGTSAQRAELIALTQALKMAEGKRLNVYTDSRYAFATAHIHGEIYRRRGLLTSEGREIKNKSEILALLKALFLPKRLSIIHCLGHQKGDSAEARGNRLADQAAREAAIKTPPDTSTLL

SEQ ID NO: 20247 - protein, 671 aa, synthetic construct
TLNLEDEYRLYETSAEPEVSPGSTWLSDFPQAWAETGGMGLAVRQAPLIIPLKATSTPVSIKQYPMSQEAKLGIKPHIQRLLDQGILVPCQSPWNTPLLPVKKPGTNDYRPVQDLREVNKRVEDIHPTVPNPYNLLSGLPPSHRWYTVLDLKDAFFCLRLHPTSQPLFAFEWRDPGMGISGQLTWTRLPQGFKNSPTLFNEALHRDLADFRIQHPDLILLQYVDDILLAATSELDCQQGTRALLLTLGNLGYRASAKKAQLCQKQVKYLGYLLKEGQRWLTEARKETVMGQPTPKTPRQLREFLGTAGFCRLWIPGFAEMAAPLYPLTKPGTLFNWGPDQQKAYQEIKQALLTAPALGLPDLTKPFELFVDEKQGYAKGVLTQKLGPWRRPVAYLSKKLDPVAAGWPPCLRMVAAIAVLRKDAGKLTMGQPLVILAPHAVEALVKQPPDRWLSNARMTHYQAMLLDTDRVQFGPVVALNPATLLPLPEEGAPHDCLEILAETHGTRPDLTDQPIPDADHTWYTDGSSFLQEGQRKAGAAVTTETEVIWARALPAGTSAQRAELIALTQALKMAEGKRLNVYTDSRYAFATAHIHGEIYRRRGWLTSEGREIKNKSEILALLKALFLPKRLSIIHCLGHQKGDSAEARGNRLADQAAREAAIKTPPDTSTLL

SEQ ID NO: 20248 - protein, 671 aa, synthetic construct
TLNLEDEYRLYETSAEPEVSPGSTWLSDFPQAWAETGGMGLAVRQAPLIIPLKATSTPVSIKQYPMSQEAKLGIKPHIQRLLDQGILVPCQSPWNTPLLPVKKPGTNDYRPVQDLREVNKRVEDIHPTVPNPYNLLSGLPPSHRWYTVLDLKDAFFCLRLHPTSQPLFAFEWRDPGMGISGQLTWTRLPQGFKNSPTLFNEALHRDLADFRIQHPDLILLQYVDDILLAATSELDCQQGTRALLLTLGNLGYRASAKKAQLCQKQVKYLGYLLKEGQRWLTEARKETVMGQPTPKTPRQLREFLGKAGFCRLFIPGFAEMAAPLYPLTKPGTLFNWGPDQQKAYQEIKQALLTAPALGLPDLTKPFELFVDEKQGYAKGVLTQKLGPWRRPVAYLSKKLDPVAAGWPPCLRMVAAIAVLRKDAGKLTMGQPLVILAPHAVEALVKQPPDRWLSNARMTHYQAMLLDTDRVQFGPVVALNPATLLPLPEEGAPHDCLEILAETHGTRPDLTDQPIPDADHTWYTDGSSFLQEGQRKAGAAVTTETEVIWARALPAGTSAQRAELIALTQALKMAEGKRLNVYTDSRYAFATAHIHGEIYRRRGWLTSEGREIKNKSEILALLKALFLPKRLSIIHCLGHQKGDSAEARGNRLADQAAREAAIKTPPDTSTLL

SEQ ID NO: 20249 - protein, 671 aa, Murine leukemia virus
TLGIEDEYRLHETSTEPDVSLGSTWLSDFPQAWAETGGMGLAVRQAPLIIPLKATSTPVSIQQYPMSHEARLGIKPHIQRLLDQGILVPCQSPWNTPLLPVKKPGTNDYRPVQDLREVNKRVEDIHPTVPNPYNLLSGLPPSHQWYTVLDLKDAFFCLRLHPTSQPLFAFEWRDPGMGISGQLTWTRLPQGFKNSPTLFDEALHRDLADFRIQHPDLILLQYVDDILLAATSELDCQQGTRALLQTLGDLGYRASAKKAQICQKQVKYLGYLLREGQRWLTEARKETVMGQPVPKTPRQLREFLGTAGFCRLWIPGFAEMAAPLYPLTKTGTLFSWGPDQQKAYQEIKQALLTAPALGLPDLTKPFELFVDEKQGYAKGVLTQKLGPWRRPVAYLSKKLDPVAAGWPPCLRMVAAIAVLTKDAGKLTMGQPLVILAPHAVEALVKQPPDRWLSNARMTHYQAMLLDTDRVQFGPVVALNPATLLPLPEEGAPHDCLEILAETHGTRPDLTDQPIPDADHTWYTDGSSFLQEGQRKAGAAVTTETEVIWAGALPAGTSAQRAELIALTQALKMAEGKRLNVYTDSRYAFATAHIHGEIYRRRGLLTSEGREIKNKSEILALLKALFLPKRLSIIHCLGHQKGDSAEARGNRLADQAAREAAIKTPPDTSTLL

SEQ ID NO: 20250 - protein, 671 aa, synthetic construct
TLGIEDEYRLHETSTEPDVSLGSTWLSDFPQAWAETGGMGLAVRQAPLIIPLKATSTPVSIQQYPMSHEARLGIKPHIQRLLDQGILVPCQSPWNTPLLPVKKPGTNDYRPVQDLREVNKRVEDIHPTVPNPYNLLSGLPPSHQWYTVLDLKDAFFCLRLHPTSQPLFAFEWRDPGMGISGQLTWTRLPQGFKNSPTLFNEALHRDLADFRIQHPDLILLQYVDDILLAATSELDCQQGTRALLQTLGDLGYRASAKKAQICQKQVKYLGYLLREGQRWLTEARKETVMGQPVPKTPRQLREFLGTAGFCRLWIPGFAEMAAPLYPLTKPGTLFSWGPDQQKAYQEIKQALLTAPALGLPDLTKPFELFVDEKQGYAKGVLTQKLGPWRRPVAYLSKKLDPVAAGWPPCLRMVAAIAVLTKDAGKLTMGQPLVILAPHAVEALVKQPPDRWLSNARMTHYQAMLLDTDRVQFGPVVALNPATLLPLPEEGAPHDCLEILAETHGTRPDLTDQPIPDADHTWYTDGSSFLQEGQRKAGAAVTTETEVIWAGALPAGTSAQRAELIALTQALKMAEGKRLNVYTDSRYAFATAHIHGEIYRRRGWLTSEGREIKNKSEILALLKALFLPKRLSIIHCLGHQKGDSAEARGNRLADQAAREAAIKTPPDTSTLL

SEQ ID NO: 20251 - protein, 671 aa, synthetic construct
LGIEDEYRLHETSTEPDVSLGSTWLSDFPQAWAETGGMGLAVRQAPLIIPLKATSTPVSIQQYPMSHEARLGIKPHIQRLLDQGILVPCQSPWNTPLLPVKKPGTNDYRPVQDLREVNKRVEDIHPTVPNPYNLLSGLPPSHQWYTVLDLKDAFFCLRLHPTSQPLFAFEWRDPGMGISGQLTWTRLPQGFKNSPTLFNEALHRDLADFRIQHPDLILLQYVDDILLAATSELDCQQGTRALLQTLGDLGYRASAKKAQICQKQVKYLGYLLREGQRWLTEARKETVMGQPVPKTPRQLREFLGKAGFCRLFIPGFAEMAAPLYPLTKPGTLFSWGPDQQKAYQEIKQALLTAPALGLPDLTKPFELFVDEKQGYAKGVLTQKLGPWRRPVAYLSKKLDPVAAGWPPCLRMVAAIAVLTKDAGKLTMGQPLVILAPHAVEALVKQPPDRWLSNARMTHYQAMLLDTDRVQFGPVVALNPATLLPLPEEGAPHDCLEILAETHGTRPDLTDQPIPDADHTWYTDGSSFLQEGQRKAGAAVTTETEVIWAGALPAGTSAQRAELIALTQALKMAEGKRLNVYTDSRYAFATAHIHGEIYRRRGWLTSEGREIKNKSEILALLKALFLPKRLSIIHCLGHQKGDSAEARGNRLADQAAREAAIKTPPDTSTLLI

SEQ ID NO: 20252 - protein, 671 aa, unidentified
TLNIEDEYRLHETSKEPDVSLGSTWLSDFPQAWAETGGMGLAVRQAPLIIPLKATSTPVSIKQYPMSQEARLGIKPHIQRLLDQGILVPCQSPWNTPLLPVKKPGTNDYRPVQDLREVNKRVEDIHPTVPNPYNLLSGLPPSHQWYTVLDLKDAFFCLRLHPTSQPLFAFEWRDPEMGISGQLTWTRLPQGFKNSPTLFDEALHRDLAGFRIQHPDLILLQYVDDLLLAATSELDCQQGTRALLQTLGDLGYRASAKKAQICQKQVKYLGYLLKEGQRWLTEARKETVMGQPIPKTPRQLREFLGTAGFCRLWIPGFAEMAAPLYPLTKTGTLFNWGPDQQKAFQEIKQALLTAPALGLPDLTKPFELFVDEKQGYAKGVLTQKLGPWRRPVAYLSKKLDPVAAGWPPCLRMVAAIAVLTKDAGKLTMGQPLVILAPHAVEALVKQPPDRWLSNARMTHYQALLLDTDRVQFGPVVALNPATLLPLPEEGLQHDCLDILAEAHGTRSDLMDQPLPDADHTWYTDGSSFLQEGQRKAGAAVTTETEVIWARALPAGTSAQRAELIALTQALKMAEGKKLNVYTDSRYAFATAHIHGEIYRRRGLLTSEGKEIKNKDEILALLKALFLPKRLSIIHCPGHQKGNSAEARGNRMADQAAREVATRETPETSTLL

SEQ ID NO: 20253 - protein, 671 aa, synthetic construct
TLNIEDEYRLHETSKEPDVSLGSTWLSDFPQAWAETGGMGLAVRQAPLIIPLKATSTPVSIKQYPMSQEARLGIKPHIQRLLDQGILVPCQSPWNTPLLPVKKPGTNDYRPVQDLREVNKRVEDIHPTVPNPYNLLSGLPPSHQWYTVLDLKDAFFCLRLHPTSQPLFAFEWRDPEMGISGQLTWTRLPQGFKNSPTLFNEALHRDLAGFRIQHPDLILLQYVDDLLLAATSELDCQQGTRALLQTLGDLGYRASAKKAQICQKQVKYLGYLLKEGQRWLTEARKETVMGQPIPKTPRQLREFLGTAGFCRLWIPGFAEMAAPLYPLTKPGTLFNWGPDQQKAFQEIKQALLTAPALGLPDLTKPFELFVDEKQGYAKGVLTQKLGPWRRPVAYLSKKLDPVAAGWPPCLRMVAAIAVLTKDAGKLTMGQPLVILAPHAVEALVKQPPDRWLSNARMTHYQALLLDTDRVQFGPVVALNPATLLPLPEEGLQHDCLDILAEAHGTRSDLMDQPLPDADHTWYTDGSSFLQEGQRKAGAAVTTETEVIWARALPAGTSAQRAELIALTQALKMAEGKKLNVYTDSRYAFATAHIHGEIYRRRGWLTSEGKEIKNKDEILALLKALFLPKRLSIIHCPGHQKGNSAEARGNRMADQAAREVATRETPETSTLL

SEQ ID NO: 20254 - protein, 671 aa, synthetic construct
TLNIEDEYRLHETSKEPDVSLGSTWLSDFPQAWAETGGMGLAVRQAPLIIPLKATSTPVSIKQYPMSQEARLGIKPHIQRLLDQGILVPCQSPWNTPLLPVKKPGTNDYRPVQDLREVNKRVEDIHPTVPNPYNLLSGLPPSHQWYTVLDLKDAFFCLRLHPTSQPLFAFEWRDPEMGISGQLTWTRLPQGFKNSPTLFNEALHRDLAGFRIQHPDLILLQYVDDLLLAATSELDCQQGTRALLQTLGDLGYRASAKKAQICQKQVKYLGYLLKEGQRWLTEARKETVMGQPIPKTPRQLREFLGKAGFCRLFIPGFAEMAAPLYPLTKPGTLFNWGPDQQKAFQEIKQALLTAPALGLPDLTKPFELFVDEKQGYAKGVLTQKLGPWRRPVAYLSKKLDPVAAGWPPCLRMVAAIAVLTKDAGKLTMGQPLVILAPHAVEALVKQPPDRWLSNARMTHYQALLLDTDRVQFGPVVALNPATLLPLPEEGLQHDCLDILAEAHGTRSDLMDQPLPDADHTWYTDGSSFLQEGQRKAGAAVTTETEVIWARALPAGTSAQRAELIALTQALKMAEGKKLNVYTDSRYAFATAHIHGEIYRRRGWLTSEGKEIKNKDEILALLKALFLPKRLSIIHCPGHQKGNSAEARGNRMADQAAREVATRETPETSTLL

SEQ ID NO: 20255 - protein, 671 aa, unidentified
TLNIEDEYRLHETSKGPDVPLGSTWLSDFPQAWAETGGMGLAFRQAPLIISLKATSTPVSIKQYPMSQEARLGIKPHIQRLLDQGILVPCQSPWNTPLLPVKKPGTNDYRPVQDLREVNKRVEDIHPTVPNPYNLLSGLPPSHQWYTVLDLKDAFFCLRLHPTSQSLFAFEWKDPEMGISGQLTWTRLPQGFKNSPTLFDEALHRDLADFRIQHPDLILLQYVDDLLLAATSELDCQQGTRALLQTLGDLGYRASAKKAQICQKQVKYLGYLLKEGQRWLTEARKETVMGQPTPKTPRQLREFLGTAGLCRLWIPGFAEMAAPLYPLTKTGTLFKWGPDQQKAYQEIKQALLTAPALGLPDLTKPFELFVDEKQGYAKGVLTQKLGPWRRPVAYLSKKLDPVAAGWPPCLRMVAAIAVLTKDVGKLTMGQPLVILAPHAVEALVKQPPDRWLSNARMTHYQALLLDTDRVQFGPIVALNPATLLPLPEEGLQHDCLDILAEAHGTRPDLTDQPLPDADHTWYTDGSSFLQEGQRRAGAAVTTETEVIWAKALPAGTSAQRAELIALTQALKMAAGKKLNVYTDSRYAFATAHIHGEIYRRRGLLTSEGKEIKNKDEILALLKALFLPKRLSIIHCPGHQKGNHAEARGNRMADQAAREVATRETPETSTLL

SEQ ID NO: 20256 - protein, 671 aa, synthetic construct
TLNIEDEYRLHETSKGPDVPLGSTWLSDFPQAWAETGGMGLAFRQAPLIISLKATSTPVSIKQYPMSQEARLGIKPHIQRLLDQGILVPCQSPWNTPLLPVKKPGTNDYRPVQDLREVNKRVEDIHPTVPNPYNLLSGLPPSHQWYTVLDLKDAFFCLRLHPTSQSLFAFEWKDPEMGISGQLTWTRLPQGFKNSPTLFNEALHRDLADFRIQHPDLILLQYVDDLLLAATSELDCQQGTRALLQTLGDLGYRASAKKAQICQKQVKYLGYLLKEGQRWLTEARKETVMGQPTPKTPRQLREFLGTAGLCRLWIPGFAEMAAPLYPLTKPGTLFKWGPDQQKAYQEIKQALLTAPALGLPDLTKPFELFVDEKQGYAKGVLTQKLGPWRRPVAYLSKKLDPVAAGWPPCLRMVAAIAVLTKDVGKLTMGQPLVILAPHAVEALVKQPPDRWLSNARMTHYQALLLDTDRVQFGPIVALNPATLLPLPEEGLQHDCLDILAEAHGTRPDLTDQPLPDADHTWYTDGSSFLQEGQRRAGAAVTTETEVIWAKALPAGTSAQRAELIALTQALKMAAGKKLNVYTDSRYAFATAHIHGEIYRRRGWLTSEGKEIKNKDEILALLKALFLPKRLSIIHCPGHQKGNHAEARGNRMADQAAREVATRETPETSTLL

SEQ ID NO: 20257 - protein, 671 aa, synthetic construct
TLNIEDEYRLHETSKGPDVPLGSTWLSDFPQAWAETGGMGLAFRQAPLIISLKATSTPVSIKQYPMSQEARLGIKPHIQRLLDQGILVPCQSPWNTPLLPVKKPGTNDYRPVQDLREVNKRVEDIHPTVPNPYNLLSGLPPSHQWYTVLDLKDAFFCLRLHPTSQSLFAFEWKDPEMGISGQLTWTRLPQGFKNSPTLFNEALHRDLADFRIQHPDLILLQYVDDLLLAATSELDCQQGTRALLQTLGDLGYRASAKKAQICQKQVKYLGYLLKEGQRWLTEARKETVMGQPTPKTPRQLREFLGKAGLCRLFIPGFAEMAAPLYPLTKPGTLFKWGPDQQKAYQEIKQALLTAPALGLPDLTKPFELFVDEKQGYAKGVLTQKLGPWRRPVAYLSKKLDPVAAGWPPCLRMVAAIAVLTKDVGKLTMGQPLVILAPHAVEALVKQPPDRWLSNARMTHYQALLLDTDRVQFGPIVALNPATLLPLPEEGLQHDCLDILAEAHGTRPDLTDQPLPDADHTWYTDGSSFLQEGQRRAGAAVTTETEVIWAKALPAGTSAQRAELIALTQALKMAAGKKLNVYTDSRYAFATAHIHGEIYRRRGWLTSEGKEIKNKDEILALLKALFLPKRLSIIHCPGHQKGNHAEARGNRMADQAAREVATRETPETSTLL

SEQ ID NO: 20258 - protein, 671 aa, synthetic construct
TLNIEDEYRLHETSKGPDVPLGSTWLSDFPQAWAETGGMGLAVRQAPLIIPLKATSTPVSIKQYPMSQEARLGIKPHIQRLLDQGILVPCQSPWNTPLLPVKKPGTNDYRPVQDLREVNKRVEDIHPTVPNPYNLLSGLPPSHQWYTVLDLKDAFFCLRLHPTSQSLFAFEWRDPEMGISGQLTWTRLPQGFKNSPTLFNEALHRDLADFRIQHPDLILLQYVDDLLLAATSELDCQQGTRALLQTLGDLGYRASAKKAQICQKQVKYLGYLLKEGQRWLTEARKETVMGQPTPKTPRQLREFLGTAGFCRLWIPGFAEMAAPLYPLTKPGTLFEWGPDQQKAYQEIKQALLTAPALGLPDLTKPFELFVDEKQGYAKGVLTQKLGPWRRPVAYLSKKLDPVAAGWPPCLRMVAAIAVLTKDAGKLTMGQPLVILAPHAVEALVKQPPDRWLSNARMTHYQALLLDTDRVQFGPIVALNPATLLPLPEEGLQHDCLDILAEAHGTRPDLTDQPLPDADHTWYTDGSSFLQEGQRKAGAAVTTETEVVWAKALPAGTSAQRAELIALTQALKMAEGKKLNVYTDSRYAFATAHIHGEIYRRRGWLTSEGKEIKNKDEILALLKALFLPKRLSIIHCPGHQKGNRAEARGNRMADQAAREVATRETPETSTLL

SEQ ID NO: 20259 - protein, 671 aa, synthetic construct
TLNIEDEYRLHETSKGPDVPLGSTWLSDFPQAWAETGGMGLAVRQAPLIIPLKATSTPVSIKQYPMSQEARLGIKPHIQRLLDQGILVPCQSPWNTPLLPVKKPGTNDYRPVQDLREVNKRVEDIHPTVPNPYNLLSGLPPSHQWYTVLDLKDAFFCLRLHPTSQSLFAFEWRDPEMGISGQLTWTRLPQGFKNSPTLFNEALHRDLADFRIQHPDLILLQYVDDLLLAATSELDCQQGTRALLQTLGDLGYRASAKKAQICQKQVKYLGYLLKEGQRWLTEARKETVMGQPTPKTPRQLREFLGKAGFCRLFIPGFAEMAAPLYPLTKPGTLFEWGPDQQKAYQEIKQALLTAPALGLPDLTKPFELFVDEKQGYAKGVLTQKLGPWRRPVAYLSKKLDPVAAGWPPCLRMVAAIAVLTKDAGKLTMGQPLVILAPHAVEALVKQPPDRWLSNARMTHYQALLLDTDRVQFGPIVALNPATLLPLPEEGLQHDCLDILAEAHGTRPDLTDQPLPDADHTWYTDGSSFLQEGQRKAGAAVTTETEVVWAKALPAGTSAQRAELIALTQALKMAEGKKLNVYTDSRYAFATAHIHGEIYRRRGWLTSEGKEIKNKDEILALLKALFLPKRLSIIHCPGHQKGNRAEARGNRMADQAAREVATRETPETSTLL

SEQ ID NO: 20260 - protein, 671 aa, Murine leukemia virus; identical to SEQ ID NO: 3

SEQ ID NO: 20261 - protein, 671 aa, synthetic construct
TLNIEDEHRLHETSKEPDVSLGSTWLSDFPQAWAETGGMGLAVRQAPLIIPLKATSTPVSIKQYPMSQEARLGIKPHIQRLLDQGILVPCQSPWNTPLLPVKKPGTNDYRPVQDLREVNKRVEDIHPTVPNPYNLLSGLPPSHQWYTVLDLKDAFFCLRLHPTSQPLFAFEWRDPEMGISGQLTWTRLPQGFKNSPTLFNEALHRDLADFRIQHPDLILLQYVDDLLLAATSELDCQQGTRALLQTLGNLGYRASAKKAQICQKQVKYLGYLLKEGQRWLTEARKETVMGQPTPKTPRQLREFLGTAGFCRLWIPGFAEMAAPLYPLTKPGTLFNWGPDQQKAYQEIKQALLTAPALGLPDLTKPFELFVDEKQGYAKGVLTQKLGPWRRPVAYLSKKLDPVAAGWPPCLRMVAAIAVLTKDAGKLTMGQPLVILAPHAVEALVKQPPDRWLSNARMTHYQALLLDTDRVQFGPVVALNPATLLPLPEEGLQHNCLDILAEAHGTRPDLTDQPLPDADHTWYTDGSSLLQEGQRKAGAAVTTETEVIWAKALPAGTSAQRAELIALTQALKMAEGKKLNVYTDSRYAFATAHIHGEIYRRRGWLTSEGKEIKNKDEILALLKALFLPKRLSIIHCPGHQKGHSAEARGNRMADQAARKAAITETPDTSTLL

SEQ ID NO: 20262 - protein, 671 aa, synthetic construct; identical to SEQ ID NO: 16707

SEQ ID NO: 20263 - protein, 691 aa, synthetic construct
TLNIEDEYRLHETSKEPDVSLGSTWLSDFPQAWAETGGMGLAVRQAPLIIPLKATSTPVSIKQYPMSQEARLGIKPHIQRLLDQGILVPCQSPWNTPLLPVKKPGTNDYRPVQDLREVNKRVEDIHPTVPNPYNLLSGLPPSHQWYTVLDLKDAFFCLRLHPTSQPLFAFEWRDPEMGISGQLTWTRLPQGFKNSPTLFNEALHRDLADFRIQHPDLILLQYVDDLLLAATSELDCQQGTRALLQTLGNLGYRASAKKAQICQKQVKYLGYLLKEGQRWLTEARKETVMGQPTPKTPRQLREFLGKAGFCRLFIPGFAEMAAPLYPLTKPGTLFNWGPDQQKAYQEIKQALLTAPALGLPDLTKPFELFVDEKQGYAKGVLTQKLGPWRRPVAYLSKKLDPVAAGWPPCLRMVAAIAVLTKDAGKLTMGQPLVILAPHAVEALVKQPPDRWLSNARMTHYQALLLDTDRVQFGPVVALNPATLLPLPEEGLQHNCLDILAEAHGTRPDLTDQPLPDADHTWYTDGSSLLQEGQRKAGAAVTTETEVIWAKALPAGTSAQRAELIALTQALKMAEGKKLNVYTDSRYAFATAHIHGEIYRRRGWLTSEGKEIKNKDEILALLKALFLPKRLSIIHCPGHQKGHSAEARGNRMADQAARKAAITETPDTSTLLIENSSPSGGSKRTADGSEFE

SEQ ID NO: 20264 - protein, 671 aa, unidentified
TLNIEDEYRLHEISTEPDVSPGSTWLSDFPQAWAETGGMGLAVRQAPLIIPLKATSTPVSIKQYPMSQEAKLGIKPHIQRLLDQGILVPCQSPWNTPLLPVKKPGTNDYRPVQGLREVNKRVEDIHPTVPNPYNLLSGLPTSHRWYTVLDLKDAFFCLRLHPTSQPLFASEWRDPGMGISGQLTWTRLPQGFKNSPTLFDEALHRGLADFRIQHPDLILLQYVDDLLLAATSELDCQQGTRALLKTLGNLGYRASAKKAQICQKQVKYLGYLLREGQRWLTEARKETVMGQPTPKTPRQLREFLGTAGFCRLWIPRFAEMAAPLYPLTKTGTLFNWGPDQQKAYHEIKQALLTAPALGLPDLTKPFELFVDEKQGYAKGVLTQKLGPWRRPVAYLSKKLDPVAAGWPPCLRMVAAIAVLTKDAGKLTMGQPLVILAPHAVEALVKQPPDRWLSNARMTHYQAMLLDTDRVQFGPVVALNPATLLPLPEEGAPHDCLEILAETHGTEPDLTDQPIPDADHTWYTDGSSFLQEGQRKAGAAVTTETEVIWARALPAGTSAQRAELIALTQALKMAEGKRLNVYTDSRYAFATAHIHGEIYKRRGLLTSEGREIKNKSEILALLKALFLPKRLSIIHCLGHQKGDSAEARGNRLADQAAREAAIKTPPDTSTLL

SEQ ID NO: 20265 - protein, 671 aa, synthetic construct
TLNIEDEYRLHEISTEPDVSPGSTWLSDFPQAWAETGGMGLAVRQAPLIIPLKATSTPVSIKQYPMSQEAKLGIKPHIQRLLDQGILVPCQSPWNTPLLPVKKPGTNDYRPVQGLREVNKRVEDIHPTVPNPYNLLSGLPTSHRWYTVLDLKDAFFCLRLHPTSQPLFASEWRDPGMGISGQLTWTRLPQGFKNSPTLFNEALHRGLADFRIQHPDLILLQYVDDLLLAATSELDCQQGTRALLKTLGNLGYRASAKKAQICQKQVKYLGYLLREGQRWLTEARKETVMGQPTPKTPRQLREFLGTAGFCRLWIPRFAEMAAPLYPLTKPGTLFNWGPDQQKAYHEIKQALLTAPALGLPDLTKPFELFVDEKQGYAKGVLTQKLGPWRRPVAYLSKKLDPVAAGWPPCLRMVAAIAVLTKDAGKLTMGQPLVILAPHAVEALVKQPPDRWLSNARMTHYQAMLLDTDRVQFGPVVALNPATLLPLPEEGAPHDCLEILAETHGTEPDLTDQPIPDADHTWYTDGSSFLQEGQRKAGAAVTTETEVIWARALPAGTSAQRAELIALTQALKMAEGKRLNVYTDSRYAFATAHIHGEIYKRRGWLTSEGREIKNKSEILALLKALFLPKRLSIIHCLGHQKGDSAEARGNRLADQAAREAAIKTPPDTSTLL

SEQ ID NO: 20266 - protein, 691 aa, Mouse mammary tumor virus
WVQEISDSRPMLHIYLNGRRFLGLLNTGADKTCIAGRDWPANWPIHQTESSLQGLGMACGVARSSQPLRWQHEDKSGIIHPFVIPTLPFTLWGRDIMKDIKVRLMTDSPDDSQDLMIGAIESNLFADQISWKSDQPVWLNQWPLKQEKLQALQQLVTEQLQLGHLEESNSPWNTPVFVIKKKSGKWRLLQDLRAVNATMHDMGALQPGLPSPVAVPKGWEIIIIDLQDCFFNIKLHPEDCKRFAFSVPSPNFKRPYQRFQWKVLPQGMKNSPTLCQKFVDKAILTVRDKYQDSYIVHYMDDILLAHPSRSIVDEILTSMIQALNKHGLVVSTEKIQKYDNLKYLGTHIQGDSVSYQKLQIRTDKLRTLNDFQKLLGNINWIRPFLKLTTGELKPLFEILNGDSNPISTRKLTPEACKALQLMNERLSTARVKRLDLSQPWSLCILKTEYTPTACLWQDGVVEWIHLPHISPKVITPYDIFCTQLIIKGRHRSKELFSKDPDYIVVPYTKVQFDLLLQEKEDWPISLLGFLGEVHFHLPKDPLLTFTLQTAIIFPHMTSTTPLEKGIVIFTDGSANGRSVTYIQGREPIIKENTQNTAQQAEIVAVITAFEEVSQPFNLYTDSKYVTGLFPEIETATLSPRTKIYTELKHLQRLIHKRQEKFYIGHIRGHTGLPGPLAQGNAYADSLTRILT

SEQ ID NO: 20267 - protein, 691 aa, synthetic construct
WVQEISDSRPMLHIYLNGRRFLGLLNTGADKTCIAGRDWPANWPIHQTESSLQGLGMACGVARSSQPLRWQHEDKSGIIHPFVIPTLPFTLWGRDIMKDIKVRLMTDSPDDSQDLMIGAIESNLFADQISWKSDQPVWLNQWPLKQEKLQALQQLVTEQLQLGHLEESNSPWNTPVFVIKKKSGKWRLLQDLRAVNATMHDMGALQPGLPSPVAVPKGWEIIIIDLQDCFFNIKLHPEDCKRFAFSVPSPNFKRPYQRFQWKVLPQGMKNSPTLCQKFVDKAILTVRDKYQDSYIVHYMDDILLAHPSRSIVDEILTSMIQALNKHGLVVSTEKIQKYDNLKYLGTHIQGDSVSYQKLQIRTDKLRTLNDFQKLLGNINWIRPFLKLTTGELKPLFEILNPDSNPISTRKLTPEACKALQLMNERLSTARVKRLDLSQPWSLCILKTEYTPTACLWQDGVVEWIHLPHISPKVITPYDIFCTQLIIKGRHRSKELFSKDPDYIVVPYTKVQFDLLLQEKEDWPISLLGFLGEVHFHLPKDPLLTFTLQTAIIFPHMTSTTPLEKGIVIFTDGSANGRSVTYIQGREPIIKENTQNTAQQAEIVAVITAFEEVSQPFNLYTDSKYVTGLFPEIETATLSPRTKIYTELKHLQRLIHKRQEKFYIGHIRGHTGLPGPLAQGNAYADSLTRILT

SEQ ID NO: 20268 - protein, 691 aa, synthetic construct
VQEISDSRPMLHIYLNGRRFLGLLDTGADKTCIAGRDWPANWPIHQTESSLQGLGMACGVARSSQPLRWQHEDKSGIIHPFVIPTLPFTLWGRDIMKDIKVRLMTDSPDDSQDLMIGAIESNLFADQISWKSDQPVWLNQWPLKQEKLQALQQLVTEQLQLGHLEESNSPWNTPVFVIKKKSGKWRLLQDLRAVNATMHDMGALQPGLPSPVAVPKGWEIIIIDLQDCFFNIKLHPEDCKRFAFSVPSPNFKRPYQRFQWKVLPQGMKNSPTLCQKFVDKAILTVRDKYQDSYIVHYMDDILLAHPSRSIVDEILTSMIQALNKHGLVVSTEKIQKYDNLKYLGTHIQGDSVSYQKLQIRTDKLRTLNDFQKLLGNINWIRPFLKLTTGELKPLFEILNPDSNPISTRKLTPEACKALQLMNERLSTARVKRLDLSQPWSLCILKTEYTPTACLWQDGVVEWIHLPHISPKVITPYDIFCTQLIIKGRHRSKELFSKDPDYIVVPYTKVQFDLLLQEKEDWPISLLGFLGEVHFHLPKDPLLTFTLQTAIIFPHMTSTTPLEKGIVIFTDGSANGRSVTYIQGREPIIKENTQNTAQQAEIVAVITAFEEVSQPFNLYTDSKYVTGLFPEIETATLSPRTKIYTELKHLQRLIHKRQEKFYIGHIRGHTGLPGPLAQGNAYADSLTRILTA

SEQ ID NO: 20269 - protein, 691 aa, synthetic construct
WVQEISDSRPMLHIYLNGRRFLGLLNTGADKTCIAGRDWPANWPIHQTESSLQGLGMACGVARSSQPLRWQHEDKSGIIHPFVIPTLPFTLWGRDIMKDIKVRLMTDSPDDSQDLMIGAIESNLFADQISWKSDQPVWLNQWPLKQEKLQALQQLVTEQLQLGHLEESNSPWNTPVFVIKKKSGKWRLLQDLRAVNATMHDMGALQPGLPSPVAPPKGWEIIIIDLQDCFFNIKLHPEDCKRFAFSVPSPNFKRPYQRFQWKVLPQGMKNSPTLCQKFVDKAILTVRDKYQDSYIVHYMDDILLAHPSRSIVDEILTSMIQALNKHGLVVSTEKIQKYDNLKYLGTHIQGDSVSYQKLQIRTDKLRTLNDFQKLLGNINWIRPFLKLTTGELKPLFEILNPDSNPISTRKLTPEACKALQLMNERLSTARVKRLDLSQPWSLCILKTEYTPTACLWQDGVVEWIHLPHISPKVITPYDIFCTQLIIKGRHRSKELFSKDPDYIVVPYTKVQFDLLLQEKEDWPISLLGFLGEVHFHLPKDPLLTFTLQTAIIFPHMTSTTPLEKGIVIFTDGSANGRSVTYIQGREPIIKENTQNTAQQAEIVAVITAFEEVSQPFNLYTDSKYVTGLFPEIETATLSPRTKIYTELKHLQRLIHKRQEKFYIGHIRGHTGLPGPLAQGNAYADSLTRILT

SEQ ID NO: 20270 - protein, 691 aa, synthetic construct
VQEISDSRPMLHIYLNGRRFLGLLDTGADKTCIAGRDWPANWPIHQTESSLQGLGMACGVARSSQPLRWQHEDKSGIIHPFVIPTLPFTLWGRDIMKDIKVRLMTDSPDDSQDLMIGAIESNLFADQISWKSDQPVWLNQWPLKQEKLQALQQLVTEQLQLGHLEESNSPWNTPVFVIKKKSGKWRLLQDLRAVNATMHDMGALQPGLPSPPAVPKGWEIIIIDLQDCFFNIKLHPEDCKRFAFSVPSPNFKRPYQRFQWKVLPQGMKNSPTLCQKFVDKAILTVRDKYQDSYIVHYMDDILLAHPSRSIVDEILTSMIQALNKHGLVVSTEKIQKYDNLKYLGTHIQGDSVSYQKLQIRTDKLRTLNDFQKLLGNINWIRPFLKLTTGELKPLFEILNPDSNPISTRKLTPEACKALQLMNERLSTARVKRLDLSQPWSLCILKTEYTPTACLWQDGVVEWIHLPHISPKVITPYDIFCTQLIIKGRHRSKELFSKDPDYIVVPYTKVQFDLLLQEKEDWPISLLGFLGEVHFHLPKDPLLTFTLQTAIIFPHMTSTTPLEKGIVIFTDGSANGRSVTYIQGREPIIKENTQNTAQQAEIVAVITAFEEVSQPFNLYTDSKYVTGLFPEIETATLSPRTKIYTELKHLQRLIHKRQEKFYIGHIRGHTGLPGPLAQGNAYADSLTRILTA

SEQ ID NO: 20271 - protein, 691 aa, Mouse mammary tumor virus
VQEISDSRPMLHIYLNGRRFLGLLDTGADKTCIAGRDWPANWPIHQTESSLQGLGMACGVARSSQPLRWQHEDKSGIIHPFVIPTLPFTLWGRDIMKDIKVRLMTDSPDDSQDLMIGAIESNLFADQISWKSDQPVWLNQWPLKQEKLQALQQLVTEQLQLGHLEESNSPWNTPVFVIKKKSGKWRLLQDLRAVNATMHDMGALQPGLPSPVAVPKGWEIIIIDLQDCFFNIKLHPEDCKRFAFSVPSPNFKRPYQRFQWKVLPQGMKNSPTLCQKFVDKAILTVRDKYQDSYIVHYMDDILLAHPSRSIVDEILTSMIQALNKHGLVVSTEKIQKYDNLKYLGTHIQGDSVSYQKLQIRTDKLRTLNDFQKLLGNINWIRPFLKLTTGELKPLFEILNGDSNPISTRKLTPEACKALQLMNERLSTARVKRLDLSQPWSLCILKTEYTPTACLWQDGVVEWIHLPHISPKVITPYDIFCTQLIIKGRHRSKELFSKDPDYIVVPYTKVQFDLLLQEKEDWPISLLGFLGEVHFHLPKDPLLTFTLQTAIIFPHMTSTTPLEKGIVIFTDGSANGRSVTYIQGREPIIKENTQNTAQQAEIVAVITAFEEVSQPFNLYTDSKYVTGLFPEIETATLSPRTKIYTELKHLQRLIHKRQEKFYIGHIRGHTGLPGPLAQGNAYADSLTRILTA

SEQ ID NO: 20272 - protein, 599 aa, Mouse mammary tumor virus
GRDIMKDIKVRLMTDSPDDSQDLMIGAIESNLFADQISWKSDQPVWLNQWPLKQEKLQALQQLVTEQLQLGHLEESNSPWNTPVFVIKKKSGKWRLLQDLRAVNATMHDMGALQPGLPSPVAVPKGWEIIIIDLQDCFFNIKLHPEDCKRFAFSVPSPNFKRPYQRFQWKVLPQGMKNSPTLCQKFVDKAILTVRDKYQDSYIVHYMDDILLAHPSRSIVDEILTSMIQALNKHGLVVSTEKIQKYDNLKYLGTHIQGDSVSYQKLQIRTDKLRTLNDFQKLLGNINWIRPFLKLTTGELKPLFEILNGDSNPISTRKLTPEACKALQLMNERLSTARVKRLDLSQPWSLCILKTEYTPTACLWQDGVVEWIHLPHISPKVITPYDIFCTQLIIKGRHRSKELFSKDPDYIVVPYTKVQFDLLLQEKEDWPISLLGFLGEVHFHLPKDPLLTFTLQTAIIFPHMTSTTPLEKGIVIFTDGSANGRSVTYIQGREPIIKENTQNTAQQAEIVAVITAFEEVSQPFNLYTDSKYVTGLFPEIETATLSPRTKIYTELKHLQRLIHKRQEKFYIGHIRGHTGLPGPLAQGNAYADSLTRILT

SEQ ID NO: 20273 - protein, 599 aa, synthetic construct
GRDIMKDIKVRLMTDSPDDSQDLMIGAIESNLFADQISWKSDQPVWLNQWPLKQEKLQALQQLVTEQLQLGHLEESNSPWNTPVFVIKKKSGKWRLLQDLRAVNATMHDMGALQPGLPSPVAVPKGWEIIIIDLQDCFFNIKLHPEDCKRFAFSVPSPNFKRPYQRFQWKVLPQGMKNSPTLCQKFVDKAILTVRDKYQDSYIVHYMDDILLAHPSRSIVDEILTSMIQALNKHGLVVSTEKIQKYDNLKYLGTHIQGDSVSYQKLQIRTDKLRTLNDFQKLLGNINWIRPFLKLTTGELKPLFEILNPDSNPISTRKLTPEACKALQLMNERLSTARVKRLDLSQPWSLCILKTEYTPTACLWQDGVVEWIHLPHISPKVITPYDIFCTQLIIKGRHRSKELFSKDPDYIVVPYTKVQFDLLLQEKEDWPISLLGFLGEVHFHLPKDPLLTFTLQTAIIFPHMTSTTPLEKGIVIFTDGSANGRSVTYIQGREPIIKENTQNTAQQAEIVAVITAFEEVSQPFNLYTDSKYVTGLFPEIETATLSPRTKIYTELKHLQRLIHKRQEKFYIGHIRGHTGLPGPLAQGNAYADSLTRILT

SEQ ID NO: 20274 - protein, 599 aa, synthetic construct
GRDIMKDIKVRLMTDSPDDSQDLMIGAIESNLFADQISWKSDQPVWLNQWPLKQEKLQALQQLVTEQLQLGHLEESNSPWNTPVFVIKKKSGKWRLLQDLRAVNATMHDMGALQPGLPSPVAPPKGWEIIIIDLQDCFFNIKLHPEDCKRFAFSVPSPNFKRPYQRFQWKVLPQGMKNSPTLCQKFVDKAILTVRDKYQDSYIVHYMDDILLAHPSRSIVDEILTSMIQALNKHGLVVSTEKIQKYDNLKYLGTHIQGDSVSYQKLQIRTDKLRTLNDFQKLLGNINWIRPFLKLTTGELKPLFEILNPDSNPISTRKLTPEACKALQLMNERLSTARVKRLDLSQPWSLCILKTEYTPTACLWQDGVVEWIHLPHISPKVITPYDIFCTQLIIKGRHRSKELFSKDPDYIVVPYTKVQFDLLLQEKEDWPISLLGFLGEVHFHLPKDPLLTFTLQTAIIFPHMTSTTPLEKGIVIFTDGSANGRSVTYIQGREPIIKENTQNTAQQAEIVAVITAFEEVSQPFNLYTDSKYVTGLFPEIETATLSPRTKIYTELKHLQRLIHKRQEKFYIGHIRGHTGLPGPLAQGNAYADSLTRILT

SEQ ID NO: 20275 - protein, 585 aa, Mason-Pfizer monkey virus
LTAAIDILAPQQCAEPITWKSDEPVWVDQWPLTNDKLAAAQQLVQEQLEAGHITESSSPWNTPIFVIKKKSGKWRLLQDLRAVNATMVLMGALQPGLPSPVAIPQGYLKIIIDLKDCFFSIPLHPSDQKRFAFSLPSTNFKEPMQRFQWKVLPQGMANSPTLCQKYVATAIHKVRHAWKQMYIIHYMDDILIAGKDGQQVLQCFDQLKQELTAAGLHIAPEKVQLQDPYTYLGFELNGPKITNQKAVIRKDKLQTLNDFQKLLGDINWLRPYLKLTTGDLKPLFDTLKGDSDPNSHRSLSKEALASLEKVETAIAEQFVTHINYSLPLIFLIFNTALTPTGLFWQDNPIMWIHLPASPKKVLLPYYDAIADLIILGRDHSKKYFGIEPSTIIQPYSKSQIDWLMQNTEMWPIACASFVGILDNHYPPNKLIQFCKLHTFVFPQIISKTPLNNALLVFTDGSSTGMAAYTLTDTTIKFQTNLNSAQLVELQALIAVLSAFPNQPLNIYTDSAYLAHSIPLLETVAQIKHISETAKLFLQCQQLIYNRSIPFYIGHVRAHSGLPGPIAQGNQRADLATKIVASNINT

SEQ ID NO: 20276 - protein, 585 aa, synthetic construct
LTAAIDILAPQQCAEPITWKSDEPVWVDQWPLTNDKLAAAQQLVQEQLEAGHITESSSPWNTPIFVIKKKSGKWRLLQDLRAVNATMVLMGALQPGLPSPVAPPQGYLKIIIDLKDCFFSIPLHPSDQKRFAFSLPSTNFKEPMQRFQWKVLPQGMANSPTLCQKYVATAIHKVRHAWKQMYIIHYMDDILIAGKDGQQVLQCFDQLKQELTAAGLHIAPEKVQLQDPYTYLGFELNGPKITNQKAVIRKDKLQTLNDFQKLLGDINWLRPYLKLTTGDLKPLFDTLKPDSDPNSHRSLSKEALASLEKVETAIAEQFVTHINYSLPLIFLIFNTALTPTGLFWQDNPIMWIHLPASPKKVLLPYYDAIADLIILGRDHSKKYFGIEPSTIIQPYSKSQIDWLMQNTEMWPIACASFVGILDNHYPPNKLIQFCKLHTFVFPQIISKTPLNNALLVFTDGSSTGMAAYTLTDTTIKFQTNLNSAQLVELQALIAVLSAFPNQPLNIYTDSAYLAHSIPLLETVAQIKHISETAKLFLQCQQLIYNRSIPFYIGHVRAHSGLPGPIAQGNQRADLATKIVASNINT

SEQ ID NO: 20277 - protein, 665 aa, unidentified
TLQLDDEYRLYSPLVKPDQNIQFWLEQFPQAWAETAGMGLAKQVPPQVIQLKASATPVSVRQYPLSKEAQEGIRPHVQRLIQQGILVPVQSPWNTPLLPVRKPGTNDYRPVQDLREVNKRVQDIHPTVPNPYNLLCALPPQRSWYTVLDLKDAFFCLRLHPTSQPLFAFEWRDPGTGRTGQLTWTRLPQGFKNSPTIFDEALHRDLANFRIQHPQVTLLQYVDDLLLAGATKQDCLEGTKALLLELSDLGYRASAKKAQICRREVTYLGYSLRDGQRWLTEARKKTVVQIPAPTTAKQVREFLGTAGFCRLWIPGFATLAAPLYPLTKEKGEFSWAPEHQKAFDAIKKALLSAPALALPDVTKPFTLYVDERKGVARGVLTQTLGPWRRPVAYLSKKLDPVASGWPVCLKAIAAVAILVKDADKLTLGQNITVIAPHALENIVRQPPDRWMTNARMTHYQSLLLTERVTFAPPAALNPATLLPEETDEPVTHDCHQLLIEETGVRKDLTDIPLTGEVLTWFTDGSSYVVEGKRMAGAAVVDGTRTIWASSLPEGTSAQKAELMALTQALRLAEGKSINIYTDSRYAFATAHVHGAIYKQRGLLTSAGREIKNKEEILSLLEALHLPKRLAIIHCPGHQKAKDPISRGNQMADRVAKQAAQGVNLL

SEQ ID NO: 20278 - protein, 665 aa, synthetic construct
TLQLDDEYRLYSPLVKPDQNIQFWLEQFPQAWAETAGMGLAKQVPPQVIQLKASATPVSVRQYPLSKEAQEGIRPHVQRLIQQGILVPVQSPWNTPLLPVRKPGTNDYRPVQDLREVNKRVQDIHPTVPNPYNLLCALPPQRSWYTVLDLKDAFFCLRLHPTSQPLFAFEWRDPGTGRTGQLTWTRLPQGFKNSPTIFNEALHRDLANFRIQHPQVTLLQYVDDLLLAGATKQDCLEGTKALLLELSDLGYRASAKKAQICRREVTYLGYSLRDGQRWLTEARKKTVVQIPAPTTAKQVREFLGTAGFCRLWIPGFATLAAPLYPLTKPKGEFSWAPEHQKAFDAIKKALLSAPALALPDVTKPFTLYVDERKGVARGVLTQTLGPWRRPVAYLSKKLDPVASGWPVCLKAIAAVAILVKDADKLTLGQNITVIAPHALENIVRQPPDRWMTNARMTHYQSLLLTERVTFAPPAALNPATLLPEETDEPVTHDCHQLLIEETGVRKDLTDIPLTGEVLTWFTDGSSYVVEGKRMAGAAVVDGTRTIWASSLPEGTSAQKAELMALTQALRLAEGKSINIYTDSRYAFATAHVHGAIYKQRGWLTSAGREIKNKEEILSLLEALHLPKRLAIIHCPGHQKAKDPISRGNQMADRVAKQAAQGVNLL

SEQ ID NO: 20279 - protein, 663 aa, synthetic construct
LDDEYRLYSPLVKPDQNIQFWLEQFPQAWAETAGMGLAKQVPPQVIQLKASATPVSVRQYPLSKEAQEGIRPHVQRLIQQGILVPVQSPWNTPLLPVRKPGTNDYRPVQDLREVNKRVQDIHPTVPNPYNLLCALPPQRSWYTVLDLKDAFFCLRLHPTSQPLFAFEWRDPGTGRTGQLTWTRLPQGFKNSPTIFNEALHRDLANFRIQHPQVTLLQYVDDLLLAGATKQDCLEGTKALLLELSDLGYRASAKKAQICRREVTYLGYSLRDGQRWLTEARKKTVVQIPAPTTAKQVREFLGKAGFCRLFIPGFATLAAPLYPLTKPKGEFSWAPEHQKAFDAIKKALLSAPALALPDVTKPFTLYVDERKGVARGVLTQTLGPWRRPVAYLSKKLDPVASGWPVCLKAIAAVAILVKDADKLTLGQNITVIAPHALENIVRQPPDRWMTNARMTHYQSLLLTERVTFAPPAALNPATLLPEETDEPVTHDCHQLLIEETGVRKDLTDIPLTGEVLTWFTDGSSYVVEGKRMAGAAVVDGTRTIWASSLPEGTSAQKAELMALTQALRLAEGKSINIYTDSRYAFATAHVHGAIYKQRGWLTSAGREIKNKEEILSLLEALHLPKRLAIIHCPGHQKAKDPISRGNQMADRVAKQAAQGVNLLP

SEQ ID NO: 20280 - protein, 751 aa, Macaque simian foamy virus
MDPLQLLQPLEAEIKGTKLKAHWNSGATITCVPEAFLEDERPIQTMLIKTIHGEKQQDVYYLTFKVQGRKVEAEVLASPYDYILLNPSDVPWLMKKPLQLTVLVPLHEYQERLLQQTALPKEQKELLQKLFLKYDALWQHWENQVGHRRIKPHNIATGTLAPRPQKQYPINPKAKPSIQIVIDDLLKQGVLIQQNSTMNTPVYPVPKPDGKWRMVLDYREVNKTIPLIAAQNQHSAGILSSIYRGKYKTTLDLTNGFWAHPITPESYWLTAFTWQGKQYCWTRLPQGFLNSPALFTADVVDLLKEIPNVQAYVDDIYISHDDPQEHLEQLEKIFSILLNAGYVVSLKKSEIAQREVEFLGFNITKEGRGLTDTFKQKLLNITPPKDLKQLQSILGLLNFARNFIPNYSELVKPLYTIVANANGKFISWTEDNSNQLQHIISVLNQADNLEERNPETRLIIKVNSSPSAGYIRYYNEGSKRPIMYVNYIFSKAEAKFTQTEKLLTTMHKGLIKAMDLAMGQEILVYSPIVSMTKIQRTPLPERKALPVRWITWMTYLEDPRIQFHYDKSLPELQQIPNVTEDVIAKTKHPSEFAMVFYTDGSAIKHPDVNKSHSAGMGIAQVQFIPEYKIVHQWSIPLGDHTAQLAEIAAVEFACKKALKISGPVLIVTDSFYVAESANKELPYWKSNGFLNNKKKPLRHVSKWKSIAECLQLKPDIIIMHEKGHQQPMTTLHTEGNNLADKLATQGSYVVH

SEQ ID NO: 20281 - protein, 751 aa, synthetic construct
MDPLQLLQPLEAEIKGTKLKAHWNSGATITCVPEAFLEDERPIQTMLIKTIHGEKQQDVYYLTFKVQGRKVEAEVLASPYDYILLNPSDVPWLMKKPLQLTVLVPLHEYQERLLQQTALPKEQKELLQKLFLKYDALWQHWENQVGHRRIKPHNIATGTLAPRPQKQYPINPKAKPSIQIVIDDLLKQGVLIQQNSTMNTPVYPVPKPDGKWRMVLDYREVNKTIPLIAAQNQHSAGILSSIYRGKYKTTLDLTNGFWAHPITPESYWLTAFTWQGKQYCWTRLPQGFLNSPALFNADVVDLLKEIPNVQAYVDDIYISHDDPQEHLEQLEKIFSILLNAGYVVSLKKSEIAQREVEFLGFNITKEGRGLTDTFKQKLLNITPPKDLKQLQSILGLLNFARNFIPNYSELVKPLYTIVAPANGKFISWTEDNSNQLQHIISVLNQADNLEERNPETRLIIKVNSSPSAGYIRYYNEGSKRPIMYVNYIFSKAEAKFTQTEKLLTTMHKGLIKAMDLAMGQEILVYSPIVSMTKIQRTPLPERKALPVRWITWMTYLEDPRIQFHYDKSLPELQQIPNVTEDVIAKTKHPSEFAMVFYTDGSAIKHPDVNKSHSAGMGIAQVQFIPEYKIVHQWSIPLGDHTAQLAEIAAVEFACKKALKISGPVLIVTDSFYVAESANKELPYWKSNGFLNNKKKPLRHVSKWKSIAECLQLKPDIIIMHEKGHQQPMTTLHTEGNNLADKLATQGSYVVH

SEQ ID NO: 20282 - protein, 751 aa, synthetic construct
MDPLQLLQPLEAEIKGTKLKAHWNSGATITCVPEAFLEDERPIQTMLIKTIHGEKQQDVYYLTFKVQGRKVEAEVLASPYDYILLNPSDVPWLMKKPLQLTVLVPLHEYQERLLQQTALPKEQKELLQKLFLKYDALWQHWENQVGHRRIKPHNIATGTLAPRPQKQYPINPKAKPSIQIVIDDLLKQGVLIQQNSTMNTPVYPVPKPDGKWRMVLDYREVNKTIPLIAAQNQHSAGILSSIYRGKYKTTLDLTNGFWAHPITPESYWLTAFTWQGKQYCWTRLPQGFLNSPALFNADVVDLLKEIPNVQAYVDDIYISHDDPQEHLEQLEKIFSILLNAGYVVSLKKSEIAQREVEFLGFNITKEGRGLTDTFKQKLLNITPPKDLKQLQSILGKLNFARNFIPNYSELVKPLYTIVAPANGKFISWTEDNSNQLQHIISVLNQADNLEERNPETRLIIKVNSSPSAGYIRYYNEGSKRPIMYVNYIFSKAEAKFTQTEKLLTTMHKGLIKAMDLAMGQEILVYSPIVSMTKIQRTPLPERKALPVRWITWMTYLEDPRIQFHYDKSLPELQQIPNVTEDVIAKTKHPSEFAMVFYTDGSAIKHPDVNKSHSAGMGIAQVQFIPEYKIVHQWSIPLGDHTAQLAEIAAVEFACKKALKISGPVLIVTDSFYVAESANKELPYWKSNGFLNNKKKPLRHVSKWKSIAECLQLKPDIIIMHEKGHQQPMTTLHTEGNNLADKLATQGSYVVH

SEQ ID NO: 20283 - protein, 662 aa, Macaque simian foamy virus
VPWLMKKPLQLTVLVPLHEYQERLLQQTALPKEQKELLQKLFLKYDALWQHWENQVGHRRIKPHNIATGTLAPRPQKQYPINPKAKPSIQIVIDDLLKQGVLIQQNSTMNTPVYPVPKPDGKWRMVLDYREVNKTIPLIAAQNQHSAGILSSIYRGKYKTTLDLTNGFWAHPITPESYWLTAFTWQGKQYCWTRLPQGFLNSPALFTADVVDLLKEIPNVQAYVDDIYISHDDPQEHLEQLEKIFSILLNAGYVVSLKKSEIAQREVEFLGFNITKEGRGLTDTFKQKLLNITPPKDLKQLQSILGLLNFARNFIPNYSELVKPLYTIVANANGKFISWTEDNSNQLQHIISVLNQADNLEERNPETRLIIKVNSSPSAGYIRYYNEGSKRPIMYVNYIFSKAEAKFTQTEKLLTTMHKGLIKAMDLAMGQEILVYSPIVSMTKIQRTPLPERKALPVRWITWMTYLEDPRIQFHYDKSLPELQQIPNVTEDVIAKTKHPSEFAMVFYTDGSAIKHPDVNKSHSAGMGIAQVQFIPEYKIVHQWSIPLGDHTAQLAEIAAVEFACKKALKISGPVLIVTDSFYVAESANKELPYWKSNGFLNNKKKPLRHVSKWKSIAECLQLKPDIIIMHEKGHQQPMTTLHTEGNNLADKLATQGSYVVH

SEQ ID NO: 20284 - protein, 662 aa, synthetic construct
VPWLMKKPLQLTVLVPLHEYQERLLQQTALPKEQKELLQKLFLKYDALWQHWENQVGHRRIKPHNIATGTLAPRPQKQYPINPKAKPSIQIVIDDLLKQGVLIQQNSTMNTPVYPVPKPDGKWRMVLDYREVNKTIPLIAAQNQHSAGILSSIYRGKYKTTLDLTNGFWAHPITPESYWLTAFTWQGKQYCWTRLPQGFLNSPALFNADVVDLLKEIPNVQAYVDDIYISHDDPQEHLEQLEKIFSILLNAGYVVSLKKSEIAQREVEFLGFNITKEGRGLTDTFKQKLLNITPPKDLKQLQSILGLLNFARNFIPNYSELVKPLYTIVAPANGKFISWTEDNSNQLQHIISVLNQADNLEERNPETRLIIKVNSSPSAGYIRYYNEGSKRPIMYVNYIFSKAEAKFTQTEKLLTTMHKGLIKAMDLAMGQEILVYSPIVSMTKIQRTPLPERKALPVRWITWMTYLEDPRIQFHYDKSLPELQQIPNVTEDVIAKTKHPSEFAMVFYTDGSAIKHPDVNKSHSAGMGIAQVQFIPEYKIVHQWSIPLGDHTAQLAEIAAVEFACKKALKISGPVLIVTDSFYVAESANKELPYWKSNGFLNNKKKPLRHVSKWKSIAECLQLKPDIIIMHEKGHQQPMTTLHTEGNNLADKLATQGSYVVH

SEQ ID NO: 20285 - protein, 662 aa, synthetic construct
VPWLMKKPLQLTVLVPLHEYQERLLQQTALPKEQKELLQKLFLKYDALWQHWENQVGHRRIKPHNIATGTLAPRPQKQYPINPKAKPSIQIVIDDLLKQGVLIQQNSTMNTPVYPVPKPDGKWRMVLDYREVNKTIPLIAAQNQHSAGILSSIYRGKYKTTLDLTNGFWAHPITPESYWLTAFTWQGKQYCWTRLPQGFLNSPALFNADVVDLLKEIPNVQAYVDDIYISHDDPQEHLEQLEKIFSILLNAGYVVSLKKSEIAQREVEFLGFNITKEGRGLTDTFKQKLLNITPPKDLKQLQSILGKLNFARNFIPNYSELVKPLYTIVAPANGKFISWTEDNSNQLQHIISVLNQADNLEERNPETRLIIKVNSSPSAGYIRYYNEGSKRPIMYVNYIFSKAEAKFTQTEKLLTTMHKGLIKAMDLAMGQEILVYSPIVSMTKIQRTPLPERKALPVRWITWMTYLEDPRIQFHYDKSLPELQQIPNVTEDVIAKTKHPSEFAMVFYTDGSAIKHPDVNKSHSAGMGIAQVQFIPEYKIVHQWSIPLGDHTAQLAEIAAVEFACKKALKISGPVLIVTDSFYVAESANKELPYWKSNGFLNNKKKPLRHVSKWKSIAECLQLKPDIIIMHEKGHQQPMTTLHTEGNNLADKLATQGSYVVH

SEQ ID NO: 20286 - protein, 751 aa, unidentified
MDPLQLLQPLEAEIKGTKLKAHWNSGATITCVPQAFLEEEVPIKNIWIKTIHGEKEQPVYYLTFKIQGRKVEAEVISSPYDYILVSPSDIPWLMKKPLQLTTLVPLQEYEERLLKQTMLTGSYKEKLQSLFLKYDALWQHWENQVGHRRIKPHHIATGTVNPRPQKQYPINPKAKASIQTVINDLLKQGVLIQQNSIMNTPVYPVPKPDGKWRMVLDYREVNKTIPLIAAQNQHSAGILSSIFRGKYKTTLDLSNGFWAHSITPESYWLTAFTWLGQQYCWTRLPQGFLNSPALFTADVVDLLKEVPNVQVYVDDIYISHDDPREHLEQLEKVFSLLLNAGYVVSLKKSEIAQHEVEFLGFNITKEGRGLTETFKQKLLNITPPRDLKQLQSILGLLNFARNFIPNFSELVKPLYNIIATANGKYITWTTDNSQQLQNIISMLNSAENLEERNPEVRLIMKVNTSPSAGYIRFYNEFAKRPIMYLNYVYTKAEVKFTNTEKLLTTIHKGLIKALDLGMGQEILVYSPIVSMTKIQKTPLPERKALPIRWITWMSYLEDPRIQFHYDKTLPELQQVPTVTDDIIAKIKHPSEFSMVFYTDGSAIKHPNVNKSHNAGMGIAQVQFKPEFTVINTWSIPLGDHTAQLAEVAAVEFACKKALKIDGPVLIVTDSFYVAESVNKELPYWQSNGFFNNKKKPLKHVSKWKSIADCIQLKPDIIIIHEKGHQPTASTFHTEGNNLADKLATQGSYVVN

SEQ ID NO: 20287 - protein, 751 aa, synthetic construct
MDPLQLLQPLEAEIKGTKLKAHWNSGATITCVPQAFLEEEVPIKNIWIKTIHGEKEQPVYYLTFKIQGRKVEAEVISSPYDYILVSPSDIPWLMKKPLQLTTLVPLQEYEERLLKQTMLTGSYKEKLQSLFLKYDALWQHWENQVGHRRIKPHHIATGTVNPRPQKQYPINPKAKASIQTVINDLLKQGVLIQQNSIMNTPVYPVPKPDGKWRMVLDYREVNKTIPLIAAQNQHSAGILSSIFRGKYKTTLDLSNGFWAHSITPESYWLTAFTWLGQQYCWTRLPQGFLNSPALFNADVVDLLKEVPNVQVYVDDIYISHDDPREHLEQLEKVFSLLLNAGYVVSLKKSEIAQHEVEFLGFNITKEGRGLTETFKQKLLNITPPRDLKQLQSILGLLNFARNFIPNFSELVKPLYNIIATAPGKYITWTTDNSQQLQNIISMLNSAENLEERNPEVRLIMKVNTSPSAGYIRFYNEFAKRPIMYLNYVYTKAEVKFTNTEKLLTTIHKGLIKALDLGMGQEILVYSPIVSMTKIQKTPLPERKALPIRWITWMSYLEDPRIQFHYDKTLPELQQVPTVTDDIIAKIKHPSEFSMVFYTDGSAIKHPNVNKSHNAGMGIAQVQFKPEFTVINTWSIPLGDHTAQLAEVAAVEFACKKALKIDGPVLIVTDSFYVAESVNKELPYWQSNGFFNNKKKPLKHVSKWKSIADCIQLKPDIIIIHEKGHQPTASTFHTEGNNLADKLATQGSYVVN

SEQ ID NO: 20288 - protein, 751 aa, synthetic construct
MDPLQLLQPLEAEIKGTKLKAHWNSGATITCVPQAFLEEEVPIKNIWIKTIHGEKEQPVYYLTFKIQGRKVEAEVISSPYDYILVSPSDIPWLMKKPLQLTTLVPLQEYEERLLKQTMLTGSYKEKLQSLFLKYDALWQHWENQVGHRRIKPHHIATGTVNPRPQKQYPINPKAKASIQTVINDLLKQGVLIQQNSIMNTPVYPVPKPDGKWRMVLDYREVNKTIPLIAAQNQHSAGILSSIFRGKYKTTLDLSNGFWAHSITPESYWLTAFTWLGQQYCWTRLPQGFLNSPALFNADVVDLLKEVPNVQVYVDDIYISHDDPREHLEQLEKVFSLLLNAGYVVSLKKSEIAQHEVEFLGFNITKEGRGLTETFKQKLLNITPPRDLKQLQSILGKLNFARNFIPNFSELVKPLYNIIATAPGKYITWTTDNSQQLQNIISMLNSAENLEERNPEVRLIMKVNTSPSAGYIRFYNEFAKRPIMYLNYVYTKAEVKFTNTEKLLTTIHKGLIKALDLGMGQEILVYSPIVSMTKIQKTPLPERKALPIRWITWMSYLEDPRIQFHYDKTLPELQQVPTVTDDIIAKIKHPSEFSMVFYTDGSAIKHPNVNKSHNAGMGIAQVQFKPEFTVINTWSIPLGDHTAQLAEVAAVEFACKKALKIDGPVLIVTDSFYVAESVNKELPYWQSNGFFNNKKKPLKHVSKWKSIADCIQLKPDIIIIHEKGHQPTASTFHTEGNNLADKLATQGSYVVN

SEQ ID NO: 20289 - protein, 662 aa, unidentified
IPWLMKKPLQLTTLVPLQEYEERLLKQTMLTGSYKEKLQSLFLKYDALWQHWENQVGHRRIKPHHIATGTVNPRPQKQYPINPKAKASIQTVINDLLKQGVLIQQNSIMNTPVYPVPKPDGKWRMVLDYREVNKTIPLIAAQNQHSAGILSSIFRGKYKTTLDLSNGFWAHSITPESYWLTAFTWLGQQYCWTRLPQGFLNSPALFTADVVDLLKEVPNVQVYVDDIYISHDDPREHLEQLEKVFSLLLNAGYVVSLKKSEIAQHEVEFLGFNITKEGRGLTETFKQKLLNITPPRDLKQLQSILGLLNFARNFIPNFSELVKPLYNIIATANGKYITWTTDNSQQLQNIISMLNSAENLEERNPEVRLIMKVNTSPSAGYIRFYNEFAKRPIMYLNYVYTKAEVKFTNTEKLLTTIHKGLIKALDLGMGQEILVYSPIVSMTKIQKTPLPERKALPIRWITWMSYLEDPRIQFHYDKTLPELQQVPTVTDDIIAKIKHPSEFSMVFYTDGSAIKHPNVNKSHNAGMGIAQVQFKPEFTVINTWSIPLGDHTAQLAEVAAVEFACKKALKIDGPVLIVTDSFYVAESVNKELPYWQSNGFFNNKKKPLKHVSKWKSIADCIQLKPDIIIIHEKGHQPTASTFHTEGNNLADKLATQGSYVVN

SEQ ID NO: 20290 - protein, 662 aa, synthetic construct
IPWLMKKPLQLTTLVPLQEYEERLLKQTMLTGSYKEKLQSLFLKYDALWQHWENQVGHRRIKPHHIATGTVNPRPQKQYPINPKAKASIQTVINDLLKQGVLIQQNSIMNTPVYPVPKPDGKWRMVLDYREVNKTIPLIAAQNQHSAGILSSIFRGKYKTTLDLSNGFWAHSITPESYWLTAFTWLGQQYCWTRLPQGFLNSPALFNADVVDLLKEVPNVQVYVDDIYISHDDPREHLEQLEKVFSLLLNAGYVVSLKKSEIAQHEVEFLGFNITKEGRGLTETFKQKLLNITPPRDLKQLQSILGLLNFARNFIPNFSELVKPLYNIIATAPGKYITWTTDNSQQLQNIISMLNSAENLEERNPEVRLIMKVNTSPSAGYIRFYNEFAKRPIMYLNYVYTKAEVKFTNTEKLLTTIHKGLIKALDLGMGQEILVYSPIVSMTKIQKTPLPERKALPIRWITWMSYLEDPRIQFHYDKTLPELQQVPTVTDDIIAKIKHPSEFSMVFYTDGSAIKHPNVNKSHNAGMGIAQVQFKPEFTVINTWSIPLGDHTAQLAEVAAVEFACKKALKIDGPVLIVTDSFYVAESVNKELPYWQSNGFFNNKKKPLKHVSKWKSIADCIQLKPDIIIIHEKGHQPTASTFHTEGNNLADKLATQGSYVVN

SEQ ID NO: 20291 - protein, 662 aa, synthetic construct
IPWLMKKPLQLTTLVPLQEYEERLLKQTMLTGSYKEKLQSLFLKYDALWQHWENQVGHRRIKPHHIATGTVNPRPQKQYPINPKAKASIQTVINDLLKQGVLIQQNSIMNTPVYPVPKPDGKWRMVLDYREVNKTIPLIAAQNQHSAGILSSIFRGKYKTTLDLSNGFWAHSITPESYWLTAFTWLGQQYCWTRLPQGFLNSPALFNADVVDLLKEVPNVQVYVDDIYISHDDPREHLEQLEKVFSLLLNAGYVVSLKKSEIAQHEVEFLGFNITKEGRGLTETFKQKLLNITPPRDLKQLQSILGKLNFARNFIPNFSELVKPLYNIIATAPGKYITWTTDNSQQLQNIISMLNSAENLEERNPEVRLIMKVNTSPSAGYIRFYNEFAKRPIMYLNYVYTKAEVKFTNTEKLLTTIHKGLIKALDLGMGQEILVYSPIVSMTKIQKTPLPERKALPIRWITWMSYLEDPRIQFHYDKTLPELQQVPTVTDDIIAKIKHPSEFSMVFYTDGSAIKHPNVNKSHNAGMGIAQVQFKPEFTVINTWSIPLGDHTAQLAEVAAVEFACKKALKIDGPVLIVTDSFYVAESVNKELPYWQSNGFFNNKKKPLKHVSKWKSIADCIQLKPDIIIIHEKGHQPTASTFHTEGNNLADKLATQGSYVVN

SEQ ID NO: 20292 - protein, 751 aa, Simian foamy virus
MNPLQLLQPLPAEVKGTKLLAHWNSGATITCIPESFLEDEQPIKQTLIKTIHGEKQQNVYYLTFKVKGRKVEAEVIASPYEYILLSPTDVPWLTQQPLQLTILVPLQEYQDRILNKTALPEEQKQQLKALFTKYDNLWQHWENQVGHRKIRPHNIATGDYPPRPQKQYPINPKAKPSIQIVIDDLLKQGVLTPQNSTMNTPVYPVPKPDGRWRMVLDYREVNKTIPLTAAQNQHSAGILATIVRQKYKTTLDLANGFWAHPITPDSYWLTAFTWQGKQYCWTRLPQGFLNSPALFTADAVDLLKEVPNVQVYVDDIYLSHDNPHEHIQQLEKVFQILLQAGYVVSLKKSEIGQRTVEFLGFNITKEGRGLTDTFKTKLLNVTPPKDLKQLQSILGLLNFARNFIPNFAELVQTLYNLIASSKGKYIEWTEDNTKQLNKVIEALNTASNLEERLPDQRLVIKVNTSPSAGYVRYYNESGKKPIMYLNYVFSKAELKFSMLEKLLTTMHKALIKAMDLAMGQEILVYSPIVSMTKIQKTPLPERKALPIRWITWMTYLEDPRIQFHYDKTLPELKHIPDVYTSSIPPLKHPSQYEGVFCTDGSAIKSPDPTKSNNAGMGIVHAIYNPEYKILNQWSIPLGHHTAQMAEIAAVEFACKKALKVPGPVLVITDSFYVAESANKELPYWKSNGFVNNKKEPLKHISKWKSIAECLSIKPDITIQHEKGHQPINTSIHTEGNALADKLATQGSYVVN

SEQ ID NO: 20293 - protein, 751 aa, synthetic construct
MNPLQLLQPLPAEVKGTKLLAHWNSGATITCIPESFLEDEQPIKQTLIKTIHGEKQQNVYYLTFKVKGRKVEAEVIASPYEYILLSPTDVPWLTQQPLQLTILVPLQEYQDRILNKTALPEEQKQQLKALFTKYDNLWQHWENQVGHRKIRPHNIATGDYPPRPQKQYPINPKAKPSIQIVIDDLLKQGVLTPQNSTMNTPVYPVPKPDGRWRMVLDYREVNKTIPLTAAQNQHSAGILATIVRQKYKTTLDLANGFWAHPITPDSYWLTAFTWQGKQYCWTRLPQGFLNSPALFNADAVDLLKEVPNVQVYVDDIYLSHDNPHEHIQQLEKVFQILLQAGYVVSLKKSEIGQRTVEFLGFNITKEGRGLTDTFKTKLLNVTPPKDLKQLQSILGLLNFARNFIPNFAELVQTLYNLIASSPGKYIEWTEDNTKQLNKVIEALNTASNLEERLPDQRLVIKVNTSPSAGYVRYYNESGKKPIMYLNYVFSKAELKFSMLEKLLTTMHKALIKAMDLAMGQEILVYSPIVSMTKIQKTPLPERKALPIRWITWMTYLEDPRIQFHYDKTLPELKHIPDVYTSSIPPLKHPSQYEGVFCTDGSAIKSPDPTKSNNAGMGIVHAIYNPEYKILNQWSIPLGHHTAQMAEIAAVEFACKKALKVPGPVLVITDSFYVAESANKELPYWKSNGFVNNKKEPLKHISKWKSIAECLSIKPDITIQHEKGHQPINTSIHTEGNALADKLATQGSYVVN

SEQ ID NO: 20294 - protein, 751 aa, synthetic construct
MNPLQLLQPLPAEVKGTKLLAHWNSGATITCIPESFLEDEQPIKQTLIKTIHGEKQQNVYYLTFKVKGRKVEAEVIASPYEYILLSPTDVPWLTQQPLQLTILVPLQEYQDRILNKTALPEEQKQQLKALFTKYDNLWQHWENQVGHRKIRPHNIATGDYPPRPQKQYPINPKAKPSIQIVIDDLLKQGVLTPQNSTMNTPVYPVPKPDGRWRMVLDYREVNKTIPLTAAQNQHSAGILATIVRQKYKTTLDLANGFWAHPITPDSYWLTAFTWQGKQYCWTRLPQGFLNSPALFNADAVDLLKEVPNVQVYVDDIYLSHDNPHEHIQQLEKVFQILLQAGYVVSLKKSEIGQRTVEFLGFNITKEGRGLTDTFKTKLLNVTPPKDLKQLQSILGKLNFARNFIPNFAELVQTLYNLIASSPGKYIEWTEDNTKQLNKVIEALNTASNLEERLPDQRLVIKVNTSPSAGYVRYYNESGKKPIMYLNYVFSKAELKFSMLEKLLTTMHKALIKAMDLAMGQEILVYSPIVSMTKIQKTPLPERKALPIRWITWMTYLEDPRIQFHYDKTLPELKHIPDVYTSSIPPLKHPSQYEGVFCTDGSAIKSPDPTKSNNAGMGIVHAIYNPEYKILNQWSIPLGHHTAQMAEIAAVEFACKKALKVPGPVLVITDSFYVAESANKELPYWKSNGFVNNKKEPLKHISKWKSIAECLSIKPDITIQHEKGHQPINTSIHTEGNALADKLATQGSYVVN

SEQ ID NO: 20295 - protein, 662 aa, Simian foamy virus
VPWLTQQPLQLTILVPLQEYQDRILNKTALPEEQKQQLKALFTKYDNLWQHWENQVGHRKIRPHNIATGDYPPRPQKQYPINPKAKPSIQIVIDDLLKQGVLTPQNSTMNTPVYPVPKPDGRWRMVLDYREVNKTIPLTAAQNQHSAGILATIVRQKYKTTLDLANGFWAHPITPDSYWLTAFTWQGKQYCWTRLPQGFLNSPALFTADAVDLLKEVPNVQVYVDDIYLSHDNPHEHIQQLEKVFQILLQAGYVVSLKKSEIGQRTVEFLGFNITKEGRGLTDTFKTKLLNVTPPKDLKQLQSILGLLNFARNFIPNFAELVQTLYNLIASSKGKYIEWTEDNTKQLNKVIEALNTASNLEERLPDQRLVIKVNTSPSAGYVRYYNESGKKPIMYLNYVFSKAELKFSMLEKLLTTMHKALIKAMDLAMGQEILVYSPIVSMTKIQKTPLPERKALPIRWITWMTYLEDPRIQFHYDKTLPELKHIPDVYTSSIPPLKHPSQYEGVFCTDGSAIKSPDPTKSNNAGMGIVHAIYNPEYKILNQWSIPLGHHTAQMAEIAAVEFACKKALKVPGPVLVITDSFYVAESANKELPYWKSNGFVNNKKEPLKHISKWKSIAECLSIKPDITIQHEKGHQPINTSIHTEGNALADKLATQGSYVVN

SEQ ID NO: 20296 - protein, 662 aa, synthetic construct
VPWLTQQPLQLTILVPLQEYQDRILNKTALPEEQKQQLKALFTKYDNLWQHWENQVGHRKIRPHNIATGDYPPRPQKQYPINPKAKPSIQIVIDDLLKQGVLTPQNSTMNTPVYPVPKPDGRWRMVLDYREVNKTIPLTAAQNQHSAGILATIVRQKYKTTLDLANGFWAHPITPDSYWLTAFTWQGKQYCWTRLPQGFLNSPALFNADAVDLLKEVPNVQVYVDDIYLSHDNPHEHIQQLEKVFQILLQAGYVVSLKKSEIGQRTVEFLGFNITKEGRGLTDTFKTKLLNVTPPKDLKQLQSILGLLNFARNFIPNFAELVQTLYNLIASSPGKYIEWTEDNTKQLNKVIEALNTASNLEERLPDQRLVIKVNTSPSAGYVRYYNESGKKPIMYLNYVFSKAELKFSMLEKLLTTMHKALIKAMDLAMGQEILVYSPIVSMTKIQKTPLPERKALPIRWITWMTYLEDPRIQFHYDKTLPELKHIPDVYTSSIPPLKHPSQYEGVFCTDGSAIKSPDPTKSNNAGMGIVHAIYNPEYKILNQWSIPLGHHTAQMAEIAAVEFACKKALKVPGPVLVITDSFYVAESANKELPYWKSNGFVNNKKEPLKHISKWKSIAECLSIKPDITIQHEKGHQPINTSIHTEGNALADKLATQGSYVVN

SEQ ID NO: 20297 - protein, 662 aa, synthetic construct
VPWLTQQPLQLTILVPLQEYQDRILNKTALPEEQKQQLKALFTKYDNLWQHWENQVGHRKIRPHNIATGDYPPRPQKQYPINPKAKPSIQIVIDDLLKQGVLTPQNSTMNTPVYPVPKPDGRWRMVLDYREVNKTIPLTAAQNQHSAGILATIVRQKYKTTLDLANGFWAHPITPDSYWLTAFTWQGKQYCWTRLPQGFLNSPALFNADAVDLLKEVPNVQVYVDDIYLSHDNPHEHIQQLEKVFQILLQAGYVVSLKKSEIGQRTVEFLGFNITKEGRGLTDTFKTKLLNVTPPKDLKQLQSILGKLNFARNFIPNFAELVQTLYNLIASSPGKYIEWTEDNTKQLNKVIEALNTASNLEERLPDQRLVIKVNTSPSAGYVRYYNESGKKPIMYLNYVFSKAELKFSMLEKLLTTMHKALIKAMDLAMGQEILVYSPIVSMTKIQKTPLPERKALPIRWITWMTYLEDPRIQFHYDKTLPELKHIPDVYTSSIPPLKHPSQYEGVFCTDGSAIKSPDPTKSNNAGMGIVHAIYNPEYKILNQWSIPLGHHTAQMAEIAAVEFACKKALKVPGPVLVITDSFYVAESANKELPYWKSNGFVNNKKEPLKHISKWKSIAECLSIKPDITIQHEKGHQPINTSIHTEGNALADKLATQGSYVVN

SEQ ID NO: 20298 - protein, 592 aa, Squirrel monkey retrovirus
PRSRAIDIPVPHADKISWKITDPVWVDQWPLTYEKTLAAIALVQEQLAAGHIEPTNSPWNTPIFIIKKKSGSWRLLQDLRAVNKVMVPMGALQPGLPSPVAIPLNYHKIVIDLKDCFFTIPLHPEDRPYFAFSVPQINFQSPMPRYQWKVLPQGMANSPTLCQKFVAAAIAPVRSQWPEAYILHYMDDILLACDSAEAAKACYAHIISCLTSYGLKIAPDKVQVSEPFSYLGFELHHQQVFTPRVCLKTDHLKTLNDFQKLLGDIQWLRPYLKLPTSALVPLNNILKGDPNPLSVRALTPEAKQSLALINKAIQNQSVQQISYNLPLVLLLLPTPHTPTAVFWQPNGTDPTKNGSPLLWLHLPASPSKVLLTYPSLLAMLIIKGRYTGRQLFGRDPHSIIIPYTQDQLTWLLQTSDEWAIALSSFTGDIDNHYPSDPVIQFAKLHQFIFPKITKCAPIPQATLVFTDGSSNGIAAYVIDNQPISIKSPYLSAQLVELYAILQVFTVLAHQPFNLYTDSAYIAQSVPLLETVPFIKSSTNATPLFSKLQQLILNRQHPFFIGHLRAHLNLPGPLAEGNALADAATQIFPIISD

SEQ ID NO: 20299 - protein, 592 aa, synthetic construct
PRSRAIDIPVPHADKISWKITDPVWVDQWPLTYEKTLAAIALVQEQLAAGHIEPTNSPWNTPIFIIKKKSGSWRLLQDLRAVNKVMVPMGALQPGLPSPVAIPLNYHKIVIDLKDCFFTIPLHPEDRPYFAFSVPQINFQSPMPRYQWKVLPQGMANSPTLCQKFVAAAIAPVRSQWPEAYILHYMDDILLACDSAEAAKACYAHIISCLTSYGLKIAPDKVQVSEPFSYLGFELHHQQVFTPRVCLKTDHLKTLNDFQKLLGDIQWLRPYLKLPTSALVPLNNILKPDPNPLSVRALTPEAKQSLALINKAIQNQSVQQISYNLPLVLLLLPTPHTPTAVFWQPNGTDPTKNGSPLLWLHLPASPSKVLLTYPSLLAMLIIKGRYTGRQLFGRDPHSIIIPYTQDQLTWLLQTSDEWAIALSSFTGDIDNHYPSDPVIQFAKLHQFIFPKITKCAPIPQATLVFTDGSSNGIAAYVIDNQPISIKSPYLSAQLVELYAILQVFTVLAHQPFNLYTDSAYIAQSVPLLETVPFIKSSTNATPLFSKLQQLILNRQHPFFIGHLRAHLNLPGPLAEGNALADAATQIFPIISD

SEQ ID NO: 20300 - protein, 592 aa, synthetic construct
PRSRAIDIPVPHADKISWKITDPVWVDQWPLTYEKTLAAIALVQEQLAAGHIEPTNSPWNTPIFIIKKKSGSWRLLQDLRAVNKVMVPMGALQPGLPSPVAPPLNYHKIVIDLKDCFFTIPLHPEDRPYFAFSVPQINFQSPMPRYQWKVLPQGMANSPTLCQKFVAAAIAPVRSQWPEAYILHYMDDILLACDSAEAAKACYAHIISCLTSYGLKIAPDKVQVSEPFSYLGFELHHQQVFTPRVCLKTDHLKTLNDFQKLLGDIQWLRPYLKLPTSALVPLNNILKPDPNPLSVRALTPEAKQSLALINKAIQNQSVQQISYNLPLVLLLLPTPHTPTAVFWQPNGTDPTKNGSPLLWLHLPASPSKVLLTYPSLLAMLIIKGRYTGRQLFGRDPHSIIIPYTQDQLTWLLQTSDEWAIALSSFTGDIDNHYPSDPVIQFAKLHQFIFPKITKCAPIPQATLVFTDGSSNGIAAYVIDNQPISIKSPYLSAQLVELYAILQVFTVLAHQPFNLYTDSAYIAQSVPLLETVPFIKSSTNATPLFSKLQQLILNRQHPFFIGHLRAHLNLPGPLAEGNALADAATQIFPIISD

SEQ ID NO: 20301 - protein, 585 aa, unidentified
LATAVDILAPQRYADPITWKSDEPVWVDQWPLTQEKLAAAQQLVQEQLQAGHIIESNSPWNTPIFVIKKKSGKWRLLQDLRAVNATMVLMGALQPGLPSPVAIPQGYFKIVIDLKDCFFTIPLQPVDQKRFAFSLPSTNFKQPMKRYQWKVLPQGMANSPTLCQKYVAAAIEPVRKSWAQMYIIHYMDDILIAGKLGEQVLQCFAQLKQALTTTGLQIAPEKVQLQDPYTYLGFQINGPKITNQKAVIRRDKLQTLNDFQKLLGDINWLRPYLHLTTGDLKPLFDILKGDSNPNSPRSLSEAALASLQKVETAIAEQFVTQIDYTQPLTFLIFNTTLTPTGLFWQNNPVMWVHLPASPKKVLLPYYDAIADLIILGRDNSKKYFGLEPSTIIQPYSKSQIHWLMQNTETWPIACASYAGNIDNHYPPNKLIQFCKLHAVVFPRIISKTPLDNALLVFTDGSSTGIAAYTFEKTTVRFKTSHTSAQLVELQALIAVLSAFPHRALNVYTDSAYLAHSIPLLETVSHIKHISDTAKFFLQCQQLIYNRSIPFYLGHIRAHSGLPGPLSQGNHITDLATKVVATTLTT

SEQ ID NO: 20302 - protein, 585 aa, synthetic construct
LATAVDILAPQRYADPITWKSDEPVWVDQWPLTQEKLAAAQQLVQEQLQAGHIIESNSPWNTPIFVIKKKSGKWRLLQDLRAVNATMVLMGALQPGLPSPVAPPQGYFKIVIDLKDCFFTIPLQPVDQKRFAFSLPSTNFKQPMKRYQWKVLPQGMANSPTLCQKYVAAAIEPVRKSWAQMYIIHYMDDILIAGKLGEQVLQCFAQLKQALTTTGLQIAPEKVQLQDPYTYLGFQINGPKITNQKAVIRRDKLQTLNDFQKLLGDINWLRPYLHLTTGDLKPLFDILKGDSNPNSPRSLSEAALASLQKVETAIAEQFVTQIDYTQPLTFLIFNTTLTPTGLFWQNNPVMWVHLPASPKKVLLPYYDAIADLIILGRDNSKKYFGLEPSTIIQPYSKSQIHWLMQNTETWPIACASYAGNIDNHYPPNKLIQFCKLHAVVFPRIISKTPLDNALLVFTDGSSTGIAAYTFEKTTVRFKTSHTSAQLVELQALIAVLSAFPHRALNVYTDSAYLAHSIPLLETVSHIKHISDTAKFFLQCQQLIYNRSIPFYLGHIRAHSGLPGPLSQGNHITDLATKVVATTLTT

SEQ ID NO: 20303 - protein, 650 aa, Walleye dermal sarcoma virus
SCQTKNTLNIDEYLLQFPDQLWASLPTDIGRMLVPPITIKIKDNASLPSIRQYPLPKDKTEGLRPLISSLENQGILIKCHSPCNTPIFPIKKAGRDEYRMIHDLRAINNIVAPLTAVVASPTTVLSNLAPSLHWFTVIDLSNAFFSVPIHKDSQYLFAFTFEGHQYTWTVLPQGFIHSPTLFSQALYQSLHKIKFKISSEICIYMDDVLIASKDRDTNLKDTAVMLQHLASEGHKVSKKKLQLCQQEVVYLGQLLTPEGRKILPDRKVTVSQFQQPTTIRQIRAFLGLVGYCRHWIPEFSIHSKFLEKQLKKDTAEPFQLDDQQVEAFNKLKHAITTAPVLVVPDPAKPFQLYTSHSEHASIAVLTQKHAGRTRPIAFLSSKFDAIESGLPPCLKACASIHRSLTQADSFILGAPLIIYTTHAICTLLQRDRSQLVTASRFSKWEADLLRPELTFVACSAVSPAHLYMQSCENNIPPHDCVLLTHTISRPRPDLSDLPIPDPDMTLFSDGSYTTGRGGAAVVMHRPVTDDFIIIHQQPGGASAQTAELLALAAACHLATDKTVNIYTDSRYAYGVVHDFGHLWMHRGFVTSAGTPIKNHKEIEYLLKQIMKPKQVSVIKIEAHTKGVSMEVRGNAAADEAAKNAVFLVQR

SEQ ID NO: 20304 - protein, 650 aa, synthetic construct
SCQTKNTLNIDEYLLQFPDQLWASLPTDIGRMLVPPITIKIKDNASLPSIRQYPLPKDKTEGLRPLISSLENQGILIKCHSPCNTPIFPIKKAGRDEYRMIHDLRAINNIVAPLTAVVASPTTVLSNLAPSLHWFTVIDLSNAFFSVPIHKDSQYLFAFTFEGHQYTWTVLPQGFIHSPTLFNQALYQSLHKIKFKISSEICIYMDDVLIASKDRDTNLKDTAVMLQHLASEGHKVSKKKLQLCQQEVVYLGQLLTPEGRKILPDRKVTVSQFQQPTTIRQIRAFLGLVGYCRHWIPEFSIHSKFLEKQLKPDTAEPFQLDDQQVEAFNKLKHAITTAPVLVVPDPAKPFQLYTSHSEHASIAVLTQKHAGRTRPIAFLSSKFDAIESGLPPCLKACASIHRSLTQADSFILGAPLIIYTTHAICTLLQRDRSQLVTASRFSKWEADLLRPELTFVACSAVSPAHLYMQSCENNIPPHDCVLLTHTISRPRPDLSDLPIPDPDMTLFSDGSYTTGRGGAAVVMHRPVTDDFIIIHQQPGGASAQTAELLALAAACHLATDKTVNIYTDSRYAYGVVHDFGHLWMHRGFVTSAGTPIKNHKEIEYLLKQIMKPKQVSVIKIEAHTKGVSMEVRGNAAADEAAKNAVFLVQR

SEQ ID NO: 20305 - protein, 650 aa, synthetic construct
SCQTKNTLNIDEYLLQFPDQLWASLPTDIGRMLVPPITIKIKDNASLPSIRQYPLPKDKTEGLRPLISSLENQGILIKCHSPCNTPIFPIKKAGRDEYRMIHDLRAINNIVAPLTAVVASPTTVLSNLAPSLHWFTVIDLSNAFFSVPIHKDSQYLFAFTFEGHQYTWTVLPQGFIHSPTLFNQALYQSLHKIKFKISSEICIYMDDVLIASKDRDTNLKDTAVMLQHLASEGHKVSKKKLQLCQQEVVYLGQLLTPEGRKILPDRKVTVSQFQQPTTIRQIRAFLGKVGYCRHFIPEFSIHSKFLEKQLKPDTAEPFQLDDQQVEAFNKLKHAITTAPVLVVPDPAKPFQLYTSHSEHASIAVLTQKHAGRTRPIAFLSSKFDAIESGLPPCLKACASIHRSLTQADSFILGAPLIIYTTHAICTLLQRDRSQLVTASRFSKWEADLLRPELTFVACSAVSPAHLYMQSCENNIPPHDCVLLTHTISRPRPDLSDLPIPDPDMTLFSDGSYTTGRGGAAVVMHRPVTDDFIIIHQQPGGASAQTAELLALAAACHLATDKTVNIYTDSRYAYGVVHDFGHLWMHRGFVTSAGTPIKNHKEIEYLLKQIMKPKQVSVIKIEAHTKGVSMEVRGNAAADEAAKNAVFLVQR

SEQ ID NO: 20306 - protein, 669 aa, Woolly monkey sarcoma virus
VLNLEEEYRLHEKPVPSSIDPSWLQLFPTVWAERAGMGLANQVPPVVVELRSGASPVAVRQYPMSKEAREGIRPHIQRFLDLGVLVPCQSPWNTPLLPVKKPGTNDYRPVQDLREINKRVQDIHPTVPNPYNLLSSLPPSHTWYSVLDLKDAFFCLKLHPNSQPLFAFEWRDPEKGNTGQLTWTRLPQGFKNSPTLFDEALHRDLAPFRALNPQVVLLQYVDDLLVAAPTYRDCKEGTQKLLQELSKLGYRVSAKKAQLCQKEVTYLGYLLKEGKRWLTPARKATVMKIPPPTTPRQVREFLGTAGFCRLWIPGFASLAAPLYPLTKESIPFIWTEEHQKAFDRIKEALLSAPALALPDLTKPFTLYVDERAGVARGVLTQTLGPWRRPVAYLSKKLDPVASGWPTCLKAVAAVALLLKDADKLTLGQNVTVIASHSLESIVRQPPDRWMTNARMTHYQSLLLNERVSFAPPAVLNPATLLPVESEATPVHRCSEILAEETGTRRDLKDQPLPGVPAWYTDGSSFIAEGKRRAGAAIVDGKRTVWASSLPEGTSAQKAELVALTQALRLAEGKDINIYTDSRYAFATAHIHGAIYKQRGLLTSAGKDIKNKEEILALLEAIHLPKRVAIIHCPGHQKGNDPVATGNRRADEAAKQAALSTRVLAETTKP

SEQ ID NO: 20307 - protein, 669 aa, synthetic construct
VLNLEEEYRLHEKPVPSSIDPSWLQLFPTVWAERAGMGLANQVPPVVVELRSGASPVAVRQYPMSKEAREGIRPHIQRFLDLGVLVPCQSPWNTPLLPVKKPGTNDYRPVQDLREINKRVQDIHPTVPNPYNLLSSLPPSHTWYSVLDLKDAFFCLKLHPNSQPLFAFEWRDPEKGNTGQLTWTRLPQGFKNSPTLFNEALHRDLAPFRALNPQVVLLQYVDDLLVAAPTYRDCKEGTQKLLQELSKLGYRVSAKKAQLCQKEVTYLGYLLKEGKRWLTPARKATVMKIPPPTTPRQVREFLGTAGFCRLWIPGFASLAAPLYPLTKPSIPFIWTEEHQKAFDRIKEALLSAPALALPDLTKPFTLYVDERAGVARGVLTQTLGPWRRPVAYLSKKLDPVASGWPTCLKAVAAVALLLKDADKLTLGQNVTVIASHSLESIVRQPPDRWMTNARMTHYQSLLLNERVSFAPPAVLNPATLLPVESEATPVHRCSEILAEETGTRRDLKDQPLPGVPAWYTDGSSFIAEGKRRAGAAIVDGKRTVWASSLPEGTSAQKAELVALTQALRLAEGKDINIYTDSRYAFATAHIHGAIYKQRGWLTSAGKDIKNKEEILALLEAIHLPKRVAIIHCPGHQKGNDPVATGNRRADEAAKQAALSTRVLAETTKP

SEQ ID NO: 20308 - protein, 669 aa, synthetic construct
VLNLEEEYRLHEKPVPSSIDPSWLQLFPTVWAERAGMGLANQVPPVVVELRSGASPVAVRQYPMSKEAREGIRPHIQRFLDLGVLVPCQSPWNTPLLPVKKPGTNDYRPVQDLREINKRVQDIHPTVPNPYNLLSSLPPSHTWYSVLDLKDAFFCLKLHPNSQPLFAFEWRDPEKGNTGQLTWTRLPQGFKNSPTLFNEALHRDLAPFRALNPQVVLLQYVDDLLVAAPTYRDCKEGTQKLLQELSKLGYRVSAKKAQLCQKEVTYLGYLLKEGKRWLTPARKATVMKIPPPTTPRQVREFLGKAGFCRLFIPGFASLAAPLYPLTKPSIPFIWTEEHQKAFDRIKEALLSAPALALPDLTKPFTLYVDERAGVARGVLTQTLGPWRRPVAYLSKKLDPVASGWPTCLKAVAAVALLLKDADKLTLGQNVTVIASHSLESIVRQPPDRWMTNARMTHYQSLLLNERVSFAPPAVLNPATLLPVESEATPVHRCSEILAEETGTRRDLKDQPLPGVPAWYTDGSSFIAEGKRRAGAAIVDGKRTVWASSLPEGTSAQKAELVALTQALRLAEGKDINIYTDSRYAFATAHIHGAIYKQRGWLTSAGKDIKNKEEILALLEAIHLPKRVAIIHCPGHQKGNDPVATGNRRADEAAKQAALSTRVLAETTKP

SEQ ID NO: 20309 - protein, 671 aa, unidentified
TLNIEDEYRLHETSKEPDVPLGSTWLSDFPQAWAETGGMGLAVRQAPLIIPLKATSTPVSIKQYPMSQEARLGIKPHIQRLLDQGILVPCQSPWNTPLLPVKKPGTNDYRPVQDLREVNKRVEDIHPTVPNPYNLLSGLPPSHQWYTVLDLKDAFFCLRLHPTSQPLFAFEWRDPEMGISGQLTWTRLPQGFKNSPTLFDEALHRDLADFRIQHPDLILLQYVDDLLLAATSEQDCQRGTRALLQTLGNLGYRASAKKAQICQKQVKYLGYLLKEGQRWLTEARKETVMGQPTPKTPRQLREFLGTAGFCRLWIPGFAEMAAPLYPLTKTGTLFNWGPDQQKAYQEIKQALLTAPALGLPDLTKPFELFVDEKQGYAKGVLTQKLGPWRRPVAYLSKKLDPVAAGWPPCLRMVAAIAVLTKDAGKLTMGQPLVILAPHAVEALVKQPPDRWLSNARMTHYQAMLLDTDRVQFGPVVALNPATLLPLPEKEAPHDCLEILAETHGTRPDLTDQPIPDADYTWYTDGSSFLQEGQRRAGAAVTTETEVIWARALPAGTSAQRAELIALTQALKMAEGKKLNVYTDSRYAFATAHVHGEIYRRRGLLTSEGREIKNKNEILALLKALFLPKRLSIIHCPGHQKGNSAEARGNRMADQAAREAAMKAVLETSTLL

SEQ ID NO: 20310 - protein, 671 aa, synthetic construct
TLNIEDEYRLHETSKEPDVPLGSTWLSDFPQAWAETGGMGLAVRQAPLIIPLKATSTPVSIKQYPMSQEARLGIKPHIQRLLDQGILVPCQSPWNTPLLPVKKPGTNDYRPVQDLREVNKRVEDIHPTVPNPYNLLSGLPPSHQWYTVLDLKDAFFCLRLHPTSQPLFAFEWRDPEMGISGQLTWTRLPQGFKNSPTLFNEALHRDLADFRIQHPDLILLQYVDDLLLAATSEQDCQRGTRALLQTLGNLGYRASAKKAQICQKQVKYLGYLLKEGQRWLTEARKETVMGQPTPKTPRQLREFLGTAGFCRLWIPGFAEMAAPLYPLTKPGTLFNWGPDQQKAYQEIKQALLTAPALGLPDLTKPFELFVDEKQGYAKGVLTQKLGPWRRPVAYLSKKLDPVAAGWPPCLRMVAAIAVLTKDAGKLTMGQPLVILAPHAVEALVKQPPDRWLSNARMTHYQAMLLDTDRVQFGPVVALNPATLLPLPEKEAPHDCLEILAETHGTRPDLTDQPIPDADYTWYTDGSSFLQEGQRRAGAAVTTETEVIWARALPAGTSAQRAELIALTQALKMAEGKKLNVYTDSRYAFATAHVHGEIYRRRGWLTSEGREIKNKNEILALLKALFLPKRLSIIHCPGHQKGNSAEARGNRMADQAAREAAMKAVLETSTLL

SEQ ID NO: 20311 - protein, 671 aa, synthetic construct
TLNIEDEYRLHETSKEPDVPLGSTWLSDFPQAWAETGGMGLAVRQAPLIIPLKATSTPVSIKQYPMSQEARLGIKPHIQRLLDQGILVPCQSPWNTPLLPVKKPGTNDYRPVQDLREVNKRVEDIHPTVPNPYNLLSGLPPSHQWYTVLDLKDAFFCLRLHPTSQPLFAFEWRDPEMGISGQLTWTRLPQGFKNSPTLFNEALHRDLADFRIQHPDLILLQYVDDLLLAATSEQDCQRGTRALLQTLGNLGYRASAKKAQICQKQVKYLGYLLKEGQRWLTEARKETVMGQPTPKTPRQLREFLGKAGFCRLFIPGFAEMAAPLYPLTKPGTLFNWGPDQQKAYQEIKQALLTAPALGLPDLTKPFELFVDEKQGYAKGVLTQKLGPWRRPVAYLSKKLDPVAAGWPPCLRMVAAIAVLTKDAGKLTMGQPLVILAPHAVEALVKQPPDRWLSNARMTHYQAMLLDTDRVQFGPVVALNPATLLPLPEKEAPHDCLEILAETHGTRPDLTDQPIPDADYTWYTDGSSFLQEGQRRAGAAVTTETEVIWARALPAGTSAQRAELIALTQALKMAEGKKLNVYTDSRYAFATAHVHGEIYRRRGWLTSEGREIKNKNEILALLKALFLPKRLSIIHCPGHQKGNSAEARGNRMADQAAREAAMKAVLETSTLL

SEQ ID NO: 20312 - protein, 122 aa, synthetic construct
MASNFTQFVLVDNGGTGDVTVAPSNFANGIAEWISSNSRSQAYKVTCSVRQSSAQNRKYTIKVEVPKGAWRSYLNMELTIPIFATNSDCELIVKAMQGLLKDGNPIPSAIAANSGIYGSGRA

SEQ ID NO: 20313 - protein, 130 aa, synthetic construct
MASNFTQFVLVDNGGTGDVTVAPSNFANGVAEWISSNSRSQAYKVTCSVRQSSAQKRKYTIKVEVPKVATQTVGGVELPVAAWRSYLNMELTIPIFATNSDCELIVKAMQGLLKDGNPIPSAIAANSGLY

SEQ ID NO: 20314 - protein, 130 aa, synthetic construct
MGSMSKTIVLSVGEATRTLTEIQSTADRQIFEEKVGPLVGRLRLTASLRQNGAKTAYRVNLKLDQADVVDSGLPKVRYTQVWSHDVTIVANSTEASRKSLYDLTKSLVATSQVEDLVVNLVPLGRGSGRA

SEQ ID NO: 20315 - protein, 70 aa, synthetic construct
MGSMKSIRCKNCNKLLFKADSFDHIEIRCPRCKRHIIMLNACEHPTEKHCGKREKITHSDETVRYGSGRA

SEQ ID NO: 20316 - protein, 125 aa, synthetic construct
YVRFEVPEDMQNEALSLLEKVRESGKVKKGTNRTTHAVYRGLAKLVYIAEDVDPPEIVAHLPLLCEEKNVPYIYVKSKNDLGRAVGGWPIGASAAIINEGELRKELGSLVEKIKGLQKRSHMHLE

SEQ ID NO: 20317 - protein, 125 aa, synthetic construct
YVRFEVPEDMQNEALSLLEKVRESGKVKKGTNSTTLAVSRGLAKLVYIAEDVDPPEIVAHLPLLCEEKNVPYIYVKSKNDLGRAVGRVYPGASAAIINEGELRKELGSLVEKIKGLQKRSHMHLE

SEQ ID NO: 20318 - protein, 22 aa, synthetic construct
MDAQTRRRERRAEKQAQWKAAN

SEQ ID NO: 20319 - protein, 119 aa, synthetic construct
MYVRFEVPEDMQNEALSLLEKVRESGKVKKGTNETTKAVERGLAKLVYIAEDVDPPEIVAHLPLLCEEKNVPYIYVKSKNDLGRAVGIEVPCASAAIINEGELRKELGSLVEKIKGLQK

SEQ ID NO: 20320 - protein, 125 aa, synthetic construct
YVRFEVPEDMQNEALSLLEKVRESGKVKKGTNETTKAVERGLAKLVYIAEDVDPPEIVAHLPLLCEEKNVPYIYVKSKNDLGRAVGIEVPCASAAIINEGELRKELGSLVEKIKGLQKRSHMHLE

SEQ ID NO: 20321 - protein, 1082 aa, Neisseria meningitidis
MAAFKPNPINYILGLDIGIASVGWAMVEIDEEENPIRLIDLGVRVFERAEVPKTGDSLAMARRLARSVRRLTRRRAHRLLRARRLLKREGVLQAADFDENGLIKSLPNTPWQLRAAALDRKLTPLEWSAVLLHLIKHRGYLSQRKNEGETADKELGALLKGVANNAHALQTGDFRTPAELALNKFEKESGHIRNQRGDYSHTFSRKDLQAELILLFEKQKEFGNPHVSGGLKEGIETLLMTQRPALSGDAVQKMLGHCTFEPAEPKAAKNTYTAERFIWLTKLNNLRILEQGSERPLTDTERATLMDEPYRKSKLTYAQARKLLGLEDTAFFKGLRYGKDNAEASTLMEMKAYHAISRALEKEGLKDKKSPLNLSSELQDEIGTAFSLFKTDEDITGRLKDRVQPEILEALLKHISFDKFVQISLKALRRIVPLMEQGKRYDEACAEIYGDHYGKKNTEEKIYLPPIPADEIRNPVVLRALSQARKVINGVVRRYGSPARIHIETAREVGKSFKDRKEIEKRQEENRKDREKAAAKFREYFPNFVGEPKSKDILKLRLYEQQHGKCLYSGKEINLVRLNEKGYVEIDHALPFSRTWDDSFNNKVLVLGSENQNKGNQTPYEYFNGKDNSREWQEFKARVETSRFPRSKKQRILLQKFDEDGFKECNLNDTRYVNRFLCQFVADHILLTGKGKRRVFASNGQITNLLRGFWGLRKVRAENDRHHALDAVVVACSTVAMQQKITRFVRYKEMNAFDGKTIDKETGKVLHQKTHFPQPWEFFAQEVMIRVFGKPDGKPEFEEADTPEKLRTLLAEKLSSRPEAVHEYVTPLFVSRAPNRKMSGAHKDTLRSAKRFVKHNEKISVKRVWLTEIKLADLENMVNYKNGREIELYEALKARLEAYGGNAKQAFDPKDNPFYKKGGQLVKAVRVEKTQESGVLLNKKNAYTIADNGDMVRVDVFCKVDKKGKNQYFIVPIYAWQVAENILPDIDCKGYRIDDSYTFCFSLHKYDLIAFQKDEKSKVEFAYYINCDSSNGRFYLAWHDKGSKEQQFRISTQNLVLIQKYQVNELGKEIRPCRLKKRPPVR

SEQ ID NO: 20322 - protein, 1055 aa, Pasteurella pneumotropica
MQNNPLNYILGLDLGIASIGWAVVEIDEESSPIRLIDVGVRTFERAEVAKTGESLALSRRLARSSRRLIKRRAERLKKAKRLLKAEKILHSIDEKLPINVWQLRVKGLKEKLERQEWAAVLLHLSKHRGYLSQRKNEGKSDNKELGALLSGIASNHQMLQSSEYRTPAEIAVKKFQVEEGHIRNQRGSYTHTFSRLDLLAEMELLFQRQAELGNSYTSTTLLENLTALLMWQKPALAGDAILKMLGKCTFEPSEYKAAKNSYSAERFVWLTKLNNLRILENGTERALNDNERFALLEQPYEKSKLTYAQVRAMLALSDNAIFKGVRYLGEDKKTVESKTTLIEMKFYHQIRKTLGSAELKKEWNELKGNSDLLDEIGTAFSLYKTDDDICRYLEGKLPERVLNALLENLNFDKFIQLSLKALHQILPLMLQGQRYDEAVSAIYGDHYGKKSTETTRLLPTIPADEIRNPVVLRTLTQARKVINAVVRLYGSPARIHIETAREVGKSYQDRKKLEKQQEDNRKQRESAVKKFKEMFPHFVGEPKGKDILKMRLYELQQAKCLYSGKSLELHRLLEKGYVEVDHALPFSRTWDDSFNNKVLVLANENQNKGNLTPYEWLDGKNNSERWQHFVVRVQTSGFSYAKKQRILNHKLDEKGFIERNLNDTRYVARFLCNFIADNMLLVGKGKRNVFASNGQITALLRHRWGLQKVREQNDRHHALDAVVVACSTVAMQQKITRFVRYNEGNVFSGERIDRETGEIIPLHFPSPWAFFKENVEIRIFSENPKLELENRLPDYPQYNHEWVQPLFVSRMPTRKMTGQGHMETVKSAKRLNEGLSVLKVPLTQLKLSDLERMVNRDREIALYESLKARLEQFGNDPAKAFAEPFYKKGGALVKAVRLEQTQKSGVLVRDGNGVADNASMVRVDVFTKGGKYFLVPIYTWQVAKGILPNRAATQGKDENDWDIMDEMATFQFSLCQNDLIKLVTKKKTIFGYFNGLNRATSNINIKEHDLDKSKGKLGIYLEVGVKLAISLEKYQVDELGKNIRPCRPTKRQHVR

SEQ ID NO: 20323 - protein, 1053 aa, Staphylococcus aureus
MKRNYILGLDIGITSVGYGIIDYETRDVIDAGVRLFKEANVENNEGRRSKRGARRLKRRRRHRIQRVKKLLFDYNLLTDHSELSGINPYEARVKGLSQKLSEEEFSAALLHLAKRRGVHNVNEVEEDTGNELSTKEQISRNSKALEEKYVAELQLERLKKDGEVRGSINRFKTSDYVKEAKQLLKVQKAYHQLDQSFIDTYIDLLETRRTYYEGPGEGSPFGWKDIKEWYEMLMGHCTYFPEELRSVKYAYNADLYNALNDLNNLVITRDENEKLEYYEKFQIIENVFKQKKKPTLKQIAKEILVNEEDIKGYRVTSTGKPEFTNLKVYHDIKDITARKEIIENAELLDQIAKILTIYQSSEDIQEELTNLNSELTQEEIEQISNLKGYTGTHNLSLKAINLILDELWHTNDNQIAIFNRLKLVPKKVDLSQQKEIPTTLVDDFILSPVVKRSFIQSIKVINAIIKKYGLPNDIIIELAREKNSKDAQKMINEMQKRNRQTNERIEEIIRTTGKENAKYLIEKIKLHDMQEGKCLYSLEAIPLEDLLNNPFNYEVDHIIPRSVSFDNSFNNKVLVKQEENSKKGNRTPFQYLSSSDSKISYETFKKHILNLAKGKGRISKTKKEYLLEERDINRFSVQKDFINRNLVDTRYATRGLMNLLRSYFRVNNLDVKVKSINGGFTSFLRRKWKFKKERNKGYKHHAEDALIIANADFIFKEWKKLDKAKKVMENQMFEEKQAESMPEIETEQEYKEIFITPHQIKHIKDFKDYKYSHRVDKKPNRELINDTLYSTRKDDKGNTLIVNNLNGLYDKDNDKLKKLINKSPEKLLMYHHDPQTYQKLKLIMEQYGDEKNPLYKYYEETGNYLTKYSKKDNGPVIKKIKYYGNKLNAHLDITDDYPNSRNKVVKLSLKPYRFDVYLDNGVYKFVTVKNLDVIKKENYYEVNSKCYEEAKKLKKISNQAEFIASFYNNDLIKINGELYRVIGVNNDLLNRIEVNMIDITYREYLENMNDKRPPRIIKTIASKTQSIKKYSTDILGNLYEVKSKKHPQIIKKG

SEQ ID NO: 20324 - protein, 1053 aa, Staphylococcus aureus
MKRNYILGLDIGITSVGYGIIDYETRDVIDAGVRLFKEANVENNEGRRSKRGARRLKRRRRHRIQRVKKLLFDYNLLTDHSELSGINPYEARVKGLSQKLSEEEFSAALLHLAKRRGVHNVNEVEEDTGNELSTKEQISRNSKALEEKYVAELQLERLKKDGEVRGSINRFKTSDYVKEAKQLLKVQKAYHQLDQSFIDTYIDLLETRRTYYEGPGEGSPFGWKDIKEWYEMLMGHCTYFPEELRSVKYAYNADLYNALNDLNNLVITRDENEKLEYYEKFQIIENVFKQKKKPTLKQIAKEILVNEEDIKGYRVTSTGKPEFTNLKVYHDIKDITARKEIIENAELLDQIAKILTIYQSSEDIQEELTNLNSELTQEEIEQISNLKGYTGTHNLSLKAINLILDELWHTNDNQIAIFNRLKLVPKKVDLSQQKEIPTTLVDDFILSPVVKRSFIQSIKVINAIIKKYGLPNDIIIELAREKNSKDAQKMINEMQKRNRQTNERIEEIIRTTGKENAKYLIEKIKLHDMQEGKCLYSLEAIPLEDLLNNPFNYEVDHIIPRSVSFDNSFNNKVLVKQEENSKKGNRTPFQYLSSSDSKISYETFKKHILNLAKGKGRISKTKKEYLLEERDINRFSVQKDFINRNLVDTRYATRGLMNLLRSYFRVNNLDVKVKSINGGFTSFLRRKWKFKKERNKGYKHHAEDALIIANADFIFKEWKKLDKAKKVMENQMFEEKQAESMPEIETEQEYKEIFITPHQIKHIKDFKDYKYSHRVDKKPNRKLINDTLYSTRKDDKGNTLIVNNLNGLYDKDNDKLKKLINKSPEKLLMYHHDPQTYQKLKLIMEQYGDEKNPLYKYYEETGNYLTKYSKKDNGPVIKKIKYYGNKLNAHLDITDDYPNSRNKVVKLSLKPYRFDVYLDNGVYKFVTVKNLDVIKKENYYEVNSKCYEEAKKLKKISNQAEFIASFYKNDLIKINGELYRVIGVNNDLLNRIEVNMIDITYREYLENMNDKRPPHIIKTIASKTQSIKKYSTDILGNLYEVKSKKHPQIIKKG

SEQ ID NO: 20325 - protein, 1061 aa, Staphylococcus auricularis
MQENQQKQNYILGLDIGITSVGYGLIDSKTREVIDAGVRLFPEADSENNSNRRSKRGARRLKRRRIHRLNRVKDLLADYQMIDLNNVPKSTDPYTIRVKGLREPLTKEEFAIALLHIAKRRGLHNISVSMGDEEQDNELSTKQQLQKNAQQLQDKYVCELQLERLTNINKVRGEKNRFKTEDFVKEVKQLCETQRQYHNIDDQFIQQYIDLVSTRREYFEGPGNGSPYGWDGDLLKWYEKLMGRCTYFPEELRSVKYAYSADLFNALNDLNNLVVTRDDNPKLEYYEKYHIIENVFKQKKNPTLKQIAKEIGVQDYDIRGYRITKSGKPQFTSFKLYHDLKNIFEQAKYLEDVEMLDEIAKILTIYQDEISIKKALDQLPELLTESEKSQIAQLTGYTGTHRLSLKCIHIVIDELWESPENQMEIFTRLNLKPKKVEMSEIDSIPTTLVDEFILSPVVKRAFIQSIKVINAVINRFGLPEDIIIELAREKNSKDRRKFINKLQKQNEATRKKIEQLLAKYGNTNAKYMIEKIKLHDMQEGKCLYSLEAIPLEDLLSNPTHYEVDHIIPRSVSFDNSLNNKVLVKQSENSKKGNRTPYQYLSSNESKISYNQFKQHILNLSKAKDRISKKKRDMLLEERDINKFEVQKEFINRNLVDTRYATRELSNLLKTYFSTHDYAVKVKTINGGFTNHLRKVWDFKKHRNHGYKHHAEDALVIANADFLFKTHKALRRTDKILEQPGLEVNDTTVKVDTEEKYQELFETPKQVKNIKQFRDFKYSHRVDKKPNRQLINDTLYSTREIDGETYVVQTLKDLYAKDNEKVKKLFTERPQKILMYQHDPKTFEKLMTILNQYAEAKNPLAAYYEDKGEYVTKYAKKGNGPAIHKIKYIDKKLGSYLDVSNKYPETQNKLVKLSLKSFRFDIYKCEQGYKMVSIGYLDVLKKDNYYYIPKDKYEAEKQKKKIKESDLFVGSFYYNDLIMYEDELFRVIGVNSDINNLVELNMVDITYKDFCEVNNVTGEKRIKKTIGKRVVLIEKYTTDILGNLYKTPLPKKPQLIFKRGEL

SEQ ID NO: 20326 - protein, 1061 aa, Staphylococcus auricularis
MQENQQKQNYILGLDIGITSVGYGLIDSKTREVIDAGVRLFPEADSENNSNRRSKRGARRLKRRRIHRLNRVKDLLADYQMIDLNNVPKSTDPYTIRVKGLREPLTKEEFAIALLHIAKRRGLHNISVSMGDEEQDNELSTKQQLQKNAQQLQDKYVCELQLERLTNINKVRGEKNRFKTEDFVKEVKQLCETQRQYHNIDDQFIQQYIDLVSTRREYFEGPGNGSPYGWDGDLLKWYEKLMGRCTYFPEELRSVKYAYSADLFNALNDLNNLVVTRDDNPKLEYYEKYHIIENVFKQKKNPTLKQIAKEIGVQDYDIRGYRITKSGKPQFTSFKLYHDLKNIFEQAKYLEDVEMLDEIAKILTIYQDEISIKKALDQLPELLTESEKSQIAQLTGYTGTHRLSLKCIHIVIDELWESPENQMEIFTRLNLKPKKVEMSEIDSIPTTLVDEFILSPVVKRAFIQSIKVINAVINRFGLPEDIIIELAREKNSKDRRKFINKLQKQNEATRKKIEQLLAKYGNTNAKYMIEKIKLHDMQEGKCLYSLEAIPLEDLLSNPTHYEVDHIIPRSVSFDNSLNNKVLVKQSENSKKGNRTPYQYLSSNESKISYNQFKQHILNLSKAKDRISKKKRDMLLEERDINKFEVQKEFINRNLVDTRYATRELSNLLKTYFSTHDYAVKVKTINGGFTNHLRKVWDFKKHRNHGYKHHAEDALVIANADFLFKTHKALRRTDKILEQPGLEVNDTTVKVDTEEKYQELFETPKQVKNIKQFRDFKYSHRVDKKPNRKLINDTLYSTREIDGETYVVQTLKDLYAKDNEKVKKLFTERPQKILMYQHDPKTFEKLMTILNQYAEAKNPLAAYYEDKGEYVTKYAKKGNGPAIHKIKYIDKKLGSYLDVSNKYPETQNKLVKLSLKSFRFDIYKCEQGYKMVSIGYLDVLKKDNYYYIPKDKYEAEKQKKKIKESDLFVGSFYKNDLIMYEDELFRVIGVNSDINNLVELNMVDITYKDFCEVNNVTGEKHIKKTIGKRVVLIEKYTTDILGNLYKTPLPKKPQLIFKRGEL

SEQ ID NO: 20327 - protein, 1375 aa, Streptococcus canis
MEKKYSIGLDIGTNSVGWAVITDDYKVPSKKFKVLGNTNRKSIKKNLMGALLFDSGETAEATRLKRTARRRYTRRKNRIRYLQEIFANEMAKLDDSFFQRLEESFLVEEDKKNERHPIFGNLADEVAYHRNYPTIYHLRKKLADSPEKADLRLIYLALAHIIKFRGHFLIEGKLNAENSDVAKLFYQLIQTYNQLFEESPLDEIEVDAKGILSARLSKSKRLEKLIAVFPNEKKNGLFGNIIALALGLTPNFKSNFDLTEDAKLQLSKDTYDDDLDELLGQIGDQYADLFSAAKNLSDAILLSDILRSNSEVTKAPLSASMVKRYDEHHQDLALLKTLVRQQFPEKYAEIFKDDTKNGYAGYVGADKKLRKRSGKLATEEEFYKFIKPILEKMDGAEELLAKLNRDDLLRKQRTFDNGSIPHQIHLKELHAILRRQEEFYPFLKENREKIEKILTFRIPYYVGPLARGNSRFAWLTRKSEEAITPWNFEEVVDKGASAQSFIERMTNFDEQLPNKKVLPKHSLLYEYFTVYNELTKVKYVTERMRKPEFLSGEQKKAIVDLLFKTNRKVTVKQLKEDYFKKIECFDSVEIIGVEDRFNASLGTYHDLLKIIKDKDFLDNEENEDILEDIVLTLTLFEDREMIEERLKTYAHLFDDKVMKQLKRRHYTGWGRLSRKMINGIRDKQSGKTILDFLKSDGFSNRNFMQLIHDDSLTFKEEIEKAQVSGQGDSLHEQIADLAGSPAIKKGILQTVKIVDELVKVMGHKPENIVIEMARENQTTTKGLQQSRERKKRIEEGIKELESQILKENPVENTQLQNEKLYLYYLQNGRDMYVDQELDINRLSDYDVDHIVPQSFIKDDSIDNKVLTRSVENRGKSDNVPSEEVVKKMKNYWRQLLNAKLITQRKFDNLTKAERGGLSEADKAGFIKRQLVETRQITKHVARILDSRMNTKRDKNDKPIREVKVITLKSKLVSDFRKDFQLYKVRDINNYHHAHDAYLNAVVGTALIKKYPKLESEFVYGDYKVYDVRKMIAKSEQEIGKATAKRFFYSNIMNFFKTEVKLANGEIRKRPLIETNGETGEVVWNKEKDFATVRKVLAMPQVNIVKKTEVQTGGFSKESILSKRESAKLIPRKKGWDTRKYGGFGSPTVAYSILVVAKVEKGKAKKLKSVKVLVGITIMEKGSYEKDPIGFLEAKGYKDIKKELIFKLPKYSLFELENGRRRMLASAKELQKANELVLPQHLVRLLYYTQNISATTGSNNLGYIEQHREEFKEIFEKIIDFSEKYILKNKVNSNLKSSFDEQFAVSDSILLSNSFVSLLKYTSFGASGGFTFLDLDVKQGRLRYQTVTEVLDATLIYQSITGLYETRTDLSQLGGD

SEQ ID NO: 20328 - protein, 1368 aa, Streptococcus pyogenes [sequence omitted]

SEQ ID NO: 20329 - protein, 1368 aa, Streptococcus pyogenes
MDKKYSIGLDIGTNSVGWAVITDEYKVPSKKFKVLGNTDRHSIKKNLIGALLFDSGETAEATRLKRTARRRYTRRKNRICYLQEIFSNEMAKVDDSFFHRLEESFLVEEDKKHERHPIFGNIVDEVAYHEKYPTIYHLRKKLVDSTDKADLRLIYLALAHMIKFRGHFLIEGDLNPDNSDVDKLFIQLVQTYNQLFEENPINASGVDAKAILSARLSKSRRLENLIAQLPGEKKNGLFGNLIALSLGLTPNFKSNFDLAEDAKLQLSKDTYDDDLDNLLAQIGDQYADLFLAAKNLSDAILLSDILRVNTEITKAPLSASMIKRYDEHHQDLTLLKALVRQQLPEKYKEIFFDQSKNGYAGYIDGGASQEEFYKFIKPILEKMDGTEELLVKLNREDLLRKQRTFDNGSIPHQIHLGELHAILRRQEDFYPFLKDNREKIEKILTFRIPYYVGPLARGNSRFAWMTRKSEETITPWNFEEVVDKGASAQSFIERMTNFDKNLPNEKVLPKHSLLYEYFTVYNELTKVKYVTEGMRKPAFLSGEQKKAIVDLLFKTNRKVTVKQLKEDYFKKIECFDSVEISGVEDRFNASLGTYHDLLKIIKDKDFLDNEENEDILEDIVLTLTLFEDREMIEERLKTYAHLFDDKVMKQLKRRRYTGWGRLSRKLINGIRDKQSGKTILDFLKSDGFANRNFMQLIHDDSLTFKEDIQKAQVSGQGDSLHEHIANLAGSPAIKKGILQTVKVVDELVKVMGRHKPENIVIEMARENQTTQKGQKNSRERMKRIEEGIKELGSQILKEHPVENTQLQNEKLYLYYLQNGRDMYVDQELDINRLSDYDVDHIVPQSFLKDDSIDNKVLTRSDKNRGKSDNVPSEEVVKKMKNYWRQLLNAKLITQRKFDNLTKAERGGLSELDKAGFIKRQLVETRQITKHVAQILDSRMNTKYDENDKLIREVKVITLKSKLVSDFRKDFQFYKVREINNYHHAHDAYLNAVVGTALIKKYPKLESEFVYGDYKVYDVRKMIAKSEQEIGKATAKYFFYSNIMNFFKTEITLANGEIRKRPLIETNGETGEIVWDKGRDFATVRKVLSMPQVNIVKKTEVQTGGFSKESIRPKRNSDKLIARKKDWDPKKYGGFVSPTVAYSVLVVAKVEKGKSKKLKSVKELLGITIMERSSFEKNPIDFLEAKGYKEVKKDLIIKLPKYSLFELENGRKRMLASARFLQKGNELALPSKYVNFLYLASHYEKLKGSPEDNEQKQLFVEQHKHYLDEIIEQISEFSKRVILADANLDKVLSAYNKHRDKPIREQAENIIHLFTLTNLGAPRAFKYFDTTIDRKVYRSTKEVLDATLIHQSITGLYETRIDLSQLGGD

SEQ ID NO: 20330 - protein, 1368 aa, Streptococcus pyogenes
MDKKYSIGLDIGTNSVGWAVITDEYKVPSKKFKVLGNTDRHSIKKNLIGALLFDSGETAERTRLKRTARRRYTRRKNRICYLQEIFSNEMAKVDDSFFHRLEESFLVEEDKKHERHPIFGNIVDEVAYHEKYPTIYHLRKKLVDSTDKADLRLIYLALAHMIKFRGHFLIEGDLNPDNSDVDKLFIQLVQTYNQLFEENPINASGVDAKAILSARLSKSRRLENLIAQLPGEKKNGLFGNLIALSLGLTPNFKSNFDLAEDAKLQLSKDTYDDDLDNLLAQIGDQYADLFLAAKNLSDAILLSDILRVNTEITKAPLSASMIKRYDEHHQDLTLLKALVRQQLPEKYKEIFFDQSKNGYAGYIDGGASQEEFYKFIKPILEKMDGTEELLVKLNREDLLRKQRTFDNGSIPHQIHLGELHAILRRQEDFYPFLKDNREKIEKILTFRIPYYVGPLARGNSRFAWMTRKSEETITPWNFEEVVDKGASAQSFIERMTNFDKNLPNEKVLPKHSLLYEYFTVYNELTKVKYVTEGMRKPAFLSGEQKKAIVDLLFKTNRKVTVKQLKEDYFKKIECFDSVEISGVEDRFNASLGTYHDLLKIIKDKDFLDNEENEDILEDIVLTLTLFEDREMIEERLKTYAHLFDDKVMKQLKRRRYTGWGRLSRKLINGIRDKQSGKTILDFLKSDGFANRNFMQLIHDDSLTFKEDIQKAQVSGQGDSLHEHIANLAGSPAIKKGILQTVKVVDELVKVMGRHKPENIVIEMARENQTTQKGQKNSRERMKRIEEGIKELGSQILKEHPVENTQLQNEKLYLYYLQNGRDMYVDQELDINRLSDYDVDHIVPQSFLKDDSIDNKVLTRSDKNRGKSDNVPSEEVVKKMKNYWRQLLNAKLITQRKFDNLTKAERGGLSELDKAGFIKRQLVETRQITKHVAQILDSRMNTKYDENDKLIREVKVITLKSKLVSDFRKDFQFYKVREINNYHHAHDAYLNAVVGTALIKKYPKLESEFVYGDYKVYDVRKMIAKSEQEIGKATAKYFFYSNIMNFFKTEITLANGEIRKRPLIETNGETGEIVWDKGRDFATVRKVLSMPQVNIVKKTEVQTGGFSKESIRPKRNSDKLIARKKDWDPKKYGGFLWPTVAYSVLVVAKVEKGKSKKLKSVKELLGITIMERSSFEKNPIDFLEAKGYKEVKKDLIIKLPKYSLFELENGRKRMLASAKQLQKGNELALPSKYVNFLYLASHYEKLKGSPEDNEQKQLFVEQHKHYLDEIIEQISEFSKRVILADANLDKVLSAYNKHRDKPIREQAENIIHLFTLTRLGAPRAFKYFDTTIDPKQYRSTKEVLDATLIHQSITGLYETRIDLSQLGGD

SEQ ID NO: 20331 - protein, 1121 aa, Streptococcus thermophilus
MSDLVLGLDIGIGSVGVGILNKVTGEIIHKNSRIFPAAQAENNLVRRTNRQGRRLARRKKHRRVRLNRLFEESGLITDFTKISINLNPYQLRVKGLTDELSNEELFIALKNMVKHRGISYLDDASDDGNSSVGDYAQIVKENSKQLETKTPGQIQLERYQTYGQLRGDFTVEKDGKKHRLINVFPTSAYRSEALRILQTQQEFNPQITDEFINRYLEILTGKRKYYHGPGNEKSRTDYGRYRTSGETLDNIFGILIGKCTFYPDEFRAAKASYTAQEFNLLNDLNNLTVPTETKKLSKEQKNQIINYVKNEKAMGPAKLFKYIAKLLSCDVADIKGYRIDKSGKAEIHTFEAYRKMKTLETLDIEQMDRETLDKLAYVLTLNTEREGIQEALEHEFADGSFSQKQVDELVQFRKANSSIFGKGWHNFSVKLMMELIPELYETSEEQMTILTRLGKQKTTSSSNKTKYIDEKLLTEEIYNPVVAKSVRQAIKIVNAAIKEYGDFDNIVIEMARETNEDDEKKAIQKIQKANKDEKDAAMLKAANQYNGKAELPHSVFHGHKQLATKIRLWHQQGERCLYTGKTISIHDLINNSNQFEVDHILPLSITFDDSLANKVLVYATANQEKGQRTPYQALDSMDDAWSFRELKAFVRESKTLSNKKKEYLLTEEDISKFDVRKKFIERNLVDTRYASRVVLNALQEHFRAHKIDTKVSVVRGQFTSQLRRHWGIEKTRDTYHHHAVDALIIAASSQLNLWKKQKNTLVSYSEDQLLDIETGELISDDEYKESVFKAPYQHFVDTLKSKEFEDSILFSYQVDSKFNRKISDATIYATRQAKVGKDKADETYVLGKIKDIYTQDGYDAFMKIYKKDKSKFLMYRHDPQTFEKVIEPILENYPNKQINEKGKEVPCNPFLKYKEEHGYIRKYSKKGNGPEIKSLKYYDSKLGNHIDITPKDSNNKVVLQSVSPWRADVYFNKTTGKYEILGLKYADLQFEKGTGTYKISQEKYNDIKKKEGVDSDSEFKFTLYKNDLLLVKDTETKEQQLFRFLSRTMPKQKHYVELKPYDKQKFEGGEALIKVLGNVANSGQCKKGLGKSNISIYKVRTDVLGNQHIIKNEGDKPKLDF

SEQ ID NO: 20332 - protein, 1092 aa, Brevibacillus laterosporus
MAYTMGIDVGIASCGWAIVDLERQRIIDIGVRTFEKAENPKNGEALAVPRREARSSRRRLRRKKHRIERLKHMFVRNGLAVDIQHLEQTLRSQNEIDVWQLRVDGLDRMLTQKEWLRVLIHLAQRRGFQSNRKTDGSSEDGQVLVNVTENDRLMEEKDYRTVAEMMVKDEKFSDHKRNKNGNYHGVVSRSSLLVEIHTLFETQRQHHNSLASKDFELEYVNIWSAQRPVATKDQIEKMIGTCTFLPKEKRAPKASWHFQYFMLLQTINHIRITNVQGTRSLNKEEIEQVVNMALTKSKVSYHDTRKILDLSEEYQFVGLDYGKEDEKKKVESKETIIKLDDYHKLNKIFNEVELAKGETWEADDYDTVAYALTFFKDDEDIRDYLQNKYKDSKNRLVKNLANKEYTNELIGKVSTLSFRKVGHLSLKALRKIIPFLEQGMTYDKACQAAGFDFQGISKKKRSVVLPVIDQISNPVVNRALTQTRKVINALIKKYGSPETIHIETARELSKTFDERKNITKDYKENRDKNEHAKKHLSELGIINPTGLDIVKYKLWCEQQGRCMYSNQPISFERLKESGYTEVDHIIPYSRSMNDSYNNRVLVMTRENREKGNQTPFEYMGNDTQRWYEFEQRVTTNPQIKKEKRQNLLLKGFTNRRELEMLERNLNDTRYITKYLSHFISTNLEFSPSDKKKKVVNTSGRITSHLRSRWGLEKNRGQNDLHHAMDAIVIAVTSDSFIQQVTNYYKRKERRELNGDDKFPLPWKFFREEVIARLSPNPKEQIEALPNHFYSEDELADLQPIFVSRMPKRSITGEAHQAQFRRVVGKTKEGKNITAKKTALVDISYDKNGDFNMYGRETDPATYEAIKERYLEFGGNVKKAFSTDLHKPKKDGTKGPLIKSVRIMENKTLVHPVNKGKGVVYNSSIVRTDVFQRKEKYYLLPVYVTDVTKGKLPNKVIVAKKGYHDWIEVDDSFTFLFSLYPNDLIFIRQNPKKKISLKKRIESHSISDSKEVQEIHAYYKGVDSSTAAIEFIIHDGSYYAKGVGVQNLDCFEKYQVDILGNYFKVKGEKRLELETSDSNHKGKDVNSIKSTSR

SEQ ID NO: 20333 - protein, 1053 aa, Staphylococcus aureus
MKRNYILGLDIGITSVGYGIIDYETRDVIDAGVRLFKEANVENNEGRRSKRGARRLKRRRRHRIQRVKKLLFDYNLLTDHSELSGINPYEARVKGLSQKLSEEEFSAALLHLAKRRGVHNVNEVEEDTGNELSTKEQISRNSKALEEKYVAELQLERLKKDGEVRGSINRFKTSDYVKEAKQLLKVQKAYHQLDQSFIDTYIDLLETRRTYYEGPGEGSPFGWKDIKEWYEMLMGHCTYFPEELRSVKYAYNADLYNALNDLNNLVITRDENEKLEYYEKFQIIENVFKQKKKPTLKQIAKEILVNEEDIKGYRVTSTGKPEFTNLKVYHDIKDITARKEIIENAELLDQIAKILTIYQSSEDIQEELTNLNSELTQEEIEQISNLKGYTGTHNLSLKAINLILDELWHTNDNQIAIFNRLKLVPKKVDLSQQKEIPTTLVDDFILSPVVKRSFIQSIKVINAIIKKYGLPNDIIIELAREKNSKDAQKMINEMQKRNRQTNERIEEIIRTTGKENAKYLIEKIKLHDMQEGKCLYSLEAIPLEDLLNNPFNYEVDHIIPRSVSFDNSFNNKVLVKQEENSKKGNRTPFQYLSSSDSKISYETFKKHILNLAKGKGRISKTKKEYLLEERDINRFSVQKDFINRNLVDTRYATRGLMNLLRSYFRVNNLDVKVKSINGGFTSFLRRKWKFKKERNKGYKHHAEDALIIANADFIFKEWKKLDKAKKVMENQMFEEKQAESMPEIETEQEYKEIFITPHQIKHIKDFKDYKYSHRVDKKPNRKLINDTLYSTRKDDKGNTLIVNNLNGLYDKDNDKLKKLINKSPEKLLMYHHDPQTYQKLKLIMEQYGDEKNPLYKYYEETGNYLTKYSKKDNGPVIKKIKYYGNKLNAHLDITDDYPNSRNKVVKLSLKPYRFDVYLDNGVYKFVTVKNLDVIKKENYYEVNSKCYEEAKKLKKISNQAEFIASFYKNDLIKINGELYRVIGVNSDKNNLIEVNMIDITYREYLENMNDKRPPHIIKTIASKTQSIKKYSTDILGNLYEVKSKKHPQIIKKG

SEQ ID NO: 20334 - protein, 1053 aa, Staphylococcus aureus
MKRNYILGLDIGITSVGYGIIDYETRDVIDAGVRLFKEANVENNEGRRSKRGARRLKRRRRHRIQRVKKLLFDYNLLTDHSELSGINPYEARVKGLSQKLSEEEFSAALLHLAKRRGVHNVNEVEEDTGNELSTKEQISRNSKALEEKYVAELQLERLKKDGEVRGSINRFKTSDYVKEAKQLLKVQKAYHQLDQSFIDTYIDLLETRRTYYEGPGEGSPFGWKDIKEWYEMLMGHCTYFPEELRSVKYAYNADLYNALNDLNNLVITRDENEKLEYYEKFQIIENVFKQKKKPTLKQIAKEILVNEEDIKGYRVTSTGKPEFTNLKVYHDIKDITARKEIIENAELLDQIAKILTIYQSSEDIQEELTNLNSELTQEEIEQISNLKGYTGTHNLSLKAINLILDELWHTNDNQIAIFNRLKLVPKKVDLSQQKEIPTTLVDDFILSPVVKRSFIQSIKVINAIIKKYGLPNDIIIELAREKNSKDAQKMINEMQKRNRQTNERIEEIIRTTGKENAKYLIEKIKLHDMQEGKCLYSLEAIPLEDLLNNPFNYEVDHIIPRSVSFDNSFNNKVLVKQEENSKKGNRTPFQYLSSSDSKISYETFKKHILNLAKGKGRISKTKKEYLLEERDINRFSVQKDFINRNLVDTRYATRGLMNLLRSYFRVNNLDVKVKSINGGFTSFLRRKWKFKKERNKGYKHHAEDALIIANADFIFKEWKKLDKAKKVMENQMFEEKQAESMPEIETEQEYKEIFITPHQIKHIKDFKDYKYSHRVDKKPNRKLINDTLYSTRKDDKGNTLIVNNLNGLYDKDNDKLKKLINKSPEKLLMYHHDPQTYQKLKLIMEQYGDEKNPLYKYYEETGNYLTKYSKKDNGPVIKKIKYYGNKLNAHLDITDDYPNSRNKVVKLSLKPYRFDVYLDNGVYKFVTVKNLDVIKKENYYEVNSKCYEEAKKLKKISNQAEFIASFYKNDLIKINGELYRVIGVNNSTRNIVELNMIDITYREYLENMNDKRPPHIIKTIASKTQSIKKYSTDILGNLYEVKSKKHPQIIKKG

SEQ ID NO: 20335 - protein, 1053 aa, Staphylococcus aureus
MKRNYILGLDIGITSVGYGIIDYETRDVIDAGVRLFKEANVENNEGRRSKRGARRLKRRRRHRIQRVKKLLFDYNLLTDHSELSGINPYEARVKGLSQKLSEEEFSAALLHLAKRRGVHNVNEVEEDTGNELSTKEQISRNSKALEEKYVAELQLERLKKDGEVRGSINRFKTSDYVKEAKQLLKVQKAYHQLDQSFIDTYIDLLETRRTYYEGPGEGSPFGWKDIKEWYEMLMGHCTYFPEELRSVKYAYNADLYNALNDLNNLVITRDENEKLEYYEKFQIIENVFKQKKKPTLKQIAKEILVNEEDIKGYRVTSTGKPEFTNLKVYHDIKDITARKEIIENAELLDQIAKILTIYQSSEDIQEELTNLNSELTQEEIEQISNLKGYTGTHNLSLKAINLILDELWHTNDNQIAIFNRLKLVPKKVDLSQQKEIPTTLVDDFILSPVVKRSFIQSIKVINAIIKKYGLPNDIIIELAREKNSKDAQKMINEMQKRNRQTNERIEEIIRTTGKENAKYLIEKIKLHDMQEGKCLYSLEAIPLEDLLNNPFNYEVDHIIPRSVSFDNSFNNKVLVKQEENSKKGNRTPFQYLSSSDSKISYETFKKHILNLAKGKGRISKTKKEYLLEERDINRFSVQKDFINRNLVDTRYATRGLMNLLRSYFRVNNLDVKVKSINGGFTSFLRRKWKFKKERNKGYKHHAEDALIIANADFIFKEWKKLDKAKKVMENQMFEEKQAESMPEIETEQEYKEIFITPHQIKHIKDFKDYKYSHRVDKKPNRKLINDTLYSTRKDDKGNTLIVNNLNGLYDKDNDKLKKLINKSPEKLLMYHHDPQTYQKLKLIMEQYGDEKNPLYKYYEETGNYLTKYSKKDNGPVIKKIKYYGNKLNAHLDITDDYPNSRNKVVKLSLKPYRFDVYLDNGVYKFVTVKNLDVIKKENYYEVNSKCYEEAKKLKKISNQAEFIASFYKNDLIKINGELYRVIGVNSDDRNIIELNMIDITYREYLENMNDKRPPHIIKTIASKTQSIKKYSTDILGNLYEVKSKKHPQIIKKG

SEQ ID NO: 20336 - protein, 1053 aa, Staphylococcus aureus
MKRNYILGLDIGITSVGYGIIDYETRDVIDAGVRLFKEANVENNEGRRSKRGARRLKRRRRHRIQRVKKLLFDYNLLTDHSELSGINPYEARVKGLSQKLSEEEFSAALLHLAKRRGVHNVNEVEEDTGNELSTKEQISRNSKALEEKYVAELQLERLKKDGEVRGSINRFKTSDYVKEAKQLLKVQKAYHQLDQSFIDTYIDLLETRRTYYEGPGEGSPFGWKDIKEWYEMLMGHCTYFPEELRSVKYAYNADLYNALNDLNNLVITRDENEKLEYYEKFQIIENVFKQKKKPTLKQIAKEILVNEEDIKGYRVTSTGKPEFTNLKVYHDIKDITARKEIIENAELLDQIAKILTIYQSSEDIQEELTNLNSELTQEEIEQISNLKGYTGTHNLSLKAINLILDELWHTNDNQIAIFNRLKLVPKKVDLSQQKEIPTTLVDDFILSPVVKRSFIQSIKVINAIIKKYGLPNDIIIELAREKNSKDAQKMINEMQKRNRQTNERIEEIIRTTGKENAKYLIEKIKLHDMQEGKCLYSLEAIPLEDLLNNPFNYEVDHIIPRSVSFDNSFNNKVLVKQEENSKKGNRTPFQYLSSSDSKISYETFKKHILNLAKGKGRISKTKKEYLLEERDINRFSVQKDFINRNLVDTRYATRGLMNLLRSYFRVNNLDVKVKSINGGFTSFLRRKWKFKKERNKGYKHHAEDALIIANADFIFKEWKKLDKAKKVMENQMFEEKQAESMPEIETEQEYKEIFITPHQIKHIKDFKDYKYSHRVDKKPNRKLINDTLYSTRKDDKGNTLIVNNLNGLYDKDNDKLKKLINKSPEKLLMYHHDPQTYQKLKLIMEQYGDEKNPLYKYYEETGNYLTKYSKKDNGPVIKKIKYYGNKLNAHLDITDDYPNSRNKVVKLSLKPYRFDVYLDNGVYKFVTVKNLDVIKKENYYEVNSKCYEEAKKLKKISNQAEFIASFYKNDLIKINGELYRVIGVNNNRLNKIELNMIDITYREYLENMNDKRPPHIIKTIASKTQSIKKYSTDILGNLYEVKSKKHPQIIKKG

SEQ ID NO: 20337 - protein, 1084 aa, Corynebacterium diphtheriae
MKYHVGIDVGTFSVGLAAIEVDDAGMPIKTLSLVSHIHDSGLDPDEIKSAVTRLASSGIARRTRRLYRRKRRRLQQLDKFIQRQGWPVIELEDYSDPLYPWKVRAELAASYIADEKERGEKLSVALRHIARHRGWRNPYAKVSSLYLPDGPSDAFKAIREEIKRASGQPVPETATVGQMVTLCELGTLKLRGEGGVLSARLQQSDYAREIQEICRMQEIGQELYRKIIDVVFAAESPKGSASSRVGKDPLQPGKNRALKASDAFQRYRIAALIGNLRVRVDGEKRILSVEEKNLVFDHLVNLTPKKEPEWVTIAEILGIDRGQLIGTATMTDDGERAGARPPTHDTNRSIVNSRIAPLVDWWKTASALEQHAMVKALSNAEVDDFDSPEGAKVQAFFADLDDDVHAKLDSLHLPVGRAAYSEDTLVRLTRRMLSDGVDLYTARLQEFGIEPSWTPPTPRIGEPVGNPAVDRVLKTVSRWLESATKTWGAPERVIIEHVREGFVTEKRAREMDGDMRRRAARNAKLFQEMQEKLNVQGKPSRADLWRYQSVQRQNCQCAYCGSPITFSNSEMDHIVPRAGQGSTNTRENLVAVCHRCNQSKGNTPFAIWAKNTSIEGVSVKEAVERTRHWVTDTGMRSTDFKKFTKAVVERFQRATMDEEIDARSMESVAWMANELRSRVAQHFASHGTTVRVYRGSLTAEARRASGISGKLKFFDGVGKSRLDRRHHAIDAAVIAFTSDYVAETLAVRSNLKQSQAHRQEAPQWREFTGKDAEHRAAWRVWCQKMEKLSALLTEDLRDDRVVVMSNVRLRLGNGSAHKETIGKLSKVKLSSQLSVSDIDKASSEALWCALTREPGFDPKEGLPANPERHIRVNGTHVYAGDNIGLFPVSAGSIALRGGYAELGSSFHHARVYKITSGKKPAFAMLRVYTIDLLPYRNQDLFSVELKPQTMSMRQAEKKLRDALATGNAEYLGWLVVDDELVVDTSKIATDQVKAVEAELGTIRRWRVDGFFSPSKLRLRPLQMSKEGIKKESAPELSKIIDRPGWLPAVNKLFSDGNVTVVRRDSLGRVRLESTAHLPVTWKVQ

SEQ ID NO: 20338 - protein, 984 aa, Campylobacter jejuni
MARILAFDIGISSIGWAFSENDELKDCGVRIFTKVENPKTGESLALPRRLARSARKRLARRKARLNHLKHLIANEFKLNYEDYQSFDESLAKAYKGSLISPYELRFRALNELLSKQDFARVILHIAKRRGYDDIKNSDDKEKGAILKAIKQNEEKLANYQSVGEYLYKEYFQKFKENSKEFTNVRNKKESYERCIAQSFLKDELKLIFKKQREFGFSFSKKFEEEVLSVAFYKRALKDFSHLVGNCSFFTDEKRAPKNSPLAFMFVALTRIINLLNNLKNTEGILYTKDDLNALLNEVLKNGTLTYKQTKKLLGLSDDYEFKGEKGTYFIEFKKYKEFIKALGEHNLSQDDLNEIAKDITLIKDEIKLKKALAKYDLNQNQIDSLSKLEFKDHLNISFKALKLVTPLMLEGKKYDEACNELNLKVAINEDKKDFLPAFNETYYKDEVTNPVVLRAIKEYRKVLNALLKKYGKVHKINIELAREVGKNHSQRAKIEKEQNENYKAKKDAELECEKLGLKINSKNILKLRLFKEQKEFCAYSGEKIKISDLQDEKMLEIDHIYPYSRSFDDSYMNKVLVFTKQNQEKLNQTPFEAFGNDSAKWQKIEVLAKNLPTKKQKRILDKNYKDKEQKNFKDRNLNDTRYIARLVLNYTKDYLDFLPLSDDENTKLNDTQKGSKVHVEAKSGMLTSALRHTWGFSAKDRNNHLHHAIDAVIIAYANNSIVKAFSDFKKEQESNSAELYAKKISELDYKNKRKFFEPFSGFRQKVLDKIDEIFVSKPERKKPSGALHEETFRKEEEFYQSYGGKEGVLKALELGKIRKVNGKIVKNGDMFRVDIFKHKKTNKFYAVPIYTMDFALKVLPNKAVARSKKGEIKDWILMDENYEFCFSLYKDSLILIQTKDMQEPEFVYYNAFTSSTVSLIVSKHDNKFETLSKNQKILFKNANEKEVIAKSIGIQNLKVFEKYIVSALGEVTKAEFRQREDFKK

SEQ ID NO: 20339 - protein, 1087 aa, Geobacillus stearothermophilus
MRYKIGLDIGITSVGWAVMNLDIPRIEDLGVRIFDRAENPQTGESLALPRRLARSARRRLRRRKHRLERIRRLVIREGILTKEELDKLFEEKHEIDVWQLRVEALDRKLNNDELARVLLHLAKRRGFKSNRKSERSNKENSTMLKHIEENRAILSSYRTVGEMIVKDPKFALHKRNKGENYTNTIARDDLEREIRLIFSKQREFGNMSCTEEFENEYITIWASQRPVASKDDIEKKVGFCTFEPKEKRAPKATYTFQSFIAWEHINKLRLISPSGARGLTDEERRLLYEQAFQKNKITYHDIRTLLHLPDDTYFKGIVYDRGESRKQNENIRFLELDAYHQIRKAVDKVYGKGKSSSFLPIDFDTFGYALTLFKDDADIHSYLRNEYEQNGKRMPNLANKVYDNELIEELLNLSFTKFGHLSLKALRSILPYMEQGEVYSSACERAGYTFTGPKKKQKTMLLPNIPPIANPVVMRALTQARKVVNAIIKKYGSPVSIHIELARDLSQTFDERRKTKKEQDENRKKNETAIRQLMEYGLTLNPTGHDIVKFKLWSEQNGRCAYSLQPIEIERLLEPGYVEVDHVIPYSRSLDDSYTNKVLVLTRENREKGNRIPAEYLGVGTERWQQFETFVLTNKQFSKKKRDRLLRLHYDENEETEFKNRNLNDTRYISRFFANFIREHLKFAESDDKQKVYTVNGRVTAHLRSRWEFNKNREESDLHHAVDAVIVACTTPSDIAKVTAFYQRREQNKELAKKTEPHFPQPWPHFADELRARLSKHPKESIKALNLGNYDDQKLESLQPVFVSRMPKRSVTGAAHQETLRRYVGIDERSGKIQTVVKTKLSEIKLDASGHFPMYGKESDPRTYEAIRQRLLEHNNDPKKAFQEPLYKPKKNGEPGPVIRTVKIIDTKNQVIPLNDGKTVAYNSNIVRVDVFEKDGKYYCVPVYTMDIMKGILPNKAIEPNKPYSEWKEMTEDYTFRFSLYPNDLIRIELPREKTVKTAAGEEINVKDVFVYYKTIDSANGGLELISHDHRFSLRGVGSRTLKRFEKYQVDVLGNIYKVRGEKRVGLASSAHSKPGKTIRPLQSTRD

SEQ ID NO: 20340 - protein, 1378 aa, Streptococcus sp.
MDKKYSIGLDIGTNSVGWAVITDEYKVPSKKFKVLGNTDRHSIKKNLIGALLFDSGETAEATRLKRTARRRYTRRKNRICYLQEIFSNEMAKVDDSFFHRLEESFLVEEDKKHERHPIFGNIVDEVAYHEKYPTIYHLRKKLVDSTDKADLRLIYLALAHMIKFRGHFLIEGDLNPDNSDVDKLFIQLVQTYNQLFEENPINASGVDAKAILSARLSKSRKLENLIAQLPGEKKNGLFGNLIALSLGLTPNFKSNFDLAEDAKLQLSKDTYDDDLDNLLAQIGDQYADLFLAAKNLSDAILLSDILRVNTEITKAPLSASMIKRYDEHHQDLTLLKALVRQQLPEKYKEIFFDQSKNGYAGYIDGGASQEEFYKFIKPILEKMDGTEELLVKLKREDLLRKQRTFDNGSIPHQIHLGELHAILRRQEDFYPFLKDNREKIEKILTFRIPYYVGPLARGNSRFAWMTRKSEETITPWNFEEVVDKGASAQSFIERMTNFDKNLPNEKVLPKHSLLYEYFTVYNELTKVKYVTEGMRKPAFLSGEQKKAIVDLLFKTNRKVTVKQLKEDYFKKIECFDSVEISGVEDRFNASLGTYHDLLKIIKDKDFLDNEENEDILEDIVLTLTLFEDREMIEERLKTYAHLFDDKVMKQLKRRRYTGWGRLSRKLINGIRDKQSGKTILDFLKSDGFANRNFMQLIHDDSLTFKEDIQKAQVSGQGDSLHEHIANLAGSPAIKKGILQTVKVVDELVKVMGRHKPENIVIEMARENQTTQKGQKNSRERMKRIEEGIKELGSQILKEHPVENTQLQNEKLYLYYLQNGRDMYVDQELDINRLSDYDVDHIVPQSFLKDDSIDNKVLTRSDKNRGKSDNVPSEEVVKKMKNYWRQLLNAKLITQRKFDNLTKAERGGLSELDKAGFIKRQLVETRQITKHVAQILDSRMNTKYDENDKLIREVKVITLKSKLVSDFRKDFQFYKVREINNYHHAHDAYLNAVVGTALIKKYPKLESEFVYGDYKVYDVRKMIAKSEQEIGKATAKYFFYSNIMNFFKTEITLANGEIRKRPLIETNGETGEIVWDKGRDFATVRKVLSMPQVNIVKKTEIQTVGQNGGLFDDNPKSPLEVTPSKLVPLKKELNPKKYGGYQKPTTAYPVLLITDTKQLIPISVMNKKQFEQNPVKFLRDRGYQQVGKNDFIKLPKYTLVDIGDGIKRLWASSKEIHKGNQLVVSKKSQILLYHAHHLDSDLSNDYLQNHNQQFDVLFNEIISFSKKCKLGKEHIQKIENVYSNKKNSASIEELAESFIKLLGFTQLGATSPFNFLGVKLNQKQYKGKKDYILPCTEGTLIRQSITGLYETRVDLSKIGEDSGGSGGSKRTADGSEFES

SEQ ID NO: 20341 - protein, 1082 aa, Neisseria meningitidis
MAAFKPNSINYILGLDIGIASVGWAMVEIDEEENPIRLIDLGVRVFERAEVPKTGDSLAMARRLARSVRRLTRRRAHRLLRTRRLLKREGVLQAANFDENGLIKSLPNTPWQLRAAALDRKLTPLEWSAVLLHLIKHRGYLSQRKNEGETADKELGALLKGVAGNAHALQTGDFRTPAELALNKFEKESGHIRNQRSDYSHTFSRKDLQAELILLFEKQKEFGNPHVSGGLKEGIETLLMTQRPALSGDAVQKMLGHCTFEPAEPKAAKNTYTAERFIWLTKLNNLRILEQGSERPLTDTERATLMDEPYRKSKLTYAQARKLLGLEDTAFFKGLRYGKDNAEASTLMEMKAYHAISRALEKEGLKDKKSPLNLSPELQDEIGTAFSLFKTDEDITGRLKDRIQPEILEALLKHISFDKFVQISLKALRRIVPLMEQGKRYDEACAEIYGDHYGKKNTEEKIYLPPIPADEIRNPVVLRALSQARKVINGVVRRYGSPARIHIETAREVGKSFKDRKEIEKRQEENRKDREKAAAKFREYFPNFVGEPKSKDILKLRLYEQQHGKCLYSGKEINLGRLNEKGYVEIDHALPFSRTWDDSFNNKVLVLGSENQNKGNQTPYEYFNGKDNSREWQEFKARVETSRFPRSKKQRILLQKFDEDGFKERNLNDTRYVNRFLCQFVADRMRLTGKGKKRVFASNGQITNLLRGFWGLRKVRAENDRHHALDAVVVACSTVAMQQKITRFVRYKEMNAFDGKTIDKETGEVLHQKTHFPQPWEFFAQEVMIRVFGKPDGKPEFEEADTLEKLRTLLAEKLSSRPEAVHEYVTPLFVSRAPNRKMSGQGHMETVKSAKRLDEGVSVLRVPLTQLKLKDLEKMVNREREPKLYEALKARLEAHKDDPAKAFAEPFYKYDKAGNRTQQVKAVRVEQVQKTGVWVRNHNGIADNATMVRVDVFEKGDKYYLVPIYSWQVAKGILPDRAVVQGKDEEDWQLIDDSFNFKFSLHPNDLVEVITKKARMFGYFASCHRGTGNINIRIHDLDHKIGKNGILEGIGVKTALSFQKYQIDELGKEIRPCRLKKRPPVR

SEQ ID NO: 20342 - protein, 1375 aa, Streptococcus canis
MEKKYSIGLDIGTNSVGWAVITDDYKVPSKKFKVLGNTNRKSIKKNLMGALLFDSGETAEATRLKRTARRRYTRRKNRIRYLQEIFANEMAKLDDSFFQRLEESFLVEEDKKNERHPIFGNLADEVAYHRNYPTIYHLRKKLADSPEKADLRLIYLALAHIIKFRGHFLIEGKLNAENSDVAKLFYQLIQTYNQLFEESPLDEIEVDAKGILSARLSKSKRLEKLIAVFPNEKKNGLFGNIIALALGLTPNFKSNFDLTEDAKLQLSKDTYDDDLDELLGQIGDQYADLFSAAKNLSDAILLSDILRSNSEVTKAPLSASMVKRYDEHHQDLALLKTLVRQQFPEKYAEIFKDDTKNGYAGYVGIGIKHRKRTTKLATQEEFYKFIKPILEKMDGAEELLAKLNRDDLLRKQRTFDNGSIPHQIHLKELHAILRRQEEFYPFLKENREKIEKILTFRIPYYVGPLARGNSRFAWLTRKSEEAITPWNFEEVVDKGASAQSFIERMTNFDEQLPNKKVLPKHSLLYEYFTVYNELTKVKYVTERMRKPEFLSGEQKKAIVDLLFKTNRKVTVKQLKEDYFKKIECFDSVEIIGVEDRFNASLGTYHDLLKIIKDKDFLDNEENEDILEDIVLTLTLFEDREMIEERLKTYAHLFDDKVMKQLKRRHYTGWGRLSRKMINGIRDKQSGKTILDFLKSDGFSNRNFMQLIHDDSLTFKEEIEKAQVSGQGDSLHEQIADLAGSPAIKKGILQTVKIVDELVKVMGHKPENIVIEMARENQTTTKGLQQSRERKKRIEEGIKELESQILKENPVENTQLQNEKLYLYYLQNGRDMYVDQELDINRLSDYDVDHIVPQSFIKDDSIDNKVLTRSVENRGKSDNVPSEEVVKKMKNYWRQLLNAKLITQRKFDNLTKAERGGLSEADKAGFIKRQLVETRQITKHVARILDSRMNTKRDKNDKPIREVKVITLKSKLVSDFRKDFQLYKVRDINNYHHAHDAYLNAVVGTALIKKYPKLESEFVYGDYKVYDVRKMIAKSEQEIGKATAKRFFYSNIMNFFKTEVKLANGEIRKRPLIETNGETGEVVWNKEKDFATVRKVLAMPQVNIVKKTEVQTGGFSKESILSKRESAKLIPRKKGWDTRKYGGFGSPTVAYSILVVAKVEKGKAKKLKSVKVLVGITIMEKGSYEKDPIGFLEAKGYKDIKKELIFKLPKYSLFELENGRRRMLASATELQKANELVLPQHLVRLLYYTQNISATTGSNNLGYIEQHREEFKEIFEKIIDFSEKYILKNKVNSNLKSSFDEQFAVSDSILLSNSFVSLLKYTSFGASGGFTFLDLDVKQGRLRYQTVTEVLDATLIYQSITGLYETRTDLSQLGGD

SEQ ID NO: 20343 - protein, 1375 aa, Streptococcus canis
MEKKYSIGLDIGTNSVGWAVITDDYKVPSKKFKVLGNTNRKSIKKNLMGALLFDSGETAEATRLKRTARRRYTRRKNRIRYLQEIFANEMAKLDDSFFQRLEESFLVEEDKKNERHPIFGNLADEVAYHRNYPTIYHLRKKLADSPEKADLRLIYLALAHIIKFRGHFLIEGKLNAENSDVAKLFYQLIQTYNQLFEESPLDEIEVDAKGILSARLSKSKRLEKLIAVFPNEKKNGLFGNIIALALGLTPNFKSNFDLTEDAKLQLSKDTYDDDLDELLGQIGDQYADLFSAAKNLSDAILLSDILRSNSEVTKAPLSASMVKRYDEHHQDLALLKTLVRQQFPEKYAEIFKDDTKNGYAGYVGADKKLRKRSGKLATEEEFYKFIKPILEKMDGAEELLAKLNRDDLLRKQRTFDNGSIPHQIHLKELHAILRRQEEFYPFLKENREKIEKILTFRIPYYVGPLARGNSRFAWLTRKSEEAITPWNFEEVVDKGASAQSFIERMTNFDEQLPNKKVLPKHSLLYEYFTVYNELTKVKYVTERMRKPEFLSGEQKKAIVDLLFKTNRKVTVKQLKEDYFKKIECFDSVEIIGVEDRFNASLGTYHDLLKIIKDKDFLDNEENEDILEDIVLTLTLFEDREMIEERLKTYAHLFDDKVMKQLKRRHYTGWGRLSRKMINGIRDKQSGKTILDFLKSDGFSNANFMQLIHDDSLTFKEEIEKAQVSGQGDSLHEQIADLAGSPAIKKGILQTVKIVDELVKVMGHKPENIVIEMARENQTTTKGLQQSRERKKRIEEGIKELESQILKENPVENTQLQNEKLYLYYLQNGRDMYVDQELDINRLSDYDVDHIVPQSFIKDDSIDNKVLTRSVENRGKSDNVPSEEVVKKMKNYWRQLLNAKLITQRKFDNLTKAERGGLSEADKAGFIKRQLVETRQITKHVARILDSRMNTKRDKNDKPIREVKVITLKSKLVSDFRKDFQLYKVRDINNYHHAHDAYLNAVVGTALIKKYPKLESEFVYGDYKVYDVRKMIAKSEQEIGKATAKRFFYSNIMNFFKTEVKLANGEIRKRPLIETNGETGEVVWNKEKDFATVRKVLAMPQVNIVKKTEVQTGGFSKESILSKRESAKLIPRKKGWDTRKYGGFGSPTVAYSILVVAKVEKGKAKKLKSVKVLVGITIMEKGSYEKDPIGFLEAKGYKDIKKELIFKLPKYSLFELENGRRRMLASAKELQKANELVLPQHLVRLLYYTQNISATTGSNNLGYIEQHREEFKEIFEKIIDFSEKYILKNKVNSNLKSSFDEQFAVSDSILLSNSFVSLLKYTSFGASGGFTFLDLDVKQGRLRYQTVTEVLDATLIYQSITGLYETRTDLSQLGGD

SEQ ID NO: 20344 - protein, 1368 aa, Streptococcus pyogenes
MDKKYSIGLDIGTNSVGWAVITDEYKVPSKKFKVLGNTDRHSIKKNLIGALLFDSGETAEATRLKRTARRRYTRRKNRICYLQEIFSNEMAKVDDSFFHRLEESFLVEEDKKHERHPIFGNIVDEVAYHEKYPTIYHLRKKLVDSTDKADLRLIYLALAHMIKFRGHFLIEGDLNPDNSDVDKLFIQLVQTYNQLFEENPINASGVDAKAILSARLSKSRRLENLIAQLPGEKKNGLFGNLIALSLGLTPNFKSNFDLAEDAKLQLSKDTYDDDLDNLLAQIGDQYADLFLAAKNLSDAILLSDILRVNTEITKAPLSASMVKRYDEHHQDLTLLKALVRQQLPEKYKEIFFDQSKNGYAGYIDGGASQEEFYKFIKPILEKMDGTEELLVKLNREDLLRKQRTFDNGIIPHQIHLGELHAILRRQGDFYPFLKDNREKIEKILTFRIPYYVGPLARGNSRFAWMTRKSEETITPWNFEEVVDKGASAQSFIERMTNFDKNLPNEKVLPKHSLLYEYFTVYNELTKVKYVTEGMRKPAFLSGEQKKAIVDLLFKTNRKVTVKQLKEDYFKKIECFDSVEISGVEDRFNASLGTYHDLLKIIKDKDFLDNEENEDILEDIVLTLTLFEDREMIEERLKTYAHLFDDKVMKQLKRLRYTGWGRLSRKLINGIRDKQSGKTILDFLKSDGFANRNFMQLIHDDSLTFKEDIQKAQVSGQGDSLHEHIANLAGSPAIKKGILQTVKVVDELVKVMGGHKPENIVIEMARENQTTQKGQKNSRERMKRIEEGIKELGSQILKEHPVENTQLQNEKLYLYYLQNGRDMYVDQELDINRLSDYDVDHIVPQSFLKDDSIDNKVLTRSDKNRGKSDNVPSEEVVKKMKNYWRQLLNAKLITQRKFDNLTKAERGGLSELDKAGFIKRQLVETRQITKHVAQILDSRMNTKYDENDKLIREVKVITLKSKLVSDFRKDFQFYKVREINNYHHAHDAYLNAVVGTALIKKYPKLESEFVYGDYKVYDVRKMIAKSEQEIGKATAKYFFYSNIMNFFKTEITLANGEIRKRPLIETNGETGEIVWDKGRDFATVRKVLSMPQVNIVKKTEVQTGGFSKESILPKGNSDKLIARKKDWDPKKYGGFNSPTAAYSVLVVAKVEKGKSKKLKSVKELLGITIMERSSFEKNPIGFLEAKGYKEVKKDLIIKLPKYSLFELENGRKRMLASAGVLHKGNELALPSKYVNFLYLASHYEKLKGSPEDNEQKQLFVEQHKHYLDEIIEQISEFSKRVILADANLDKVLSAYNKHRDKPIREQAENIIHLFTLTNLGVPAAFKYFDTTIDKKRYTSTKEVLDATLIHQSITGLYETRIDLSQLGGD

SEQ ID NO: 20345 - protein, 1368 aa, Streptococcus pyogenes
MDKKYSIGLDIGTNSVGWAVITDEYKVPSKKFKVLGNTDRHSIKKNLIGALLFDSGETAEATRLKRTARRRYTRRKNRICYLQEIFSNEMAKVDDSFFHRLEESFLVEEDKKHERHPIFGNIVDEVAYHEKYPTIYHLRKKLVDSTDKADLRLIYLALAHMIKFRGHFLIEGDLNPDNSDVDKLFIQLVQTYNQLFEENPINASGVDAKAILSARLSKSRRLENLIAQLPGEKKNGLFGNLIALSLGLTPNFKSNFDLAEDAKLQLSKDTYDDDLDNLLAQIGDQYADLFLAAKNLSDAILLSDILRVNTEITKAPLSASMVKRYDEHHQDLTLLKALVRQQLPEKYKEIFFDQSKNGYAGYIDGGASQEEFYKFIKPILEKMDGTEELLVKLNREDLLRKQRTFDNGIIPHQIHLGELHAILRRQGDFYPFLKDNREKIEKILTFRIPYYVGPLARGNSRFAWMTRKSEETITPWNFEEVVDKGASAQSFIERMTNFDKNLPNEKVLPKHSLLYEYFTVYNELTKVKYVTEGMRKPAFLSGEQKKAIVDLLFKTNRKVTVKQLKEDYFKKIECFDSVEISGVEDRFNASLGTYHDLLKIIKDKDFLDNEENEDILEDIVLTLTLFEDREMIEERLKTYAHLFDDKVMKQLKRLRYTGWGRLSRKLINGIRDKQSGKTILDFLKSDGFANRNFMQLIHDDSLTFKEDIQKAQVSGQGDSLHEHIANLAGSPAIKKGILQTVKVVDELVKVMGGHKPENIVIEMARENQTTQKGQKNSRERMKRIEEGIKELGSQILKEHPVENTQLQNEKLYLYYLQNGRDMYVDQELDINRLSDYDVDHIVPQSFLKDDSIDNKVLTRSDKNRGKSDNVPSEEVVKKMKNYWRQLLNAKLITQRKFDNLTKAERGGLSELDKAGFIKRQLVETRQITKHVAQILDSRMNTKYDENDKLIREVKVITLKSKLVSDFRKDFQFYKVREINNYHHAHDAYLNAVVGTALIKKYPKLESEFVYGDYKVYDVRKMIAKSEQEIGKATAKYFFYSNIMNFFKTEITLANGEIRKRPLIETNGETGEIVWDKGRDFATVRKVLSMPQVNIVKKTEVQTGGFSKESILPKGNSDKLIARKKDWDPKKYGGFNSPTVAYSVLVVAKVEKGKSKKLKSVKELLGITIMERSSFEKNPIGFLEAKGYKEVKKDLIIKLPKYSLFELENGRKRMLASASVLHKGNELALPSKYVNFLYLASHYEKLKGSSEDNKQKQLFVEQHKHYLDEIIEQISEFSKRVILADANLDKVLSAYNKHRDKPIREQAENIIHLFTLTNLGASAAFKYFDTTIGRKLYTSTKEVLDATLIHQSITGLYETRIDLSQLGGD

SEQ ID NO: 20346 - protein, 1368 aa, Streptococcus pyogenes
MDKKYSIGLDIGTNSVGWAVITDEYKVPSKKFKVLGNTDRHSIKKNLIGALLFDSGETAEATRLKRTARRRYTRRKNRICYLQEIFSNEMAKVDDSFFHRLEESFLVEEDKKHERHPIFGNIVDEVAYHEKYPTIYHLRKKLVDSTDKADLRLIYLALAHMIKFRGHFLIEGDLNPDNSDVDKLFIQLVQTYNQLFEENPINASGVDAKAILSARLSKSRRLENLIAQLPGEKKNGLFGNLIALSLGLTPNFKSNFDLAEDAKLQLSKDTYDDDLDNLLAQIGDQYADLFLAAKNLSDAILLSDILRVNTEITKAPLSASMVKRYDEHHQDLTLLKALVRQQLPEKYKEIFFDQSKNGYAGYIDGGASQEEFYKFIKPILEKMDGTEELLVKLNREDLLRKQRTFDNGIIPHQIHLGELHAILRRQGDFYPFLKDNREKIEKILTFRIPYYVGPLARGNSRFAWMTRKSEETITPWNFEEVVDKGASAQSFIERMTNFDKNLPNEKVLPKHSLLYEYFTVYNELTKVKYVTEGMRKPAFLSGEQKKAIVDLLFKTNRKVTVKQLKEDYFKKIECFDSVEISGVEDRFNASLGTYHDLLKIIKDKDFLDNEENEDILEDIVLTLTLFEDREMIEERLKTYAHLFDDKVMKQLKRLRYTGWGRLSRKLINGIRDKQSGKTILDFLKSDGFANRNFMQLIHDDSLTFKEDIQKAQVSGQGDSLHEHIANLAGSPAIKKGILQTVKVVDELVKVMGGHKPENIVIEMARENQTTQKGQKNSRERMKRIEEGIKELGSQILKEHPVENTQLQNEKLYLYYLQNGRDMYVDQELDINRLSDYDVDHIVPQSFLKDDSIDNKVLTRSDKNRGKSDNVPSEEVVKKMKNYWRQLLNAKLITQRKFDNLTKAERGGLSELDKAGFIKRQLVETRQITKHVAQILDSRMNTKYDENDKLIREVKVITLKSKLVSDFRKDFQFYKVREINNYHHAHDAYLNAVVGTALIKKYPKLESEFVYGDYKVYDVRKMIAKSEQEIGKATAKYFFYSNIMNFFKTEITLANGEIRKRPLIETNGETGEIVWDKGRDFATVRKVLSMPQVNIVKKTEVQTGGFSKESILPKGNSDKLIARKKDWDPKKYGGFNSPTVAYSVLVVAKVEKGKSKKLKSVKELLGITIMERSSFEKNPIDFLEAKGYKEVKKDLIIKLPKYSLFELENGRKRMLASAGVLQKGNELALPSKYVNFLYLASHYEKLKGSPEDNEQKQLFVEQHKHYLDEIIEQISEFSKRVILADANLDKVLSAYNKHRDKPIREQAENIIHLFTLTNLGAPAAFKYFDTTINRKQYNTTKEVLDATLIRQSITGLYETRIDLSQLGGD

SEQ ID NO: 20347 - protein, 1368 aa, Streptococcus pyogenes
MDKKYSIGLDIGTNSVGWAVITDEYKVPSKKFKVLGNTDRHSIKKNLIGALLFDSGETAEATRLKRTARRRYTRRKNRICYLQEIFSNEMAKVDDSFFHRLEESFLVEEDKKHERHPIFGNIVDEVAYHEKYPTIYHLRKKLVDSTDKADLRLIYLALAHMIKFRGHFLIEGDLNPDNSDVDKLFIQLVQTYNQLFEENPINASGVDAKAILSARLSKSRRLENLIAQLPGEKKNGLFGNLIALSLGLTPNFKSNFDLAEDAKLQLSKDTYDDDLDNLLAQIGDQYADLFLAAKNLSDAILLSDILRVNTEITKAPLSASMIKRYDEHHQDLTLLKALVRQQLPEKYKEIFFDQSKNGYAGYIDGGASQEEFYKFIKPILEKMDGTEELLVKLNREDLLRKQRTFDNGSIPHQIHLGELHAILRRQEDFYPFLKDNREKIEKILTFRIPYYVGPLARGNSRFAWMTRKSEETITPWNFEEVVDKGASAQSFIERMTNFDKNLPNEKVLPKHSLLYEYFTVYNELTKVKYVTEGMRKPAFLSGEQKKAIVDLLFKTNRKVTVKQLKEDYFKKIECFDSVEISGVEDRFNASLGTYHDLLKIIKDKDFLDNEENEDILEDIVLTLTLFEDREMIEERLKTYAHLFDDKVMKQLKRRRYTGWGRLSRKLINGIRDKQSGKTILDFLKSDGFANRNFMQLIHDDSLTFKEDIQKAQVSGQGDSLHEHIANLAGSPAIKKGILQTVKVVDELVKVMGRHKPENIVIEMARENQTTQKGQKNSRERMKRIEEGIKELGSQILKEHPVENTQLQNEKLYLYYLQNGRDMYVDQELDINRLSDYDVDHIVPQSFLKDDSIDNKVLTRSDKNRGKSDNVPSEEVVKKMKNYWRQLLNAKLITQRKFDNLTKAERGGLSELDKAGFIKRQLVETRQITKHVAQILDSRMNTKYDENDKLIREVKVITLKSKLVSDFRKDFQFYKVREINNYHHAHDAYLNAVVGTALIKKYPKLESEFVYGDYKVYDVRKMIAKSEQEIGKATAKYFFYSNIMNFFKTEITLANGEIRKRPLIETNGETGEIVWDKGRDFATVRKVLSMPQVNIVKKTEVQTGGFSKESILPKRNSDKLIARKKDWDPKKYGGFDSPTVAYSVLVVAKVEKGKSKKLKSVKELLGITIMERSSFEKNPIDFLEAKGYKEVKKDLIIKLPKYSLFELENGRKRMLASARELQKGNELALPSKYVNFLYLASHYEKLKGSPEDNEQKQLFVEQHKHYLDEIIEQISEFSKRVILADAQLDKVLSAYNKHRDKPIREQAENIIHLFTLTNLGAPAAFKYFDTTFKQKQYRSTKEVLDATLIHQSITGLYETRIDLSQLGGD

SEQ ID NO: 20348 - protein, 1368 aa, Streptococcus pyogenes
MDKKYSIGLDIGTNSVGWAVITDEYKVPSKKFKVLGNTDRHSIKKNLIGALLFDSGETAEATRLKRTARRRYTRRKNRICYLQEIFSNEMAKVDDSFFHRLEESFLVEEDKKHERHPIFGNIVDEVAYHEKYPTIYHLRKKLVDSTDKADLRLIYLALAHMIKFRGHFLIEGDLNPDNSDVDKLFIQLVQTYNQLFEENPINASGVDAKAILSARLSKSRRLENLIAQLPGEKKNGLFGNLIALSLGLTPNFKSNFDLAEDAKLQLSKDTYDDDLDNLLAQIGDQYADLFLAAKNLSDAILLSDILRVNTEITKAPLSASMIKRYDEHHQDLTLLKALVRQQLPEKYKEIFFDQSKNGYAGYIDGGASQEEFYKFIKPILEKMDGTEELLVKLNREDLLRKQRTFDNGSIPHQIHLGELHAILRRQEDFYPFLKDNREKIEKILTFRIPYYVGPLARGNSRFAWMTRKSEETITPWNFEEVVDKGASAQSFIERMTNFDKNLPNEKVLPKHSLLYEYFTVYNELTKVKYVTEGMRKPAFLSGEQKKAIVDLLFKTNRKVTVKQLKEDYFKKIECFDSVEISGVEDRFNASLGTYHDLLKIIKDKDFLDNEENEDILEDIVLTLTLFEDREMIEERLKTYAHLFDDKVMKQLKRRRYTGWGRLSRKLINGIRDKQSGKTILDFLKSDGFANRNFMQLIHDDSLTFKEDIQKAQVSGQGDSLHEHIANLAGSPAIKKGILQTVKVVDELVKVMGRHKPENIVIEMARENQTTQKGQKNSRERMKRIEEGIKELGSQILKEHPVENTQLQNEKLYLYYLQNGRDMYVDQELDINRLSDYDVDHIVPQSFLKDDSIDNKVLTRSDKNRGKSDNVPSEEVVKKMKNYWRQLLNAKLITQRKFDNLTKAERGGLSELDKAGFIKRQLVETRQITKHVAQILDSRMNTKYDENDKLIREVKVITLKSKLVSDFRKDFQFYKVREINNYHHAHDAYLNAVVGTALIKKYPKLESEFVYGDYKVYDVRKMIAKSEQEIGKATAKYFFYSNIMNFFKTEITLANGEIRKRPLIETNGETGEIVWDKGRDFATVRKVLSMPQVNIVKKTEVQTGGFSKESILPKRNSDKLIARKKDWDPKKYGGFLWPTVAYSVLVVAKVEKGKSKKLKSVKELLGITIMERSSFEKNPIDFLEAKGYKEVKKDLIIKLPKYSLFELENGRKRMLASAKQLQKGNELALPSKYVNFLYLASHYEKLKGSPEDNEQKQLFVEQHKHYLDEIIEQISEFSKRVILADANLDKVLSAYNKHRDKPIREQAENIIHLFTLTNLGAPAAFKYFDTTIDRKQYRSTKEVLDATLIHQSITGLYETRIDLSQLGGD

SEQ ID NO: 20349 - protein, 1368 aa, Streptococcus pyogenes
MDKKYSIGLDIGTNSVGWAVITDEYKVPSKKFKVLGNTDRHSIKKNLIGALLFDSGETAEATRLKRTARRRYTRRKNRICYLQEIFSNEMAKVDDSFFHRLEESFLVEEDKKHERHPIFGNIVDEVAYHEKYPTIYHLRKKLVDSTDKADLRLIYLALAHMIKFRGHFLIEGDLNPDNSDVDKLFIQLVQTYNQLFEENPINASGVDAKAILSARLSKSRRLENLIAQLPGEKKNGLFGNLIALSLGLTPNFKSNFDLAEDAKLQLSKDTYDDDLDNLLAQIGDQYADLFLAAKNLSDAILLSDILRVNTEITKAPLSASMIKRYDEHHQDLTLLKALVRQQLPEKYKEIFFDQSKNGYAGYIDGGASQEEFYKFIKPILEKMDGTEELLVKLNREDLLRKQRTFDNGSIPHQIHLGELHAILRRQEDFYPFLKDNREKIEKILTFRIPYYVGPLARGNSRFAWMTRKSEETITPWNFEEVVDKGASAQSFIERMTNFDKNLPNEKVLPKHSLLYEYFTVYNELTKVKYVTEGMRKPAFLSGEQKKAIVDLLFKTNRKVTVKQLKEDYFKKIECFDSVEISGVEDRFNASLGTYHDLLKIIKDKDFLDNEENEDILEDIVLTLTLFEDREMIEERLKTYAHLFDDKVMKQLKRRRYTGWGRLSRKLINGIRDKQSGKTILDFLKSDGFANRNFMQLIHDDSLTFKEDIQKAQVSGQGDSLHEHIANLAGSPAIKKGILQTVKVVDELVKVMGRHKPENIVIEMARENQTTQKGQKNSRERMKRIEEGIKELGSQILKEHPVENTQLQNEKLYLYYLQNGRDMYVDQELDINRLSDYDVDHIVPQSFLKDDSIDNKVLTRSDKNRGKSDNVPSEEVVKKMKNYWRQLLNAKLITQRKFDNLTKAERGGLSELDKAGFIKRQLVETRQITKHVAQILDSRMNTKYDENDKLIREVKVITLKSKLVSDFRKDFQFYKVREINNYHHAHDAYLNAVVGTALIKKYPKLESEFVYGDYKVYDVRKMIAKSEQEIGKATAKYFFYSNIMNFFKTEITLANGEIRKRPLIETNGETGEIVWDKGRDFATVRKVLSMPQVNIVKKTEVQTGGFSKESILPKRNSDKLIARKKDWDPKKYGGFVSPTVAYSVLVVAKVEKGKSKKLKSVKELLGITIMERSSFEKNPIDFLEAKGYKEVKKDLIIKLPKYSLFELENGRKRMLASAGELQKGNELALPSKYVNFLYLASHYEKLKGSPEDNEQKQLFVEQHKHYLDEIIEQISEFSKRVILADANLDKVLSAYNKHRDKPIREQAENIIHLFTLTNLGAPAAFKYFDTTIDRKQYRSTKEVLDATLIHQSITGLYETRIDLSQLGGD

SEQ ID NO: 20350 - protein, 1368 aa, Streptococcus pyogenes
MDKKYSIGLDIGTNSVGWAVITDEYKVPSKKFKVLGNTDRHSIKKNLIGALLFDSGETAEATRLKRTARRRYTRRKNRICYLQEIFSNEMAKVDDSFFHRLEESFLVEEDKKHERHPIFGNIVDEVAYHEKYPTIYHLRKKLVDSTDKADLRLIYLALAHMIKFRGHFLIEGDLNPDNSDVDKLFIQLVQTYNQLFEENPINASGVDAKAILSARLSKSRRLENLIAQLPGEKKNGLFGNLIALSLGLTPNFKSNFDLAEDAKLQLSKDTYDDDLDNLLAQIGDQYADLFLAAKNLSDAILLSDILRVNTEITKAPLSASMIKRYDEHHQDLTLLKALVRQQLPEKYKEIFFDQSKNGYAGYIDGGASQEEFYKFIKPILEKMDGTEELLVKLNREDLLRKQRTFDNGSIPHQIHLGELHAILRRQEDFYPFLKDNREKIEKILTFRIPYYVGPLARGNSRFAWMTRKSEETITPWNFEEVVDKGASAQSFIERMTNFDKNLPNEKVLPKHSLLYEYFTVYNELTKVKYVTEGMRKPAFLSGEQKKAIVDLLFKTNRKVTVKQLKEDYFKKIECFDSVEISGVEDRFNASLGTYHDLLKIIKDKDFLDNEENEDILEDIVLTLTLFEDREMIEERLKTYAHLFDDKVMKQLKRRRYTGWGRLSRKLINGIRDKQSGKTILDFLKSDGFANRNFMQLIHDDSLTFKEDIQKAQVSGQGDSLHEHIANLAGSPAIKKGILQTVKVVDELVKVMGRHKPENIVIEMARENQTTQKGQKNSRERMKRIEEGIKELGSQILKEHPVENTQLQNEKLYLYYLQNGRDMYVDQELDINRLSDYDVDHIVPQSFLKDDSIDNKVLTRSDKNRGKSDNVPSEEVVKKMKNYWRQLLNAKLITQRKFDNLTKAERGGLSELDKAGFIKRQLVETRQITKHVAQILDSRMNTKYDENDKLIREVKVITLKSKLVSDFRKDFQFYKVREINNYHHAHDAYLNAVVGTALIKKYPKLESEFVYGDYKVYDVRKMIAKSEQEIGKATAKYFFYSNIMNFFKTEITLANGEIRKRPLIETNGETGEIVWDKGRDFATVRKVLSMPQVNIVKKTEVQTGGFSKESILPKRNSDKLIARKKDWDPKKYGGFVSPTVAYSVLVVAKVEKGKSKKLKSVKELLGITIMERSSFEKNPIDFLEAKGYKEVKKDLIIKLPKYSLFELENGRKRMLASARELQKGNELALPSKYVNFLYLASHYEKLKGSPEDNEQKQLFVEQHKHYLDEIIEQISEFSKRVILADANLDKVLSAYNKHRDKPIREQAENIIHLFTLTNLGAPAAFKYFDTTIDRKEYRSTKEVLDATLIHQSITGLYETRIDLSQLGGD

SEQ ID NO: 20351 - protein, 1368 aa, Streptococcus pyogenes
MDKKYSIGLDIGTNSVGWAVITDEYKVPSKKFKVLGNTDRHSIKKNLIGALLFDSGETAEATRLKRTARRRYTRRKNRICYLQEIFSNEMAKVDDSFFHRLEESFLVEEDKKHERHPIFGNIVDEVAYHEKYPTIYHLRKKLVDSTDKADLRLIYLALAHMIKFRGHFLIEGDLNPDNSDVDKLFIQLVQTYNQLFEENPINASGVDAKAILSARLSKSRRLENLIAQLPGEKKNGLFGNLIALSLGLTPNFKSNFDLAEDTKLQLSKDTYDDDLDNLLAQIGDQYADLFLAAKNLSDAILLSDILRVNTEITKAPLSASMIKLYDEHHQDLTLLKALVRQQLPEKYKEIFFDQSKNGYAGYIDGGASQEEFYKFIKPILEKMDGTEELLVKLNREDLLRKQRTFDNGIIPHQIHLGELHAILRRQEDFYPFLKDNREKIEKILTFRIPYYVGPLARGNSRFAWMTRKSEETITPWNFEKVVDKGASAQSFIERMTNFDKNLPNEKVLPKHSLLYEYFTVYNELTKVKYVTEGMRKPAFLSGDQKKAIVDLLFKTNRKVTVKQLKEDYFKKIECFDSVEISGVEDRFNASLGTYHDLLKIIKDKDFLDNEENEDILEDIVLTLTLFEDREMIEERLKTYAHLFDDKVMKQLKRRRYTGWGRLSRKLINGIRDKQSGKTILDFLKSDGFANRNFIQLIHDDSLTFKEDIQKAQVSGQGDSLHEHIANLAGSPAIKKGILQTVKVVDELVKVMGRHKPENIVIEMARENQTTQKGQKNSRERMKRIEEGIKELGSQILKEHPVENTQLQNEKLYLYYLQNGRDMYVDQELDINRLSDYDVDHIVPQSFLKDDSIDNKVLTRSDKNRGKSDNVPSEEVVKKMKNYWRQLLNAKLITQRKFDNLTKAERGGLSELDKAGFIKRQLVETRQITKHVAQILDSRMNTKYDENDKLIREVKVITLKSKLVSDFRKDFQFYKVREINNYHHAHDAYLNAVVGTALIKKYPKLESEFVYGDYKVYDVRKMIAKSEQEIGKATAKYFFYSNIMNFFKTEITLANGEIRKRPLIETNGETGEIVWDKGRDFATVRKVLSMPQVNIVKKTEVQTGGFSKESILPKRNSDKLIARKKDWDPKKYGGFDSPTVAYSVLVVAKVEKGKSKKLKSVKELLGITIMERSSFEKNPIDFLEAKGYKEVKKDLIIKLPKYSLFELENGRKRMLASAGVLQKGNELALPSKYVNFLYLASHYEKLKGSPEDNEQKQLFVEQHKHYLDEIIEQISEFSKRVILADANLDKVLSAYNKHRDKPIREQAENIIHLFTLTNLGAPAAFKYFDTTIDRKRYTSTKEVLDATLIHQSITGLYETRIDLSQLGGD

SEQ ID NO: 20352 - protein, 1368 aa, Streptococcus pyogenes
MDKKYSIGLDIGTNSVGWAVITDEYKVPSKKFKVLGNTDRHSIKKNLIGALLFDSGETAEATRLKRTARRRYTRRKNRICYLQEIFSNEMAKVDDSFFHRLEESFLVEEDKKHERHPIFGNIVDEVAYHEKYPTIYHLRKKLVDSTDKADLRLIYLALAHMIKFRGHFLIEGDLNPDNSDVDKLFIQLVQTYNQLFEENPINASGVDAKAILSARLSKSRRLENLIAQLPGEKKNGLFGNLIALSLGLTPNFKSNFDLAEDTKLQLSKDTYDDDLDNLLAQIGDQYADLFLAAKNLSDAILLSDILRVNTEITKAPLSASMIKLYDEHHQDLTLLKALVRQQLPEKYKEIFFDQSKNGYAGYIDGGASQEEFYKFIKPILEKMDGTEELLVKLNREDLLRKQRTFDNGIIPHQIHLGELHAILRRQEDFYPFLKDNREKIEKILTFRIPYYVGPLARGNSRFAWMTRKSEETITPWNFEKVVDKGASAQSFIERMTNFDKNLPNEKVLPKHSLLYEYFTVYNELTKVKYVTEGMRKPAFLSGDQKKAIVDLLFKTNRKVTVKQLKEDYFKKIECFDSVEISGVEDRFNASLGTYHDLLKIIKDKDFLDNEENEDILEDIVLTLTLFEDREMIEERLKTYAHLFDDKVMKQLKRRRYTGWGRLSRKLINGIRDKQSGKTILDFLKSDGFANRNFIQLIHDDSLTFKEDIQKAQVSGQGDSLHEHIANLAGSPAIKKGILQTVKVVDELVKVMGRHKPENIVIEMARENQTTQKGQKNSRERMKRIEEGIKELGSQILKEHPVENTQLQNEKLYLYYLQNGRDMYVDQELDINRLSDYDVDHIVPQSFLKDDSIDNKVLTRSDKNRGKSDNVPSEEVVKKMKNYWRQLLNAKLITQRKFDNLTKAERGGLSELDKAGFIKRQLVETRQITKHVAQILDSRMNTKYDENDKLIREVKVITLKSKLVSDFRKDFQFYKVREINNYHHAHDAYLNAVVGTALIKKYPKLESEFVYGDYKVYDVRKMIAKSEQEIGKATAKYFFYSNIMNFFKTEITLANGEIRKRPLIETNGETGEIVWDKGRDFATVRKVLSMPQVNIVKKTEVQTGGFSKESIRPKRNSDKLIARKKDWDPKKYGGFVSPTVAYSVLVVAKVEKGKSKKLKSVKELLGITIMERSSFEKNPIDFLEAKGYKEVKKDLIIKLPKYSLFELENGRKRMLASARFLQKGNELALPSKYVNFLYLASHYEKLKGSPEDNEQKQLFVEQHKHYLDEIIEQISEFSKRVILADANLDKVLSAYNKHRDKPIREQAENIIHLFTLTNLGAPRAFKYFDTTIDRKVYRSTKEVLDATLIHQSITGLYETRIDLSQLGGD

SEQ ID NO: 20353 - protein, 1122 aa, Streptococcus thermophilus
MSDLVLGLDIGIGSVGVGILNKVTGEIIHKNSRIFPAAQAENNLVRRTNRQGRRLARRKKHRRVRLNRLFEESGLITDFTKISINLNPYQLRVKGLTDELSNEELFIALKNMVKHRGISYLDDASDDGNSSVGDYAQIVKENSKQLETKTPGQIQLERYQTYGQLRGDFTVEKDGKKHRLINVFPTSAYRSEALRILQTQQEFNPQITDEFINRYLEILTGKRKYYHGPGNEKSRTDYGRYRTSGETLDNIFGILIGKCTFYPDEFRAAKASYTAQEFNLLNDLNNLTVPTETKKLSKEQKNQIINYVKNEKAMGPAKLFKYIAKLLSCDVADIKGYRIDKSGKAEIHTFEAYRKMKTLETLDIEQMDRETLDKLAYVLTLNTEREGIQEALEHEFADGSFSQKQVDELVQFRKANSSIFGKGWHNFSVKLMMELIPELYETSEEQMTILTRLGKQKTTSSSNKTKYIDEKLLTEEIYNPVVAKSVRQAIKIVNAAIKEYGDFDNIVIEMARETNEDDEKKAIQKIQKANKDEKDAAMLKAANQYNGKAELPHSVFHGHKQLATKIRLWHQQGERCLYTGKTISIHDLINNSNQFEVDHILPLSITFDDSLANKVLVYATANQEKGQRTPYQALDSMDDAWSFRELKAFVRESKTLSNKKKEYLLTEEDISKFDVRKKFIERNLVDTRYASRVVLNALQEHFRAHKIDTKVSVVRGQFTSQLRRHWGIEKTRDTYHHHAVDALIIAASSQLNLWKKQKNTLVSYSEEQLLDIETGELISDDEYKESVFKAPYQHFVDTLKSKEFEDSILFSYQVDSKFNRKISDATIYATRQAKVGKDKKDETYVLGKIKDIYTQDGYDAFMKIYKKDKSKFLMYRHDPQTFEKVIEPILENYPNKQMNEKGKEVPCNPFLKYKEEHGYIRKYSKKGNGPEIKSLKYYDSKLLGNPIDITPENSKNKVVLQSLKPWRTDVYFNKATGKYEILGLKYADLQFEKGTGTYKISQEKYNDIKKKEGVDSDSEFKFTLYKNDLLLVKDTETKEQQLFRFLSRTLPKQKHYVELKPYDKQKFEGGEALIKVLGNVANGGQCIKGLAKSNISIYKVRTDVLGNQHIIKNEGDKPKLDF

SEQ ID NO: 20354 - protein, 1122 aa, Streptococcus thermophilus
MSDLVLGLDIGIGSVGVGILNKVTGEIIHKNSRIFPAAQAENNLVRRTNRQGRRLARRKKHRRVRLNRLFEESGLITDFTKISINLNPYQLRVKGLTDELSNEELFIALKNMVKHRGISYLDDASDDGNSSVGDYAQIVKENSKQLETKTPGQIQLERYQTYGQLRGDFTVEKDGKKHRLINVFPTSAYRSEALRILQTQQEFNPQITDEFINRYLEILTGKRKYYHGPGNEKSRTDYGRYRTSGETLDNIFGILIGKCTFYPDEFRAAKASYTAQEFNLLNDLNNLTVPTETKKLSKEQKNQIINYVKNEKAMGPAKLFKYIAKLLSCDVADIKGYRIDKSGKAEIHTFEAYRKMKTLETLDIEQMDRETLDKLAYVLTLNTEREGIQEALEHEFADGSFSQKQVDELVQFRKANSSIFGKGWHNFSVKLMMELIPELYETSEEQMTILTRLGKQKTTSSSNKTKYIDEKLLTEEIYNPVVAKSVRQAIKIVNAAIKEYGDFDNIVIEMARETNEDDEKKAIQKIQKANKDEKDAAMLKAANQYNGKAELPHSVFHGHKQLATKIRLWHQQGERCLYTGKTISIHDLINNSNQFEVDHILPLSITFDDSLANKVLVYATANQEKGQRTPYQALDSMDDAWSFRELKAFVRESKTLSNKKKEYLLTEEDISKFDVRKKFIERNLVDTRYASRVVLNALQEHFRAHKIDTKVSVVRGQFTSQLRRHWGIEKTRDTYHHHAVDALIIAASSQLNLWKKQKNTLVSYSEEQLLDIETGELISDDEYKESVFKAPYQHFVDTLKSKEFEDSILFSYQVDSKFNRKISDATIYATRQAKVGKDKKDETYVLGKIKDIYTQDGYDAFMKIYKKDKSKFLMYRHDPQTFEKVIEPILENYPNKQMNEKGKEVPCNPFLKYKEEHGYIRKYSKKGNGPEIKSLKYYDSKLLGNPIDITPENSKNKVVLQSLKPWRTDVYFNKNTGKYEILGLKYADLQFEKKTGTYKISQEKYNGIMKEEGVDSDSEFKFTLYKNDLLLVKDTETKEQQLFRFLSRTMPNVKYYVELKPYSKDKFEKNESLIEILGSADKSGRCIKGLGKSNISIYKVRTDVLGNQHIIKNEGDKPKLDF

SEQ ID NO: 20355 - protein, 1120 aa, Streptococcus thermophilus
MSDLVLGLDIGIGSVGVGILNKVTGEIIHKNSRIFPAAQAENNLVRRTNRQGRRLARRKKHRRVRLNRLFEESGLITDFTKISINLNPYQLRVKGLTDELSNEELFIALKNMVKHRGISYLDDASDDGNSSVGDYAQIVKENSKQLETKTPGQIQLERYQTYGQLRGDFTVEKDGKKHRLINVFPTSAYRSEALRILQTQQEFNPQITDEFINRYLEILTGKRKYYHGPGNEKSRTDYGRYRTSGETLDNIFGILIGKCTFYPDEFRAAKASYTAQEFNLLNDLNNLTVPTETKKLSKEQKNQIINYVKNEKAMGPAKLFKYIAKLLSCDVADIKGYRIDKSGKAEIHTFEAYRKMKTLETLDIEQMDRETLDKLAYVLTLNTEREGIQEALEHEFADGSFSQKQVDELVQFRKANSSIFGKGWHNFSVKLMMELIPELYETSEEQMTILTRLGKQKTTSSSNKTKYIDEKLLTEEIYNPVVAKSVRQAIKIVNAAIKEYGDFDNIVIEMARETNEDDEKKAIQKIQKANKDEKDAAMLKAANQYNGKAELPHSVFHGHKQLATKIRLWHQQGERCLYTGKTISIHDLINNSNQFEVDHILPLSITFDDSLANKVLVYATANQEKGQRTPYQALDSMDDAWSFRELKAFVRESKTLSNKKKEYLLTEEDISKFDVRKKFIERNLVDTRYASRVVLNALQEHFRAHKIDTKVSVVRGQFTSQLRRHWGIEKTRDTYHHHAVDALIIAASSQLNLWKKQKNTLVSYSEDQLLDIETGELISDDEYKESVFKAPYQHFVDTLKSKEFEDSILFSYQVDSKFNRKISDATIYATRQAKVGKDKADETYVLGKIKDIYTQDGYDAFMKIYKKDKSKFLMYRHDPQTFEKVIEPILENYPNKQINEKGKEVPCNPFLKYKEEHGYIRKYSKKGNGPEIKSLKYYDSKLGNHIDITPKDSNNKVVLQSLKPWRTDVYFNKNTGKYEILGLKYSDMQFEKGTGKYSISKEQYENIKVREGVDENSEFKFTLYKNDLLLLKDSENGEQILLRFTSRNDTSKHYVELKPYNRQKFEGSEYLIKSLGTVAKGGQCIKGLGKSNISIYKVRTDVLGNQHIIKNEGDKPKLDF

SEQ ID NO: 20356 - protein, 1120 aa, Streptococcus thermophilus
MSDLVLGLDIGIGSVGVGILNKVTGEIIHKNSRIFPAAQAENNLVRRTNRQGRRLARRKKHRRVRLNRLFEESGLITDFTKISINLNPYQLRVKGLTDELSNEELFIALKNMVKHRGISYLDDASDDGNSSVGDYAQIVKENSKQLETKTPGQIQLERYQTYGQLRGDFTVEKDGKKHRLINVFPTSAYRSEALRILQTQQEFNPQITDEFINRYLEILTGKRKYYHGPGNEKSRTDYGRYRTSGETLDNIFGILIGKCTFYPDEFRAAKASYTAQEFNLLNDLNNLTVPTETKKLSKEQKNQIINYVKNEKAMGPAKLFKYIAKLLSCDVADIKGYRIDKSGKAEIHTFEAYRKMKTLETLDIEQMDRETLDKLAYVLTLNTEREGIQEALEHEFADGSFSQKQVDELVQFRKANSSIFGKGWHNFSVKLMMELIPELYETSEEQMTILTRLGKQKTTSSSNKTKYIDEKLLTEEIYNPVVAKSVRQAIKIVNAAIKEYGDFDNIVIEMARETNEDDEKKAIQKIQKANKDEKDAAMLKAANQYNGKAELPHSVFHGHKQLATKIRLWHQQGERCLYTGKTISIHDLINNSNQFEVDHILPLSITFDDSLANKVLVYATANQEKGQRTPYQALDSMDDAWSFRELKAFVRESKTLSNKKKEYLLTEEDISKFDVRKKFIERNLVDTRYASRVVLNALQEHFRAHKIDTKVSVVRGQFTSQLRRHWGIEKTRDTYHHHAVDALIIAASSQLNLWKKQKNTLVSYSEDQLLDIETGELISDDEYKESVFKAPYQHFVDTLKSKEFEDSILFSYQVDSKFNRKISDATIYATRQAKVGKDKADETYVLGKIKDIYTQDGYDAFMKIYKKDKSKFLMYRHDPQTFEKVIEPILENYPNKQINEKGKEVPCNPFLKYKEEHGYIRKYSKKGNGPEIKSLKYYDSKLGNHIDITPKDSNNKVVLQSLKPWRTDVYFNKNTGKYEILGLKYSDMQFEKGTGKYSISKEQYENIKVREGVDENSEFKFTLYKNDLLLLKDSENGEQILLRFTSRNDTSKHYVELKPYNRQKFEGSEYLIKSLGTVVKGGRCIKGLGKSNISIYKVRTDVLGNQHIIKNEGDKPKLDF

SEQ ID NO: 20357 - protein, 1057 aa, Staphylococcus sp.
MNQKFILGLDIGITSVGYGLIDYETKNIIDAGVRLFPEANVENNEGRRSKRGSRRLKRRRIHRLERVKLLLTEYDLINKEQIPTSNNPYQIRVKGLSEILSKDELAIALLHLAKRRGIHNVDVAADKEETASDSLSTKDQINKNAKFLESRYVCELQKERLENEGHVRGVENRFLTKDIVREAKKIIDTQMQYYPEIDETFKEKYISLVETRREYFEGPGQGSPFGWNGDLKKWYEMLMGHCTYFPQELRSVKYAYSADLFNALNDLNNLIIQRDNSEKLEYHEKYHIIENVFKQKKKPTLKQIAKEIGVNPEDIKGYRITKSGTPEFTSFKLFHDLKKVVKDHAILDDIDLLNQIAEILTIYQDKDSIVAELGQLEYLMSEADKQSISELTGYTGTHSLSLKCMNMIIDELWHSSMNQMEVFTYLNMRPKKYELKGYQRIPTDMIDDAILSPVVKRTFIQSINVINKVIEKYGIPEDIIIELARENNSDDRKKFINNLQKKNEATRKRINEIIGQTGNQNAKRIVEKIRLHDQQEGKCLYSLESIPLEDLLNNPNHYEVDHIIPRSVSFDNSYHNKVLVKQSENSKKSNLTPYQYFNSGKSKLSYNQFKQHILNLSKSQDRISKKKKEYLLEERDINKFEVQKEFINRNLVDTRYATRELTNYLKAYFSANNMNVKVKTINGSFTDYLRKVWKFKKERNHGYKHHAEDALIIANADFLFKENKKLKAVNSVLEKPEIETKQLDIQVDSEDNYSEMFIIPKQVQDIKDFRNFKYSHRVDKKPNRQLINDTLYSTRKKDNSTYIVQTIKDIYAKDNTTLKKQFDKSPEKFLMYQHDPRTFEKLEVIMKQYANEKNPLAKYHEETGEYLTKYSKKNNGPIVKSLKYIGNKLGSHLDVTHQFKSSTKKLVKLSIKNYRFDVYLTEKGYKFVTIAYLNVFKKDNYYYIPKDKYQELKEKKKIKDTDQFIASFYKNDLIKLNGDLYKIIGVNSDDRNIIELDYYDIKYKDYCEINNIKGEPRIKKTIGKKTESIEKFTTDVLGNLYLHSTEKAPQLIFKRGL

SEQ ID NO: 20358 - protein, 1057 aa, Staphylococcus sp.
MNQKFILGLDIGITSVGYGLIDYETKNIIDAGVRLFPEANVENNEGRRSKRGSRRLKRRRIHRLERVKLLLTEYDLINKEQIPTSNNPYQIRVKGLSEILSKDELAIALLHLAKRRGIHNVDVAADKEETASDSLSTKDQINKNAKFLESRYVCELQKERLENEGHVRGVENRFLTKDIVREAKKIIDTQMQYYPEIDETFKEKYISLVETRREYFEGPGQGSPFGWNGDLKKWYEMLMGHCTYFPQELRSVKYAYSADLFNALNDLNNLIIQRDNSEKLEYHEKYHIIENVFKQKKKPTLKQIAKEIGVNPEDIKGYRITKSGTPEFTSFKLFHDLKKVVKDHAILDDIDLLNQIAEILTIYQDKDSIVAELGQLEYLMSEADKQSISELTGYTGTHSLSLKCMNMIIDELWHSSMNQMEVFTYLNMRPKKYELKGYQRIPTDMIDDAILSPVVKRTFIQSINVINKVIEKYGIPEDIIIELARENNSDDRKKFINNLQKKNEATRKRINEIIGQTGNQNAKRIVEKIRLHDQQEGKCLYSLESIPLEDLLNNPNHYEVDHIIPRSVSFDNSYHNKVLVKQSENSKKSNLTPYQYFNSGKSKLSYNQFKQHILNLSKSQDRISKKKKEYLLEERDINKFEVQKEFINRNLVDTRYATRELTSYLKAYFSANNMDVKVKTINGSFTNHLRKVWRFDKYRNHGYKHHAEDALIIANADFLFKENKKLQNTNKILEKPTIENNTKKVTVEKEEDYNNVFETPKLVEDIKQYRDYKFSHRVDKKPNRQLINDTLYSTRMKDEHDYIVQTITDIYGKDNTNLKKQFNKNPEKFLMYQNDPKTFEKLSIIMKQYSDEKNPLAKYYEETGEYLTKYSKKNNGPIVKKIKLLGNKVGNHLDVTNKYENSTKKLVKLSIKNYRFDVYLTEKGYKFVTIAYLNVFKKDNYYYIPKDKYQELKEKKKIKDTDQFIASFYKNDLIKLNGDLYKIIGVNSDDRNIIELDYYDIKYKDYCEINNIKGEPRIKKTIGKKTESIEKFTTDVLGNLYLHSTEKAPQLIFKRGL

SEQ ID NO: 20359 - protein, 1367 aa, unidentified
DKKYSIGLDIGTNSVGWAVITDEYKVPSKKFKVLGNTDRHSIKKNLIGALLFDSGETAEATRLKRTARRRYTRRKNRICYLQEIFSNEMAKVDDSFFHRLEESFLVEEDKKHERHPIFGNIVDEVAYHEKYPTIYHLRKKLVDSTDKADLRLIYLALAHMIKFRGHFLIEGDLNPDNSDVDKLFIQLVQTYNQLFEENPINASGVDAKAILSARLSKSRRLENLIAQLPGEKKNGLFGNLIALSLGLTPNFKSNFDLAEDAKLQLSKDTYDDDLDNLLAQIGDQYADLFLAAKNLSDAILLSDILRVNTEITKAPLSASMIKRYDEHHQDLTLLKALVRQQLPEKYKEIFFDQSKNGYAGYIDGGASQEEFYKFIKPILEKMDGTEELLVKLNREDLLRKQRTFDNGSIPHQIHLGELHAILRRQEDFYPFLKDNREKIEKILTFRIPYYVGPLARGNSRFAWMTRKSEETITPWNFEEVVDKGASAQSFIERMTNFDKNLPNEKVLPKHSLLYEYFTVYNELTKVKYVTEGMRKPAFLSGEQKKAIVDLLFKTNRKVTVKQLKEDYFKKIECFDSVEISGVEDRFNASLGTYHDLLKIIKDKDFLDNEENEDILEDIVLTLTLFEDREMIEERLKTYAHLFDDKVMKQLKRRRYTGWGRLSRKLINGIRDKQSGKTILDFLKSDGFANRNFMQLIHDDSLTFKEDIQKAQVSGQGDSLHEHIANLAGSPAIKKGILQTVKVVDELVKVMGRHKPENIVIEMARENQTTQKGQKNSRERMKRIEEGIKELGSQILKEHPVENTQLQNEKLYLYYLQNGRDMYVDQELDINRLSDYDVDAIVPQSFLKDDSIDNKVLTRSDKNRGKSDNVPSEEVVKKMKNYWRQLLNAKLITQRKFDNLTKAERGGLSELDKAGFIKRQLVETRQITKHVAQILDSRMNTKYDENDKLIREVKVITLKSKLVSDFRKDFQFYKVREINNYHHAHDAYLNAVVGTALIKKYPKLESEFVYGDYKVYDVRKMIAKSEQEIGKATAKYFFYSNIMNFFKTEITLANGEIRKRPLIETNGETGEIVWDKGRDFATVRKVLSMPQVNIVKKTEVQTGGFSKESILPKRNSDKLIARKKDWDPKKYGGFDSPTVAYSVLVVAKVEKGKSKKLKSVKELLGITIMERSSFEKNPIDFLEAKGYKEVKKDLIIKLPKYSLFELENGRKRMLASAGELQKGNELALPSKYVNFLYLASHYEKLKGSPEDNEQKQLFVEQHKHYLDEIIEQISEFSKRVILADANLDKVLSAYNKHRDKPIREQAENIIHLFTLTNLGAPAAFKYFDTTIDRKRYTSTKEVLDATLIHQSITGLYETRIDLSQLGGD

SEQ ID NO: 20360 - protein, 33 aa, synthetic construct; identical to SEQ ID NO: 6

SEQ ID NO: 20361 - protein, 107 aa, synthetic construct
GVQVETISPGDGRTFPKRGQTCVVHYTGMLEDGKKFDSSRDRNKPFKFMLGKQEVIRGWEEGVAQMSVGQRAKLTISPDYAYGATGHPGIIPPHATLVFDVELLKLE

SEQ ID NO: 20362 - protein, 109 aa, synthetic construct
SRGVQVETISPGDGRTFPKRGQTCVVHYTGMLEDGKKFDSSRDRNKPFKFMLGKQEVIRGWEEGVAQMSVGQRAKLTISPDYAYGATGHPGIIPPHATLVFDVELLKLE

SEQ ID NO: 20363 - protein, 297 aa, synthetic construct
PLYGFTSICGRRPEMEAAVSTIPRFLQSSSGSMLDGRFDPQSAAHFFGVYDGHGGSQVANYCRERMHLALAEEIAKEKPMLCDGDTWLEKWKKALFNSFLRVDSEIESVAPETVGSTSVVAVVFPSHIFVANCGDSRAVLCRGKTALPLSVDHKPDREDEAARIEAAGGKVIQWNGARVFGVLAMSRSIGDRYLKPSIIPDPEVTAVKRVKEDDCLILASDGVWDVMTDEEACEMARKRILLWHKKNAVAGDASLLADERRKEGKDPAAMSAAEYLSKLAIQRGSKDNISVVVVDLK

SEQ ID NO: 20364 - protein, 297 aa, synthetic construct
PLYGFTSICGRRPEMEDAVSTIPRFLQSSSGSMLDGRFDPQSAAHFFGVYDGHGGSQVANYCRERMHLALAEEIAKEKPMLCDGDTWLEKWKKALFNSFLRVDSEIGSVAPETVGSTSVVAVVFPSHIFVANCGDSRAVLCRGKTALPLSVDHKPDREDEAARIEAAGGKVIQWNGARVFGVLAMSRSIGDRYLKPSIIPDPEVTAVKRVKEDDCLILASDGVWDVMTDEEACEMARKRILLWHKKNAVAGDASLLADERRKEGKDPAAMSAAEYLSKLAIQRGSKDNISVVVVDLK

SEQ ID NO: 20365 - protein, 91 aa, synthetic construct
KRDHHHHHHQDKKTMMMNEEDDGNGMDELLAVLGYKVRSSEMADVAQKLEQLEVMMSNVQEDDLSQLATETVHYNPAELYTWLDSMLTDLN

SEQ ID NO: 20366 - protein, 497 aa, synthetic construct
KMDKKTIVWFRRDLRIEDNPALAAAAHEGSVFPVFIWCPEEEGQFYPGRASRWWMKQSLAHLSQSLKALGSDLTLIKTHNTISAILDCIRVTGATKVVFNHLYDPVSLVRDHTVKEKLVERGISVQSYNGDLLYEPWEIYCEKGKPFTSFNSYWKKCLDMSIESVMLPPPWRLMPITAAAEAIWACSIEELGLENEAEKPSNALLTRAWSPGWSNADKLLNEFIEKQLIDYAKNSKKVVGNSTSLLSPYLHFGEISVRHVFQCARMKQIIWARDKNSEGEESADLFLRGIGLREYSRYICFNFPFTHEQSLLSHLRFFPWDADVDKFKAWRQGRTGYPLVDAGMRELWATGWMHNRIRVIVSSFAVKFLLLPWKWGMKYFWDTLLDADLECDILGWQYISGSIPDGHELDRLDNPALQGAKYDPEGEYIRQWLPELARLPTEWIHHPWDAPLTVLKASGVELGTNYAKPIVDIDTARELLAKAISRTREAQIMIGAA

SEQ ID NO: 20367 - protein, 150 aa, synthetic construct
HTLYAPGGYDIMGYLRQIRNRPNPQVELGPVDTSCALILCDLKQKDTPIVYASEAFLYMTGYSNAEVLGRNCRFLQSPDGMVKPKSTRKYVDSNTINTMRKAIDRNAEVQVEVVNFKKNGQRFVNFLTMIPVRDETGEYRYSMGFQCETE

SEQ ID NO: 20368 - protein, 150 aa, synthetic construct
HTLYAPGGYDIMGYLRQIRNRPNPQVELGPVDTSCALVLCDLKQKDTPVVYASEAFLYMTGYSNAEVLGRNCRFLQSPDGMVKPKSTRKYVDSNTINTMRKAIDRNAEVQVEVVNFKKNGQRFVNFLTMIPVRDETGEYRYSMGFQCETE

SEQ ID NO: 20369 - protein, 907 aa, synthetic construct
VSGVGGSGGGRGGGRGGEEEPSSSHTPNNRRGGEQAQSSGTKSLRPRSNTESMSKAIQQYTVDARLHAVFEQSGESGKSFDYSQSLKTTTYGSSVPEQQITAYLSRIQRGGYIQPFGCMIAVDESSFRIIGYSENAREMLGIMPQSVPTLEKPEILAMGTDVRSLFTSSSSILLERAFVAREITLLNPVWIHSKNTGKPFYAILHRIDVGVVIDLEPARTEDPALSIAGAVQSQKLAVRAISQLQALPGGDIKLLCDTVVESVRDLTGYDRVMVYKFHEDEHGEVVAESKRDDLEPYIGLHYPATDIPQASRFLFKQNRVRMIVDCNATPVLVVQDDRLTQSMCLVGSTLRAPHGCHSQYMANMGSIASLAMAVIINGNEDDGSNVASGRSSMRLWGLVVCHHTSSRCIPFPLRYACEFLMQAFGLQLNMELQLALQMSEKRVLRTQTLLCDMLLRDSPAGIVTQSPSIMDLVKCDGAAFLYHGKYYPLGVAPSEVQIKDVVEWLLANHADSTGLSTDSLGDAGYPGAAALGDAVCGMAVAYITKRDFLFWFRSHTAKEIKWGGAKHHPEDKDDGQRMHPRSSFQAFLEVVKSRSQPWETAEMDAIHSLQLILRDSFKESEAAMNSKVVDGVVQPCRDMAGEQGIDELGAVAREMVRLIETATVPIFAVDAGGCINGWNAKIAELTGLSVEEAMGKSLVSDLIYKENEATVNKLLSRALRGDEEKNVEVKLKTFSPELQGKAVFVVVNACSSKDYLNNIVGVCFVGQDVTSQKIVMDKFINIQGDYKAIVHSPNPLIPPIFAADENTCCLEWNMAMEKLTGWSRSEVIGKMIVGEVFGSCCMLKGPDALTKFMIVLHNAIGGQDTDKFPFPFFDRNGKFVQALLTANKRVSLEGKVIGAFCFLQIPS

SEQ ID NO: 20370 - protein, 620 aa, synthetic construct
VSGVGGSGGGRGGGRGGEEEPSSSHTPNNRRGGEQAQSSGTKSLRPRSNTESMSKAIQQYTVDARLHAVFEQSGESGKSFDYSQSLKTTTYGSSVPEQQITAYLSRIQRGGYIQPFGCMIAVDESSFRIIGYSENAREMLGIMPQSVPTLEKPEILAMGTDVRSLFTSSSSILLERAFVAREITLLNPVWIHSKNTGKPFYAILHRIDVGVVIDLEPARTEDPALSIAGAVQSQKLAVRAISQLQALPGGDIKLLCDTVVESVRDLTGYDRVMVYKFHEDEHGEVVAESKRDDLEPYIGLHYPATDIPQASRFLFKQNRVRMIVDCNATPVLVVQDDRLTQSMCLVGSTLRAPHGCHSQYMANMGSIASLAMAVIINGNEDDGSNVASGRSSMRLWGLVVCHHTSSRCIPFPLRYACEFLMQAFGLQLNMELQLALQMSEKRVLRTQTLLCDMLLRDSPAGIVTQSPSIMDLVKCDGAAFLYHGKYYPLGVAPSEVQIKDVVEWLLANHADSTGLSTDSLGDAGYPGAAALGDAVCGMAVAYITKRDFLFWFRSHTAKEIKWGGAKHHPEDKDDGQRMHPRSSFQAFLEVVKSRSQPWETAEMDAIHSLQLILRDSFKES

SEQ ID NO: 20371 - protein, 463 aa, synthetic construct
ASKSVHADITLLLDMEGVIREATLSPTMAAESVDGWLGRRWSDIAGAEGGDKVRRMVEDARRSGISAFRQINQPFPSGVEIPIEFTTMLLGDRTGMIAVGKNMQAVTELHSRLIAAQQAMERDYWRLRELETRYRLVFDAAADAVMIVSAGDMRIVEANRAAVNAISRVERGNDDLAGRDFLAEVAAADRDAVRDMLAQVRQRGTALSVLVHLGRYDRAWMLRGSLMSSERRQVFLLHFTPVTTTPAIDDVDDDAVLRGLIDRIPDGFVALDSEGVVRHANQAFLDLVQIGSKPAAVGRSLGVWMGRPGADLSSLLTLLRRYKTVRLFQTTIRGELGTETEVEVSAVDGEDDQYIGVLMRNVARRLDAADDHDALRQALGPISKQLGRSSLRKLVKNAVSIVEQHYVKEALLRSKGNRTATAELLGLSRQSLYAKLNSYGFDDKGVVASAADGAEGASDDAED

SEQ ID NO: 20372 - protein, 93 aa, synthetic construct [sequence omitted]

SEQ ID NO: 20373 - protein, 91 aa, synthetic construct
EMWHEGLEEASRLYFGERNVKGMFEVLEPLHAMMERGPQTLKETSFNQAYGRDLMEAQEWCRKYMKSGNVKDLTQAWDLYYHVFRRISKQL

SEQ ID NO: 20374 - protein, 92 aa, synthetic construct
ILWHEMWHEGLEEASRLYFGERNVKGMFEVLEPLHAMMERGPQTLKETSFNQAYGRDLMEAQEWCRKYMKSGNVKDLLQAWDLYYHVFRRIS

SEQ ID NO: 20375 - protein, 93 aa, synthetic construct
ILWHEMWHEGLEEASRLYFGERNVKGMFEVLEPLHAMMERGPQTLKETSFNQAYGRDLMEAQEWCRKYMKSGNVKDLLQAWDLYYHVFRRISK

SEQ ID NO: 20376 - protein, 179 aa, synthetic construct
APTQDEFTQLSQSIAEFHTYQLGNGRCSSLLAQRIHAPPETVWSVVRRFDRPQIYKHFIKSCNVSEDFEMRVGCTRDVNVISGLPANTSRERLDLLDDDRRVTGFSITGGEHRLRNYKSVTTVHRFEKEEEEERIWTVVLESYVVDVPEGNSEEDTRLFADTVIRLNLQKLASITEAMN

SEQ ID NO: 20377 - protein, 188 aa, synthetic construct
APTQDEFTQLSQSIAEFHTYQLGNGRCSSLLAQRIHAPPETVWSVVRRFDRPQIYKHFIKSCNVSEDFEMRVGCTRDVNVISGLPANTSRERLDLLDDDRRVTGFSITGGEHRLRNYKSVTTVHRFEKEEEEERIWTVVLESYVVDVPEGNSEEDTRLFADTVIRLNLQKLASITEAMNYPYDVPDYA

SEQ ID NO: 20378 - protein, 344 aa, synthetic construct
AASDEVNLIESRTVVPLNTWVLISNFKVAYNILRRPDGTFNRHLAEYLDRKVTANANPVDGVFSFDVLIDRRINLLSRVYRPAYADQEQPPSILDLEKPVDGDIVPVILFFHGGSFAHSSANSAIYDTLCRRLVGLCKCVVVSVNYRRAPENPYPCAYDDGWIALNWVNSRSWLKSKKDSKVHIFLAGDSSGGNIAHNVALRAGESGIDVLGNILLNPMFGGNERTESEKSLDGKYFVTVRDRDWYWKAFLPEGEDREHPACNPFSPRGKSLEGVSFPKSLVVVAGLDLIRDWQLAYAEGLKKAGQEVKLMHLEKATVGFYLLPNNNHFHNVMDEISAFVNAEC

SEQ ID NO: 20379 - protein, 169 aa, synthetic construct
NGAIGGDLLLNFPDMSVLERQRAHLKYLNPTFDSPLAGFFADSSMITGGEMDSYLSTAGLNLPMMYGETTVEGDSRLSISPETTLGTGNFKAAKFDTETKDCNEAAKKMTMNRDDLVEEGEEEKSKITEQNNGSTKSIKKMKHKAKKEENNFSNDSSKVTKELEKTDYI

SEQ ID NO: 20380 - protein, 169 aa, synthetic construct
NGAIGGDLLLNFPDMSVLERQRAHLKYLNPTFDSPLAGFFADSSMITGGEMDSYLSTAGLNLPMMYGETTVEGDSRLSISPETTLGTGNFKKRKFDTETKDCNEKKKKMTMNRDDLVEEGEEEKSKITEQNNGSTKSIKKMKHKAKKEENNFSNDSSKVTKELEKTDYI

SEQ ID NO: 20381 - protein, 150 aa, synthetic construct
HTLYAPGGYDIMGYLDQIGNRPNPQVELGPVDTSCALILCDLKQKDTPIVYASEAFLYMTGYSNAEVLGRNCRFLQSPDGMVKPKSTRKYVDSNTINTIRKAIDRNAEVQVEVVNFKKNGQRFVNFLTIIPVRDETGEYRYSMGFQCETE

SEQ ID NO: 20382 - protein, 150 aa, synthetic construct
HTLYAPGGYDIMGYLDQIGNRPNPQVELGPVDTSCALILCDLKQKDTPIVYASEAFLYMTGYSNAEVLGRNCRFLQSPDGMVKPKSTRKYVDSNTINTMRKAIDRNAEVQVEVVNFKKNGQRFVNFLTMIPVRDETGEYRYSMGFQCETE

SEQ ID NO: 20383 - protein, 99 aa, synthetic construct
MFLPTDYCCRLSDQEYMELVFENGQILAKGQRSNVSLHNQRTKSIMDLYEAEYNEDFMKSIIHGGGGAITNLGDTQVVPQSHVAAAHETNMLESNKHVD

SEQ ID NO: 20384 - protein, 731 aa, synthetic construct
VAGHASGSPAFGTADLSNCEREEIHLAGSIQPHGALLVVSEPDHRIIQASANAAEFLNLGSVLGVPLAEIDGDLLIKILPHLDPTAEGMPVAVRCRIGNPSTEYDGLMHRPPEGGLIIELERAGPPIDLSGTLAPALERIRTAGSLRALCDDTALLFQQCTGYDRVMVYRFDEQGHGEVFSERHVPGLESYFGNRYPSSDIPQMARRLYERQRVRVLVDVSYQPVPLEPRLSPLTGRDLDMSGCFLRSMSPIHLQYLKNMGVRATLVVSLVVGGKLWGLVACHHYLPRFIHFELRAICELLAEAIATRITALESFAQSQSELFVQRLEQRMIEAITREGDWRAAIFDTSQSILQPLHADGCALVYEDQIRTIGDVPSTQDVREIAGWLDRQPRAAVTSTASLGLDVPELAHLTRMASGVVAAPISDHRGEFLMWFRPERVHTVTWGGDPKKPFTMGDTPADLSPRRSFAKWHQVVEGTSDPWTAADLAAARTIGQTVADIVLQFRAVRTLIAREQYEQFSSQVHASMQPVLITDAEGRILLMNDSFRDMLPAGSPSAVHLDDLAGFFVESNDFLRNVAELIDHGRGWRGEVLLRGAGNRPLPLAVRADPVTRTEDQSLGFVLIFSDATDRRTADAARTRFQEGILASARPGVRLDSKSDLLHEKLLSALVENAQLAALEITYGVETGRIAELLEGVRQSMLRTAEVLGHLVQHAARTAGSDSSSNGSQNKK

SEQ ID NO: 20385 - protein, 19 aa, synthetic construct
EELLSKNYHLENEVARLKK

SEQ ID NO: 20386 - protein, 22 aa, synthetic construct
LLPKNYHLENEVARLKKLVGER

SEQ ID NO: 20387 - protein, 15 aa, synthetic construct
KNEQELLELDKWASL

SEQ ID NO: 20388 - protein, 246 aa, synthetic construct
GPDIVMTQSPSSLSASVGDRVTITCRSSTGAVTTSNYASWVQEKPGKLFKGLIGGTNNRAPGVPSRFSGSLIGDKATLTISSLQPEDFATYFCALWYSNHWVFGQGTKVELKRGGGGSGGGGSGGGGSSGGGSEVKLLESGGGLVQPGGSLKLSCAVSGFSLTDYGVNWVRQAPGRGLEWIGVIWGDGITDYNSALKDRFIISKDNGKNTVYLQMSKVRSDDTALYYCVTGLFDYWGQGTLVTVSS

SEQ ID NO: 20389 - protein, 122 aa, synthetic construct
EVQLVESGGGLVQPGGSLRLSCAASGSISSVDVMSWYRQAPGKQRELVAFITDRGRTNYKVSVKGRFTISRDNSKNMVYLQMNSLKPEDTADYLCRAESRTSWSSPSPLDVWGRGTQVTVSS

SEQ ID NO: 20390 - protein, 33 aa, synthetic construct
SPEDEIQALEEENAQLEQENAALEEEIAQLEYG

SEQ ID NO: 20391 - protein, 33 aa, synthetic construct
SPEDKIAQLKEKNAALKEKNQQLKEKIQALKYG

SEQ ID NO: 20392 - protein, 33 aa, synthetic construct
SPEDEIQQLEEEIAQLEQKNAALKEKNQALKYG

SEQ ID NO: 20393 - protein, 33 aa, synthetic construct
SPEDKIAQLKQKIQALKQENQQLEEENAALEYG

SEQ ID NO: 20394 - protein, 33 aa, synthetic construct
SPEDEIQQLEEEISQLEQKNSQLKEKNQQLKYG

SEQ ID NO: 20395 - protein, 33 aa, synthetic construct
SPEDKISQLKQKIQQLKQENQQLEEENSQLEYG

SEQ ID NO: 20396 - protein, 33 aa, synthetic construct
SPEDENAALEEKIAQLKQKNAALKEEIQALEYG

SEQ ID NO: 20397 - protein, 33 aa, synthetic construct
SPEDKNAALKEEIQALEEENQALEEKIAQLKYG

SEQ ID NO: 20398 - protein, 33 aa, synthetic construct
SPEDEIQALEEKNAQLKQEIAALEEKNQALKYG

SEQ ID NO: 20399 - protein, 33 aa, synthetic construct
SPEDKIAQLKEENQQLEQKIQALKEENAALEYG

SEQ ID NO: 20400 - protein, 33 aa, synthetic construct
SPEDENQALEQKNAQLKQEIAALEQEIAQLEYG

SEQ ID NO: 20401 - protein, 33 aa, synthetic construct
SPEDKNAQLKEENAALEEKIQQLKEKIQALKYG

SEQ ID NO: 20402 - protein, 33 aa, synthetic construct
SPEDENQALEQEIAQLEQEIAALEQKNAQLKYG

SEQ ID NO: 20403 - protein, 33 aa, synthetic construct
SPEDKNAQLKEKIAALKEKIQQLKEENQALEYG

SEQ ID NO: 20404 - protein, 64 aa, synthetic construct
GSPKEEARELIRKQKELIKEQKKLIKEAKQKSDSRDAERIWKRSREINRESKKINKRIKELIKS

SEQ ID NO: 20405 - protein, 62 aa, synthetic construct
PKKEAEELAEESEELHDRSEKLHERAEQSSNSEEARKILEDIERISERIEEISDRIERLLRS

SEQ ID NO: 20406 - protein, 77 aa, synthetic construct
GTKEDILERQRKIIERAQEIHRRQQEILEELERIIRKPGSSEEAMKRMLKLLEESLRLLKELLELSEESAQLLYEQR

SEQ ID NO: 20407 - protein, 83 aa, synthetic construct
GTEKRLLEEAERAHREQKEIIKKAQELHRRLEEIVRQSGSSEEAKKEAKKILEEIRELSKRSLELLREILYLSQEQKGSLVPR

SEQ ID NO: 20408 - protein, 76 aa, synthetic construct
TKEDILERQRKIIERAQEIIRRQQEILEELERIIRKPGSSEEAMKRMLKLLEESLRLLKELLELLEESAQLLYEQR

SEQ ID NO: 20409 - protein, 78 aa, synthetic construct
GSTEKRLLEEAERAHREAKEIIKKAQELHRRLEEIVRQSGSSEEAKKEAKKILEEIRELSKRLLELLREILYLSQEQK

SEQ ID NO: 20410 - protein, 76 aa, synthetic construct
TKEDILERARKIIERAQEIHRRQQEILEELERIIRKPGSSEEAMKRMLKLLEESLRLLKELLELSEELAQLLYEQR

SEQ ID NO: 20411 - protein, 78 aa, synthetic construct
GSTEKRLLEEAERAIREQKEIIKKAQELHRRLEEIVRQSGSSEEAKKEAKKILEEIRELSKRSLELLREILYLLQEQK

SEQ ID NO: 20412 - protein, 35 aa, synthetic construct
TKEDILERQRKIIERAQEIHRRQQEILEELEYIIR

SEQ ID NO: 20413 - protein, 121 aa, synthetic construct
MSEEAMKRMLKLLEESLRLLKELLELSEESAQLLYEQRKANNGSETEKRLLEEAERAHREQKEIIKKAQELHRRLEEIVRQSGSSEEAKKEAKKILEEIRELSKRSLELLREILYLSQEQK

SEQ ID NO: 20414 - protein, 77 aa, synthetic construct
MTKEDILERQRKIIERAQEIHRRQQEILKEQEKIIRKPGSSEEAMKRSLKLIEESLRLLKELLELSEESAQLLYEQR

SEQ ID NO: 20415 - protein, 77 aa, synthetic construct
GTEKRLLEEAERAHREQKEIIKKAQELHKELTKIHQQSGSSEEAKKRALKISQEIRELSKRSLELLREILYLSQEQK

SEQ ID NO: 20416 - protein, 76 aa, synthetic construct
TKEDILERQRKIIERAQEIHRRQQEILKRSEEIIRKPGSSEEALETLRELQEESLRLLKELLELSEESAQLLYEQR

SEQ ID NO: 20417 - protein, 78 aa, synthetic construct
GSTEKRLLEEAERAHREQKEIIKKAQELHRRTEEIIRQSGSSEEAKDELRRIQEEIRELSKRSLELLREILYLSQEQK

SEQ ID NO: 20418 - protein, 36 aa, synthetic construct
TTKRYLEEAERAHREQKEIIKKAQELHRRLEEIVRQ

SEQ ID NO: 20419 - protein, 116 aa, synthetic construct
GSSEEAKKEAKKILEEIRELSKRSLELLREILYLSQQVNDVDEKALERQRKIIERAQEIHRRQQEILEELERIIRKPGSSEEAMKRMLKLLEESLRLLKELLELSEESAQLLYEAR

SEQ ID NO: 20420 - protein, 35 aa, synthetic construct
EAMKRMLKLLEESLRLLKELLELSEESAQLLYEAR

SEQ ID NO: 20421 - protein, 116 aa, synthetic construct
TTKRYLEEAERAHREQKEIIKKAQELHRRLEEIVRQSGSSEEAKKEAKKILEEIRELSKRSLELLREILYLSQQVNDVDEKALERQRKIIERAQEIHRRQQEILEELERIIRKPGS

SEQ ID NO: 20422 - protein, 77 aa, synthetic construct
TREELLRENIELAKEHIEIMREILELLQKMEELLEKARGADEDVAKTIKELLRRLKEIIERNQRIAKEHEYIARERS

SEQ ID NO: 20423 - protein, 78 aa, synthetic construct
GTERKLLERSRRLQEESKRLLDEMAEIMRRIKKLLKKARGADEKVLDELRKIIERIRELLDRSRKIHERSEEIAYKEE

SEQ ID NO: 20424 - protein, 76 aa, synthetic construct
GDRQELIRRNIELLKEHIKILEEISQLIEELSELLDKSSSEEVVKRYKKILERYKQLLRKSQEIHKESSEIAKKES

SEQ ID NO: 20425 - protein, 82 aa, synthetic construct
GDEQKLIERSQRMQKESLELLKEIIKILDTIEKLLDKPDSEELLDTIKKLHDTLKKIHDRNKKLLKEHEEILRQRSGSLVPR

SEQ ID NO: 20426 - protein, 73 aa, synthetic construct
DKEEEYKRLLDEIKEILKESKEVLKDSKRVLEDIKRKVPDDDLVKLLEKHVRLLEEHVKLLEQLIREAEKSSK

SEQ ID NO: 20427 - protein, 72 aa, synthetic construct
QGSSAEELLKKIKESEKKIRDSLRKIKEIIKKSRKEGVDDKQLDLIRKVVESHRDLLRLHRDLLRLLREETS

SEQ ID NO: 20428 - protein, 77 aa, synthetic construct
DIDESIKEVEKLLEEVEQSLQKLDDSLKKLLEKVNQDPDVDDSVRKIVKRHVEILKRHEEVLKRLIEVVKEHTKTVK

SEQ ID NO: 20429 - protein, 72 aa, synthetic construct
GSDREEVHKEIVKLIREIIKIHKKILKIHEKIKNGEIDPSEILKLSEEIKKLTDTIIKIIEDLEQLTRDLRR

SEQ ID NO: 20430 - protein, 71 aa, synthetic construct
DRKEIVKRHQKVVELLKESSKLLRESSKLLQRLLDKTGDENLQKAVDDQDKAIKRQETAIRKSQEASKKLD

SEQ ID NO: 20431 - protein, 77 aa, synthetic construct
DNSEEIKKVAKTSREVAEYSERVAKENDKVVKTLEEGKIDESELLRLLEESIKIFDTALKLHEEAYKLHQDLVRKVS

SEQ ID NO: 20432 - protein, 72 aa, synthetic construct
DESEAASVAIESVQILVESVKLLEESVRILLDAVKKNGVEDLLRVAQRWEKLVDEWLKVVKRWLDNVRDIQR

SEQ ID NO: 20433 - protein, 76 aa, synthetic construct
GSDKAEEVEKSVRKIEESIKKIRKSIKKAEDAVQLLKEGKIDAKDFLRIVREDLEVVKEDVEIVKEDVENVREFSS

SEQ ID NO: 20434 - protein, 69 aa, synthetic construct
SDKEVSDKLLKASKKLLKVSEELLEVVRRLLKALKDDELIKKIADLLRKIIDKDKKFIRTSEEIVKESR

SEQ ID NO: 20435 - protein, 78 aa, synthetic construct
GSDLKEVLKTVEEAVKEIIKSSEELLQISRKILEISRVGVDEHEYISAIREYLKALEKHIQILKKFIEILKELIRAVS

SEQ ID NO: 20436 - protein, 81 aa, synthetic construct
SKEEIDKIVKKHKKKIEEHKKKVDELKKLVEEHDKRVSQDKDDKVKKLSEEVKKIIKRLEEVSKRLEEVSKKLLKVISDKR

SEQ ID NO: 20437 - protein, 78 aa, synthetic construct
GSNDEELKKILETLDRILKKLDKILTRLIEVLKKSEDPNLDDKDYTELVKQFIELIKKYEEVVKEYEEVVRQLIRLFS

SEQ ID NO: 20438 - protein, 81 aa, synthetic construct
SKEEIDKIVKKHKKKIEELKKLVDELKKLVEEHDKRVSQDKDDKVKKLSEEVKKIIKRVEEVAKRLEEVSKKLLKVISDKR

SEQ ID NO: 20439 - protein, 78 aa, synthetic construct
GSNDEELKKILETLDRILKKLEKILTRLIEVLKKSEDPNLDDKDYTELVKQFIELIKKFEEVIKEYEEVVRQLIRLFS

SEQ ID NO: 20440 - protein, 81 aa, synthetic construct
SKEEIDKIVKKHKKKIEEHKKKVDEHKKLVEEHDKRVSQDKDDKVKKLSEELKKISKRLEEVSKRLEEVSKKLLKVISDKR

SEQ ID NO: 20441 - protein, 78 aa, synthetic construct
GSNDEELKKILETLDRILKKLDKILTRLDEVLKKSEDPNLDDKDYTELVKQYIELVKKYEEVVKEYEEVVRQLIRLFS

SEQ ID NO: 20442 - protein, 69 aa, synthetic construct
DHSRKLKEILDRLRKHVKRLKEHLDELRDLVRQVPEDKLLEHVVKLSDKILQISERAVREFTKSVDKDS

SEQ ID NO: 20443 - protein, 76 aa, synthetic construct
GSDKKDELERILDEIRRLIERLDEILSRLNKLLELLKHGVPNAKEVVKDYIRLLKEYLELVKEFLKLVKRHADLVS

SEQ ID NO: 20444 - protein, 72 aa, synthetic construct
DSDEHLKKLKTFLENLRRHLDRLDKHIKQLRDILSENPEDERVKDVIDLSERSVRIVKTVIKIFEDSVRKKE

SEQ ID NO: 20445 - protein, 75 aa, synthetic construct
GSDDKELDKLLDTLEKILQTATKIIDDANKLLEKLRRSERKDPKVVETYVELLKRHEKAVKELLEIAKTHAKKVE

SEQ ID NO: 20446 - protein, 73 aa, synthetic construct
MDEEDHLKKLKTHLEKLERHLKLLEDHAKKLEDILKERPEDSAVKESIDELRRSIELVRESIEIFRQSVEEEE

SEQ ID NO: 20447 - protein, 74 aa, synthetic construct
GDVKELTKILDTLTKILETATKVIKDATKLLEEHRKSDKPDPRLIETHKKLVEEHETLVRQHKELAEEHLKRTR

SEQ ID NO: 20448 - protein, 72 aa, synthetic construct
DSDEHLKKLKTFLENLRRHLDRLDKLLKELRDILSENPEDERVKDVIDELERVIRIVKTVIKIFEDSVRKKE

SEQ ID NO: 20449 - protein, 75 aa, synthetic construct
GSDDKELDKLLDTLEKILQTATKIIDDLNKVLEKLRRSERKDPKVIETVVELLKRHEKAVKELLEIAKTHAKKVE

SEQ ID NO: 20450 - protein, 72 aa, synthetic construct
DSDEHLKKLKTFLENLRRLEDLLDKHIKQLRDILSENPEDERVKDVIDLSERVVRTVKTVIKIFEDSVRKKE

SEQ ID NO: 20451 - protein, 75 aa, synthetic construct
GSDDKELDKLLDTLEKILQTATKVVDDANKLLEKLRRSERKDPKVVETYVELLKRLEKLIKELLEIAKTHAKKVE

SEQ ID NO: 20452 - protein, 37 aa, synthetic construct
DSDEHLKKLKTFLENLRRHLDRLDKHIKQLRDILSEN

SEQ ID NO: 20453 - protein, 114 aa, synthetic construct
EDERVKDVIDLSERSVRIVKTVIKIFEDSVRKLEKTKPDSKTAKELDKLLDTLEKILQTATKIIDDANKLLEKLRRSERKDPKVVETYVELLKRHEKAVKELLEIAKTHAKKVE

SEQ ID NO: 20454 - protein, 114 aa, synthetic construct
DSDEHLYKLKTFLENLRRHLDRLDKHIKQLRDILSENPEDERVKDAIDLSERSVRIVKTVIKIFEDSVRKKEKRPIDKRDDKELDKLLDTLEKILQTATKIIDDANKLLEYLRR

SEQ ID NO: 20455 - protein, 35 aa, synthetic construct
GDPKVVETYVELLKRHEKAVKELLEIAKTHAKKVE

SEQ ID NO: 20456 - protein, 72 aa, synthetic construct
DSDEHLDRLDKHLKKLKTFLENLRRHIKQLRDILSENPEDERVKDVIDLSKTVIKIFEDSVRKKERSVRIVE

SEQ ID NO: 20457 - protein, 75 aa, synthetic construct
GSDDKEATKIIDDLDKLLDTLEKILQTANKLLEKLRRSERKDPKVVETYVKAVKELLEIAKTHAELLKRHEKKVE

SEQ ID NO: 20458 - protein, 72 aa, synthetic construct
DSDEHIKQLRDHLDRLDKHLKKLKTFLENLRRILSENPEDERVKTVIKIFEDSVRKKERSVRIVKDVIDLSE

SEQ ID NO: 20459 - protein, 75 aa, synthetic construct
GSDDKEANKLLEKATKIIDDLDKLLDTLEKILQTLRRSERKDPKAVKELLEIAKTHAELLKRHEKVVETYVKKVE

SEQ ID NO: 20460 - protein, 104 aa, synthetic construct
DHSRKLEEILDRLRKHVKRLLEHLRELLSLVKENPEDKDLVEVLELSLAILRRSLEAVEAFLKSVTKKDPDDEDLRRKADEIRKEVEEIKKSLAEVEKEIYKLK

SEQ ID NO: 20461 - protein, 116 aa, synthetic construct
GSSADDVLEDILKIIRELIEILDQILSLLNQLLKLLRHGVPNAKKVVEKYKEILELYLQLVSLFLKIVKTHADAVSGKIDKKAEEEIKKEEEKIKEKLRQAKDILKKLQEEIDKTR

SEQ ID NO: 20462 - protein, 107 aa, synthetic construct
DRDAHLYKLLTFLEQLVRHLDRLVKHITQLRDIVKKDPEDERAVDVIRQSVRSLEIVITVLKIFVDSVSDAARSKEAEKIVRKIRKEIDEIRQKLREIDKEVKKTTS

SEQ ID NO: 20463 - protein, 114 aa, synthetic construct
GSNDKVLDKILDILDRILRLATRVIDLANKLLQVKKKSTHKDPRIVETYKELLKIHETAVRLLLELADLHRRLKSKDEEANKRVETELDRIRKKVKDIEDKVRKLEDKVRKTAS

SEQ ID NO: 20464 - protein, 68 aa, synthetic construct
NDLSKEVLKKLEKSVEELLRRVQKSVKEAQKRGLLSDELVDRHLKILNQLVKRHLELLQEVIKRSDKK

SEQ ID NO: 20465 - protein, 78 aa, synthetic construct
GSDEAVKRVVEKSLKILDEVIKKSLDILRELIELQIRHAKDDESVIRASKSALKDAIEALKKSLDEIKKALKRSADEG

SEQ ID NO: 20466 - protein, 76 aa, synthetic construct
SSEEVVKVHEKVVKLHKEILELLKKIIKIHETAARDPDDKDSIKKLSDEIKKIVKRIEDISDQAKRESSDAQRKQS

SEQ ID NO: 20467 - protein, 74 aa, synthetic construct
DKEEESKELLKKLKEILKRSEELLEESKELLKLAKNGEIDESELADADRKLNKKHEKLVQDIQDLLREHERQDR

SEQ ID NO: 20468 - protein, 73 aa, synthetic construct
DEKKKIDKIVKETEDLLQKSEKLLQQSKEAVKRIRSQVKENEIVDRLLRISEELLKISRRLVEISRRIASTLS

SEQ ID NO: 20469 - protein, 78 aa, synthetic construct
GSSKEEVIRLLKENVRLIKENLELLTRNLKLITDLVRGSNGSEEKIKTLKELLKEYRELLKRYRKLVEDYKRLVDKHD

SEQ ID NO: 20470 - protein, 81 aa, synthetic construct
EIQELIKSSRRIIEESKELIKESEEVLRRIKEILDRIRNGVDNQEDLLREILKLLTKNLKIIQRNLKLLQDNAEILKRLVS

SEQ ID NO: 20471 - protein, 75 aa, synthetic construct
GSYIEDVIKKILDVSRELIKLSRTIIKISEEINKQLQQGRDTKDLVKKYDEIIKKYTRIVQHYTELIKELQKLLS

SEQ ID NO: 20472 - protein, 75 aa, synthetic construct
SPTEEAIQLSQRVIELSKRVIELSKEILKLLKRVLDLLPDLDKNEEKRLDDYDKELKEYDKELKKYEKRLKDLAS

SEQ ID NO: 20473 - protein, 75 aa, synthetic construct
GSEEEEILKIQKELLRIQSEILDKQKKILDTLRSNGAVTEEVRSILEKVERLSEEAKELSKEAKELTKEVSKLIS

SEQ ID NO: 20474 - protein, 77 aa, synthetic construct
SPLKELNNQLLRLLRELVKVSKKIVDLSKTIIEVLKHTDLDPRLLDSLEKSQQELDKSQKELDKVVKELTKVNKKLQ

SEQ ID NO: 20475 - protein, 78 aa, synthetic construct
GSPLEDLVRKYDELVKTYEKLVEEFKKAVDKYDKAVKKAPVSKEATDSLDLIRKVLELLDRNLKLIKENAKLIKELLK

SEQ ID NO: 20476 - protein, 69 aa, synthetic construct
SPTRENEKVIKENEKVISDNERVLEEVVKVVETATDRKEIQDAVDEVRKSVDKLRDSVRKLEESVRTLD

SEQ ID NO: 20477 - protein, 72 aa, synthetic construct
GSPIKDISKRLLEISKRLVEISDRIVELLQRIADSKDPNKDLQKEVKDVLEEYKRLVREYREVVKEYEKVVS

SEQ ID NO: 20478 - protein, 75 aa, synthetic construct
DEDEHVKQLIKNADLLRKHAELLKELVKLFQEIASQIPDDRVAKKVTDVVDRIDKILKQTEKLVRRTKQILDYSR

SEQ ID NO: 20479 - protein, 71 aa, synthetic construct
GSNLEELVKLLKEVLEMHERLLRIHEDLVEAHKSNASDKESERKLKKSDKDIKESLKKIKSIIDQVRYIQS

SEQ ID NO: 20480 - protein, 70 aa, synthetic construct
PVEDIIEESLRLLEESLKLLNRILKLLEDSLRKLPRSEEWRQRLDEFRKKLEDWKEELERWIEDVRYKKT

SEQ ID NO: 20481 - protein, 78 aa, synthetic construct
GSDEDYESREIIDEIRKLLDRSKKIVHRSQRLVERVKSTPLSEDQEDLIRRHEETINRHRELVKELEKVLEDHERHIR

SEQ ID NO: 20482 - protein, 78 aa, synthetic construct
PEEDSRRVLERFVRVSREVLKVLEEFLRVSEELLREADRDRDRRLEEYERQVDELREEIRRYKEEVDKFDKEVKYYKK

SEQ ID NO: 20483 - protein, 79 aa, synthetic construct
GSPEKDENRKLLDKVRKLVEKSRRLVEELRKLVDQSTKNGLIDEKALRKQQEVLRKVEEVLEKQERVLRELEEISYRVI

SEQ ID NO: 20484 - protein, 39 aa, synthetic construct
GSPERDENRKLLDKVRKLVEKSRRLVEELRKLVDQSTKN

SEQ ID NO: 20485 - protein, 124 aa, synthetic construct
GSDEKALRKQQEVLRKVEEVLEKQERVLRELEEISYRVITRGEDHKAEEDSRRVLERFVRVSREVLKVLEEFLRVSEELLREADRDRDRRLEEYERQVDELREEIRRYKEEVDKFDKEVKYYKK

SEQ ID NO: 20486 - protein, 39 aa, synthetic construct
GSDRRLEEYERQVDELREEIRRYKEEVDKFDKEVKYYKK

SEQ ID NO: 20487 - protein, 125 aa, synthetic construct
GSPERDENRKLLDKVRKLVEKSRRLVEELRKLVDQSTKNGLIDEKALRKQQEVLRKVEEVLEKQERVLRELEEISYRVITRGEDHKAEEDSRRVLERFVRVSREVLKVLEEFLRVSEELLREADR

SEQ ID NO: 20488 - protein, 75 aa, synthetic construct
DLSEESKKFVEKVKKLEKESRELEKQVKKIEEDSRSVENDVQKEFLELLKRLLDIQKKVVEVLREVVKVQQYVDS

SEQ ID NO: 20489 - protein, 80 aa, synthetic construct
GSDSEYESRQVLRELDTVLKDSHTVLEALRQVIRDSQDVVSKSDEESRRVIDDLEKVIQDSKKVLDDIKRLIDKSKSIKS

SEQ ID NO: 20490 - protein, 75 aa, synthetic construct
NEDELLKLLTENLKLLDENLKLLRENLSLLRQANNITDKNRIREIVKQSKEIVKQSREILKQSKEIVERIKYIVS

SEQ ID NO: 20491 - protein, 78 aa, synthetic construct
GSSLYELTQRYEKLVQQYEELVKDYRRLVKKLEKLKRDNKPDKRLLKEIVDVIKKSVEIIDRSLKLLEESIKILEETD

SEQ ID NO: 20492 - protein, 73 aa, synthetic construct
SQERSLEILKRILDVLKESLEILKESLSILRQLASRIKNPNRKIEEILKESDKIIKESDKVLKEIEEVIRYSS

SEQ ID NO: 20493 - protein, 78 aa, synthetic construct
GSDIEYESKEILELIKELLKLSRELLKESRRALELVRKSRDDSIVEEVIQVHKKVLDIHKEVLKIVRKVVEVHRRVKS

SEQ ID NO: 20494 - protein, 76 aa, synthetic construct
SKKDESTKLERLAEKIDEITKRIEELVKDVKRKSSEGVDKDQQQKIDEVFQKLLDLQREILEILDRILKVQQYILD

SEQ ID NO: 20495 - protein, 78 aa, synthetic construct
GSDLEYLNRRLLQLIKTLIDLNRHLLKLIDKLKKLNSREGDEEKIKEESKQIQEQFKEIVERSKEIIKQIKEIIKRSQ

SEQ ID NO: 20496 - protein, 79 aa, synthetic construct
DFERSSRRLEKVVEDLRRSSDRLREVIDELRKSADEKDEDEDLRRARKEHRDLIEELKRALEKQEEIIKHLQELVYRQL

SEQ ID NO: 20497 - protein, 78 aa, synthetic construct
GSEESEEVRKVVERIKKISRELEEVVKELDRVSKEFDRHGETDEIVREHERIVEKLEEIVKKHTKIVEELAEIVYKQQ

SEQ ID NO: 20498 - protein, 71 aa, synthetic construct
SDDDSVRVLDEIVKILDESVKLLKESLKLLDDFLRTKPDDHLKEVVKESKKVVEQSKKVLDRIKKIIYESK

SEQ ID NO: 20499 - protein, 72 aa, synthetic construct
GSDLLYLSKELLKLVRELLKLSRELVELSRRLVNSTHKSPELVKKYDKLVKKYQDLLKKLADVADEYLRQRS

SEQ ID NO: 20500 - protein, 76 aa, synthetic construct
DEKDYHRRLIEHLEDLVRRHEELIKRQKKVVEELERRGLDERLRRVVDRFRRSSERWEEVIERFRQVVDKLRKSVE

SEQ ID NO: 20501 - protein, 78 aa, synthetic construct
GSDAYDLDRIVKEHRRLVEEQRELVEELEKLVRRQEDHRVDKKESHEILERLERIIRRSTRILTELEKLTDEFERRTR

SEQ ID NO: 20502 - protein, 77 aa, synthetic construct
DERYRAREHIRRVEEHTKRLRHILKRLREHEEKLRRELKPGDEITESVDRFKKIVDQFEESIKKFETVSEELRKSDS

SEQ ID NO: 20503 - protein, 71 aa, synthetic construct
GSDRQRILDRLDKILEKLDDILKKLKDILETLSKDDVSDRRHKDLVEKFRELVDTHHKLVERYRELVYQNR

SEQ ID NO: 20504 - protein, 38 aa, synthetic construct
GSDEITESVDRFKKIVDQFEESIKKFETVSEELRKSIS

SEQ ID NO: 20505 - protein, 107 aa, synthetic construct
GSDPQRAADRLDKILEKLDDILKKLKDILETLSKDDVKDRRAKDLVEKFRELVDTHHKLVERYRELVYTATAGSDLARELIRRVEEHTKRLRHILKRLREHEEKLRR

SEQ ID NO: 20506 - protein, 73 aa, synthetic construct
NADDQLATSIKKLEDSIDQLIKIVRKFEESVKKLQKHGVDQHHVEILRKIVEIFRQHIEKLKKHLEKLRYTSS

SEQ ID NO: 20507 - protein, 70 aa, synthetic construct
GSDKEYLVTEHEKLVREHEKIVSEIEKLVKKHEAGVDESELEEILKKVEKLLRKLDEILEQLTQLLRKTE

SEQ ID NO: 20508 - protein, 36 aa, synthetic construct
GSDQHVVEILRKIVEIFRQHIEKLKKHLEKLRYTSS

SEQ ID NO: 20509 - protein, 114 aa, synthetic construct
GSDAEYLVTEHEKLVREHEKIVSEIEKLVKKHEKGVDESELEEILKKVEKLLRKLDEILEQLTQLLRKAEKHIDKHSKAADQLATSIKKLEDSIDQLIKIVRKFEESVKKLQKH

SEQ ID NO: 20510 - protein, 74 aa, synthetic construct
DEDDDIRRVLDESRRVLEHSRRVLKRSEEVLEKASRKKEKDTEEIEKHLKRLREHAKKLEKHRRELDDFLYKEI

SEQ ID NO: 20511 - protein, 74 aa, synthetic construct
GSRDKYLLERLNDILKKLDEIVDKLSDILKRLKDVRHDDRLQELVERYKEIVKEYKRIVEEYEKLVREFEEQQR

SEQ ID NO: 20512 - protein, 73 aa, synthetic construct
DRDYEDKEFKKIIKELEDVQEELKKLQEKIKRFSSELEEPNELLKEQLKVNEEQLEVNKKILKILRDQLKQNE

SEQ ID NO: 20513 - protein, 76 aa, synthetic construct
GSDAEYKVRESVKRSKESVKHSEDVVDKLNKSVKLSESGHSDAEKASRELVKLVREVVELSREVIKLSEKVLRVIS

SEQ ID NO: 20514 - protein, 79 aa, synthetic construct
DLQYKQEKLIRHFDRVVREWDKLVRKFSKVLEKQKHESKDKELEEASRRVDELIKRLREQLKRSKEILRRLKELSRKSS

SEQ ID NO: 20515 - protein, 79 aa, synthetic construct
GSDWEELLRRLEKVLQEYEEIVKELIDLIERLIKVSEDKSKDASEYKKLVTELEKLISKLEEISKKLEELVKEYEYKTE

SEQ ID NO: 20516 - protein, 76 aa, synthetic construct
DAKDELEKSLQEIEESLKELKKLLEELDKSLRELTSQGRNKKLEEHIKKVQKFIELVKKYIKAVQDYLKEVRYDNS

SEQ ID NO: 20517 - protein, 75 aa, synthetic construct
GSDKERAARATEEMVKLTKKLLKAVEDLVRDVRRLLKEGLISEKHARIAETILEVFKKHAKIIKKHVDIVKYDES

SEQ ID NO: 20518 - protein, 78 aa, synthetic construct
GSPLKERLLEIQRDLDRVLEEVVERLLRIQERLDSVVERKPPDVHEEYKYIVDEIREIVERVVREYEEIVKRIDEEVR

SEQ ID NO: 20519 - protein, 83 aa, synthetic construct
GSEEDERIRYDLDRIRKDVRRKLEEIRQRVRELEKKLRDAGHRRDEKELLRELIETSKDILRLVEELLKKIIDKSEDLLRKTE

SEQ ID NO: 20520 - protein, 73 aa, synthetic construct
GSDEEDYINENVEKDVRDIEDDVRRINERIRELLEKIRTEEVLQRVLEEHHELVERVLRKLVEILRKHEEENR

SEQ ID NO: 20521 - protein, 77 aa, synthetic construct
GSDEEEYYKEKLHKLLREIEELLKHYRELVRRLEELVKRGELDKDTAAHILERLSELLERIIRRVAHTLRRLSEERR

SEQ ID NO: 20522 - protein, 84 aa, synthetic construct
GSDEDEISYDSKRRVEEIVRQAREKSEKSRKDIEDVAEVLRKGDVSEKEVVDELVKVLEEQVKVLREAVERLREVLKKQVDDVR

SEQ ID NO: 20523 - protein, 82 aa, synthetic construct
GSDIVELVDHLLKRSLKLLEELAELVRRLLEKSTELLKRRTEEHKEEVVEESEYMVRELEERLRRVVDESEKLVRDADKHIR

SEQ ID NO: 20524 - protein, 83 aa, synthetic construct
GSKEKDIVKTLVDLLRENLETLERLIEEVVRLLKENVDVRDEGRDDKDSERILRDIKRRIDEAAKESREIIERIEKEVEYRSR

SEQ ID NO: 20525 - protein, 80 aa, synthetic construct
GSPEVDVLRRIVREILKASEELLRLLRKLIDEALKLSERKRDSQEYREVVDRVKKELERLLDEYRKLVEELKEKLRYDTR

SEQ ID NO: 20526 - protein, 84 aa, synthetic construct
GSDKRYESEKLKRRLDEAVEKVREVVERVERESDRVLEEVRRRRESKEVVDKVIEDNDKALEDVLRVVDEVAKVVRDVVRENTR

SEQ ID NO: 20527 - protein, 77 aa, synthetic construct
GSPREYHSKDILRKVDEILERIRRHADRVKKKSERLKRENVDVNEHSKDVKRVIRELLELVKELLRLAKKHSDDQQE

SEQ ID NO: 20528 - protein, 79 aa, synthetic construct
GSDEDEILYHSERLLQKLKKELDDLKEKSRELLEELKKEDPDDRLIERIIRLHDEVLKDLDEVLKNILEVHREVLERLR

SEQ ID NO: 20529 - protein, 75 aa, synthetic construct
DKLDRLLKIHEEALRRAEELIKRLLDIHRRALDLARRGELDDYLLKESERELREIIRRAREELKESRDRLEEISR

SEQ ID NO: 20530 - protein, 80 aa, synthetic construct
GSPKEELIRRVLEEVKRLNEKLLEIIRRAAELVKRANDELPETEKLREIDRELEKKLKEIEDELRRIDKELDDALYEIED

SEQ ID NO: 20531 - protein, 80 aa, synthetic construct
GSPKLDKLRELLERNLEKLREILEEVLKILRTNLERVREDIRDEDVLQEYERLIRKAEEDLRRVLKEYDDLLKKLVYELR

SEQ ID NO: 20532 - protein, 75 aa, synthetic construct
GSKEDESVKRAEEIVRTLLKLLEDSLREAERSLRDIKNGEDEHNLRRISEKLEELSKRITETIERLLRELQYTSR

SEQ ID NO: 20533 - protein, 84 aa, synthetic construct
GSPNQELLDRVRKILEDLLRLNEELVRLNKELLKRALEMRRKNRDSEEVLERLAEEYRKRLEEYRRELEKLLEELEETIYRYKR

SEQ ID NO: 20534 - protein, 84 aa, synthetic construct
GSDESEEAQHEVEKVLDDIRRLSEHLQKRLEEVLEEVYELRREGSDRTEVVELLKEVIREIVRVNREALERLLRVVEEAVKRNE

SEQ ID NO: 20535 - protein, 83 aa, synthetic construct
GSDEEELVETVKRIQKEILDRLTELAKLLVEIQREIKKLKDEGEDDKELKRLSDELEEKVRQVVEEIKRLSDELEETVEYVSR

SEQ ID NO: 20536 - protein, 80 aa, synthetic construct
GSDEEEEVVRRAEELVKEHEELIERVIRTHEELVYKLEDQGADKKLVDVLKRVVEESERVAREIVKVSRELIRLLEEASR

SEQ ID NO: 20537 - protein, 80 aa, synthetic construct
GSSKEEILKELEDLQRRLIEELKKLQERVVELLEELIKRLRDRGRDDKHLKRLVKEVRRLSEEVLRSIKEVSDRVRYQLR

SEQ ID NO: 20538 - protein, 81 aa, synthetic construct
GSDKEEESEYLLRDLVRLLEKVKEKIEEVNREVEKLLKKVKDGRLDRREVLREILRLNRELAEIIKEVVDRIRHVVERSER

SEQ ID NO: 20539 - protein, 76 aa, synthetic construct
GSDLHEVVYETKELLKRIEEVVEELRKKSEDIIRKAERGEISEDELKRLQEEIAREAKKLLDEIKRVLERHLEQTL

SEQ ID NO: 20540 - protein, 81 aa, synthetic construct
GSPVEEIIKEVVKRVIEVQEKVLRIISHAVKRVVEVQKKYDPGSEESNRVVEEVKKTIEDAIRESDEVVDEVVKRIQYTVR

SEQ ID NO: 20541 - protein, 80 aa, synthetic construct
GSPEQEIADRILTEIRESQKELERLARKILKLLDESQEKAKRGRLSEEESDELLERIKKELDELLERSKELLKKIEYELR

SEQ ID NO: 20542 - protein, 80 aa, synthetic construct
GSDEDKEANRVLDEVLKTVRDLLETANEVLKEVLYRLKRTDDQEKVVRTLTEVLKEHLKLVEEIVRILDKVLKEHLETEK

SEQ ID NO: 20543 - protein, 76 aa, synthetic construct
GSPEDDVLRRLEEVSEKILRVAEDVARQLREVSEKITQGKVDRKEWEEDIKRLKRELEELLREWKEEIERLTYELR

SEQ ID NO: 20544 - protein, 78 aa, synthetic construct
GSRREEVVKRIRELLKRNKELIDRIRELLEENEYLDKDARDKDVLRRSVELLEELVRILEESVELAKEIIKLLREVVE

SEQ ID NO: 20545 - protein, 75 aa, synthetic construct
GSDEKEDNRRLQHKIERILEKNEDLQRKLEEILELLERGEADEEKIDRLRKAVEDYRRVVEEIKEDVKRHKYTVR

SEQ ID NO: 20546 - protein, 77 aa, synthetic construct
GSDEKEEAKKASEESVRTVERILEELLKASEESVELLRRGEDAKDVVERSKEALKRVKELLDEVVKRSDEILKYIHN

SEQ ID NO: 20547 - protein, 84 aa, synthetic construct
GSDEKKLINEVVETQKRLIKEAAKRLSEVVRHQTELIRELREKNVDDKDVEKLLKESLDLAEEIVRRIKELLDESKKLVEYVSN

SEQ ID NO: 20548 - protein, 76 aa, synthetic construct
GSPDMDEVKRVLDELIEIQEEILREIKRVLEKLIKIQEDNGSEYESREVVREIVEIARKLVERSRRVVKKITETLQ

SEQ ID NO: 20549 - protein, 80 aa, synthetic construct
GSDERYATREIVERIERIAREILKRTEEIVREVREVLSRDVDQEEVVRRLADLLRESVELVQHLVRRVEELLQESVERKK

SEQ ID NO: 20550 - protein, 79 aa, synthetic construct
GSPEREALREVLEDLKRVTDRLRELVERVLEELKKVTDHVDSERILRESRRVLKELKDIIEEILRESEKVLEKLKYTED

SEQ ID NO: 20551 - protein, 80 aa, synthetic construct
GSPAREILEEVVKKHLEVVEDAARILEEIIREHEKAVREDRDKKELEEISRDLLRKAREALKKVKDISDDLSREIEYVAS

SEQ ID NO: 20552 - protein, 75 aa, synthetic construct
GSPVEEAIKKVIDDLRDVQRKIRELVEELIRLLEEVQRDNDKRESEYVVERVEEILRRITETSREVVRKAVEDLS

SEQ ID NO: 20553 - protein, 81 aa, synthetic construct
GSDSDEKAEYLLKEMERVVRESDEVVKKILRDLEEVLERLRRGEISEDDVTEILKELAERHIRAIEELVRRLRELLERHKR

SEQ ID NO: 20554 - protein, 79 aa, synthetic construct
GSPVEEVLKELSEVNERVRDIAREIIERLSEVNEEVKETDDEDELKKISKKVVDEVEDLLRKILEVSEEVVRRVEYHDR

SEQ ID NO: 20555 - protein, 76 aa, synthetic construct
GSPKEDILREVLRRHKEIVREIVRLVREAVETHLELVKRNSDDRDAQDVIRKLEEDLERLVRHAQEVIEEIFYRLH

SEQ ID NO: 20556 - protein, 75 aa, synthetic construct
GSPRSYLLKELADLSQHLVRLLERLVRESERVVEVLERGEVDEEELKRLEDLHRELEKAVREVRETHREIRERSR

SEQ ID NO: 20557 - protein, 76 aa, synthetic construct
GSDREYIIKDILDSQEHLLRLIEELLETQKELLEILKRRPDSVERVRELVRRSKEIADEIRRQSDRNVRLLEEVSK

SEQ ID NO: 20558 - protein, 75 aa, synthetic construct
GSDEKDEIRHVIESVERLIEDIKRLLKTLRELAHDDSDKKTVKEVLDRVKEMIERHRRELEEHRKELERAEYEVR

SEQ ID NO: 20559 - protein, 76 aa, synthetic construct
GSESEDRIKELLKRHIELVERHEELLHEIKKLIDLEEKDDKDREEAVKRIDDAIKESEEMLEESKEILEEIEYLNR

SEQ ID NO: 20560 - protein, 77 aa, synthetic construct
GSSLEDSVRLNDEVVKVVERVVRLNQEVVRLIKHATDVEDEETVKYVLERVREVLDESREVLKRVHELLEESERRLE

SEQ ID NO: 20561 - protein, 82 aa, synthetic construct
GSHEKDIVYKVEDLVRKSDRIAERAREIVKRSRDIMREIRKDKDNKKLSDDLLKVTRDLQRVVDELEELSRELLRVAEESRK

SEQ ID NO: 20562 - protein, 76 aa, synthetic construct
GSPELDEVKKLIDELKKSVERLEESIREVKESIKKLRKGDIDAEENIKLLKENIKIVRENIKIIKEIIDVVQYVLR

SEQ ID NO: 20563 - protein, 82 aa, synthetic construct
GSDEEEIEELLRELEKLLKKSEEALEESKKLIDESEELLRRDRLDKEKHVRASEEHVKLSEEHLRISREIVKILEKAVYSTR

SEQ ID NO: 20564 - protein, 79 aa, synthetic construct
GSDESDRIRKIVEESDEIVKESRKLAERARELIKESEDKRVSEERNERLLEELLRILDENAELLKRNLELLKEVLYRTR

SEQ ID NO: 20565 - protein, 79 aa, synthetic construct
GSDEDDELERLLREYHRVLREYEKLLEELRRLYEEYKRGEVSEEESDRILREIKEILDKSERLWDLSEEVWRTLLYQAE

SEQ ID NO: 20566 - protein, 78 aa, synthetic construct
GSDKKDASRRAIRVLHEFVRVSEEVLEVLRKSVESLKRLDVDEKIKRTHDRIEEELRRWKRELEELIERLREWEYHQD

SEQ ID NO: 20567 - protein, 75 aa, synthetic construct
GSDDEEEDKRLLEEVKRSLDTDERILEKLRHSLERQLEDVDKDEDSRRVLRELDEITKRSREVVKRLRKLAYESK

SEQ ID NO: 20568 - protein, 79 aa, synthetic construct
GSDKEYKLDRILRRLDELIKQLSRILEEIERLVDELEREPLDDKEVQDVIERIVELIDEHLELLKEYIKLLEEYIKTTK

SEQ ID NO: 20569 - protein, 79 aa, synthetic construct
GSPSKEYQEKSAERQKELLHEYEKLVRHLRELVEKLQRRELDKEEVLRRLVEILERLKDLHKKIEDAHRKNEEAHKENK

SEQ ID NO: 20570 - protein, 78 aa, synthetic construct
GSRDRKISEELIKALEDHIRMLEELIRAIEEHIKLAERGVDEKELRESLEELKKIVDELEKSLEELRKLAERYKYETR

SEQ ID NO: 20571 - protein, 77 aa, synthetic construct
GSPKEESVEELKRVIDKHEEILRELKRVLEEHERVSHDEDENELRRSLERLKHILDRLHESLKELHELLKKNEYTER

SEQ ID NO: 20572 - protein, 77 aa, synthetic construct
GSDHEYWVKIVERILRVMEKHAEIVKKHLEIVERVVREGPSEDLRRKLKESLREIEESLRELKELLDELDELSEKTR

SEQ ID NO: 20573 - protein, 72 aa, synthetic construct
GSDEEYVTRSQRRLKRLLEEYIKVVEEHARLVERNERDDKELKRSIDELDKLTKELLELVKRYKELVDKTET

SEQ ID NO: 20574 - protein, 76 aa, synthetic construct
GSDKEEIVKLQDEVIKTLERHLDILRKHIDLLEKLKDHLSEELKERVDRSIKKLEESIKRLERIIEELQELAEYSL

SEQ ID NO: 20575 - protein, 75 aa, synthetic construct
GSREEELKESAEELERSVRELKKEADKYKEEVDRLHYRGKVDKDWVRVVEKLIKLVEEHLELIREHLELLKEERR

SEQ ID NO: 20576 - protein, 75 aa, synthetic construct
GSDMEYELKKSAEELRKSLEELKRILDELHKSLRELRRHGDDEEYVQTVEELRKELEEHAKKLEEHLKELERVAT

SEQ ID NO: 20577 - protein, 70 aa, synthetic construct
PEYELKKSVDDLKRDVDRLVEEVEEVFELSKERLREDRKHLELVEEMVRLIEKHLELIKEHLKLADDHVR

SEQ ID NO: 20578 - protein, 78 aa, synthetic construct
GSREKDESKELNDEYKKLLEEYERLLRRSEELVKRAKGPRDEKELKRILEENEDILRRTKEILERTKEISEEQKYRRR

SEQ ID NO: 20579 - protein, 78 aa, synthetic construct
GSDKDERQERLNEESDKSNEESERSNRESEELNRRARGPNDEKELQEILDRHLELLERNQRLLDENKEILRESQYLND

SEQ ID NO: 20580 - protein, 76 aa, synthetic construct
GSENKYILKEILKLLRENLKLLHDILRLLDENLEELEKHGAKDLDDYRRKIEEIRKKVEDYREKIEEIEKKVERDR

SEQ ID NO: 20581 - protein, 75 aa, synthetic construct
GSESEYTQEEILELLKESIKLLREILRLLEESEELWRRENTKSERSEEIKERAKEAIKRSEEILERVKRLSDHSR

SEQ ID NO: 20582 - protein, 74 aa, synthetic construct
GSDEEEANYVSDKAVKIAEDVQELLKELLELSEVVRRGEVDEDEYDRVLRKLQEVMKEYEEVLKEYEEVSRKHE

SEQ ID NO: 20583 - protein, 80 aa, synthetic construct
GSPEKYLIKTQEELLRRHAEILEDLIRKVERQVDLRRKVDERDEDLKRELERSLRELERLVRESSRLVEEIRELSKEIKR

SEQ ID NO: 20584 - protein, 78 aa, synthetic construct
GSDEEYELERISRESKELLERYKRLLREYQELLKELRHVKDLDRAVKIIHELMRVSKELVEISHRLLELHERLVRRRK

SEQ ID NO: 20585 - protein, 79 aa, synthetic construct
GSEKEYIEKLSRKIEEDIRRSEERAKDSERLVRRLEELAKRKRLDLDDVLRVAEENLEILEDNLRILEEILKEQDKSNR

SEQ ID NO: 20586 - protein, 75 aa, synthetic construct
GSPHEEVVELHERVMEISERAVELIQRIIDIIRRIREDDKDIEKLVKTIRDLVREYEELHRELEEIDEEIYKKSE

SEQ ID NO: 20587 - protein, 82 aa, synthetic construct
GSDHEDVVRLHEDLVRKQEDARRVLEEIVRLAEEIVEVIKKDEKDKDRVTRLVEEIEKLVEEYKKKVDEMRKISDEIKYRSR

SEQ ID NO: 20588 - protein, 79 aa, synthetic construct
GSRAREVVKRAKRIIEEWQKILEEWRRILEEWRRLLEDERVDDRDNERIIRENERVIRENEKIIRDVIRLLEELLYERR

SEQ ID NO: 20589 - protein, 79 aa, synthetic construct
GSREDEELEEEIDRIRQMVEEYEELVKEYEELTEKYKQGKVDKEESKKIIEKSERLLDLSQDAVRKVKEIIRRILYTNR

SEQ ID NO: 20590 - protein, 77 aa, synthetic construct
GSPKEEIVKLHDESAELHRRSVEVADEILKMHERSKDVDDERESRELSKEIERLIREVEEVSKRIKRLSEEVEYLVR

SEQ ID NO: 20591 - protein, 77 aa, synthetic construct
GSPLEEILKIQRRINKIQDDINKILHEILRMQEKLNRSSDKDEVEESLRRIRELIKRIKDLSKEIEDLSREVKYRTT

SEQ ID NO: 20592 - protein, 81 aa, synthetic construct
GSPEDEHVYVVREIYEVLREHAEVLEENREVIERLLEAKKRGDKSEELVKELKKSIDKLKEISRKLEEIVKELEKVSEKLK

SEQ ID NO: 20593 - protein, 79 aa, synthetic construct
GSDEDETSYRILELLREIVRASRELIRLSEELLEVARRDDKDETVLETLIREYKELLDRYRRLIEELTRLVEEYEERSR

SEQ ID NO: 20594 - protein, 74 aa, synthetic construct
GSTQEEINRIQHEVLRIQEEIDEILRDIVEKLKAISRGELDHEVVKDVEDKVREALEKSEELLDKSRKVEYKSE

SEQ ID NO: 20595 - protein, 82 aa, synthetic construct
GSDEEELNRELLEKSKRLVDINRDIIRTAQELIEMLKDSKDGRVDEDTKRELRDKLRKLEEKLERVREELRKYEELLRYVQR

SEQ ID NO: 20596 - protein, 77 aa, synthetic construct
GSDEKDRVYEILKEVQRLVKEYRDISKEIEDLVKHYEHITDDEAQEVSKELIDKSLRASEIVRELIRLIKELLDELE

SEQ ID NO: 20597 - protein, 79 aa, synthetic construct
GSDEEDVLYHLRELLEELKRVSDDYERLVREIKETSERKDRDTKENKDMLDELVKAHREQEKLLERLVRLLEELFERKR

SEQ ID NO: 20598 - protein, 54 aa, synthetic construct
PREQAIRISEEIIRISKKIIEILERTRSSTAREAMKWAKDSIRLAEESKYLLDK

SEQ ID NO: 20599 - protein, 54 aa, synthetic construct
IEDDVKKIQDSTKKAQKETIEALERSTSSTARKQMEEQKEQIRLQKEAMYLLKK

SEQ ID NO: 20600 - protein, 76 aa, synthetic construct
SREEIAKLQEEVIKLQRRVIELQKEVIELQRRAKELTSSYTKEILEIQRRIEEIQREIEEIQKRIEEIQEEIQRRT

SEQ ID NO: 20601 - protein, 76 aa, synthetic construct
SDEEIKRLSEEVIQLSRRVIKMSREAIKLSREVQKLTPSYQKRIKEIADRSIELARESIEIAKRSEKIAEESQRRT

SEQ ID NO: 20602 - protein, 56 aa, synthetic construct
PAKDEALKMANESLELAKKSARLIQESSSKEILERIEKIQRRIAELQDRIAYLIKK

SEQ ID NO: 20603 - protein, 56 aa, synthetic construct
PAKDEALRMIDESRELIKKSNELIQRSSSKEILERILEIQRKIAELQKRIQYLLKS

SEQ ID NO: 20604 - protein, 75 aa, synthetic construct
TDEARYRSERIVKEAKRLLDEARRRSEKIVREAKQRSNSEDAKRIMEENLRESEEAARRLREIIRRNLEESRETG

SEQ ID NO: 20605 - protein, 75 aa, synthetic construct
TREALEYQRKMAEEIEDLLREALRRQEEMVREAKQRSLSEEFKRIMERILEEQERVMRLAKEALERILEEQKRTG

SEQ ID NO: 20606 - protein, 76 aa, synthetic construct
SERTKREAKRSQEEILREAKEAMRRAKESQDHRQNRDGSNSEDLERLSQEQKRELEEVERRLKELAREQKYKLEDS

SEQ ID NO: 20607 - protein, 76 aa, synthetic construct
SEDLKRILKEITERELKLMQDLMEILKKITEDENNLDSNNSEDLKRSIEKARRILDEALRKLEESARRAKYIQEDN

SEQ ID NO: 20608 - protein, 76 aa, synthetic construct
TEDEIRESLKWLDEVLQELREIARESNEVLERNRQKSRSDKLREDIERYKKRMEEARKKLDDQLNKYKKRMDENRS

SEQ ID NO: 20609 - protein, 76 aa, synthetic construct
TEEELKESKKFAEDLARSARRALKESKRVLEEISQASRSKKLEEIVRRYKEQVKRWQDEWDERAREYRKRMKENRS

SEQ ID NO: 20610 - protein, 76 aa, synthetic construct
TKTEEIERLAREIKKLSEKVERLAQEIEELSRRVKEENSTDRELKEANREIERAIREIEKANKRMEEALRRMKYNG

SEQ ID NO: 20611 - protein, 76 aa, synthetic construct
TKTEEHERLAREISKLADEHRKLAKIIEELARRIKEENLTDDELREAIRKIEDALRKNKEALKIMKEAAERNRYNT

SEQ ID NO: 20612 - protein, 76 aa, synthetic construct
TKKEESRELARESEELARESEKLARKSLELARRAESSGSEEEKRRIIDENRKIIERNREIIERNKEIIEYNKELIS

SEQ ID NO: 20613 - protein, 76 aa, synthetic construct
TKDEESLELNRESEELNRKSEELNRKSKELNDRAESSNSEEEEKEILREHKEILREHLEILRRHKEILRRHKYLTS

SEQ ID NO: 20614 - protein, 75 aa, synthetic construct
TREELLRENIELAKEHIEIMREILELLQKMEELLERQSSEDILEELRKIIERIRELLDRSRKIHERSEEIAYKEE

SEQ ID NO: 20615 - protein, 79 aa, synthetic construct
SEDIAREIKELLRRLKEIIERNQRIAKEHEYIARERKKLDPSNEKERKLLERSRRLQEESKRLLDEMAEIMRRIKKLLD

SEQ ID NO: 20616 - protein, 75 aa, synthetic construct
DRQKLIEENIKLLDKHIKILEEILRLLKKDIDLLKKSSSEEVLEELKKIHRRIDKLLDESKKIHKRSSEIVKKRS

SEQ ID NO: 20617 - protein, 75 aa, synthetic construct
DEQKLIETSQRLQEKSERLLEKFEQILREASDLYRKPDSEELLRRVEKLLRELEKLIRENQDLARKHEKILRDQS

SEQ ID NO: 20618 - protein, 75 aa, synthetic construct
DRQELIRENIELLKKHIKIVKEIQKLIETFIELLKKSSSEEILRRLKKILKRIEKLYRESQEIHKRSEEIAKKRQ

SEQ ID NO: 20619 - protein, 75 aa, synthetic construct
DEERLIDKSRELQKESEELLKELLKIFKRIEELLEKPDSEELIREIKKLLETLSEIHKRNEKLARTHEEILRQQS

SEQ ID NO: 20620 - protein, 74 aa, synthetic construct
STRDVQREIAKAFKKMADVQKKLAEEIKRHVKNVEKKNKDNDEYRKIATELLKKATESQKKLKELLDRIRKSDS

SEQ ID NO: 20621 - protein, 74 aa, synthetic construct
DKDDRSTSLLKRVEKLIDESDRIIDKFTTLIELSRNGKIDDDQYKKELKEILELLKKYDKHVKEVEELLKRLNS

SEQ ID NO: 20622 - protein, 70 aa, synthetic construct
SKRKALEVSERVVRISEKVVRVLDESSDLLKKSYDDSDKFAELIDRHEEKIKKWKKLIKEWLEIIQRHKS

SEQ ID NO: 20623 - protein, 68 aa, synthetic construct
SAEEFVKLSEEAVKRSKEILDIVRKQVKLVKAGVDKHEITDSLRKSEKLIEEHKELIKTHRDLLRREN

SEQ ID NO: 20624 - protein, 74 aa, synthetic construct
SSTEILKRFKRALRESEKIVKHSRRVLKIIREVLKQKPTQAVHDLVRIIETQVKALEEQLKVLKRIVEALERQS

SEQ ID NO: 20625 - protein, 73 aa, synthetic construct
DKQKEIKDILEKTRRIAEESRKIAEKFDEIIKRSTEGKIDESLTKELEELVKEVIKLSEDDARTSDDLVRKES

SEQ ID NO: 20626 - protein, 74 aa, synthetic construct
DEDESIKLTRKSIEETRKSLKIIKEVVELIREVLKHIKDLDKEIFERIDKILDKYKKQVDTYDEILKEYEKKQR

SEQ ID NO: 20627 - protein, 70 aa, synthetic construct
SELDEQKELIKKQEKLIEEQQRLLSKIRRMFKERVKDQELLREIQKVLKRSQEIVETSKKILDRSDKTTE

SEQ ID NO: 20628 - protein, 76 aa, synthetic construct
DQKEINTRIVEKLERIFKKSKEIVRQSERVISTIEKKTEDERELDLLRRHVKIVREHLKLLEELLKIIKEVQKESE

SEQ ID NO: 20629 - protein, 71 aa, synthetic construct
DTEELVKRLNELLKELSKLVKEFIKILETYRKDQTKDTSKISERVDRILKTYEDLLQKYKEILEKIEKQLS

SEQ ID NO: 20630 - protein, 68 aa, synthetic construct
DYARLIDQAVEVTRKVVEVNVTVARVNDKFAKHLGDEELRRVSEHLKEVSKDLQEVAKKSKDAARQVK

SEQ ID NO: 20631 - protein, 77 aa, synthetic construct
DVSKVAEEYLQISKTLVDISRTLLEISERLVRLVRTVADDRSEVKKAIEDSIEVLKTSEEVVRQIKRASDKLVKAIS

SEQ ID NO: 20632 - protein, 76 aa, synthetic construct
DAKEIQRRVVEIQTEVVKLQKKAVDIIRKIIEAFNNSNIDQSLLEAAKEIVKEIDKLEKLTESLLEESKKLLKRSS

SEQ ID NO: 20633 - protein, 76 aa, synthetic construct
SAEEVVKLAKIFLELLRESIKLLKRSVDLLRKSSDPSLDKSEAEKVSREIEKVSDTSLKLSKKALDVVKRALKVAS

SEQ ID NO: 20634 - protein, 81 aa, synthetic construct
DEKDAARKARKVSEEAKEASKKIEKALEESKRILNTLKQKKDEQEVKVIKEHEDVLRQIEKIQKQVLEIQKEVAKLLESLD

SEQ ID NO: 20635 - protein, 71 aa, synthetic construct
SADDVARASEKVLRVARESAKAADKSLEVFKEVVKRGDKEAFLQVVKINEEVVKINITVIRILIEVSKTAT

SEQ ID NO: 20636 - protein, 112 aa, synthetic construct
DEYVKETLKQLREALASLREADKRITELVKEARKKPLSEAARKFAEAIVTHVKVVVEHVEVVLRHVEVLVEAKKNGVIDKSILDNALRIIENVIRLLSNVIRVVDEVLQDLD

SEQ ID NO: 20637 - protein, 113 aa, synthetic construct
DASDVIRRIHELFEEVHRLIEAVHRAIEDVAKAAQKKGLDESAVEILAELSKELAKLSRRLAEISREIQKVVTDPDDKEAVERLKEIIKEIKKQLDELRDRLRKLQDLLYKLK

SEQ ID NO: 20638 - protein, 77 aa, synthetic construct
SEDKAHHDIVRVLEELIKIHDELMKISEEILKATSDSTATDETKEELKRRSKEAQKKSDTLVKIVKELEKESRKAQS

SEQ ID NO: 20639 - protein, 73 aa, synthetic construct
DDEEKYRQIIREAQEISKTAKRILRDAQEISKRIRHQGVDRSEHQRLVDLLRELIKEHHKLLRRQQEADTRND

SEQ ID NO: 20640 - protein, 74 aa, synthetic construct
DRKDKARKASEKLEEVIQRWKTVADKWKKMVDLVSNGKLSQEEVARVTEELLKIQTELAKLLEEHAKVLQESAS

SEQ ID NO: 20641 - protein, 77 aa, synthetic construct
SDEESIKTQSELIKTSEELLKDVKRIDEELQKLRDDPTLDESELKKRVKEWSDRVRKAKEISRKIQEIVKESKKRSS

SEQ ID NO: 20642 - protein, 72 aa, synthetic construct
DKDEELRKVIEKYREMVKEYRKVIREYEEVIKSSKTIDKSSLISLSRKMVELSQRVIDVSDEVAKVLSRKQS

SEQ ID NO: 20643 - protein, 69 aa, synthetic construct
TDEERLKKQTKELKEQTKQLEKQKDLLEKISNGEISKDEIQEIIKESKKIAKESQKALDSSRKALEEVS

SEQ ID NO: 20644 - protein, 75 aa, synthetic construct
DEKEVSKEIIKVLKDIAKVQQKVIEVSQRLASVLRADDDNVVKRALEEYEKILEELRELNKEIEKLTDKYRKVTS

SEQ ID NO: 20645 - protein, 77 aa, synthetic construct
DSDEQTKELEKLTELHKRHVEKLKKQTKESREVDSNKLWKSKDVKDKLSESEKELQKLSDQDKKAKDALESSRRKND

SEQ ID NO: 20646 - protein, 76 aa, synthetic construct
DAEEQLKLLTKLLRHQQRLLQLIKESLKLIEKIDQSSQENQDEIRKWREVTKKLRELIKTSEKLVRELEKSYKKSS

SEQ ID NO: 20647 - protein, 70 aa, synthetic construct
SLRDVVRRYQELVRRYDELIKTLTEILKKYQKKGAEDKDASTELVKAVRTSLKLSKELLKLNSELLKEDS

SEQ ID NO: 20648 - protein, 69 aa, synthetic construct
SKEELKRKLDELKKRSDTLKELSKKLKEISERNPDDKSVHRTIIRIHREFVKNHKEIVRVIEEIVSDKS

SEQ ID NO: 20649 - protein, 71 aa, synthetic construct
SKQDEHDRLLKIHDKLVKQHDELLKLLTKLSRAGDSVTKKKLEEILRKLQEVSKQLEESLKDADKVSKDIN

SEQ ID NO: 20650 - protein, 69 aa, synthetic construct
TVQSLLEQHVKIVKRSIEILERHTQILQDIARSQGVSKELEDVERQVKEYRKEVKKLEEDLRQLSRNSK

SEQ ID NO: 20651 - protein, 76 aa, synthetic construct
SDSDRIEKLIRESTELLKEQQKLAKRSRELAETVESLPLTEEYLKQQREHQKKIEKLLKDSEKHLEELKRLVKSEK

SEQ ID NO: 20652 - protein, 70 aa, synthetic construct
DSEKRIEDILRTDLELAKRDAELVKEHIKLVKRIDLSEELKKQVEDVEKESKKLEDSSEKLVQKVRKRSS

SEQ ID NO: 20653 - protein, 80 aa, synthetic construct
DEEERAKDLRKYLEEQTQYYRTVTEHLRNLEKVVEELERRGKPSSELQQILERSQRIYKETTEIYDTSKKLIEELDKHHR

SEQ ID NO: 20654 - protein, 77 aa, synthetic construct
PLEDILKRHLDKVRELVRLSEEVNKLAKEVLDILKDKRVDEKELDKVLKELEKVVEEYERAVKESRDLLRELRETTR

SEQ ID NO: 20655 - protein, 75 aa, synthetic construct
DKERLLEIHERIQKLLDRNLEIIERLLRLLREARDIKDDDKLDKVIKRLKELSEESKDILDKIKELLKESEKELT

SEQ ID NO: 20656 - protein, 75 aa, synthetic construct
PEDEVIRVIEELLRIAAEVDEVHRRNVEVQEEASRVTDRERLERLNRESEELIKRSRELIEEQRKLIERLERLAT

SEQ ID NO: 20657 - protein, 74 aa, synthetic construct
DLEELIKEYAEVVRRHHKAVRDLERLVRELANAKHASEEELKRIATEILRIVKELIRVQERLIKLSEDSNEESR

SEQ ID NO: 20658 - protein, 75 aa, synthetic construct
PTDEVIEVLKELLRIHRENLRVNEEIVEVNERASRVTDREELERLLRRSNELIKRSRELNEESKKLIEKLERLAT

SEQ ID NO: 20659 - protein, 74 aa, synthetic construct
DNEEIIKEARRVVEEYKKAVDRLEELVRRAENAKHASEKELKDIVREILRISKELNKVSERLIELWERSQERAR

SEQ ID NO: 20660 - protein, 72 aa, synthetic construct
PKEDIDRVSRELVRVHKELLEVLRKSTEIVEAVARNEKDERTIEEVLEEQERAVRKLEEVSKKHKEAVKRLK

SEQ ID NO: 20661 - protein, 77 aa, synthetic construct
ELERLSEEIQKLSDRLIELIRRHSKVLEEIVRLLKHKDNDEREVRRLLKLLRDLTRRYEEVLRKVEEIVKRQEDESR

SEQ ID NO: 20662 - protein, 72 aa, synthetic construct
PEEDILRLLRKLVEVDKELLEVVRESTEVVRLVARNEKDVETVERVLRKQEEVVRKYERVSRELEEAVRRLK

SEQ ID NO: 20663 - protein, 77 aa, synthetic construct
ELKDLVEEIVKLSKENLKLWEDHSRVLEEIVRLLKHKDNDEREVRRLLKLLEDLTRRAEETSRRIEEIVKEAEDRAR

SEQ ID NO: 20664 - protein, 74 aa, synthetic construct
DEERELREVLRKHHRVVREWTKVVEELKRVVELLKRGETSEEDLLRVLKKLLEMDKRILEVNREVLRVLEKRLT

SEQ ID NO: 20665 - protein, 70 aa, synthetic construct
SLEEIIEELVELVRRSVEIAKESDEVARRIVESEDKKKELIDTLRDLHREWQEVTKRAEELVREAEKEVR

SEQ ID NO: 20666 - protein, 72 aa, synthetic construct
TAEELLEVHKKSDRVTKEHLRVSEEILKVVEVLTRGEVSSEVLKRVLRKLEELTDKLRRVTEEQRRVVEKLN

SEQ ID NO: 20667 - protein, 76 aa, synthetic construct
DLEDLLRRLRRLVDEQRRLVEELERVSRRLEKAVRDNEDERELARLSREHSDIQDKHDKLAREILEVLKRLLERTE

SEQ ID NO: 20668 - protein, 72 aa, synthetic construct
PEDDVVRIIKEDLESNREVLREQKEIHRILELVTRGEVSEEAIDRVLKRQEDLLKKQKESTDKARKVVEERR

SEQ ID NO: 20669 - protein, 70 aa, synthetic construct
DEVRLITEWLKLSEESTRLLKELVELTRLLRNNVPNVEEILREHERISRELERLSRRLKDLADKLERTRR

SEQ ID NO: 20670 - protein, 70 aa, synthetic construct
DEDEVVKVHEEHVKSHEEIHRSHEEVVRAAEEDKRDSRELRTLMEEHRKLLEENEKSIEEVKKIHERVKR

SEQ ID NO: 20671 - protein, 80 aa, synthetic construct
KKEELIDISKEVLDLDDEINKISKEILELIKKLLRLKEEGREDKDKAREVKRRIRELHRRIQELNKRLRELHKRVQETKR

SEQ ID NO: 20672 - protein, 77 aa, synthetic construct
PEEDIARRVEDLLRKSEELIKESEKILKESKRLLDRNDSDKRVLETNLRLIDKHTKLLERNLELLEELLKLAEDVAK

SEQ ID NO: 20673 - protein, 74 aa, synthetic construct
RFKDLSREYIEVVKRLLELSREALEVLREIKDTDKTDKKRIKELIDRLRKLIEEYKRIIDRLRKLSKDLEEEHR

SEQ ID NO: 20674 - protein, 73 aa, synthetic construct
DEEELVKILKELQRLSEESLEINKRLVEILRLLRRGEVPKEEVEKKLREIKKEQEKLDREHEKIKKRIEEITK

SEQ ID NO: 20675 - protein, 74 aa, synthetic construct
SLKEKILEIIERNMKLVELSNRSVEIVARILKGEKDDEETLERLLREWDKITRDYEEIIKESRKLVKELEEEAK

SEQ ID NO: 20676 - protein, 74 aa, synthetic construct
SKTEILRKALEIHKEQIDIVRKLIELSEEVLKLVEESKEKNLEKLKRIDEETDRLLERLDELHKRLTELAERLK

SEQ ID NO: 20677 - protein, 80 aa, synthetic construct
SDDEARKQLEEMKRRLREVEKKSKRVEERVRELERLVRENREDEDRVLKTLEDLLRENEKLVRTIERHVREQRELSKEVK

SEQ ID NO: 20678 - protein, 73 aa, synthetic construct
SEEELEKKADELRKLSEEWRKLQEEDKRLSEMVEKGELDLQEVDEHSLRVLERATEVHRTVDKVIEEILRTTN

SEQ ID NO: 20679 - protein, 77 aa, synthetic construct
SEKERHRESQETQEEIRRTHEEIIRKLEEILRRAKAGELPEETLDRLRRIMERLKELSERLDDLVRKLRDDHRREQK

SEQ ID NO: 20680 - protein, 76 aa, synthetic construct
SEKEILEELKRILKRVKDISDRLEELDKRTEEIARREPTKELVDELVKIHRDWLRLHEEILKLVDDALKKVEDATK

SEQ ID NO: 20681 - protein, 73 aa, synthetic construct
DLRELLELQREASRLHRELVKLLTELVKKLELIAKGEDIREEDLKRIKERLEEIKKRSKRIKEESDEIDKKTK

SEQ ID NO: 20682 - protein, 72 aa, synthetic construct
SERELQRELNKIVRRILEIHREVSELHQRAVKLIRENDNSEELEEISRRIEELSKELEKLVREHDEIVKTIE

SEQ ID NO: 20683 - protein, 77 aa, synthetic construct
SEREKLDRNDEELKEINKRVEEIKERSDRITEAIEKNERSEEEIRRLSREQNEALQRLLELHKKLVKLHRELLEDTR

SEQ ID NO: 20684 - protein, 76 aa, synthetic construct
DKEDVIRVHDEQHKLIEEQLELTRRIAELVREIAKNTASEEEIKEMLKEIKRLDDRSREIQDRLQKLLEEIRRKTK

SEQ ID NO: 20685 - protein, 73 aa, synthetic construct
TEEEIVELNKDIQRKSKEHIDLQNELVKKIERAIRENNITEELLEELERLLRESEKIVEEIRRITDKIRKDAK

SEQ ID NO: 20686 - protein, 72 aa, synthetic construct
SEKEILERLLRLSKEQNEISEEIHRLTERLVELKRRKDDDERLKRILDRQKRLVERAREISKEYEDLLRKLE

SEQ ID NO: 20687 - protein, 69 aa, synthetic construct
SMEELLRKNARLSRKQLKIIDEHLELSTKLTRGEAGDETLEEIERRSREMLEEQRRVDEESKRIREKLK

SEQ ID NO: 20688 - protein, 76 aa, synthetic construct
SEEEIRDIVEKLLRTHEEVLKEIKKLLDDSERVRRRELDKKDLDRIQKEQRDIQEENKEKAKRFDELVKELKKAAK

SEQ ID NO: 20689 - protein, 70 aa, synthetic construct
SEEEHRRTMEKVEKEVRDIKRRSEEVKKKVKANTLSEEDLVRLLERLVEDHKRLQDLSQEIIERDEKATK

SEQ ID NO: 20690 - protein, 72 aa, synthetic construct
DEDELAKEIEDVQRRNKESQEEHDKSVKKLEAAERGEIDEDSLLRVLEEDIKVLEKDIEVLERSIEVIEKAE

SEQ ID NO: 20691 - protein, 73 aa, synthetic construct
SEKELIRRLLEQQRQHLRLSERLIELSRRLVEVVRKGKDNRDLLRELKKLSEEHKKHSKDDHEKVREIREREK

SEQ ID NO: 20692 - protein, 47 aa, synthetic construct
NLVAQLENEVASLENENETLKKKNLHKKDLIAYLEKEIANLRKKIEE

SEQ ID NO: 20693 - protein, 50 aa, synthetic construct
ARNAYLRKKIARLKKDNLQLERDEQNLEKIIANLRDEIARLENEVASHEQ

SEQ ID NO: 20694 - protein, 42 aa, synthetic construct
NEVTTLENDAAFIENENAYLEKEIARLRKEKAALRNRLAHKK

SEQ ID NO: 20695 - protein, 54 aa, synthetic construct
QKVAELKNRVAVKLNRNEQLKNKVEELKNRNAYLKNELATLENEVARLENDVAE

SEQ ID NO: 20696 - protein, 44 aa, synthetic construct
NTVKELKNYIQELEERNAELKNLKEHLKFAKAELEFELAAHKFE

SEQ ID NO: 20697 - protein, 54 aa, synthetic construct
QKVAQLKNRVAYKLKENAKLENIVARLENDNANLEKDIANLEKDIANLERDVAR

SEQ ID NO: 20698 - protein, 51 aa, synthetic construct
KEIEYLEKEIERLKDLREHLKQDNAAHRQELNALRLEEAKLEFILAHLLST

SEQ ID NO: 20699 - protein, 51 aa, synthetic construct
KEIANLEKEIASLEKKVAVLKQRNAAHKQEVAALRKEIAYVEDEIQYVEDE

SEQ ID NO: 20700 - protein, 36 aa, synthetic construct
QKVESLKQKIEELKQRKAQLKNDIANLEKEIAYAET

SEQ ID NO: 20701 - protein, 42 aa, synthetic construct
NLLATLRSTAAVLENENHVLEKEKEKLRKEKEQLLNKLEAYK

SEQ ID NO: 20702 - protein, 42 aa, synthetic construct
ELTDELKNKKEALRKDNAALLNELASLENEIANLEKEIAYFK

SEQ ID NO: 20703 - protein, 42 aa, synthetic construct
NEDLVLENRLAALRNENAALENDLARLEKEIAYLEKEIEREK

SEQ ID NO: 20704 - protein, 44 aa, synthetic construct
QKVEELKNKIAELENRNAVKKNRVAHLKQEIAYLKDELAAHEFE

SEQ ID NO: 20705 - protein, 47 aa, synthetic construct
NDLDAYEREAEKLEKKNEVLRNRLAALENELATLRQEVASMKQELQS

SEQ ID NO: 20706 - protein, 41 aa, synthetic construct
FENVTHEFILATLENENAKLRRLEAKLERELARLRNEVAWL

SEQ ID NO: 20707 - protein, 42 aa, synthetic construct
NILASLENKKEELKKLNAHLLKEIENLEKEIANLEKEIAYFK

SEQ ID NO: 20708 - protein, 42 aa, synthetic construct
NEKEELKSKKAELRNRIEQLKQKREQLKQKIANLRKEIEAYK

SEQ ID NO: 20709 - protein, 41 aa, synthetic construct
SIAATLENDLARLENENARLEKDIANLERDLAKLEREEAYF

SEQ ID NO: 20710 - protein, 45 aa, synthetic construct
NELESLENKKEELKNRNEELKQKREQLKQKLAALRNKLDAYKNRL

SEQ ID NO: 20711 - protein, 44 aa, synthetic construct
STVEELLRAIQELEKRNAELKNRKEELKNLVAHLRQELAAHKYE

SEQ ID NO: 20712 - protein, 42 aa, synthetic construct
NEVAQLENDVAVIENENAYLEKEIARLRKEIAALRDRLAHKK

SEQ ID NO: 20713 - protein, 50 aa, synthetic construct
KRIAYLRKKIAALKKDNANLEKDIANLENEIERLIKEIKTLENEVASHEQ

SEQ ID NO: 20714 - protein, 273 aa, synthetic construct
CFAKGTNVLMADGSIECIENIEVGNKVMGKDGRPREVIKLPRGRETMYSVVQKSQHRAHKSDSSREVPELLKFTCNATHELVVRTPRSVRRLSRTIKGVEYFEVITFEMGQKKAPDGRIVELVKEVSKSYPISEGPERANELVESYRKASNKAYFEWTIEARDLSLLGSHVRKATYQTYAPILYENDHFFDYMQKSKFHLTIEGPKVLAYLLGLWIGDGLSDRATFSVDSRDTSLMERVTEYAEKLNLCAEYKDRKEPQVAKTVNLYSKVVRG

SEQ ID NO: 20715 - protein, 280 aa, synthetic construct
GGIIYVGCFAKGTNVLMADGSIECIENIEVGNKVMGKDGRPREVIKLPRGRETMYSVVQKSQHRAHKSDSSREVPELLKFTCNATHELVVRTPRSVRRLSRTIKGVEYFEVITFEMGQKKAPDGRIVELVKEVSKSYPISEGPERANELVESYRKASNKAYFEWTIEARDLSLLGSHVRKATYQTYAPILYENDHFFDYMQKSKFHLTIEGPKVLAYLLGLWIGDGLSDRATFSVDSRDTSLMERVTEYAEKLNLCAEYKDRKEPQVAKTVNLYSKVVRG

SEQ ID NO: 20716 - protein, 281 aa, synthetic construct
GGVVLEKGCFAKGTNVLMADGSIECIENIEVGNKVMGKDGRPREVIKLPRGRETMYSVVQKSQHRAHKSDSSREVPELLKFTCNATHELVVRTPRSVRRLSRTIKGVEYFEVITFEMGQKKAPDGRIVELVKEVSKSYPISEGPERANELVESYRKASNKAYFEWTIEARDLSLLGSHVRKATYQTYAPILYENDHFFDYMQKSKFHLTIEGPKVLAYLLGLWIGDGLSDRATFSVDSRDTSLMERVTEYAEKLNLCAEYKDRKEPQVAKTVNLYSKVVRG

SEQ ID NO: 20717 - protein, 280 aa, synthetic construct
GGFQTVGCFAKGTNVLMADGSIECIENIEVGNKVMGKDGRPREVIKLPRGRETMYSVVQKSQHRAHKSDSSREVPELLKFTCNATHELVVRTPRSVRRLSRTIKGVEYFEVITFEMGQKKAPDGRIVELVKEVSKSYPISEGPERANELVESYRKASNKAYFEWTIEARDLSLLGSHVRKATYQTYAPILYENDHFFDYMQKSKFHLTIEGPKVLAYLLGLWIGDGLSDRATFSVDSRDTSLMERVTEYAEKLNLCAEYKDRKEPQVAKTVNLYSKVVRG

SEQ ID NO: 20718 - protein, 182 aa, synthetic construct
CFAKGTNVLMADGSIECIENIEVGNKVMGKDGRPREVIKLPRGRETMYSVVQKSQHRAHKSDSSREVPELLKFTCNATHELVVRTPRSVRRLSRTIKGVEYFEVITFEMGQKKAPDGRIVELVKEVSKSYPISEGPERANELVESYRKASNKAYFEWTIEARDLSLLGSHVRKATYQTYAPI

SEQ ID NO: 20719 - protein, 189 aa, synthetic construct
GGIIYVGCFAKGTNVLMADGSIECIENIEVGNKVMGKDGRPREVIKLPRGRETMYSVVQKSQHRAHKSDSSREVPELLKFTCNATHELVVRTPRSVRRLSRTIKGVEYFEVITFEMGQKKAPDGRIVELVKEVSKSYPISEGPERANELVESYRKASNKAYFEWTIEARDLSLLGSHVRKATYQTYAPI

SEQ ID NO: 20720 - protein, 190 aa, synthetic construct
GGVVLEKGCFAKGTNVLMADGSIECIENIEVGNKVMGKDGRPREVIKLPRGRETMYSVVQKSQHRAHKSDSSREVPELLKFTCNATHELVVRTPRSVRRLSRTIKGVEYFEVITFEMGQKKAPDGRIVELVKEVSKSYPISEGPERANELVESYRKASNKAYFEWTIEARDLSLLGSHVRKATYQTYAPI

SEQ ID NO: 20721 - protein, 189 aa, synthetic construct
GGFQTVGCFAKGTNVLMADGSIECIENIEVGNKVMGKDGRPREVIKLPRGRETMYSVVQKSQHRAHKSDSSREVPELLKFTCNATHELVVRTPRSVRRLSRTIKGVEYFEVITFEMGQKKAPDGRIVELVKEVSKSYPISEGPERANELVESYRKASNKAYFEWTIEARDLSLLGSHVRKATYQTYAPI

SEQ ID NO: 20722 - protein, 183 aa, synthetic construct
GHGGIRNNLNTENPLWDAIVGLGFLKDGVKNIPSFLSTDNIGTRETFLAGLIDSDGYVTDEHGIKATIKTIHTSVRDGLVSLARSLGLVVSVNAEPAKVDMNVTKHKISYAIYMSGGDVLLNVLSKCAGSKKFRPAPAAAFARECRGFYFELQELKEDDYYGITLSDDSDHQFLLGSQVVVQN

SEQ ID NO: 20723 - protein, 192 aa, synthetic construct
GHGGIRNNLNTENPLWDAIVGLGFLKDGVKNIPSFLSTDNIGTRETFLAGLIDSDGYVTDEHGIKATIKTIHTSVRDGLVSLARSLGLVVSVNAEPAKVDMNVTKHKISYAIYMSGGDVLLNVLSKCAGSKKFRPAPAAAFARECRGFYFELQELKEDDYYGITLSDDSDHQFLLGSQVVVQNCGERGNGSG

SEQ ID NO: 20724 - protein, 192 aa, synthetic construct
GHGGIRNNLNTENPLWDAIVGLGFLKDGVKNIPSFLSTDNIGTRETFLAGLIDSDGYVTDEHGIKATIKTIHTSVRDGLVSLARSLGLVVSVNAEPAKVDMNVTKHKISYAIYMSGGDVLLNVLSKCAGSKKFRPAPAAAFARECRGFYFELQELKEDDYYGITLSDDSDHQFLLGSQVVVQNCTMTEKGSG

SEQ ID NO: 20725 - protein, 192 aa, synthetic construct
GHGGIRNNLNTENPLWDAIVGLGFLKDGVKNIPSFLSTDNIGTRETFLAGLIDSDGYVTDEHGIKATIKTIHTSVRDGLVSLARSLGLVVSVNAEPAKVDMNVTKHKISYAIYMSGGDVLLNVLSKCAGSKKFRPAPAAAFARECRGFYFELQELKEDDYYGITLSDDSDHQFLLGSQVVVQNCGEKSMGSG

SEQ ID NO: 20726 - protein, 65 aa, synthetic construct
VLLNVLSKCAGSKKFRPAPAAAFARECRGFYFELQELKEDDYYGITLSDDSDHQFLLANQVVVHN

SEQ ID NO: 20727 - protein, 74 aa, synthetic construct
VLLNVLSKCAGSKKFRPAPAAAFARECRGFYFELQELKEDDYYGITLSDDSDHQFLLANQVVVHNCGERGNGSG

SEQ ID NO: 20728 - protein, 74 aa, synthetic construct
VLLNVLSKCAGSKKFRPAPAAAFARECRGFYFELQELKEDDYYGITLSDDSDHQFLLANQVVVHNCTMTEKGSG

SEQ ID NO: 20729 - protein, 74 aa, synthetic construct
VLLNVLSKCAGSKKFRPAPAAAFARECRGFYFELQELKEDDYYGITLSDDSDHQFLLANQVVVHNCGEKSMGSG

SEQ ID NO: 20730 - DNA, 76 bp, synthetic construct
  source 1..76: mol_type = other DNA
gttttagagctagaaatagcaagttaaaataaggctagtccgttatcaacttgaaaaagtggcaccgagtcggtgc

SEQ ID NO: 20731 - DNA, 24 bp, synthetic construct
  source 1..24: mol_type = other DNA
gttgtagctccctttctcatttcg

SEQ ID NO: 20732 - DNA, 25 bp, synthetic construct
  source 1..25: mol_type = other DNA
gttgtagctccctttttcatttcgc

SEQ ID NO: 20733 - DNA, 14 bp, synthetic construct
  source 1..14: mol_type = other DNA
gttttagtactctg

SEQ ID NO: 20734 - DNA, 12 bp, synthetic construct
  source 1..12: mol_type = other DNA
gttttagagcta

SEQ ID NO: 20735 - DNA, 14 bp, synthetic construct
  source 1..14: mol_type = other DNA
gtctttgtactctg

SEQ ID NO: 20736 - DNA, 16 bp, synthetic construct
  source 1..16: mol_type = other DNA
gctatagttccttact

SEQ ID NO: 20737 - DNA, 14 bp, synthetic construct
  source 1..14: mol_type = other DNA
gtcttagtactctg

SEQ ID NO: 20738 - DNA, 12 bp, synthetic construct
  source 1..12: mol_type = other DNA
actggggttcag

SEQ ID NO: 20739 - DNA, 12 bp, synthetic construct
  source 1..12: mol_type = other DNA
gttttagtccct

SEQ ID NO: 20740 - DNA, 16 bp, synthetic construct
  source 1..16: mol_type = other DNA
gtcatagttcccctga

SEQ ID NO: 20741 - DNA, 17 bp, synthetic construct
  source 1..17: mol_type = other DNA
gtttaagagctatgctg

SEQ ID NO: 20742 - DNA, 93 bp, synthetic construct
  source 1..93: mol_type = other DNA
cgaaatgagaaccgttgctacaataaggccgtctgaaaagatgtgccgcaacgctctgccccttaaagcttctgctttaaggggcatcgttta

SEQ ID NO: 20743 - DNA, 82 bp, synthetic construct
  source 1..82: mol_type = other DNA
gcgaaatgaaaaacgttgttacaataagagatgaatttctcgcaaagctctgcctcttgaaatttcggtttcaagaggcatc

SEQ ID NO: 20744 - DNA, 58 bp, synthetic construct
  source 1..58: mol_type = other DNA
cagaatctactaaaacaaggcaaaatgccgtgtttatctcgtcaacttgttggcgaga

SEQ ID NO: 20745 - DNA, 60 bp, synthetic construct
  source 1..60: mol_type = other DNA
tagcaagttaaaataaggctagtccgttatcaacttgaaaaagtggcaccgagtcggtgc

SEQ ID NO: 20746 - DNA, 66 bp, synthetic construct
  source 1..66: mol_type = other DNA
cagaagctacaaagataaggcttcatgccgaaatcaacaccctgtcattttatggcagggtgtttt

SEQ ID NO: 20747 - DNA, 127 bp, synthetic construct
  source 1..127: mol_type = other DNA
ggtaagttgctatagtaagggcaacagacccgaggcgttggggatcgcctagcccgtgtttacgggctctccccatattcaaaataatgacagacgagcaccttggagcatttatctccgaggtgct

SEQ ID NO: 20748 - DNA, 58 bp, synthetic construct
  source 1..58: mol_type = other DNA
cagaatctactaagacaaggcaaaatgccgtgtttatctcgtcaacttgttggcgaga

SEQ ID NO: 20749 - DNA, 76 bp, synthetic construct
  source 1..76: mol_type = other DNA
ctgaacctcagtaagcattggctcgtttccaatgttgattgctccgccggtgctccttatttttaagggcgccggc

SEQ ID NO: 20750 - DNA, 57 bp, synthetic construct
  source 1..57: mol_type = other DNA
agggactaaaataaagagtttgcgggactctgcggggttacaatcccctaaaaccgc

SEQ ID NO: 20751 - DNA, 98 bp, synthetic construct
  source 1..98: mol_type = other DNA
tcagggttactatgataagggctttctgcctaaggcagactgacccgcggcgttggggatcgcctgtcgcccgcttttggcgggcattccccatcctt

SEQ ID NO: 20752 - DNA, 65 bp, synthetic construct
  source 1..65: mol_type = other DNA
cagcatagcaagtttaaataaggctagtccgttatcaacttgaaaaagtggcaccgagtcggtgc

SEQ ID NO: 20753 - DNA, 62 bp, synthetic construct
  source 1..62: mol_type = other DNA
cagaatctactgaaacaagacaatatgtcgtgtttatcccatcaatttattggtgggatttt

SEQ ID NO: 20754 - DNA, 23 bp, synthetic construct
  source 1..23: mol_type = other DNA
gcacatgaggatcacccatgtgc

SEQ ID NO: 20755 - DNA, 29 bp, synthetic construct
  source 1..29: mol_type = other DNA
cataaggagtttatatggaaacccttatg

SEQ ID NO: 20756 - DNA, 19 bp, synthetic construct
  source 1..19: mol_type = other DNA
ctgaatgcctgcgagcatc

SEQ ID NO: 20757 - DNA, 56 bp, synthetic construct
  source 1..56: mol_type = other DNA
ggcagagaaaggccatacaatcattggccttgtgaggccgtgtgtcttccagtggc

SEQ ID NO: 20758 - DNA, 54 bp, synthetic construct
  source 1..54: mol_type = other DNA
ggcagagaaaggccatacaatcattggcttttccatgacgccagttccagtggc

SEQ ID NO: 20759 - DNA, 19 bp, synthetic construct
  source 1..19: mol_type = other DNA
gggccctgaagaagggccc

SEQ ID NO: 20760 - DNA, 27 bp, synthetic construct
  source 1..27: mol_type = other DNA
ggatccgtgatcggaaacgtgagatcc

SEQ ID NO: 20761 - DNA, 38 bp, synthetic construct
  source 1..38: mol_type = other DNA
ggtggcagagaaaggcgaaagccttgtgaggccatcaa

SEQ ID NO: 20762 - DNA, 35 bp, synthetic construct
  source 1..35: mol_type = other DNA
ggatgcagagaacgaaagttccatgacgcatccaa

SEQ ID NO: 20763 - DNA, 11 bp, synthetic construct
  source 1..11: mol_type = other DNA
ggtggtggtgg

SEQ ID NO: 20764 - DNA, 12 bp, synthetic construct
  source 1..12: mol_type = other DNA
ggacttcggtcc

SEQ ID NO: 20765 - DNA, 36 bp, synthetic construct
  source 1..36: mol_type = other DNA
ctcatagttcccctgagaaatcagggttactatgag

SEQ ID NO: 20766 - DNA, 121 bp, synthetic construct
  source 1..121: mol_type = other DNA
gttgtagctccctttctcatttcggaaacgaaatgagaaccgttgctacaataaggccgtctgaaaagatgtgccgcaacgctctgccccttaaagcttctgctttaaggggcatcgttta

SEQ ID NO: 20767 - DNA, 141 bp, synthetic construct
  source 1..141: mol_type = other DNA
cagtacatgaccttacgggagttgtagctccctttctcatttcggaaacgaaatgagaaccgttgctacaataaggccgtctgaaaagatgtgccgcaacgctctgccccttaaagcttctgctttaaggggcatcgttta

SEQ ID NO: 20768 - DNA, 137 bp, synthetic construct
  source 1..137: mol_type = other DNA
acatgaccttacgggagttgtagctccctttctcatttcggaaacgaaatgagaaccgttgctacaataaggccgtctgaaaagatgtgccgcaacgctctgccccttaaagcttctgctttaaggggcatcgttta

SEQ ID NO: 20769 - DNA, 147 bp, synthetic construct
  source 1..147: mol_type = other DNA
gctatagttccttactgaaaggtaagttgctatagtaagggcaacagacccgaggcgttggggatcgcctagcccgtgtttacgggctctccccatattcaaaataatgacagacgagcaccttggagcatttatctccgaggtgct

SEQ ID NO: 20770 - DNA, 118 bp, synthetic construct
  source 1..118: mol_type = other DNA
gtcatagttcccctgagaaatcagggttactatgataagggctttctgcctaaggcagactgacccgcggcgttggggatcgcctgtcgcccgcttttggcgggcattccccatcctt

SEQ ID NO: 20771 - DNA, 111 bp, synthetic construct
  source 1..111: mol_type = other DNA
gttgtagctccctttttcatttcgcgaaagcgaaatgaaaaacgttgttacaataagagatgaatttctcgcaaagctctgcctcttgaaatttcggtttcaagaggcatc

SEQ ID NO: 20772 - DNA, 92 bp, synthetic construct
  source 1..92: mol_type = other DNA
actggggttcaggaaactgaacctcagtaagcattggctcgtttccaatgttgattgctccgccggtgctccttatttttaagggcgccggc

SEQ ID NO: 20773 - DNA, 85 bp, synthetic construct
  source 1..85: mol_type = other DNA
gttttagagctagaaatagcaagttaaaataaggctagtccgttatcaacttgaaaaagtggcaccgggacttcggtcccggtgc

SEQ ID NO: 20774 - DNA, 84 bp, synthetic construct
  source 1..84: mol_type = other DNA
gtctttgtactctggtaccagaagctacaaagataaggcttcatgccgaaatcaacaccctgtcattttatggcagggtgtttt

SEQ ID NO: 20775 - DNA, 76 bp, synthetic construct
  source 1..76: mol_type = other DNA
gtcttagtactctggaaacagaatctactaagacaaggcaaaatgccgtgtttatctcgtcaacttgttggcgaga

SEQ ID NO: 20776 - DNA, 86 bp, synthetic construct
  source 1..86: mol_type = other DNA
gtttaagagctatgctggaaacagcatagcaagtttaaataaggctagtccgttatcaacttgaaaaagtggcaccgagtcggtgc

SEQ ID NO: 20777 - DNA, 76 bp, synthetic construct
  source 1..76: mol_type = other DNA
gttttagtactctggaaacagaatctactaaaacaaggcaaaatgccgtgtttatctcgtcaacttgttggcgaga

SEQ ID NO: 20778 - DNA, 73 bp, synthetic construct
  source 1..73: mol_type = other DNA
gttttagtccctgaaaagggactaaaataaagagtttgcgggactctgcggggttacaatcccctaaaaccgc

SEQ ID NO: 20779 - DNA, 76 bp, synthetic construct; identical to SEQ ID NO: 20730
  source 1..76: mol_type = other DNA

SEQ ID NO: 20780 - DNA, 250 bp, synthetic construct
  source 1..250: mol_type = other DNA
agaattttgtaatacgactcactatagggcggccgggaattcgccaccatggtgagcaagggcgaggagctgttcaccggggtggtgcccatcctggtcgagctggacggcgacgtaaacggccacaagttcagcgtgtccggcgagggcgagggcgatgccacctacggcaagctgaccctgaagttcatctgcaccaccggcaagctgcccgtgccctggcccaccctcgtgaccaccctgacgtacg

SEQ ID NO: 20781 - DNA, 250 bp, synthetic construct
  source 1..250: mol_type = other DNA
cagaattttgtaatacgactcactatagggcggccgggaattcgccaccatggtgagcaagggcgaggagctgttcaccggggtggtgcccatcctggtcgagctggacggcgacgtaaacggccacaagttcagcgtgtccggcgagggcgagggcgatgccacctacggcaagctgaccctgaagttcatctgcaccaccggcaagctgcccgtgccctggcccaccctcgtgaccaccctgacgtac

SEQ ID NO: 20782 - DNA, 250 bp, synthetic construct
  source 1..250: mol_type = other DNA
tcagaattttgtaatacgactcactatagggcggccgggaattcgccaccatggtgagcaagggcgaggagctgttcaccggggtggtgcccatcctggtcgagctggacggcgacgtaaacggccacaagttcagcgtgtccggcgagggcgagggcgatgccacctacggcaagctgaccctgaagttcatctgcaccaccggcaagctgcccgtgccctggcccaccctcgtgaccaccctgacgta

SEQ ID NO: 20783 - DNA, 250 bp, synthetic construct
  source 1..250: mol_type = other DNA
gtcagaattttgtaatacgactcactatagggcggccgggaattcgccaccatggtgagcaagggcgaggagctgttcaccggggtggtgcccatcctggtcgagctggacggcgacgtaaacggccacaagttcagcgtgtccggcgagggcgagggcgatgccacctacggcaagctgaccctgaagttcatctgcaccaccggcaagctgcccgtgccctggcccaccctcgtgaccaccctgacgt

SEQ ID NO: 20784 - DNA, 250 bp, synthetic construct
  source 1..250: mol_type = other DNA
cgtcagaattttgtaatacgactcactatagggcggccgggaattcgccaccatggtgagcaagggcgaggagctgttcaccggggtggtgcccatcctggtcgagctggacggcgacgtaaacggccacaagttcagcgtgtccggcgagggcgagggcgatgccacctacggcaagctgaccctgaagttcatctgcaccaccggcaagctgcccgtgccctggcccaccctcgtgaccaccctgacg

SEQ ID NO: 20785 - DNA, 250 bp, synthetic construct
  source 1..250: mol_type = other DNA
ccgtcagaattttgtaatacgactcactatagggcggccgggaattcgccaccatggtgagcaagggcgaggagctgttcaccggggtggtgcccatcctggtcgagctggacggcgacgtaaacggccacaagttcagcgtgtccggcgagggcgagggcgatgccacctacggcaagctgaccctgaagttcatctgcaccaccggcaagctgcccgtgccctggcccaccctcgtgaccaccctgac

SEQ ID NO: 20786 - DNA, 250 bp, synthetic construct
  source 1..250: mol_type = other DNA
accgtcagaattttgtaatacgactcactatagggcggccgggaattcgccaccatggtgagcaagggcgaggagctgttcaccggggtggtgcccatcctggtcgagctggacggcgacgtaaacggccacaagttcagcgtgtccggcgagggcgagggcgatgccacctacggcaagctgaccctgaagttcatctgcaccaccggcaagctgcccgtgccctggcccaccctcgtgaccaccctga

SEQ ID NO: 20787 - DNA, 250 bp, synthetic construct
  source 1..250: mol_type = other DNA
aaccgtcagaattttgtaatacgactcactatagggcggccgggaattcgccaccatggtgagcaagggcgaggagctgttcaccggggtggtgcccatcctggtcgagctggacggcgacgtaaacggccacaagttcagcgtgtccggcgagggcgagggcgatgccacctacggcaagctgaccctgaagttcatctgcaccaccggcaagctgcccgtgccctggcccaccctcgtgaccaccctg

SEQ ID NO: 20788 - DNA, 250 bp, synthetic construct
  source 1..250: mol_type = other DNA
gaaccgtcagaattttgtaatacgactcactatagggcggccgggaattcgccaccatggtgagcaagggcgaggagctgttcaccggggtggtgcccatcctggtcgagctggacggcgacgtaaacggccacaagttcagcgtgtccggcgagggcgagggcgatgccacctacggcaagctgaccctgaagttcatctgcaccaccggcaagctgcccgtgccctggcccaccctcgtgaccaccct

SEQ ID NO: 20789 - DNA, 250 bp, synthetic construct
  source 1..250: mol_type = other DNA
tgaaccgtcagaattttgtaatacgactcactatagggcggccgggaattcgccaccatggtgagcaagggcgaggagctgttcaccggggtggtgcccatcctggtcgagctggacggcgacgtaaacggccacaagttcagcgtgtccggcgagggcgagggcgatgccacctacggcaagctgaccctgaagttcatctgcaccaccggcaagctgcccgtgccctggcccaccctcgtgaccaccc

SEQ ID NO: 20790 - DNA, 250 bp, synthetic construct
  source 1..250: mol_type = other DNA
gtgaaccgtcagaattttgtaatacgactcactatagggcggccgggaattcgccaccatggtgagcaagggcgaggagctgttcaccggggtggtgcccatcctggtcgagctggacggcgacgtaaacggccacaagttcagcgtgtccggcgagggcgagggcgatgccacctacggcaagctgaccctgaagttcatctgcaccaccggcaagctgcccgtgccctggcccaccctcgtgaccacc

SEQ ID NO: 20791 - DNA, 250 bp, synthetic construct
  source 1..250: mol_type = other DNA
agtgaaccgtcagaattttgtaatacgactcactatagggcggccgggaattcgccaccatggtgagcaagggcgaggagctgttcaccggggtggtgcccatcctggtcgagctggacggcgacgtaaacggccacaagttcagcgtgtccggcgagggcgagggcgatgccacctacggcaagctgaccctgaagttcatctgcaccaccggcaagctgcccgtgccctggcccaccctcgtgaccac

SEQ ID NO: 20792 - DNA, 250 bp, synthetic construct
  source 1..250: mol_type = other DNA
tagtgaaccgtcagaattttgtaatacgactcactatagggcggccgggaattcgccaccatggtgagcaagggcgaggagctgttcaccggggtggtgcccatcctggtcgagctggacggcgacgtaaacggccacaagttcagcgtgtccggcgagggcgagggcgatgccacctacggcaagctgaccctgaagttcatctgcaccaccggcaagctgcccgtgccctggcccaccctcgtgacca

SEQ ID NO: 20793 - DNA, 250 bp, synthetic construct
  source 1..250: mol_type = other DNA
ttagtgaaccgtcagaattttgtaatacgactcactatagggcggccgggaattcgccaccatggtgagcaagggcgaggagctgttcaccggggtggtgcccatcctggtcgagctggacggcgacgtaaacggccacaagttcagcgtgtccggcgagggcgagggcgatgccacctacggcaagctgaccctgaagttcatctgcaccaccggcaagctgcccgtgccctggcccaccctcgtgacc

SEQ ID NO: 20794 - DNA, 250 bp, synthetic construct
  source 1..250: mol_type = other DNA
tttagtgaaccgtcagaattttgtaatacgactcactatagggcggccgggaattcgccaccatggtgagcaagggcgaggagctgttcaccggggtggtgcccatcctggtcgagctggacggcgacgtaaacggccacaagttcagcgtgtccggcgagggcgagggcgatgccacctacggcaagctgaccctgaagttcatctgcaccaccggcaagctgcccgtgccctggcccaccctcgtgac

SEQ ID NO: 20795 - DNA, 250 bp, synthetic construct
  source 1..250: mol_type = other DNA
gtttagtgaaccgtcagaattttgtaatacgactcactatagggcggccgggaattcgccaccatggtgagcaagggcgaggagctgttcaccggggtggtgcccatcctggtcgagctggacggcgacgtaaacggccacaagttcagcgtgtccggcgagggcgagggcgatgccacctacggcaagctgaccctgaagttcatctgcaccaccggcaagctgcccgtgccctggcccaccctcgtga

SEQ ID NO: 20796 - DNA, 250 bp, synthetic construct
  source 1..250: mol_type = other DNA
cgtttagtgaaccgtcagaattttgtaatacgactcactatagggcggccgggaattcgccaccatggtgagcaagggcgaggagctgttcaccggggtggtgcccatcctggtcgagctggacggcgacgtaaacggccacaagttcagcgtgtccggcgagggcgagggcgatgccacctacggcaagctgaccctgaagttcatctgcaccaccggcaagctgcccgtgccctggcccaccctcgtg

SEQ ID NO: 20797 - DNA, 250 bp, synthetic construct
  source 1..250: mol_type = other DNA
tcgtttagtgaaccgtcagaattttgtaatacgactcactatagggcggccgggaattcgccaccatggtgagcaagggcgaggagctgttcaccggggtggtgcccatcctggtcgagctggacggcgacgtaaacggccacaagttcagcgtgtccggcgagggcgagggcgatgccacctacggcaagctgaccctgaagttcatctgcaccaccggcaagctgcccgtgccctggcccaccctcgt

SEQ ID NO: 20798 - DNA, 250 bp, synthetic construct
  source 1..250: mol_type = other DNA
ctcgtttagtgaaccgtcagaattttgtaatacgactcactatagggcggccgggaattcgccaccatggtgagcaagggcgaggagctgttcaccggggtggtgcccatcctggtcgagctggacggcgacgtaaacggccacaagttcagcgtgtccggcgagggcgagggcgatgccacctacggcaagctgaccctgaagttcatctgcaccaccggcaagctgcccgtgccctggcccaccctcg

SEQ ID NO: 20799 - DNA, 250 bp, synthetic construct
  source 1..250: mol_type = other DNA
gctcgtttagtgaaccgtcagaattttgtaatacgactcactatagggcggccgggaattcgccaccatggtgagcaagggcgaggagctgttcaccggggtggtgcccatcctggtcgagctggacggcgacgtaaacggccacaagttcagcgtgtccggcgagggcgagggcgatgccacctacggcaagctgaccctgaagttcatctgcaccaccggcaagctgcccgtgccctggcccaccctc

SEQ ID NO: 20800 - DNA, 250 bp, synthetic construct
  source 1..250: mol_type = other DNA
agctcgtttagtgaaccgtcagaattttgtaatacgactcactatagggcggccgggaattcgccaccatggtgagcaagggcgaggagctgttcaccggggtggtgcccatcctggtcgagctggacggcgacgtaaacggccacaagttcagcgtgtccggcgagggcgagggcgatgccacctacggcaagctgaccctgaagttcatctgcaccaccggcaagctgcccgtgccctggcccaccct

SEQ ID NO: 20801 - DNA, 10 bp, synthetic construct
  source 1..10: mol_type = other DNA
ctgacgtacg

SEQ ID NO: 20802 - DNA, 11 bp, synthetic construct
  source 1..11: mol_type = other DNA
cctgacgtacg

SEQ ID NO: 20803 - DNA, 12 bp, synthetic construct
  source 1..12: mol_type = other DNA
ccctgacgtacg

SEQ ID NO: 20804 - DNA, 13 bp, synthetic construct
  source 1..13: mol_type = other DNA
accctgacgtacg

SEQ ID NO: 20805 - DNA, 14 bp, synthetic construct
  source 1..14: mol_type = other DNA
caccctgacgtacg

SEQ ID NO: 20806 - DNA, 15 bp, synthetic construct
  source 1..15: mol_type = other DNA
ccaccctgacgtacg

SEQ ID NO: 20807 - DNA, 16 bp, synthetic construct
  source 1..16: mol_type = other DNA
accaccctgacgtacg

SEQ ID NO: 20808 - DNA, 17 bp, synthetic construct
  source 1..17: mol_type = other DNA
gaccaccctgacgtacg

SEQ ID NO: 20809 - DNA, 18 bp, synthetic construct
  source 1..18: mol_type = other DNA
tgaccaccctgacgtacg

SEQ ID NO: 20810 - DNA, 19 bp, synthetic construct
  source 1..19: mol_type = other DNA
gtgaccaccctgacgtacg

SEQ ID NO: 20811 - DNA, 20 bp, synthetic construct
  source 1..20: mol_type = other DNA
cgtgaccaccctgacgtacg

SEQ ID NO: 20812 - DNA, 11 bp, synthetic construct
  source 1..11: mol_type = other DNA
accaccctgac

SEQ ID NO: 20813 - DNA, 12 bp, synthetic construct
  source 1..12: mol_type = other DNA
gaccaccctgac

SEQ ID NO: 20814 - DNA, 13 bp, synthetic construct
  source 1..13: mol_type = other DNA
tgaccaccctgac

SEQ ID NO: 20815 - DNA, 14 bp, synthetic construct
  source 1..14: mol_type = other DNA
gtgaccaccctgac

SEQ ID NO: 20816 - DNA, 16 bp, synthetic construct
  source 1..16: mol_type = other DNA
tcgtgaccaccctgac

SEQ ID NO: 20817 - DNA, 20 bp, synthetic construct
  source 1..20: mol_type = other DNA
accctcgtgaccaccctgac

SEQ ID NO: 20818 - DNA, 24 bp, synthetic construct
  source 1..24: mol_type = other DNA
gcccaccctcgtgaccaccctgac

SEQ ID NO: 20819 - DNA, 25 bp, synthetic construct
  source 1..25: mol_type = other DNA
ggcccaccctcgtgaccaccctgac

SEQ ID NO: 20820 - DNA, 500 bp, synthetic construct
  source 1..500: mol_type = other DNA
cccgcctggctgaccgcccaacgacccccgcccattgacgtcaataatgacgtatgttcccatagtaacgccaatagggactttccattgacgtcaatgggtggagtatttacggtaaactgcccacttggcagtacatcaagtgtatcatatgccaagtccgccccctattgacgtcaatgacggtaaatggcccgcctggcattatgcccagtacatgaccttacgggactttcctacttggcagtacatctacgtattagtcatcgctattaccatggtgatgcggttttggcagtacaccaatgggcgtggatagcggtttgactcacggggatttccaagtctccaccccattgacgtcaatgggagtttgttttggcaccaaaatcaacgggactttccaaaatgtcgtaataaccccgccccgttgacgcaaatgggcggtaggcgtgtacggtgggaggtctatataagcagagctcgtttagtgaaccgtc

SEQ ID NO: 20821 - DNA, 499 bp, synthetic construct
  source 1..499: mol_type = other DNA
ccgcctggctgaccgcccaacgacccccgcccattgacgtcaataatgacgtatgttcccatagtaacgccaatagggactttccattgacgtcaatgggtggagtatttacggtaaactgcccacttggcagtacatcaagtgtatcatatgccaagtccgccccctattgacgtcaatgacggtaaatggcccgcctggcattatgcccagtacatgaccttacgggactttcctacttggcagtacatctacgtattagtcatcgctattaccatggtgatgcggttttggcagtacaccaatgggcgtggatagcggtttgactcacggggatttccaagtctccaccccattgacgtcaatgggagtttgttttggcaccaaaatcaacgggactttccaaaatgtcgtaataaccccgccccgttgacgcaaatgggcggtaggcgtgtacggtgggaggtctatataagcagagctcgtttagtgaaccgtc

SEQ ID NO: 20822 - DNA, 498 bp, synthetic construct
  source 1..498: mol_type = other DNA
cgcctggctgaccgcccaacgacccccgcccattgacgtcaataatgacgtatgttcccatagtaacgccaatagggactttccattgacgtcaatgggtggagtatttacggtaaactgcccacttggcagtacatcaagtgtatcatatgccaagtccgccccctattgacgtcaatgacggtaaatggcccgcctggcattatgcccagtacatgaccttacgggactttcctacttggcagtacatctacgtattagtcatcgctattaccatggtgatgcggttttggcagtacaccaatgggcgtggatagcggtttgactcacggggatttccaagtctccaccccattgacgtcaatgggagtttgttttggcaccaaaatcaacgggactttccaaaatgtcgtaataaccccgccccgttgacgcaaatgggcggtaggcgtgtacggtgggaggtctatataagcagagctcgtttagtgaaccgtc

SEQ ID NO: 20823 - DNA, 497 bp, synthetic construct
  source 1..497: mol_type = other DNA
gcctggctgaccgcccaacgacccccgcccattgacgtcaataatgacgtatgttcccatagtaacgccaatagggactttccattgacgtcaatgggtggagtatttacggtaaactgcccacttggcagtacatcaagtgtatcatatgccaagtccgccccctattgacgtcaatgacggtaaatggcccgcctggcattatgcccagtacatgaccttacgggactttcctacttggcagtacatctacgtattagtcatcgctattaccatggtgatgcggttttggcagtacaccaatgggcgtggatagcggtttgactcacggggatttccaagtctccaccccattgacgtcaatgggagtttgttttggcaccaaaatcaacgggactttccaaaatgtcgtaataaccccgccccgttgacgcaaatgggcggtaggcgtgtacggtgggaggtctatataagcagagctcgtttagtgaaccgtc

SEQ ID NO: 20824 - DNA, 496 bp, synthetic construct
  source 1..496: mol_type = other DNA
cctggctgaccgcccaacgacccccgcccattgacgtcaataatgacgtatgttcccatagtaacgccaatagggactttccattgacgtcaatgggtggagtatttacggtaaactgcccacttggcagtacatcaagtgtatcatatgccaagtccgccccctattgacgtcaatgacggtaaatggcccgcctggcattatgcccagtacatgaccttacgggactttcctacttggcagtacatctacgtattagtcatcgctattaccatggtgatgcggttttggcagtacaccaatgggcgtggatagcggtttgactcacggggatttccaagtctccaccccattgacgtcaatgggagtttgttttggcaccaaaatcaacgggactttccaaaatgtcgtaataaccccgccccgttgacgcaaatgggcggtaggcgtgtacggtgggaggtctatataagcagagctcgtttagtgaaccgtc

SEQ ID NO: 20825 - DNA, 495 bp, synthetic construct
  source 1..495: mol_type = other DNA
ctggctgaccgcccaacgacccccgcccattgacgtcaataatgacgtatgttcccatagtaacgccaatagggactttccattgacgtcaatgggtggagtatttacggtaaactgcccacttggcagtacatcaagtgtatcatatgccaagtccgccccctattgacgtcaatgacggtaaatggcccgcctggcattatgcccagtacatgaccttacgggactttcctacttggcagtacatctacgtattagtcatcgctattaccatggtgatgcggttttggcagtacaccaatgggcgtggatagcggtttgactcacggggatttccaagtctccaccccattgacgtcaatgggagtttgttttggcaccaaaatcaacgggactttccaaaatgtcgtaataaccccgccccgttgacgcaaatgggcggtaggcgtgtacggtgggaggtctatataagcagagctcgtttagtgaaccgtc

SEQ ID NO: 20826 - DNA, 494 bp, synthetic construct
  source 1..494: mol_type = other DNA
tggctgaccgcccaacgacccccgcccattgacgtcaataatgacgtatgttcccatagtaacgccaatagggactttccattgacgtcaatgggtggagtatttacggtaaactgcccacttggcagtacatcaagtgtatcatatgccaagtccgccccctattgacgtcaatgacggtaaatggcccgcctggcattatgcccagtacatgaccttacgggactttcctacttggcagtacatctacgtattagtcatcgctattaccatggtgatgcggttttggcagtacaccaatgggcgtggatagcggtttgactcacggggatttccaagtctccaccccattgacgtcaatgggagtttgttttggcaccaaaatcaacgggactttccaaaatgtcgtaataaccccgccccgttgacgcaaatgggcggtaggcgtgtacggtgggaggtctatataagcagagctcgtttagtgaaccgtc

SEQ ID NO: 20827 - DNA, 493 bp, synthetic construct
  source 1..493: mol_type = other DNA
ggctgaccgcccaacgacccccgcccattgacgtcaataatgacgtatgttcccatagtaacgccaatagggactttccattgacgtcaatgggtggagtatttacggtaaactgcccacttggcagtacatcaagtgtatcatatgccaagtccgccccctattgacgtcaatgacggtaaatggcccgcctggcattatgcccagtacatgaccttacgggactttcctacttggcagtacatctacgtattagtcatcgctattaccatggtgatgcggttttggcagtacaccaatgggcgtggatagcggtttgactcacggggatttccaagtctccaccccattgacgtcaatgggagtttgttttggcaccaaaatcaacgggactttccaaaatgtcgtaataaccccgccccgttgacgcaaatgggcggtaggcgtgtacggtgggaggtctatataagcagagctcgtttagtgaaccgtc

SEQ ID NO: 20828 - DNA, 492 bp, synthetic construct
  source 1..492: mol_type = other DNA
gctgaccgcccaacgacccccgcccattgacgtcaataatgacgtatgttcccatagtaacgccaatagggactttccattgacgtcaatgggtggagtatttacggtaaactgcccacttggcagtacatcaagtgtatcatatgccaagtccgccccctattgacgtcaatgacggtaaatggcccgcctggcattatgcccagtacatgaccttacgggactttcctacttggcagtacatctacgtattagtcatcgctattaccatggtgatgcggttttggcagtacaccaatgggcgtggatagcggtttgactcacggggatttccaagtctccaccccattgacgtcaatgggagtttgttttggcaccaaaatcaacgggactttccaaaatgtcgtaataaccccgccccgttgacgcaaatgggcggtaggcgtgtacggtgggaggtctatataagcagagctcgtttagtgaaccgtc

SEQ ID NO: 20829 - DNA, 491 bp, synthetic construct
  source 1..491: mol_type = other DNA
ctgaccgcccaacgacccccgcccattgacgtcaataatgacgtatgttcccatagtaacgccaatagggactttccattgacgtcaatgggtggagtatttacggtaaactgcccacttggcagtacatcaagtgtatcatatgccaagtccgccccctattgacgtcaatgacggtaaatggcccgcctggcattatgcccagtacatgaccttacgggactttcctacttggcagtacatctacgtattagtcatcgctattaccatggtgatgcggttttggcagtacaccaatgggcgtggatagcggtttgactcacggggatttccaagtctccaccccattgacgtcaatgggagtttgttttggcaccaaaatcaacgggactttccaaaatgtcgtaataaccccgccccgttgacgcaaatgggcggtaggcgtgtacggtgggaggtctatataagcagagctcgtttagtgaaccgtc

SEQ ID NO: 20830 - DNA, 490 bp, synthetic construct
  source 1..490: mol_type = other DNA
tgaccgcccaacgacccccgcccattgacgtcaataatgacgtatgttcccatagtaacgccaatagggactttccattgacgtcaatgggtggagtatttacggtaaactgcccacttggcagtacatcaagtgtatcatatgccaagtccgccccctattgacgtcaatgacggtaaatggcccgcctggcattatgcccagtacatgaccttacgggactttcctacttggcagtacatctacgtattagtcatcgctattaccatggtgatgcggttttggcagtacaccaatgggcgtggatagcggtttgactcacggggatttccaagtctccaccccattgacgtcaatgggagtttgttttggcaccaaaatcaacgggactttccaaaatgtcgtaataaccccgccccgttgacgcaaatgggcggtaggcgtgtacggtgggaggtctatataagcagagctcgtttagtgaaccgtc

SEQ ID NO: 20831 - DNA, 489 bp, synthetic construct
  source 1..489: mol_type = other DNA
gaccgcccaacgacccccgcccattgacgtcaataatgacgtatgttcccatagtaacgccaatagggactttccattgacgtcaatgggtggagtatttacggtaaactgcccacttggcagtacatcaagtgtatcatatgccaagtccgccccctattgacgtcaatgacggtaaatggcccgcctggcattatgcccagtacatgaccttacgggactttcctacttggcagtacatctacgtattagtcatcgctattaccatggtgatgcggttttggcagtacaccaatgggcgtggatagcggtttgactcacggggatttccaagtctccaccccattgacgtcaatgggagtttgttttggcaccaaaatcaacgggactttccaaaatgtcgtaataaccccgccccgttgacgcaaatgggcggtaggcgtgtacggtgggaggtctatataagcagagctcgtttagtgaaccgtc

SEQ ID NO: 20832 - DNA, 488 bp, synthetic construct
  source 1..488: mol_type = other DNA
accgcccaacgacccccgcccattgacgtcaataatgacgtatgttcccatagtaacgccaatagggactttccattgacgtcaatgggtggagtatttacggtaaactgcccacttggcagtacatcaagtgtatcatatgccaagtccgccccctattgacgtcaatgacggtaaatggcccgcctggcattatgcccagtacatgaccttacgggactttcctacttggcagtacatctacgtattagtcatcgctattaccatggtgatgcggttttggcagtacaccaatgggcgtggatagcggtttgactcacggggatttccaagtctccaccccattgacgtcaatgggagtttgttttggcaccaaaatcaacgggactttccaaaatgtcgtaataaccccgccccgttgacgcaaatgggcggtaggcgtgtacggtgggaggtctatataagcagagctcgtttagtgaaccgtc

SEQ ID NO: 20833 - DNA, 487 bp, synthetic construct
  source 1..487: mol_type = other DNA
ccgcccaacgacccccgcccattgacgtcaataatgacgtatgttcccatagtaacgccaatagggactttccattgacgtcaatgggtggagtatttacggtaaactgcccacttggcagtacatcaagtgtatcatatgccaagtccgccccctattgacgtcaatgacggtaaatggcccgcctggcattatgcccagtacatgaccttacgggactttcctacttggcagtacatctacgtattagtcatcgctattaccatggtgatgcggttttggcagtacaccaatgggcgtggatagcggtttgactcacggggatttccaagtctccaccccattgacgtcaatgggagtttgttttggcaccaaaatcaacgggactttccaaaatgtcgtaataaccccgccccgttgacgcaaatgggcggtaggcgtgtacggtgggaggtctatataagcagagctcgtttagtgaaccgtc

SEQ ID NO: 20834 - DNA, 486 bp, synthetic construct
  source 1..486: mol_type = other DNA
cgcccaacgacccccgcccattgacgtcaataatgacgtatgttcccatagtaacgccaatagggactttccattgacgtcaatgggtggagtatttacggtaaactgcccacttggcagtacatcaagtgtatcatatgccaagtccgccccctattgacgtcaatgacggtaaatggcccgcctggcattatgcccagtacatgaccttacgggactttcctacttggcagtacatctacgtattagtcatcgctattaccatggtgatgcggttttggcagtacaccaatgggcgtggatagcggtttgactcacggggatttccaagtctccaccccattgacgtcaatgggagtttgttttggcaccaaaatcaacgggactttccaaaatgtcgtaataaccccgccccgttgacgcaaatgggcggtaggcgtgtacggtgggaggtctatataagcagagctcgtttagtgaaccgtc

SEQ ID NO: 20835 - DNA, 485 bp, synthetic construct
  source 1..485: mol_type = other DNA
gcccaacgacccccgcccattgacgtcaataatgacgtatgttcccatagtaacgccaatagggactttccattgacgtcaatgggtggagtatttacggtaaactgcccacttggcagtacatcaagtgtatcatatgccaagtccgccccctattgacgtcaatgacggtaaatggcccgcctggcattatgcccagtacatgaccttacgggactttcctacttggcagtacatctacgtattagtcatcgctattaccatggtgatgcggttttggcagtacaccaatgggcgtggatagcggtttgactcacggggatttccaagtctccaccccattgacgtcaatgggagtttgttttggcaccaaaatcaacgggactttccaaaatgtcgtaataaccccgccccgttgacgcaaatgggcggtaggcgtgtacggtgggaggtctatataagcagagctcgtttagtgaaccgtc

SEQ ID NO: 20836 - DNA, 484 bp, synthetic construct
  source 1..484: mol_type = other DNA
cccaacgacccccgcccattgacgtcaataatgacgtatgttcccatagtaacgccaatagggactttccattgacgtcaatgggtggagtatttacggtaaactgcccacttggcagtacatcaagtgtatcatatgccaagtccgccccctattgacgtcaatgacggtaaatggcccgcctggcattatgcccagtacatgaccttacgggactttcctacttggcagtacatctacgtattagtcatcgctattaccatggtgatgcggttttggcagtacaccaatgggcgtggatagcggtttgactcacggggatttccaagtctccaccccattgacgtcaatgggagtttgttttggcaccaaaatcaacgggactttccaaaatgtcgtaataaccccgccccgttgacgcaaatgggcggtaggcgtgtacggtgggaggtctatataagcagagctcgtttagtgaaccgtc

SEQ ID NO: 20837 - DNA, 483 bp, synthetic construct
  source 1..483: mol_type = other DNA
ccaacgacccccgcccattgacgtcaataatgacgtatgttcccatagtaacgccaatagggactttccattgacgtcaatgggtggagtatttacggtaaactgcccacttggcagtacatcaagtgtatcatatgccaagtccgccccctattgacgtcaatgacggtaaatggcccgcctggcattatgcccagtacatgaccttacgggactttcctacttggcagtacatctacgtattagtcatcgctattaccatggtgatgcggttttggcagtacaccaatgggcgtggatagcggtttgactcacggggatttccaagtctccaccccattgacgtcaatgggagtttgttttggcaccaaaatcaacgggactttccaaaatgtcgtaataaccccgccccgttgacgcaaatgggcggtaggcgtgtacggtgggaggtctatataagcagagctcgtttagtgaaccgtc

SEQ ID NO: 20838 - DNA, 482 bp, synthetic construct
  source 1..482: mol_type = other DNA
caacgacccccgcccattgacgtcaataatgacgtatgttcccatagtaacgccaatagggactttccattgacgtcaatgggtggagtatttacggtaaactgcccacttggcagtacatcaagtgtatcatatgccaagtccgccccctattgacgtcaatgacggtaaatggcccgcctggcattatgcccagtacatgaccttacgggactttcctacttggcagtacatctacgtattagtcatcgctattaccatggtgatgcggttttggcagtacaccaatgggcgtggatagcggtttgactcacggggatttccaagtctccaccccattgacgtcaatgggagtttgttttggcaccaaaatcaacgggactttccaaaatgtcgtaataaccccgccccgttgacgcaaatgggcggtaggcgtgtacggtgggaggtctatataagcagagctcgtttagtgaaccgtc

SEQ ID NO: 20839 - DNA, 481 bp, synthetic construct
  source 1..481: mol_type = other DNA
aacgacccccgcccattgacgtcaataatgacgtatgttcccatagtaacgccaatagggactttccattgacgtcaatgggtggagtatttacggtaaactgcccacttggcagtacatcaagtgtatcatatgccaagtccgccccctattgacgtcaatgacggtaaatggcccgcctggcattatgcccagtacatgaccttacgggactttcctacttggcagtacatctacgtattagtcatcgctattaccatggtgatgcggttttggcagtacaccaatgggcgtggatagcggtttgactcacggggatttccaagtctccaccccattgacgtcaatgggagtttgttttggcaccaaaatcaacgggactttccaaaatgtcgtaataaccccgccccgttgacgcaaatgggcggtaggcgtgtacggtgggaggtctatataagcagagctcgtttagtgaaccgtc

SEQ ID NO: 20840 - DNA, 480 bp, synthetic construct
  source 1..480: mol_type = other DNA
acgacccccgcccattgacgtcaataatgacgtatgttcccatagtaacgccaatagggactttccattgacgtcaatgggtggagtatttacggtaaactgcccacttggcagtacatcaagtgtatcatatgccaagtccgccccctattgacgtcaatgacggtaaatggcccgcctggcattatgcccagtacatgaccttacgggactttcctacttggcagtacatctacgtattagtcatcgctattaccatggtgatgcggttttggcagtacaccaatgggcgtggatagcggtttgactcacggggatttccaagtctccaccccattgacgtcaatgggagtttgttttggcaccaaaatcaacgggactttccaaaatgtcgtaataaccccgccccgttgacgcaaatgggcggtaggcgtgtacggtgggaggtctatataagcagagctcgtttagtgaaccgtc

SEQ ID NO: 20841 - DNA, 479 bp, synthetic construct
  source 1..479: mol_type = other DNA
cgacccccgcccattgacgtcaataatgacgtatgttcccatagtaacgccaatagggactttccattgacgtcaatgggtggagtatttacggtaaactgcccacttggcagtacatcaagtgtatcatatgccaagtccgccccctattgacgtcaatgacggtaaatggcccgcctggcattatgcccagtacatgaccttacgggactttcctacttggcagtacatctacgtattagtcatcgctattaccatggtgatgcggttttggcagtacaccaatgggcgtggatagcggtttgactcacggggatttccaagtctccaccccattgacgtcaatgggagtttgttttggcaccaaaatcaacgggactttccaaaatgtcgtaataaccccgccccgttgacgcaaatgggcggtaggcgtgtacggtgggaggtctatataagcagagctcgtttagtgaaccgtc

SEQ ID NO: 20842 - DNA, 478 bp, synthetic construct
  source 1..478: mol_type = other DNA
gacccccgcccattgacgtcaataatgacgtatgttcccatagtaacgccaatagggactttccattgacgtcaatgggtggagtatttacggtaaactgcccacttggcagtacatcaagtgtatcatatgccaagtccgccccctattgacgtcaatgacggtaaatggcccgcctggcattatgcccagtacatgaccttacgggactttcctacttggcagtacatctacgtattagtcatcgctattaccatggtgatgcggttttggcagtacaccaatgggcgtggatagcggtttgactcacggggatttccaagtctccaccccattgacgtcaatgggagtttgttttggcaccaaaatcaacgggactttccaaaatgtcgtaataaccccgccccgttgacgcaaatgggcggtaggcgtgtacggtgggaggtctatataagcagagctcgtttagtgaaccgtc

SEQ ID NO: 20843 - DNA, 477 bp, synthetic construct
  source 1..477: mol_type = other DNA
acccccgcccattgacgtcaataatgacgtatgttcccatagtaacgccaatagggactttccattgacgtcaatgggtggagtatttacggtaaactgcccacttggcagtacatcaagtgtatcatatgccaagtccgccccctattgacgtcaatgacggtaaatggcccgcctggcattatgcccagtacatgaccttacgggactttcctacttggcagtacatctacgtattagtcatcgctattaccatggtgatgcggttttggcagtacaccaatgggcgtggatagcggtttgactcacggggatttccaagtctccaccccattgacgtcaatgggagtttgttttggcaccaaaatcaacgggactttccaaaatgtcgtaataaccccgccccgttgacgcaaatgggcggtaggcgtgtacggtgggaggtctatataagcagagctcgtttagtgaaccgtc

SEQ ID NO: 20844 - DNA, 476 bp, synthetic construct
  source 1..476: mol_type = other DNA
cccccgcccattgacgtcaataatgacgtatgttcccatagtaacgccaatagggactttccattgacgtcaatgggtggagtatttacggtaaactgcccacttggcagtacatcaagtgtatcatatgccaagtccgccccctattgacgtcaatgacggtaaatggcccgcctggcattatgcccagtacatgaccttacgggactttcctacttggcagtacatctacgtattagtcatcgctattaccatggtgatgcggttttggcagtacaccaatgggcgtggatagcggtttgactcacggggatttccaagtctccaccccattgacgtcaatgggagtttgttttggcaccaaaatcaacgggactttccaaaatgtcgtaataaccccgccccgttgacgcaaatgggcggtaggcgtgtacggtgggaggtctatataagcagagctcgtttagtgaaccgtc

SEQ ID NO: 20845 - DNA, 475 bp, synthetic construct
  source 1..475: mol_type = other DNA
ccccgcccattgacgtcaataatgacgtatgttcccatagtaacgccaatagggactttccattgacgtcaatgggtggagtatttacggtaaactgcccacttggcagtacatcaagtgtatcatatgccaagtccgccccctattgacgtcaatgacggtaaatggcccgcctggcattatgcccagtacatgaccttacgggactttcctacttggcagtacatctacgtattagtcatcgctattaccatggtgatgcggttttggcagtacaccaatgggcgtggatagcggtttgactcacggggatttccaagtctccaccccattgacgtcaatgggagtttgttttggcaccaaaatcaacgggactttccaaaatgtcgtaataaccccgccccgttgacgcaaatgggcggtaggcgtgtacggtgggaggtctatataagcagagctcgtttagtgaaccgtc

SEQ ID NO: 20846 - DNA, 474 bp, synthetic construct
  source 1..474: mol_type = other DNA
cccgcccattgacgtcaataatgacgtatgttcccatagtaacgccaatagggactttccattgacgtcaatgggtggagtatttacggtaaactgcccacttggcagtacatcaagtgtatcatatgccaagtccgccccctattgacgtcaatgacggtaaatggcccgcctggcattatgcccagtacatgaccttacgggactttcctacttggcagtacatctacgtattagtcatcgctattaccatggtgatgcggttttggcagtacaccaatgggcgtggatagcggtttgactcacggggatttccaagtctccaccccattgacgtcaatgggagtttgttttggcaccaaaatcaacgggactttccaaaatgtcgtaataaccccgccccgttgacgcaaatgggcggtaggcgtgtacggtgggaggtctatataagcagagctcgtttagtgaaccgtc

SEQ ID NO: 20847 - DNA, 473 bp, synthetic construct
  source 1..473: mol_type = other DNA
ccgcccattgacgtcaataatgacgtatgttcccatagtaacgccaatagggactttccattgacgtcaatgggtggagtatttacggtaaactgcccacttggcagtacatcaagtgtatcatatgccaagtccgccccctattgacgtcaatgacggtaaatggcccgcctggcattatgcccagtacatgaccttacgggactttcctacttggcagtacatctacgtattagtcatcgctattaccatggtgatgcggttttggcagtacaccaatgggcgtggatagcggtttgactcacggggatttccaagtctccaccccattgacgtcaatgggagtttgttttggcaccaaaatcaacgggactttccaaaatgtcgtaataaccccgccccgttgacgcaaatgggcggtaggcgtgtacggtgggaggtctatataagcagagctcgtttagtgaaccgtc

SEQ ID NO: 20848 - DNA, 472 bp, synthetic construct
  source 1..472: mol_type = other DNA
cgcccattgacgtcaataatgacgtatgttcccatagtaacgccaatagggactttccattgacgtcaatgggtggagtatttacggtaaactgcccacttggcagtacatcaagtgtatcatatgccaagtccgccccctattgacgtcaatgacggtaaatggcccgcctggcattatgcccagtacatgaccttacgggactttcctacttggcagtacatctacgtattagtcatcgctattaccatggtgatgcggttttggcagtacaccaatgggcgtggatagcggtttgactcacggggatttccaagtctccaccccattgacgtcaatgggagtttgttttggcaccaaaatcaacgggactttccaaaatgtcgtaataaccccgccccgttgacgcaaatgggcggtaggcgtgtacggtgggaggtctatataagcagagctcgtttagtgaaccgtc

SEQ ID NO: 20849 - DNA, 471 bp, synthetic construct
  source 1..471: mol_type = other DNA
gcccattgacgtcaataatgacgtatgttcccatagtaacgccaatagggactttccattgacgtcaatgggtggagtatttacggtaaactgcccacttggcagtacatcaagtgtatcatatgccaagtccgccccctattgacgtcaatgacggtaaatggcccgcctggcattatgcccagtacatgaccttacgggactttcctacttggcagtacatctacgtattagtcatcgctattaccatggtgatgcggttttggcagtacaccaatgggcgtggatagcggtttgactcacggggatttccaagtctccaccccattgacgtcaatgggagtttgttttggcaccaaaatcaacgggactttccaaaatgtcgtaataaccccgccccgttgacgcaaatgggcggtaggcgtgtacggtgggaggtctatataagcagagctcgtttagtgaaccgtc

SEQ ID NO: 20850 - DNA, 470 bp, synthetic construct
  source 1..470: mol_type = other DNA
cccattgacgtcaataatgacgtatgttcccatagtaacgccaatagggactttccattgacgtcaatgggtggagtatttacggtaaactgcccacttggcagtacatcaagtgtatcatatgccaagtccgccccctattgacgtcaatgacggtaaatggcccgcctggcattatgcccagtacatgaccttacgggactttcctacttggcagtacatctacgtattagtcatcgctattaccatggtgatgcggttttggcagtacaccaatgggcgtggatagcggtttgactcacggggatttccaagtctccaccccattgacgtcaatgggagtttgttttggcaccaaaatcaacgggactttccaaaatgtcgtaataaccccgccccgttgacgcaaatgggcggtaggcgtgtacggtgggaggtctatataagcagagctcgtttagtgaaccgtc

SEQ ID NO: 20851 - DNA, 469 bp, synthetic construct
  source 1..469: mol_type = other DNA
ccattgacgtcaataatgacgtatgttcccatagtaacgccaatagggactttccattgacgtcaatgggtggagtatttacggtaaactgcccacttggcagtacatcaagtgtatcatatgccaagtccgccccctattgacgtcaatgacggtaaatggcccgcctggcattatgcccagtacatgaccttacgggactttcctacttggcagtacatctacgtattagtcatcgctattaccatggtgatgcggttttggcagtacaccaatgggcgtggatagcggtttgactcacggggatttccaagtctccaccccattgacgtcaatgggagtttgttttggcaccaaaatcaacgggactttccaaaatgtcgtaataaccccgccccgttgacgcaaatgggcggtaggcgtgtacggtgggaggtctatataagcagagctcgtttagtgaaccgtc

SEQ ID NO: 20852 - DNA, 468 bp, synthetic construct
  source 1..468: mol_type = other DNA
cattgacgtcaataatgacgtatgttcccatagtaacgccaatagggactttccattgacgtcaatgggtggagtatttacggtaaactgcccacttggcagtacatcaagtgtatcatatgccaagtccgccccctattgacgtcaatgacggtaaatggcccgcctggcattatgcccagtacatgaccttacgggactttcctacttggcagtacatctacgtattagtcatcgctattaccatggtgatgcggttttggcagtacaccaatgggcgtggatagcggtttgactcacggggatttccaagtctccaccccattgacgtcaatgggagtttgttttggcaccaaaatcaacgggactttccaaaatgtcgtaataaccccgccccgttgacgcaaatgggcggtaggcgtgtacggtgggaggtctatataagcagagctcgtttagtgaaccgtc

SEQ ID NO: 20853 - DNA, 467 bp, synthetic construct
  source 1..467: mol_type = other DNA
attgacgtcaataatgacgtatgttcccatagtaacgccaatagggactttccattgacgtcaatgggtggagtatttacggtaaactgcccacttggcagtacatcaagtgtatcatatgccaagtccgccccctattgacgtcaatgacggtaaatggcccgcctggcattatgcccagtacatgaccttacgggactttcctacttggcagtacatctacgtattagtcatcgctattaccatggtgatgcggttttggcagtacaccaatgggcgtggatagcggtttgactcacggggatttccaagtctccaccccattgacgtcaatgggagtttgttttggcaccaaaatcaacgggactttccaaaatgtcgtaataaccccgccccgttgacgcaaatgggcggtaggcgtgtacggtgggaggtctatataagcagagctcgtttagtgaaccgtc

SEQ ID NO: 20854 - DNA, 466 bp, synthetic construct
  source 1..466: mol_type = other DNA
ttgacgtcaataatgacgtatgttcccatagtaacgccaatagggactttccattgacgtcaatgggtggagtatttacggtaaactgcccacttggcagtacatcaagtgtatcatatgccaagtccgccccctattgacgtcaatgacggtaaatggcccgcctggcattatgcccagtacatgaccttacgggactttcctacttggcagtacatctacgtattagtcatcgctattaccatggtgatgcggttttggcagtacaccaatgggcgtggatagcggtttgactcacggggatttccaagtctccaccccattgacgtcaatgggagtttgttttggcaccaaaatcaacgggactttccaaaatgtcgtaataaccccgccccgttgacgcaaatgggcggtaggcgtgtacggtgggaggtctatataagcagagctcgtttagtgaaccgtc

SEQ ID NO: 20855 - DNA, 465 bp, synthetic construct
  source 1..465: mol_type = other DNA
tgacgtcaataatgacgtatgttcccatagtaacgccaatagggactttccattgacgtcaatgggtggagtatttacggtaaactgcccacttggcagtacatcaagtgtatcatatgccaagtccgccccctattgacgtcaatgacggtaaatggcccgcctggcattatgcccagtacatgaccttacgggactttcctacttggcagtacatctacgtattagtcatcgctattaccatggtgatgcggttttggcagtacaccaatgggcgtggatagcggtttgactcacggggatttccaagtctccaccccattgacgtcaatgggagtttgttttggcaccaaaatcaacgggactttccaaaatgtcgtaataaccccgccccgttgacgcaaatgggcggtaggcgtgtacggtgggaggtctatataagcagagctcgtttagtgaaccgtc

SEQ ID NO: 20856 - DNA, 464 bp, synthetic construct
  source 1..464: mol_type = other DNA
gacgtcaataatgacgtatgttcccatagtaacgccaatagggactttccattgacgtcaatgggtggagtatttacggtaaactgcccacttggcagtacatcaagtgtatcatatgccaagtccgccccctattgacgtcaatgacggtaaatggcccgcctggcattatgcccagtacatgaccttacgggactttcctacttggcagtacatctacgtattagtcatcgctattaccatggtgatgcggttttggcagtacaccaatgggcgtggatagcggtttgactcacggggatttccaagtctccaccccattgacgtcaatgggagtttgttttggcaccaaaatcaacgggactttccaaaatgtcgtaataaccccgccccgttgacgcaaatgggcggtaggcgtgtacggtgggaggtctatataagcagagctcgtttagtgaaccgtc

SEQ ID NO: 20857 - DNA, 463 bp, synthetic construct
  source 1..463: mol_type = other DNA
acgtcaataatgacgtatgttcccatagtaacgccaatagggactttccattgacgtcaatgggtggagtatttacggtaaactgcccacttggcagtacatcaagtgtatcatatgccaagtccgccccctattgacgtcaatgacggtaaatggcccgcctggcattatgcccagtacatgaccttacgggactttcctacttggcagtacatctacgtattagtcatcgctattaccatggtgatgcggttttggcagtacaccaatgggcgtggatagcggtttgactcacggggatttccaagtctccaccccattgacgtcaatgggagtttgttttggcaccaaaatcaacgggactttccaaaatgtcgtaataaccccgccccgttgacgcaaatgggcggtaggcgtgtacggtgggaggtctatataagcagagctcgtttagtgaaccgtc

SEQ ID NO: 20858 - DNA, 462 bp, synthetic construct
  source 1..462: mol_type = other DNA
cgtcaataatgacgtatgttcccatagtaacgccaatagggactttccattgacgtcaatgggtggagtatttacggtaaactgcccacttggcagtacatcaagtgtatcatatgccaagtccgccccctattgacgtcaatgacggtaaatggcccgcctggcattatgcccagtacatgaccttacgggactttcctacttggcagtacatctacgtattagtcatcgctattaccatggtgatgcggttttggcagtacaccaatgggcgtggatagcggtttgactcacggggatttccaagtctccaccccattgacgtcaatgggagtttgttttggcaccaaaatcaacgggactttccaaaatgtcgtaataaccccgccccgttgacgcaaatgggcggtaggcgtgtacggtgggaggtctatataagcagagctcgtttagtgaaccgtc

SEQ ID NO: 20859 - DNA, 461 bp, synthetic construct
  source 1..461: mol_type = other DNA
gtcaataatgacgtatgttcccatagtaacgccaatagggactttccattgacgtcaatgggtggagtatttacggtaaactgcccacttggcagtacatcaagtgtatcatatgccaagtccgccccctattgacgtcaatgacggtaaatggcccgcctggcattatgcccagtacatgaccttacgggactttcctacttggcagtacatctacgtattagtcatcgctattaccatggtgatgcggttttggcagtacaccaatgggcgtggatagcggtttgactcacggggatttccaagtctccaccccattgacgtcaatgggagtttgttttggcaccaaaatcaacgggactttccaaaatgtcgtaataaccccgccccgttgacgcaaatgggcggtaggcgtgtacggtgggaggtctatataagcagagctcgtttagtgaaccgtc

SEQ ID NO: 20860 - DNA, 460 bp, synthetic construct
  source 1..460: mol_type = other DNA
tcaataatgacgtatgttcccatagtaacgccaatagggactttccattgacgtcaatgggtggagtatttacggtaaactgcccacttggcagtacatcaagtgtatcatatgccaagtccgccccctattgacgtcaatgacggtaaatggcccgcctggcattatgcccagtacatgaccttacgggactttcctacttggcagtacatctacgtattagtcatcgctattaccatggtgatgcggttttggcagtacaccaatgggcgtggatagcggtttgactcacggggatttccaagtctccaccccattgacgtcaatgggagtttgttttggcaccaaaatcaacgggactttccaaaatgtcgtaataaccccgccccgttgacgcaaatgggcggtaggcgtgtacggtgggaggtctatataagcagagctcgtttagtgaaccgtc

SEQ ID NO: 20861 - DNA, 459 bp, synthetic construct
  source 1..459: mol_type = other DNA
caataatgacgtatgttcccatagtaacgccaatagggactttccattgacgtcaatgggtggagtatttacggtaaactgcccacttggcagtacatcaagtgtatcatatgccaagtccgccccctattgacgtcaatgacggtaaatggcccgcctggcattatgcccagtacatgaccttacgggactttcctacttggcagtacatctacgtattagtcatcgctattaccatggtgatgcggttttggcagtacaccaatgggcgtggatagcggtttgactcacggggatttccaagtctccaccccattgacgtcaatgggagtttgttttggcaccaaaatcaacgggactttccaaaatgtcgtaataaccccgccccgttgacgcaaatgggcggtaggcgtgtacggtgggaggtctatataagcagagctcgtttagtgaaccgtc

SEQ ID NO: 20862 - DNA, 458 bp, synthetic construct
  source 1..458: mol_type = other DNA
aataatgacgtatgttcccatagtaacgccaatagggactttccattgacgtcaatgggtggagtatttacggtaaactgcccacttggcagtacatcaagtgtatcatatgccaagtccgccccctattgacgtcaatgacggtaaatggcccgcctggcattatgcccagtacatgaccttacgggactttcctacttggcagtacatctacgtattagtcatcgctattaccatggtgatgcggttttggcagtacaccaatgggcgtggatagcggtttgactcacggggatttccaagtctccaccccattgacgtcaatgggagtttgttttggcaccaaaatcaacgggactttccaaaatgtcgtaataaccccgccccgttgacgcaaatgggcggtaggcgtgtacggtgggaggtctatataagcagagctcgtttagtgaaccgtc

SEQ ID NO: 20863 - DNA, 457 bp, synthetic construct
  source 1..457: mol_type = other DNA
ataatgacgtatgttcccatagtaacgccaatagggactttccattgacgtcaatgggtggagtatttacggtaaactgcccacttggcagtacatcaagtgtatcatatgccaagtccgccccctattgacgtcaatgacggtaaatggcccgcctggcattatgcccagtacatgaccttacgggactttcctacttggcagtacatctacgtattagtcatcgctattaccatggtgatgcggttttggcagtacaccaatgggcgtggatagcggtttgactcacggggatttccaagtctccaccccattgacgtcaatgggagtttgttttggcaccaaaatcaacgggactttccaaaatgtcgtaataaccccgccccgttgacgcaaatgggcggtaggcgtgtacggtgggaggtctatataagcagagctcgtttagtgaaccgtc

SEQ ID NO: 20864 - DNA, 456 bp, synthetic construct
  source 1..456: mol_type = other DNA
taatgacgtatgttcccatagtaacgccaatagggactttccattgacgtcaatgggtggagtatttacggtaaactgcccacttggcagtacatcaagtgtatcatatgccaagtccgccccctattgacgtcaatgacggtaaatggcccgcctggcattatgcccagtacatgaccttacgggactttcctacttggcagtacatctacgtattagtcatcgctattaccatggtgatgcggttttggcagtacaccaatgggcgtggatagcggtttgactcacggggatttccaagtctccaccccattgacgtcaatgggagtttgttttggcaccaaaatcaacgggactttccaaaatgtcgtaataaccccgccccgttgacgcaaatgggcggtaggcgtgtacggtgggaggtctatataagcagagctcgtttagtgaaccgtc

SEQ ID NO: 20865 - DNA, 455 bp, synthetic construct
  source 1..455: mol_type = other DNA
aatgacgtatgttcccatagtaacgccaatagggactttccattgacgtcaatgggtggagtatttacggtaaactgcccacttggcagtacatcaagtgtatcatatgccaagtccgccccctattgacgtcaatgacggtaaatggcccgcctggcattatgcccagtacatgaccttacgggactttcctacttggcagtacatctacgtattagtcatcgctattaccatggtgatgcggttttggcagtacaccaatgggcgtggatagcggtttgactcacggggatttccaagtctccaccccattgacgtcaatgggagtttgttttggcaccaaaatcaacgggactttccaaaatgtcgtaataaccccgccccgttgacgcaaatgggcggtaggcgtgtacggtgggaggtctatataagcagagctcgtttagtgaaccgtc

SEQ ID NO: 20866 - DNA, 454 bp, synthetic construct
  source 1..454: mol_type = other DNA
atgacgtatgttcccatagtaacgccaatagggactttccattgacgtcaatgggtggagtatttacggtaaactgcccacttggcagtacatcaagtgtatcatatgccaagtccgccccctattgacgtcaatgacggtaaatggcccgcctggcattatgcccagtacatgaccttacgggactttcctacttggcagtacatctacgtattagtcatcgctattaccatggtgatgcggttttggcagtacaccaatgggcgtggatagcggtttgactcacggggatttccaagtctccaccccattgacgtcaatgggagtttgttttggcaccaaaatcaacgggactttccaaaatgtcgtaataaccccgccccgttgacgcaaatgggcggtaggcgtgtacggtgggaggtctatataagcagagctcgtttagtgaaccgtc

SEQ ID NO: 20867 - DNA, 453 bp, synthetic construct
  source 1..453: mol_type = other DNA
tgacgtatgttcccatagtaacgccaatagggactttccattgacgtcaatgggtggagtatttacggtaaactgcccacttggcagtacatcaagtgtatcatatgccaagtccgccccctattgacgtcaatgacggtaaatggcccgcctggcattatgcccagtacatgaccttacgggactttcctacttggcagtacatctacgtattagtcatcgctattaccatggtgatgcggttttggcagtacaccaatgggcgtggatagcggtttgactcacggggatttccaagtctccaccccattgacgtcaatgggagtttgttttggcaccaaaatcaacgggactttccaaaatgtcgtaataaccccgccccgttgacgcaaatgggcggtaggcgtgtacggtgggaggtctatataagcagagctcgtttagtgaaccgtc

SEQ ID NO: 20868 - DNA, 452 bp, synthetic construct
  source 1..452: mol_type = other DNA
gacgtatgttcccatagtaacgccaatagggactttccattgacgtcaatgggtggagtatttacggtaaactgcccacttggcagtacatcaagtgtatcatatgccaagtccgccccctattgacgtcaatgacggtaaatggcccgcctggcattatgcccagtacatgaccttacgggactttcctacttggcagtacatctacgtattagtcatcgctattaccatggtgatgcggttttggcagtacaccaatgggcgtggatagcggtttgactcacggggatttccaagtctccaccccattgacgtcaatgggagtttgttttggcaccaaaatcaacgggactttccaaaatgtcgtaataaccccgccccgttgacgcaaatgggcggtaggcgtgtacggtgggaggtctatataagcagagctcgtttagtgaaccgtc

SEQ ID NO: 20869 - DNA, 451 bp, synthetic construct
  source 1..451: mol_type = other DNA
acgtatgttcccatagtaacgccaatagggactttccattgacgtcaatgggtggagtatttacggtaaactgcccacttggcagtacatcaagtgtatcatatgccaagtccgccccctattgacgtcaatgacggtaaatggcccgcctggcattatgcccagtacatgaccttacgggactttcctacttggcagtacatctacgtattagtcatcgctattaccatggtgatgcggttttggcagtacaccaatgggcgtggatagcggtttgactcacggggatttccaagtctccaccccattgacgtcaatgggagtttgttttggcaccaaaatcaacgggactttccaaaatgtcgtaataaccccgccccgttgacgcaaatgggcggtaggcgtgtacggtgggaggtctatataagcagagctcgtttagtgaaccgtc

SEQ ID NO: 20870 - DNA, 450 bp, synthetic construct
  source 1..450: mol_type = other DNA
cgtatgttcccatagtaacgccaatagggactttccattgacgtcaatgggtggagtatttacggtaaactgcccacttggcagtacatcaagtgtatcatatgccaagtccgccccctattgacgtcaatgacggtaaatggcccgcctggcattatgcccagtacatgaccttacgggactttcctacttggcagtacatctacgtattagtcatcgctattaccatggtgatgcggttttggcagtacaccaatgggcgtggatagcggtttgactcacggggatttccaagtctccaccccattgacgtcaatgggagtttgttttggcaccaaaatcaacgggactttccaaaatgtcgtaataaccccgccccgttgacgcaaatgggcggtaggcgtgtacggtgggaggtctatataagcagagctcgtttagtgaaccgtc

SEQ ID NO: 20871 - DNA, 449 bp, synthetic construct
  source 1..449: mol_type = other DNA
gtatgttcccatagtaacgccaatagggactttccattgacgtcaatgggtggagtatttacggtaaactgcccacttggcagtacatcaagtgtatcatatgccaagtccgccccctattgacgtcaatgacggtaaatggcccgcctggcattatgcccagtacatgaccttacgggactttcctacttggcagtacatctacgtattagtcatcgctattaccatggtgatgcggttttggcagtacaccaatgggcgtggatagcggtttgactcacggggatttccaagtctccaccccattgacgtcaatgggagtttgttttggcaccaaaatcaacgggactttccaaaatgtcgtaataaccccgccccgttgacgcaaatgggcggtaggcgtgtacggtgggaggtctatataagcagagctcgtttagtgaaccgtc

SEQ ID NO: 20872 - DNA, 448 bp, synthetic construct
  source 1..448: mol_type = other DNA
tatgttcccatagtaacgccaatagggactttccattgacgtcaatgggtggagtatttacggtaaactgcccacttggcagtacatcaagtgtatcatatgccaagtccgccccctattgacgtcaatgacggtaaatggcccgcctggcattatgcccagtacatgaccttacgggactttcctacttggcagtacatctacgtattagtcatcgctattaccatggtgatgcggttttggcagtacaccaatgggcgtggatagcggtttgactcacggggatttccaagtctccaccccattgacgtcaatgggagtttgttttggcaccaaaatcaacgggactttccaaaatgtcgtaataaccccgccccgttgacgcaaatgggcggtaggcgtgtacggtgggaggtctatataagcagagctcgtttagtgaaccgtc

SEQ ID NO: 20873 - DNA, 447 bp, synthetic construct
  source 1..447: mol_type = other DNA
atgttcccatagtaacgccaatagggactttccattgacgtcaatgggtggagtatttacggtaaactgcccacttggcagtacatcaagtgtatcatatgccaagtccgccccctattgacgtcaatgacggtaaatggcccgcctggcattatgcccagtacatgaccttacgggactttcctacttggcagtacatctacgtattagtcatcgctattaccatggtgatgcggttttggcagtacaccaatgggcgtggatagcggtttgactcacggggatttccaagtctccaccccattgacgtcaatgggagtttgttttggcaccaaaatcaacgggactttccaaaatgtcgtaataaccccgccccgttgacgcaaatgggcggtaggcgtgtacggtgggaggtctatataagcagagctcgtttagtgaaccgtc

SEQ ID NO: 20874 - DNA, 446 bp, synthetic construct
  source 1..446: mol_type = other DNA
tgttcccatagtaacgccaatagggactttccattgacgtcaatgggtggagtatttacggtaaactgcccacttggcagtacatcaagtgtatcatatgccaagtccgccccctattgacgtcaatgacggtaaatggcccgcctggcattatgcccagtacatgaccttacgggactttcctacttggcagtacatctacgtattagtcatcgctattaccatggtgatgcggttttggcagtacaccaatgggcgtggatagcggtttgactcacggggatttccaagtctccaccccattgacgtcaatgggagtttgttttggcaccaaaatcaacgggactttccaaaatgtcgtaataaccccgccccgttgacgcaaatgggcggtaggcgtgtacggtgggaggtctatataagcagagctcgtttagtgaaccgtc

SEQ ID NO: 20875 - DNA, 445 bp, synthetic construct
  source 1..445: mol_type = other DNA
gttcccatagtaacgccaatagggactttccattgacgtcaatgggtggagtatttacggtaaactgcccacttggcagtacatcaagtgtatcatatgccaagtccgccccctattgacgtcaatgacggtaaatggcccgcctggcattatgcccagtacatgaccttacgggactttcctacttggcagtacatctacgtattagtcatcgctattaccatggtgatgcggttttggcagtacaccaatgggcgtggatagcggtttgactcacggggatttccaagtctccaccccattgacgtcaatgggagtttgttttggcaccaaaatcaacgggactttccaaaatgtcgtaataaccccgccccgttgacgcaaatgggcggtaggcgtgtacggtgggaggtctatataagcagagctcgtttagtgaaccgtc

SEQ ID NO: 20876 - DNA, 444 bp, synthetic construct
  source 1..444: mol_type = other DNA
ttcccatagtaacgccaatagggactttccattgacgtcaatgggtggagtatttacggtaaactgcccacttggcagtacatcaagtgtatcatatgccaagtccgccccctattgacgtcaatgacggtaaatggcccgcctggcattatgcccagtacatgaccttacgggactttcctacttggcagtacatctacgtattagtcatcgctattaccatggtgatgcggttttggcagtacaccaatgggcgtggatagcggtttgactcacggggatttccaagtctccaccccattgacgtcaatgggagtttgttttggcaccaaaatcaacgggactttccaaaatgtcgtaataaccccgccccgttgacgcaaatgggcggtaggcgtgtacggtgggaggtctatataagcagagctcgtttagtgaaccgtc

SEQ ID NO: 20877 - DNA, 443 bp, synthetic construct
  source 1..443: mol_type = other DNA
tcccatagtaacgccaatagggactttccattgacgtcaatgggtggagtatttacggtaaactgcccacttggcagtacatcaagtgtatcatatgccaagtccgccccctattgacgtcaatgacggtaaatggcccgcctggcattatgcccagtacatgaccttacgggactttcctacttggcagtacatctacgtattagtcatcgctattaccatggtgatgcggttttggcagtacaccaatgggcgtggatagcggtttgactcacggggatttccaagtctccaccccattgacgtcaatgggagtttgttttggcaccaaaatcaacgggactttccaaaatgtcgtaataaccccgccccgttgacgcaaatgggcggtaggcgtgtacggtgggaggtctatataagcagagctcgtttagtgaaccgtc

SEQ ID NO: 20878 - DNA, 442 bp, synthetic construct
  source 1..442: mol_type = other DNA
cccatagtaacgccaatagggactttccattgacgtcaatgggtggagtatttacggtaaactgcccacttggcagtacatcaagtgtatcatatgccaagtccgccccctattgacgtcaatgacggtaaatggcccgcctggcattatgcccagtacatgaccttacgggactttcctacttggcagtacatctacgtattagtcatcgctattaccatggtgatgcggttttggcagtacaccaatgggcgtggatagcggtttgactcacggggatttccaagtctccaccccattgacgtcaatgggagtttgttttggcaccaaaatcaacgggactttccaaaatgtcgtaataaccccgccccgttgacgcaaatgggcggtaggcgtgtacggtgggaggtctatataagcagagctcgtttagtgaaccgtc

SEQ ID NO: 20879 - DNA, 441 bp, synthetic construct
  source 1..441: mol_type = other DNA
ccatagtaacgccaatagggactttccattgacgtcaatgggtggagtatttacggtaaactgcccacttggcagtacatcaagtgtatcatatgccaagtccgccccctattgacgtcaatgacggtaaatggcccgcctggcattatgcccagtacatgaccttacgggactttcctacttggcagtacatctacgtattagtcatcgctattaccatggtgatgcggttttggcagtacaccaatgggcgtggatagcggtttgactcacggggatttccaagtctccaccccattgacgtcaatgggagtttgttttggcaccaaaatcaacgggactttccaaaatgtcgtaataaccccgccccgttgacgcaaatgggcggtaggcgtgtacggtgggaggtctatataagcagagctcgtttagtgaaccgtc

SEQ ID NO: 20880 - DNA, 440 bp, synthetic construct
  source 1..440: mol_type = other DNA
catagtaacgccaatagggactttccattgacgtcaatgggtggagtatttacggtaaactgcccacttggcagtacatcaagtgtatcatatgccaagtccgccccctattgacgtcaatgacggtaaatggcccgcctggcattatgcccagtacatgaccttacgggactttcctacttggcagtacatctacgtattagtcatcgctattaccatggtgatgcggttttggcagtacaccaatgggcgtggatagcggtttgactcacggggatttccaagtctccaccccattgacgtcaatgggagtttgttttggcaccaaaatcaacgggactttccaaaatgtcgtaataaccccgccccgttgacgcaaatgggcggtaggcgtgtacggtgggaggtctatataagcagagctcgtttagtgaaccgtc

SEQ ID NO: 20881 - DNA, 439 bp, synthetic construct
  source 1..439: mol_type = other DNA
atagtaacgccaatagggactttccattgacgtcaatgggtggagtatttacggtaaactgcccacttggcagtacatcaagtgtatcatatgccaagtccgccccctattgacgtcaatgacggtaaatggcccgcctggcattatgcccagtacatgaccttacgggactttcctacttggcagtacatctacgtattagtcatcgctattaccatggtgatgcggttttggcagtacaccaatgggcgtggatagcggtttgactcacggggatttccaagtctccaccccattgacgtcaatgggagtttgttttggcaccaaaatcaacgggactttccaaaatgtcgtaataaccccgccccgttgacgcaaatgggcggtaggcgtgtacggtgggaggtctatataagcagagctcgtttagtgaaccgtc

SEQ ID NO: 20882 - DNA, 438 bp, synthetic construct
  source 1..438: mol_type = other DNA
tagtaacgccaatagggactttccattgacgtcaatgggtggagtatttacggtaaactgcccacttggcagtacatcaagtgtatcatatgccaagtccgccccctattgacgtcaatgacggtaaatggcccgcctggcattatgcccagtacatgaccttacgggactttcctacttggcagtacatctacgtattagtcatcgctattaccatggtgatgcggttttggcagtacaccaatgggcgtggatagcggtttgactcacggggatttccaagtctccaccccattgacgtcaatgggagtttgttttggcaccaaaatcaacgggactttccaaaatgtcgtaataaccccgccccgttgacgcaaatgggcggtaggcgtgtacggtgggaggtctatataagcagagctcgtttagtgaaccgtc

SEQ ID NO: 20883 - DNA, 437 bp, synthetic construct
  source 1..437: mol_type = other DNA
agtaacgccaatagggactttccattgacgtcaatgggtggagtatttacggtaaactgcccacttggcagtacatcaagtgtatcatatgccaagtccgccccctattgacgtcaatgacggtaaatggcccgcctggcattatgcccagtacatgaccttacgggactttcctacttggcagtacatctacgtattagtcatcgctattaccatggtgatgcggttttggcagtacaccaatgggcgtggatagcggtttgactcacggggatttccaagtctccaccccattgacgtcaatgggagtttgttttggcaccaaaatcaacgggactttccaaaatgtcgtaataaccccgccccgttgacgcaaatgggcggtaggcgtgtacggtgggaggtctatataagcagagctcgtttagtgaaccgtc

SEQ ID NO: 20884 - DNA, 436 bp, synthetic construct
  source 1..436: mol_type = other DNA
gtaacgccaatagggactttccattgacgtcaatgggtggagtatttacggtaaactgcccacttggcagtacatcaagtgtatcatatgccaagtccgccccctattgacgtcaatgacggtaaatggcccgcctggcattatgcccagtacatgaccttacgggactttcctacttggcagtacatctacgtattagtcatcgctattaccatggtgatgcggttttggcagtacaccaatgggcgtggatagcggtttgactcacggggatttccaagtctccaccccattgacgtcaatgggagtttgttttggcaccaaaatcaacgggactttccaaaatgtcgtaataaccccgccccgttgacgcaaatgggcggtaggcgtgtacggtgggaggtctatataagcagagctcgtttagtgaaccgtc

SEQ ID NO: 20885 - DNA, 435 bp, synthetic construct
  source 1..435: mol_type = other DNA
taacgccaatagggactttccattgacgtcaatgggtggagtatttacggtaaactgcccacttggcagtacatcaagtgtatcatatgccaagtccgccccctattgacgtcaatgacggtaaatggcccgcctggcattatgcccagtacatgaccttacgggactttcctacttggcagtacatctacgtattagtcatcgctattaccatggtgatgcggttttggcagtacaccaatgggcgtggatagcggtttgactcacggggatttccaagtctccaccccattgacgtcaatgggagtttgttttggcaccaaaatcaacgggactttccaaaatgtcgtaataaccccgccccgttgacgcaaatgggcggtaggcgtgtacggtgggaggtctatataagcagagctcgtttagtgaaccgtc

SEQ ID NO: 20886 - DNA, 434 bp, synthetic construct
  source 1..434: mol_type = other DNA
aacgccaatagggactttccattgacgtcaatgggtggagtatttacggtaaactgcccacttggcagtacatcaagtgtatcatatgccaagtccgccccctattgacgtcaatgacggtaaatggcccgcctggcattatgcccagtacatgaccttacgggactttcctacttggcagtacatctacgtattagtcatcgctattaccatggtgatgcggttttggcagtacaccaatgggcgtggatagcggtttgactcacggggatttccaagtctccaccccattgacgtcaatgggagtttgttttggcaccaaaatcaacgggactttccaaaatgtcgtaataaccccgccccgttgacgcaaatgggcggtaggcgtgtacggtgggaggtctatataagcagagctcgtttagtgaaccgtc

SEQ ID NO: 20887 - DNA, 433 bp, synthetic construct
  source 1..433: mol_type = other DNA
acgccaatagggactttccattgacgtcaatgggtggagtatttacggtaaactgcccacttggcagtacatcaagtgtatcatatgccaagtccgccccctattgacgtcaatgacggtaaatggcccgcctggcattatgcccagtacatgaccttacgggactttcctacttggcagtacatctacgtattagtcatcgctattaccatggtgatgcggttttggcagtacaccaatgggcgtggatagcggtttgactcacggggatttccaagtctccaccccattgacgtcaatgggagtttgttttggcaccaaaatcaacgggactttccaaaatgtcgtaataaccccgccccgttgacgcaaatgggcggtaggcgtgtacggtgggaggtctatataagcagagctcgtttagtgaaccgtc

SEQ ID NO: 20888 - DNA, 432 bp, synthetic construct
  source 1..432: mol_type = other DNA
cgccaatagggactttccattgacgtcaatgggtggagtatttacggtaaactgcccacttggcagtacatcaagtgtatcatatgccaagtccgccccctattgacgtcaatgacggtaaatggcccgcctggcattatgcccagtacatgaccttacgggactttcctacttggcagtacatctacgtattagtcatcgctattaccatggtgatgcggttttggcagtacaccaatgggcgtggatagcggtttgactcacggggatttccaagtctccaccccattgacgtcaatgggagtttgttttggcaccaaaatcaacgggactttccaaaatgtcgtaataaccccgccccgttgacgcaaatgggcggtaggcgtgtacggtgggaggtctatataagcagagctcgtttagtgaaccgtc

SEQ ID NO: 20889 - DNA, 431 bp, synthetic construct
  source 1..431: mol_type = other DNA
gccaatagggactttccattgacgtcaatgggtggagtatttacggtaaactgcccacttggcagtacatcaagtgtatcatatgccaagtccgccccctattgacgtcaatgacggtaaatggcccgcctggcattatgcccagtacatgaccttacgggactttcctacttggcagtacatctacgtattagtcatcgctattaccatggtgatgcggttttggcagtacaccaatgggcgtggatagcggtttgactcacggggatttccaagtctccaccccattgacgtcaatgggagtttgttttggcaccaaaatcaacgggactttccaaaatgtcgtaataaccccgccccgttgacgcaaatgggcggtaggcgtgtacggtgggaggtctatataagcagagctcgtttagtgaaccgtc

SEQ ID NO: 20890 - DNA, 430 bp, synthetic construct
  source 1..430: mol_type = other DNA
ccaatagggactttccattgacgtcaatgggtggagtatttacggtaaactgcccacttggcagtacatcaagtgtatcatatgccaagtccgccccctattgacgtcaatgacggtaaatggcccgcctggcattatgcccagtacatgaccttacgggactttcctacttggcagtacatctacgtattagtcatcgctattaccatggtgatgcggttttggcagtacaccaatgggcgtggatagcggtttgactcacggggatttccaagtctccaccccattgacgtcaatgggagtttgttttggcaccaaaatcaacgggactttccaaaatgtcgtaataaccccgccccgttgacgcaaatgggcggtaggcgtgtacggtgggaggtctatataagcagagctcgtttagtgaaccgtc

SEQ ID NO: 20891 - DNA, 429 bp, synthetic construct
  source 1..429: mol_type = other DNA
caatagggactttccattgacgtcaatgggtggagtatttacggtaaactgcccacttggcagtacatcaagtgtatcatatgccaagtccgccccctattgacgtcaatgacggtaaatggcccgcctggcattatgcccagtacatgaccttacgggactttcctacttggcagtacatctacgtattagtcatcgctattaccatggtgatgcggttttggcagtacaccaatgggcgtggatagcggtttgactcacggggatttccaagtctccaccccattgacgtcaatgggagtttgttttggcaccaaaatcaacgggactttccaaaatgtcgtaataaccccgccccgttgacgcaaatgggcggtaggcgtgtacggtgggaggtctatataagcagagctcgtttagtgaaccgtc

SEQ ID NO: 20892 - DNA, 428 bp, synthetic construct
  source 1..428: mol_type = other DNA
aatagggactttccattgacgtcaatgggtggagtatttacggtaaactgcccacttggcagtacatcaagtgtatcatatgccaagtccgccccctattgacgtcaatgacggtaaatggcccgcctggcattatgcccagtacatgaccttacgggactttcctacttggcagtacatctacgtattagtcatcgctattaccatggtgatgcggttttggcagtacaccaatgggcgtggatagcggtttgactcacggggatttccaagtctccaccccattgacgtcaatgggagtttgttttggcaccaaaatcaacgggactttccaaaatgtcgtaataaccccgccccgttgacgcaaatgggcggtaggcgtgtacggtgggaggtctatataagcagagctcgtttagtgaaccgtc

SEQ ID NO: 20893 - DNA, 427 bp, synthetic construct
  source 1..427: mol_type = other DNA
atagggactttccattgacgtcaatgggtggagtatttacggtaaactgcccacttggcagtacatcaagtgtatcatatgccaagtccgccccctattgacgtcaatgacggtaaatggcccgcctggcattatgcccagtacatgaccttacgggactttcctacttggcagtacatctacgtattagtcatcgctattaccatggtgatgcggttttggcagtacaccaatgggcgtggatagcggtttgactcacggggatttccaagtctccaccccattgacgtcaatgggagtttgttttggcaccaaaatcaacgggactttccaaaatgtcgtaataaccccgccccgttgacgcaaatgggcggtaggcgtgtacggtgggaggtctatataagcagagctcgtttagtgaaccgtc

SEQ ID NO: 20894 - DNA, 426 bp, synthetic construct
  source 1..426: mol_type = other DNA
tagggactttccattgacgtcaatgggtggagtatttacggtaaactgcccacttggcagtacatcaagtgtatcatatgccaagtccgccccctattgacgtcaatgacggtaaatggcccgcctggcattatgcccagtacatgaccttacgggactttcctacttggcagtacatctacgtattagtcatcgctattaccatggtgatgcggttttggcagtacaccaatgggcgtggatagcggtttgactcacggggatttccaagtctccaccccattgacgtcaatgggagtttgttttggcaccaaaatcaacgggactttccaaaatgtcgtaataaccccgccccgttgacgcaaatgggcggtaggcgtgtacggtgggaggtctatataagcagagctcgtttagtgaaccgtc

SEQ ID NO: 20895 - DNA, 425 bp, synthetic construct
  source 1..425: mol_type = other DNA
agggactttccattgacgtcaatgggtggagtatttacggtaaactgcccacttggcagtacatcaagtgtatcatatgccaagtccgccccctattgacgtcaatgacggtaaatggcccgcctggcattatgcccagtacatgaccttacgggactttcctacttggcagtacatctacgtattagtcatcgctattaccatggtgatgcggttttggcagtacaccaatgggcgtggatagcggtttgactcacggggatttccaagtctccaccccattgacgtcaatgggagtttgttttggcaccaaaatcaacgggactttccaaaatgtcgtaataaccccgccccgttgacgcaaatgggcggtaggcgtgtacggtgggaggtctatataagcagagctcgtttagtgaaccgtc

SEQ ID NO: 20896 - DNA, 424 bp, synthetic construct
  source 1..424: mol_type = other DNA
gggactttccattgacgtcaatgggtggagtatttacggtaaactgcccacttggcagtacatcaagtgtatcatatgccaagtccgccccctattgacgtcaatgacggtaaatggcccgcctggcattatgcccagtacatgaccttacgggactttcctacttggcagtacatctacgtattagtcatcgctattaccatggtgatgcggttttggcagtacaccaatgggcgtggatagcggtttgactcacggggatttccaagtctccaccccattgacgtcaatgggagtttgttttggcaccaaaatcaacgggactttccaaaatgtcgtaataaccccgccccgttgacgcaaatgggcggtaggcgtgtacggtgggaggtctatataagcagagctcgtttagtgaaccgtc

SEQ ID NO: 20897 - DNA, 423 bp, synthetic construct
  source 1..423: mol_type = other DNA
ggactttccattgacgtcaatgggtggagtatttacggtaaactgcccacttggcagtacatcaagtgtatcatatgccaagtccgccccctattgacgtcaatgacggtaaatggcccgcctggcattatgcccagtacatgaccttacgggactttcctacttggcagtacatctacgtattagtcatcgctattaccatggtgatgcggttttggcagtacaccaatgggcgtggatagcggtttgactcacggggatttccaagtctccaccccattgacgtcaatgggagtttgttttggcaccaaaatcaacgggactttccaaaatgtcgtaataaccccgccccgttgacgcaaatgggcggtaggcgtgtacggtgggaggtctatataagcagagctcgtttagtgaaccgtc

SEQ ID NO: 20898 - DNA, 422 bp, synthetic construct
  source 1..422: mol_type = other DNA
gactttccattgacgtcaatgggtggagtatttacggtaaactgcccacttggcagtacatcaagtgtatcatatgccaagtccgccccctattgacgtcaatgacggtaaatggcccgcctggcattatgcccagtacatgaccttacgggactttcctacttggcagtacatctacgtattagtcatcgctattaccatggtgatgcggttttggcagtacaccaatgggcgtggatagcggtttgactcacggggatttccaagtctccaccccattgacgtcaatgggagtttgttttggcaccaaaatcaacgggactttccaaaatgtcgtaataaccccgccccgttgacgcaaatgggcggtaggcgtgtacggtgggaggtctatataagcagagctcgtttagtgaaccgtc

SEQ ID NO: 20899 - DNA, 421 bp, synthetic construct
  source 1..421: mol_type = other DNA
actttccattgacgtcaatgggtggagtatttacggtaaactgcccacttggcagtacatcaagtgtatcatatgccaagtccgccccctattgacgtcaatgacggtaaatggcccgcctggcattatgcccagtacatgaccttacgggactttcctacttggcagtacatctacgtattagtcatcgctattaccatggtgatgcggttttggcagtacaccaatgggcgtggatagcggtttgactcacggggatttccaagtctccaccccattgacgtcaatgggagtttgttttggcaccaaaatcaacgggactttccaaaatgtcgtaataaccccgccccgttgacgcaaatgggcggtaggcgtgtacggtgggaggtctatataagcagagctcgtttagtgaaccgtc

SEQ ID NO: 20900 - DNA, 420 bp, synthetic construct
  source 1..420: mol_type = other DNA
ctttccattgacgtcaatgggtggagtatttacggtaaactgcccacttggcagtacatcaagtgtatcatatgccaagtccgccccctattgacgtcaatgacggtaaatggcccgcctggcattatgcccagtacatgaccttacgggactttcctacttggcagtacatctacgtattagtcatcgctattaccatggtgatgcggttttggcagtacaccaatgggcgtggatagcggtttgactcacggggatttccaagtctccaccccattgacgtcaatgggagtttgttttggcaccaaaatcaacgggactttccaaaatgtcgtaataaccccgccccgttgacgcaaatgggcggtaggcgtgtacggtgggaggtctatataagcagagctcgtttagtgaaccgtc

SEQ ID NO: 20901 - DNA, 419 bp, synthetic construct
  source 1..419: mol_type = other DNA
tttccattgacgtcaatgggtggagtatttacggtaaactgcccacttggcagtacatcaagtgtatcatatgccaagtccgccccctattgacgtcaatgacggtaaatggcccgcctggcattatgcccagtacatgaccttacgggactttcctacttggcagtacatctacgtattagtcatcgctattaccatggtgatgcggttttggcagtacaccaatgggcgtggatagcggtttgactcacggggatttccaagtctccaccccattgacgtcaatgggagtttgttttggcaccaaaatcaacgggactttccaaaatgtcgtaataaccccgccccgttgacgcaaatgggcggtaggcgtgtacggtgggaggtctatataagcagagctcgtttagtgaaccgtc

SEQ ID NO: 20902 - DNA, 418 bp, synthetic construct
  source 1..418: mol_type = other DNA
ttccattgacgtcaatgggtggagtatttacggtaaactgcccacttggcagtacatcaagtgtatcatatgccaagtccgccccctattgacgtcaatgacggtaaatggcccgcctggcattatgcccagtacatgaccttacgggactttcctacttggcagtacatctacgtattagtcatcgctattaccatggtgatgcggttttggcagtacaccaatgggcgtggatagcggtttgactcacggggatttccaagtctccaccccattgacgtcaatgggagtttgttttggcaccaaaatcaacgggactttccaaaatgtcgtaataaccccgccccgttgacgcaaatgggcggtaggcgtgtacggtgggaggtctatataagcagagctcgtttagtgaaccgtc

SEQ ID NO: 20903 - DNA, 417 bp, synthetic construct
  source 1..417: mol_type = other DNA
tccattgacgtcaatgggtggagtatttacggtaaactgcccacttggcagtacatcaagtgtatcatatgccaagtccgccccctattgacgtcaatgacggtaaatggcccgcctggcattatgcccagtacatgaccttacgggactttcctacttggcagtacatctacgtattagtcatcgctattaccatggtgatgcggttttggcagtacaccaatgggcgtggatagcggtttgactcacggggatttccaagtctccaccccattgacgtcaatgggagtttgttttggcaccaaaatcaacgggactttccaaaatgtcgtaataaccccgccccgttgacgcaaatgggcggtaggcgtgtacggtgggaggtctatataagcagagctcgtttagtgaaccgtc

SEQ ID NO: 20904 - DNA, 416 bp, synthetic construct
  source 1..416: mol_type = other DNA
ccattgacgtcaatgggtggagtatttacggtaaactgcccacttggcagtacatcaagtgtatcatatgccaagtccgccccctattgacgtcaatgacggtaaatggcccgcctggcattatgcccagtacatgaccttacgggactttcctacttggcagtacatctacgtattagtcatcgctattaccatggtgatgcggttttggcagtacaccaatgggcgtggatagcggtttgactcacggggatttccaagtctccaccccattgacgtcaatgggagtttgttttggcaccaaaatcaacgggactttccaaaatgtcgtaataaccccgccccgttgacgcaaatgggcggtaggcgtgtacggtgggaggtctatataagcagagctcgtttagtgaaccgtc

SEQ ID NO: 20905 - DNA, 415 bp, synthetic construct
  source 1..415: mol_type = other DNA
cattgacgtcaatgggtggagtatttacggtaaactgcccacttggcagtacatcaagtgtatcatatgccaagtccgccccctattgacgtcaatgacggtaaatggcccgcctggcattatgcccagtacatgaccttacgggactttcctacttggcagtacatctacgtattagtcatcgctattaccatggtgatgcggttttggcagtacaccaatgggcgtggatagcggtttgactcacggggatttccaagtctccaccccattgacgtcaatgggagtttgttttggcaccaaaatcaacgggactttccaaaatgtcgtaataaccccgccccgttgacgcaaatgggcggtaggcgtgtacggtgggaggtctatataagcagagctcgtttagtgaaccgtc

SEQ ID NO: 20906 - DNA, 414 bp, synthetic construct
  source 1..414: mol_type = other DNA
attgacgtcaatgggtggagtatttacggtaaactgcccacttggcagtacatcaagtgtatcatatgccaagtccgccccctattgacgtcaatgacggtaaatggcccgcctggcattatgcccagtacatgaccttacgggactttcctacttggcagtacatctacgtattagtcatcgctattaccatggtgatgcggttttggcagtacaccaatgggcgtggatagcggtttgactcacggggatttccaagtctccaccccattgacgtcaatgggagtttgttttggcaccaaaatcaacgggactttccaaaatgtcgtaataaccccgccccgttgacgcaaatgggcggtaggcgtgtacggtgggaggtctatataagcagagctcgtttagtgaaccgtc

SEQ ID NO: 20907 - DNA, 413 bp, synthetic construct
  source 1..413: mol_type = other DNA
ttgacgtcaatgggtggagtatttacggtaaactgcccacttggcagtacatcaagtgtatcatatgccaagtccgccccctattgacgtcaatgacggtaaatggcccgcctggcattatgcccagtacatgaccttacgggactttcctacttggcagtacatctacgtattagtcatcgctattaccatggtgatgcggttttggcagtacaccaatgggcgtggatagcggtttgactcacggggatttccaagtctccaccccattgacgtcaatgggagtttgttttggcaccaaaatcaacgggactttccaaaatgtcgtaataaccccgccccgttgacgcaaatgggcggtaggcgtgtacggtgggaggtctatataagcagagctcgtttagtgaaccgtc

SEQ ID NO: 20908 - DNA, 412 bp, synthetic construct
  source 1..412: mol_type = other DNA
tgacgtcaatgggtggagtatttacggtaaactgcccacttggcagtacatcaagtgtatcatatgccaagtccgccccctattgacgtcaatgacggtaaatggcccgcctggcattatgcccagtacatgaccttacgggactttcctacttggcagtacatctacgtattagtcatcgctattaccatggtgatgcggttttggcagtacaccaatgggcgtggatagcggtttgactcacggggatttccaagtctccaccccattgacgtcaatgggagtttgttttggcaccaaaatcaacgggactttccaaaatgtcgtaataaccccgccccgttgacgcaaatgggcggtaggcgtgtacggtgggaggtctatataagcagagctcgtttagtgaaccgtc

SEQ ID NO: 20909 - DNA, 411 bp, synthetic construct
  source 1..411: mol_type = other DNA
gacgtcaatgggtggagtatttacggtaaactgcccacttggcagtacatcaagtgtatcatatgccaagtccgccccctattgacgtcaatgacggtaaatggcccgcctggcattatgcccagtacatgaccttacgggactttcctacttggcagtacatctacgtattagtcatcgctattaccatggtgatgcggttttggcagtacaccaatgggcgtggatagcggtttgactcacggggatttccaagtctccaccccattgacgtcaatgggagtttgttttggcaccaaaatcaacgggactttccaaaatgtcgtaataaccccgccccgttgacgcaaatgggcggtaggcgtgtacggtgggaggtctatataagcagagctcgtttagtgaaccgtc

SEQ ID NO: 20910 - DNA, 410 bp, synthetic construct
  source 1..410: mol_type = other DNA
acgtcaatgggtggagtatttacggtaaactgcccacttggcagtacatcaagtgtatcatatgccaagtccgccccctattgacgtcaatgacggtaaatggcccgcctggcattatgcccagtacatgaccttacgggactttcctacttggcagtacatctacgtattagtcatcgctattaccatggtgatgcggttttggcagtacaccaatgggcgtggatagcggtttgactcacggggatttccaagtctccaccccattgacgtcaatgggagtttgttttggcaccaaaatcaacgggactttccaaaatgtcgtaataaccccgccccgttgacgcaaatgggcggtaggcgtgtacggtgggaggtctatataagcagagctcgtttagtgaaccgtc

SEQ ID NO: 20911 - DNA, 409 bp, synthetic construct
  source 1..409: mol_type = other DNA
cgtcaatgggtggagtatttacggtaaactgcccacttggcagtacatcaagtgtatcatatgccaagtccgccccctattgacgtcaatgacggtaaatggcccgcctggcattatgcccagtacatgaccttacgggactttcctacttggcagtacatctacgtattagtcatcgctattaccatggtgatgcggttttggcagtacaccaatgggcgtggatagcggtttgactcacggggatttccaagtctccaccccattgacgtcaatgggagtttgttttggcaccaaaatcaacgggactttccaaaatgtcgtaataaccccgccccgttgacgcaaatgggcggtaggcgtgtacggtgggaggtctatataagcagagctcgtttagtgaaccgtc

SEQ ID NO: 20912 - DNA, 408 bp, synthetic construct
  source 1..408: mol_type = other DNA
gtcaatgggtggagtatttacggtaaactgcccacttggcagtacatcaagtgtatcatatgccaagtccgccccctattgacgtcaatgacggtaaatggcccgcctggcattatgcccagtacatgaccttacgggactttcctacttggcagtacatctacgtattagtcatcgctattaccatggtgatgcggttttggcagtacaccaatgggcgtggatagcggtttgactcacggggatttccaagtctccaccccattgacgtcaatgggagtttgttttggcaccaaaatcaacgggactttccaaaatgtcgtaataaccccgccccgttgacgcaaatgggcggtaggcgtgtacggtgggaggtctatataagcagagctcgtttagtgaaccgtc

SEQ ID NO: 20913 - DNA, 407 bp, synthetic construct
  source 1..407: mol_type = other DNA
tcaatgggtggagtatttacggtaaactgcccacttggcagtacatcaagtgtatcatatgccaagtccgccccctattgacgtcaatgacggtaaatggcccgcctggcattatgcccagtacatgaccttacgggactttcctacttggcagtacatctacgtattagtcatcgctattaccatggtgatgcggttttggcagtacaccaatgggcgtggatagcggtttgactcacggggatttccaagtctccaccccattgacgtcaatgggagtttgttttggcaccaaaatcaacgggactttccaaaatgtcgtaataaccccgccccgttgacgcaaatgggcggtaggcgtgtacggtgggaggtctatataagcagagctcgtttagtgaaccgtc

SEQ ID NO: 20914 - DNA, 406 bp, synthetic construct
  source 1..406: mol_type = other DNA
caatgggtggagtatttacggtaaactgcccacttggcagtacatcaagtgtatcatatgccaagtccgccccctattgacgtcaatgacggtaaatggcccgcctggcattatgcccagtacatgaccttacgggactttcctacttggcagtacatctacgtattagtcatcgctattaccatggtgatgcggttttggcagtacaccaatgggcgtggatagcggtttgactcacggggatttccaagtctccaccccattgacgtcaatgggagtttgttttggcaccaaaatcaacgggactttccaaaatgtcgtaataaccccgccccgttgacgcaaatgggcggtaggcgtgtacggtgggaggtctatataagcagagctcgtttagtgaaccgtc

SEQ ID NO: 20915 - DNA, 405 bp, synthetic construct
  source 1..405: mol_type = other DNA
aatgggtggagtatttacggtaaactgcccacttggcagtacatcaagtgtatcatatgccaagtccgccccctattgacgtcaatgacggtaaatggcccgcctggcattatgcccagtacatgaccttacgggactttcctacttggcagtacatctacgtattagtcatcgctattaccatggtgatgcggttttggcagtacaccaatgggcgtggatagcggtttgactcacggggatttccaagtctccaccccattgacgtcaatgggagtttgttttggcaccaaaatcaacgggactttccaaaatgtcgtaataaccccgccccgttgacgcaaatgggcggtaggcgtgtacggtgggaggtctatataagcagagctcgtttagtgaaccgtc

SEQ ID NO: 20916 - DNA, 404 bp, synthetic construct
  source 1..404: mol_type = other DNA
atgggtggagtatttacggtaaactgcccacttggcagtacatcaagtgtatcatatgccaagtccgccccctattgacgtcaatgacggtaaatggcccgcctggcattatgcccagtacatgaccttacgggactttcctacttggcagtacatctacgtattagtcatcgctattaccatggtgatgcggttttggcagtacaccaatgggcgtggatagcggtttgactcacggggatttccaagtctccaccccattgacgtcaatgggagtttgttttggcaccaaaatcaacgggactttccaaaatgtcgtaataaccccgccccgttgacgcaaatgggcggtaggcgtgtacggtgggaggtctatataagcagagctcgtttagtgaaccgtc

SEQ ID NO: 20917 - DNA, 403 bp, synthetic construct
  source 1..403: mol_type = other DNA
tgggtggagtatttacggtaaactgcccacttggcagtacatcaagtgtatcatatgccaagtccgccccctattgacgtcaatgacggtaaatggcccgcctggcattatgcccagtacatgaccttacgggactttcctacttggcagtacatctacgtattagtcatcgctattaccatggtgatgcggttttggcagtacaccaatgggcgtggatagcggtttgactcacggggatttccaagtctccaccccattgacgtcaatgggagtttgttttggcaccaaaatcaacgggactttccaaaatgtcgtaataaccccgccccgttgacgcaaatgggcggtaggcgtgtacggtgggaggtctatataagcagagctcgtttagtgaaccgtc

SEQ ID NO: 20918 - DNA, 402 bp, synthetic construct
  source 1..402: mol_type = other DNA
gggtggagtatttacggtaaactgcccacttggcagtacatcaagtgtatcatatgccaagtccgccccctattgacgtcaatgacggtaaatggcccgcctggcattatgcccagtacatgaccttacgggactttcctacttggcagtacatctacgtattagtcatcgctattaccatggtgatgcggttttggcagtacaccaatgggcgtggatagcggtttgactcacggggatttccaagtctccaccccattgacgtcaatgggagtttgttttggcaccaaaatcaacgggactttccaaaatgtcgtaataaccccgccccgttgacgcaaatgggcggtaggcgtgtacggtgggaggtctatataagcagagctcgtttagtgaaccgtc

SEQ ID NO: 20919 - DNA, 401 bp, synthetic construct
  source 1..401: mol_type = other DNA
ggtggagtatttacggtaaactgcccacttggcagtacatcaagtgtatcatatgccaagtccgccccctattgacgtcaatgacggtaaatggcccgcctggcattatgcccagtacatgaccttacgggactttcctacttggcagtacatctacgtattagtcatcgctattaccatggtgatgcggttttggcagtacaccaatgggcgtggatagcggtttgactcacggggatttccaagtctccaccccattgacgtcaatgggagtttgttttggcaccaaaatcaacgggactttccaaaatgtcgtaataaccccgccccgttgacgcaaatgggcggtaggcgtgtacggtgggaggtctatataagcagagctcgtttagtgaaccgtc

SEQ ID NO: 20920 - DNA, 400 bp, synthetic construct
  source 1..400: mol_type = other DNA
gtggagtatttacggtaaactgcccacttggcagtacatcaagtgtatcatatgccaagtccgccccctattgacgtcaatgacggtaaatggcccgcctggcattatgcccagtacatgaccttacgggactttcctacttggcagtacatctacgtattagtcatcgctattaccatggtgatgcggttttggcagtacaccaatgggcgtggatagcggtttgactcacggggatttccaagtctccaccccattgacgtcaatgggagtttgttttggcaccaaaatcaacgggactttccaaaatgtcgtaataaccccgccccgttgacgcaaatgggcggtaggcgtgtacggtgggaggtctatataagcagagctcgtttagtgaaccgtc

SEQ ID NO: 20921 - DNA, 399 bp, synthetic construct
  source 1..399: mol_type = other DNA
tggagtatttacggtaaactgcccacttggcagtacatcaagtgtatcatatgccaagtccgccccctattgacgtcaatgacggtaaatggcccgcctggcattatgcccagtacatgaccttacgggactttcctacttggcagtacatctacgtattagtcatcgctattaccatggtgatgcggttttggcagtacaccaatgggcgtggatagcggtttgactcacggggatttccaagtctccaccccattgacgtcaatgggagtttgttttggcaccaaaatcaacgggactttccaaaatgtcgtaataaccccgccccgttgacgcaaatgggcggtaggcgtgtacggtgggaggtctatataagcagagctcgtttagtgaaccgtc

SEQ ID NO: 20922 - DNA, 398 bp, synthetic construct
  source 1..398: mol_type = other DNA
ggagtatttacggtaaactgcccacttggcagtacatcaagtgtatcatatgccaagtccgccccctattgacgtcaatgacggtaaatggcccgcctggcattatgcccagtacatgaccttacgggactttcctacttggcagtacatctacgtattagtcatcgctattaccatggtgatgcggttttggcagtacaccaatgggcgtggatagcggtttgactcacggggatttccaagtctccaccccattgacgtcaatgggagtttgttttggcaccaaaatcaacgggactttccaaaatgtcgtaataaccccgccccgttgacgcaaatgggcggtaggcgtgtacggtgggaggtctatataagcagagctcgtttagtgaaccgtc

SEQ ID NO: 20923 - DNA, 397 bp, synthetic construct
  source 1..397: mol_type = other DNA
gagtatttacggtaaactgcccacttggcagtacatcaagtgtatcatatgccaagtccgccccctattgacgtcaatgacggtaaatggcccgcctggcattatgcccagtacatgaccttacgggactttcctacttggcagtacatctacgtattagtcatcgctattaccatggtgatgcggttttggcagtacaccaatgggcgtggatagcggtttgactcacggggatttccaagtctccaccccattgacgtcaatgggagtttgttttggcaccaaaatcaacgggactttccaaaatgtcgtaataaccccgccccgttgacgcaaatgggcggtaggcgtgtacggtgggaggtctatataagcagagctcgtttagtgaaccgtc

SEQ ID NO: 20924 - DNA, 396 bp, synthetic construct
  source 1..396: mol_type = other DNA
agtatttacggtaaactgcccacttggcagtacatcaagtgtatcatatgccaagtccgccccctattgacgtcaatgacggtaaatggcccgcctggcattatgcccagtacatgaccttacgggactttcctacttggcagtacatctacgtattagtcatcgctattaccatggtgatgcggttttggcagtacaccaatgggcgtggatagcggtttgactcacggggatttccaagtctccaccccattgacgtcaatgggagtttgttttggcaccaaaatcaacgggactttccaaaatgtcgtaataaccccgccccgttgacgcaaatgggcggtaggcgtgtacggtgggaggtctatataagcagagctcgtttagtgaaccgtc

SEQ ID NO: 20925 - DNA, 395 bp, synthetic construct
  source 1..395: mol_type = other DNA
gtatttacggtaaactgcccacttggcagtacatcaagtgtatcatatgccaagtccgccccctattgacgtcaatgacggtaaatggcccgcctggcattatgcccagtacatgaccttacgggactttcctacttggcagtacatctacgtattagtcatcgctattaccatggtgatgcggttttggcagtacaccaatgggcgtggatagcggtttgactcacggggatttccaagtctccaccccattgacgtcaatgggagtttgttttggcaccaaaatcaacgggactttccaaaatgtcgtaataaccccgccccgttgacgcaaatgggcggtaggcgtgtacggtgggaggtctatataagcagagctcgtttagtgaaccgtc

SEQ ID NO: 20926 - DNA, 394 bp, synthetic construct
  source 1..394: mol_type = other DNA
tatttacggtaaactgcccacttggcagtacatcaagtgtatcatatgccaagtccgccccctattgacgtcaatgacggtaaatggcccgcctggcattatgcccagtacatgaccttacgggactttcctacttggcagtacatctacgtattagtcatcgctattaccatggtgatgcggttttggcagtacaccaatgggcgtggatagcggtttgactcacggggatttccaagtctccaccccattgacgtcaatgggagtttgttttggcaccaaaatcaacgggactttccaaaatgtcgtaataaccccgccccgttgacgcaaatgggcggtaggcgtgtacggtgggaggtctatataagcagagctcgtttagtgaaccgtc

SEQ ID NO: 20927 - DNA, 393 bp, synthetic construct
  source 1..393: mol_type = other DNA
atttacggtaaactgcccacttggcagtacatcaagtgtatcatatgccaagtccgccccctattgacgtcaatgacggtaaatggcccgcctggcattatgcccagtacatgaccttacgggactttcctacttggcagtacatctacgtattagtcatcgctattaccatggtgatgcggttttggcagtacaccaatgggcgtggatagcggtttgactcacggggatttccaagtctccaccccattgacgtcaatgggagtttgttttggcaccaaaatcaacgggactttccaaaatgtcgtaataaccccgccccgttgacgcaaatgggcggtaggcgtgtacggtgggaggtctatataagcagagctcgtttagtgaaccgtc

SEQ ID NO: 20928 - DNA, 392 bp, synthetic construct
  source 1..392: mol_type = other DNA
tttacggtaaactgcccacttggcagtacatcaagtgtatcatatgccaagtccgccccctattgacgtcaatgacggtaaatggcccgcctggcattatgcccagtacatgaccttacgggactttcctacttggcagtacatctacgtattagtcatcgctattaccatggtgatgcggttttggcagtacaccaatgggcgtggatagcggtttgactcacggggatttccaagtctccaccccattgacgtcaatgggagtttgttttggcaccaaaatcaacgggactttccaaaatgtcgtaataaccccgccccgttgacgcaaatgggcggtaggcgtgtacggtgggaggtctatataagcagagctcgtttagtgaaccgtc

SEQ ID NO: 20929 - DNA, 391 bp, synthetic construct
  source 1..391: mol_type = other DNA
ttacggtaaactgcccacttggcagtacatcaagtgtatcatatgccaagtccgccccctattgacgtcaatgacggtaaatggcccgcctggcattatgcccagtacatgaccttacgggactttcctacttggcagtacatctacgtattagtcatcgctattaccatggtgatgcggttttggcagtacaccaatgggcgtggatagcggtttgactcacggggatttccaagtctccaccccattgacgtcaatgggagtttgttttggcaccaaaatcaacgggactttccaaaatgtcgtaataaccccgccccgttgacgcaaatgggcggtaggcgtgtacggtgggaggtctatataagcagagctcgtttagtgaaccgtc

SEQ ID NO: 20930 - DNA, 390 bp, synthetic construct
  source 1..390: mol_type = other DNA
tacggtaaactgcccacttggcagtacatcaagtgtatcatatgccaagtccgccccctattgacgtcaatgacggtaaatggcccgcctggcattatgcccagtacatgaccttacgggactttcctacttggcagtacatctacgtattagtcatcgctattaccatggtgatgcggttttggcagtacaccaatgggcgtggatagcggtttgactcacggggatttccaagtctccaccccattgacgtcaatgggagtttgttttggcaccaaaatcaacgggactttccaaaatgtcgtaataaccccgccccgttgacgcaaatgggcggtaggcgtgtacggtgggaggtctatataagcagagctcgtttagtgaaccgtc

SEQ ID NO: 20931 - DNA, 389 bp, synthetic construct
  source 1..389: mol_type = other DNA
acggtaaactgcccacttggcagtacatcaagtgtatcatatgccaagtccgccccctattgacgtcaatgacggtaaatggcccgcctggcattatgcccagtacatgaccttacgggactttcctacttggcagtacatctacgtattagtcatcgctattaccatggtgatgcggttttggcagtacaccaatgggcgtggatagcggtttgactcacggggatttccaagtctccaccccattgacgtcaatgggagtttgttttggcaccaaaatcaacgggactttccaaaatgtcgtaataaccccgccccgttgacgcaaatgggcggtaggcgtgtacggtgggaggtctatataagcagagctcgtttagtgaaccgtc

SEQ ID NO: 20932 - DNA, 388 bp, synthetic construct
  source 1..388: mol_type = other DNA
cggtaaactgcccacttggcagtacatcaagtgtatcatatgccaagtccgccccctattgacgtcaatgacggtaaatggcccgcctggcattatgcccagtacatgaccttacgggactttcctacttggcagtacatctacgtattagtcatcgctattaccatggtgatgcggttttggcagtacaccaatgggcgtggatagcggtttgactcacggggatttccaagtctccaccccattgacgtcaatgggagtttgttttggcaccaaaatcaacgggactttccaaaatgtcgtaataaccccgccccgttgacgcaaatgggcggtaggcgtgtacggtgggaggtctatataagcagagctcgtttagtgaaccgtc

SEQ ID NO: 20933 - DNA, 387 bp, synthetic construct
  source 1..387: mol_type = other DNA
ggtaaactgcccacttggcagtacatcaagtgtatcatatgccaagtccgccccctattgacgtcaatgacggtaaatggcccgcctggcattatgcccagtacatgaccttacgggactttcctacttggcagtacatctacgtattagtcatcgctattaccatggtgatgcggttttggcagtacaccaatgggcgtggatagcggtttgactcacggggatttccaagtctccaccccattgacgtcaatgggagtttgttttggcaccaaaatcaacgggactttccaaaatgtcgtaataaccccgccccgttgacgcaaatgggcggtaggcgtgtacggtgggaggtctatataagcagagctcgtttagtgaaccgtc

SEQ ID NO: 20934 - DNA, 386 bp, synthetic construct
  source 1..386: mol_type = other DNA
gtaaactgcccacttggcagtacatcaagtgtatcatatgccaagtccgccccctattgacgtcaatgacggtaaatggcccgcctggcattatgcccagtacatgaccttacgggactttcctacttggcagtacatctacgtattagtcatcgctattaccatggtgatgcggttttggcagtacaccaatgggcgtggatagcggtttgactcacggggatttccaagtctccaccccattgacgtcaatgggagtttgttttggcaccaaaatcaacgggactttccaaaatgtcgtaataaccccgccccgttgacgcaaatgggcggtaggcgtgtacggtgggaggtctatataagcagagctcgtttagtgaaccgtc

SEQ ID NO: 20935 - DNA, 385 bp, synthetic construct
  source 1..385: mol_type = other DNA
taaactgcccacttggcagtacatcaagtgtatcatatgccaagtccgccccctattgacgtcaatgacggtaaatggcccgcctggcattatgcccagtacatgaccttacgggactttcctacttggcagtacatctacgtattagtcatcgctattaccatggtgatgcggttttggcagtacaccaatgggcgtggatagcggtttgactcacggggatttccaagtctccaccccattgacgtcaatgggagtttgttttggcaccaaaatcaacgggactttccaaaatgtcgtaataaccccgccccgttgacgcaaatgggcggtaggcgtgtacggtgggaggtctatataagcagagctcgtttagtgaaccgtc

SEQ ID NO: 20936 - DNA, 384 bp, synthetic construct
  source 1..384: mol_type = other DNA
aaactgcccacttggcagtacatcaagtgtatcatatgccaagtccgccccctattgacgtcaatgacggtaaatggcccgcctggcattatgcccagtacatgaccttacgggactttcctacttggcagtacatctacgtattagtcatcgctattaccatggtgatgcggttttggcagtacaccaatgggcgtggatagcggtttgactcacggggatttccaagtctccaccccattgacgtcaatgggagtttgttttggcaccaaaatcaacgggactttccaaaatgtcgtaataaccccgccccgttgacgcaaatgggcggtaggcgtgtacggtgggaggtctatataagcagagctcgtttagtgaaccgtc

SEQ ID NO: 20937 - DNA, 383 bp, synthetic construct
  source 1..383: mol_type = other DNA
aactgcccacttggcagtacatcaagtgtatcatatgccaagtccgccccctattgacgtcaatgacggtaaatggcccgcctggcattatgcccagtacatgaccttacgggactttcctacttggcagtacatctacgtattagtcatcgctattaccatggtgatgcggttttggcagtacaccaatgggcgtggatagcggtttgactcacggggatttccaagtctccaccccattgacgtcaatgggagtttgttttggcaccaaaatcaacgggactttccaaaatgtcgtaataaccccgccccgttgacgcaaatgggcggtaggcgtgtacggtgggaggtctatataagcagagctcgtttagtgaaccgtc

SEQ ID NO: 20938 - DNA, 382 bp, synthetic construct
  source 1..382: mol_type = other DNA
actgcccacttggcagtacatcaagtgtatcatatgccaagtccgccccctattgacgtcaatgacggtaaatggcccgcctggcattatgcccagtacatgaccttacgggactttcctacttggcagtacatctacgtattagtcatcgctattaccatggtgatgcggttttggcagtacaccaatgggcgtggatagcggtttgactcacggggatttccaagtctccaccccattgacgtcaatgggagtttgttttggcaccaaaatcaacgggactttccaaaatgtcgtaataaccccgccccgttgacgcaaatgggcggtaggcgtgtacggtgggaggtctatataagcagagctcgtttagtgaaccgtc

SEQ ID NO: 20939 - DNA, 381 bp, synthetic construct
  source 1..381: mol_type = other DNA
ctgcccacttggcagtacatcaagtgtatcatatgccaagtccgccccctattgacgtcaatgacggtaaatggcccgcctggcattatgcccagtacatgaccttacgggactttcctacttggcagtacatctacgtattagtcatcgctattaccatggtgatgcggttttggcagtacaccaatgggcgtggatagcggtttgactcacggggatttccaagtctccaccccattgacgtcaatgggagtttgttttggcaccaaaatcaacgggactttccaaaatgtcgtaataaccccgccccgttgacgcaaatgggcggtaggcgtgtacggtgggaggtctatataagcagagctcgtttagtgaaccgtc

SEQ ID NO: 20940 - DNA, 380 bp, synthetic construct
  source 1..380: mol_type = other DNA
tgcccacttggcagtacatcaagtgtatcatatgccaagtccgccccctattgacgtcaatgacggtaaatggcccgcctggcattatgcccagtacatgaccttacgggactttcctacttggcagtacatctacgtattagtcatcgctattaccatggtgatgcggttttggcagtacaccaatgggcgtggatagcggtttgactcacggggatttccaagtctccaccccattgacgtcaatgggagtttgttttggcaccaaaatcaacgggactttccaaaatgtcgtaataaccccgccccgttgacgcaaatgggcggtaggcgtgtacggtgggaggtctatataagcagagctcgtttagtgaaccgtc

SEQ ID NO: 20941 - DNA, 379 bp, synthetic construct
  source 1..379: mol_type = other DNA
gcccacttggcagtacatcaagtgtatcatatgccaagtccgccccctattgacgtcaatgacggtaaatggcccgcctggcattatgcccagtacatgaccttacgggactttcctacttggcagtacatctacgtattagtcatcgctattaccatggtgatgcggttttggcagtacaccaatgggcgtggatagcggtttgactcacggggatttccaagtctccaccccattgacgtcaatgggagtttgttttggcaccaaaatcaacgggactttccaaaatgtcgtaataaccccgccccgttgacgcaaatgggcggtaggcgtgtacggtgggaggtctatataagcagagctcgtttagtgaaccgtc

SEQ ID NO: 20942 - DNA, 378 bp, synthetic construct
  source 1..378: mol_type = other DNA
cccacttggcagtacatcaagtgtatcatatgccaagtccgccccctattgacgtcaatgacggtaaatggcccgcctggcattatgcccagtacatgaccttacgggactttcctacttggcagtacatctacgtattagtcatcgctattaccatggtgatgcggttttggcagtacaccaatgggcgtggatagcggtttgactcacggggatttccaagtctccaccccattgacgtcaatgggagtttgttttggcaccaaaatcaacgggactttccaaaatgtcgtaataaccccgccccgttgacgcaaatgggcggtaggcgtgtacggtgggaggtctatataagcagagctcgtttagtgaaccgtc

SEQ ID NO: 20943 - DNA, 377 bp, synthetic construct
  source 1..377: mol_type = other DNA
ccacttggcagtacatcaagtgtatcatatgccaagtccgccccctattgacgtcaatgacggtaaatggcccgcctggcattatgcccagtacatgaccttacgggactttcctacttggcagtacatctacgtattagtcatcgctattaccatggtgatgcggttttggcagtacaccaatgggcgtggatagcggtttgactcacggggatttccaagtctccaccccattgacgtcaatgggagtttgttttggcaccaaaatcaacgggactttccaaaatgtcgtaataaccccgccccgttgacgcaaatgggcggtaggcgtgtacggtgggaggtctatataagcagagctcgtttagtgaaccgtc

SEQ ID NO: 20944 - DNA, 376 bp, synthetic construct
  source 1..376: mol_type = other DNA
cacttggcagtacatcaagtgtatcatatgccaagtccgccccctattgacgtcaatgacggtaaatggcccgcctggcattatgcccagtacatgaccttacgggactttcctacttggcagtacatctacgtattagtcatcgctattaccatggtgatgcggttttggcagtacaccaatgggcgtggatagcggtttgactcacggggatttccaagtctccaccccattgacgtcaatgggagtttgttttggcaccaaaatcaacgggactttccaaaatgtcgtaataaccccgccccgttgacgcaaatgggcggtaggcgtgtacggtgggaggtctatataagcagagctcgtttagtgaaccgtc

SEQ ID NO: 20945 - DNA, 375 bp, synthetic construct
  source 1..375: mol_type = other DNA
acttggcagtacatcaagtgtatcatatgccaagtccgccccctattgacgtcaatgacggtaaatggcccgcctggcattatgcccagtacatgaccttacgggactttcctacttggcagtacatctacgtattagtcatcgctattaccatggtgatgcggttttggcagtacaccaatgggcgtggatagcggtttgactcacggggatttccaagtctccaccccattgacgtcaatgggagtttgttttggcaccaaaatcaacgggactttccaaaatgtcgtaataaccccgccccgttgacgcaaatgggcggtaggcgtgtacggtgggaggtctatataagcagagctcgtttagtgaaccgtc

SEQ ID NO: 20946 - DNA, 374 bp, synthetic construct
  source 1..374: mol_type = other DNA
cttggcagtacatcaagtgtatcatatgccaagtccgccccctattgacgtcaatgacggtaaatggcccgcctggcattatgcccagtacatgaccttacgggactttcctacttggcagtacatctacgtattagtcatcgctattaccatggtgatgcggttttggcagtacaccaatgggcgtggatagcggtttgactcacggggatttccaagtctccaccccattgacgtcaatgggagtttgttttggcaccaaaatcaacgggactttccaaaatgtcgtaataaccccgccccgttgacgcaaatgggcggtaggcgtgtacggtgggaggtctatataagcagagctcgtttagtgaaccgtc

SEQ ID NO: 20947 - DNA, 373 bp, synthetic construct
  source 1..373: mol_type = other DNA
ttggcagtacatcaagtgtatcatatgccaagtccgccccctattgacgtcaatgacggtaaatggcccgcctggcattatgcccagtacatgaccttacgggactttcctacttggcagtacatctacgtattagtcatcgctattaccatggtgatgcggttttggcagtacaccaatgggcgtggatagcggtttgactcacggggatttccaagtctccaccccattgacgtcaatgggagtttgttttggcaccaaaatcaacgggactttccaaaatgtcgtaataaccccgccccgttgacgcaaatgggcggtaggcgtgtacggtgggaggtctatataagcagagctcgtttagtgaaccgtc

SEQ ID NO: 20948 - DNA, 372 bp, synthetic construct
  source 1..372: mol_type = other DNA
tggcagtacatcaagtgtatcatatgccaagtccgccccctattgacgtcaatgacggtaaatggcccgcctggcattatgcccagtacatgaccttacgggactttcctacttggcagtacatctacgtattagtcatcgctattaccatggtgatgcggttttggcagtacaccaatgggcgtggatagcggtttgactcacggggatttccaagtctccaccccattgacgtcaatgggagtttgttttggcaccaaaatcaacgggactttccaaaatgtcgtaataaccccgccccgttgacgcaaatgggcggtaggcgtgtacggtgggaggtctatataagcagagctcgtttagtgaaccgtc

SEQ ID NO: 20949 - DNA, 371 bp, synthetic construct
  source 1..371: mol_type = other DNA
ggcagtacatcaagtgtatcatatgccaagtccgccccctattgacgtcaatgacggtaaatggcccgcctggcattatgcccagtacatgaccttacgggactttcctacttggcagtacatctacgtattagtcatcgctattaccatggtgatgcggttttggcagtacaccaatgggcgtggatagcggtttgactcacggggatttccaagtctccaccccattgacgtcaatgggagtttgttttggcaccaaaatcaacgggactttccaaaatgtcgtaataaccccgccccgttgacgcaaatgggcggtaggcgtgtacggtgggaggtctatataagcagagctcgtttagtgaaccgtc

SEQ ID NO: 20950 - DNA, 370 bp, synthetic construct
  source 1..370: mol_type = other DNA
gcagtacatcaagtgtatcatatgccaagtccgccccctattgacgtcaatgacggtaaatggcccgcctggcattatgcccagtacatgaccttacgggactttcctacttggcagtacatctacgtattagtcatcgctattaccatggtgatgcggttttggcagtacaccaatgggcgtggatagcggtttgactcacggggatttccaagtctccaccccattgacgtcaatgggagtttgttttggcaccaaaatcaacgggactttccaaaatgtcgtaataaccccgccccgttgacgcaaatgggcggtaggcgtgtacggtgggaggtctatataagcagagctcgtttagtgaaccgtc

SEQ ID NO: 20951 - DNA, 369 bp, synthetic construct
  source 1..369: mol_type = other DNA
cagtacatcaagtgtatcatatgccaagtccgccccctattgacgtcaatgacggtaaatggcccgcctggcattatgcccagtacatgaccttacgggactttcctacttggcagtacatctacgtattagtcatcgctattaccatggtgatgcggttttggcagtacaccaatgggcgtggatagcggtttgactcacggggatttccaagtctccaccccattgacgtcaatgggagtttgttttggcaccaaaatcaacgggactttccaaaatgtcgtaataaccccgccccgttgacgcaaatgggcggtaggcgtgtacggtgggaggtctatataagcagagctcgtttagtgaaccgtc

SEQ ID NO: 20952 - DNA, 368 bp, synthetic construct
  source 1..368: mol_type = other DNA
agtacatcaagtgtatcatatgccaagtccgccccctattgacgtcaatgacggtaaatggcccgcctggcattatgcccagtacatgaccttacgggactttcctacttggcagtacatctacgtattagtcatcgctattaccatggtgatgcggttttggcagtacaccaatgggcgtggatagcggtttgactcacggggatttccaagtctccaccccattgacgtcaatgggagtttgttttggcaccaaaatcaacgggactttccaaaatgtcgtaataaccccgccccgttgacgcaaatgggcggtaggcgtgtacggtgggaggtctatataagcagagctcgtttagtgaaccgtc

SEQ ID NO: 20953 - DNA, 367 bp, synthetic construct
  source 1..367: mol_type = other DNA
gtacatcaagtgtatcatatgccaagtccgccccctattgacgtcaatgacggtaaatggcccgcctggcattatgcccagtacatgaccttacgggactttcctacttggcagtacatctacgtattagtcatcgctattaccatggtgatgcggttttggcagtacaccaatgggcgtggatagcggtttgactcacggggatttccaagtctccaccccattgacgtcaatgggagtttgttttggcaccaaaatcaacgggactttccaaaatgtcgtaataaccccgccccgttgacgcaaatgggcggtaggcgtgtacggtgggaggtctatataagcagagctcgtttagtgaaccgtc

SEQ ID NO: 20954 - DNA, 366 bp, synthetic construct
  source 1..366: mol_type = other DNA
tacatcaagtgtatcatatgccaagtccgccccctattgacgtcaatgacggtaaatggcccgcctggcattatgcccagtacatgaccttacgggactttcctacttggcagtacatctacgtattagtcatcgctattaccatggtgatgcggttttggcagtacaccaatgggcgtggatagcggtttgactcacggggatttccaagtctccaccccattgacgtcaatgggagtttgttttggcaccaaaatcaacgggactttccaaaatgtcgtaataaccccgccccgttgacgcaaatgggcggtaggcgtgtacggtgggaggtctatataagcagagctcgtttagtgaaccgtc

SEQ ID NO: 20955 - DNA, 365 bp, synthetic construct
  source 1..365: mol_type = other DNA
acatcaagtgtatcatatgccaagtccgccccctattgacgtcaatgacggtaaatggcccgcctggcattatgcccagtacatgaccttacgggactttcctacttggcagtacatctacgtattagtcatcgctattaccatggtgatgcggttttggcagtacaccaatgggcgtggatagcggtttgactcacggggatttccaagtctccaccccattgacgtcaatgggagtttgttttggcaccaaaatcaacgggactttccaaaatgtcgtaataaccccgccccgttgacgcaaatgggcggtaggcgtgtacggtgggaggtctatataagcagagctcgtttagtgaaccgtc

SEQ ID NO: 20956 - DNA, 364 bp, synthetic construct
  source 1..364: mol_type = other DNA
catcaagtgtatcatatgccaagtccgccccctattgacgtcaatgacggtaaatggcccgcctggcattatgcccagtacatgaccttacgggactttcctacttggcagtacatctacgtattagtcatcgctattaccatggtgatgcggttttggcagtacaccaatgggcgtggatagcggtttgactcacggggatttccaagtctccaccccattgacgtcaatgggagtttgttttggcaccaaaatcaacgggactttccaaaatgtcgtaataaccccgccccgttgacgcaaatgggcggtaggcgtgtacggtgggaggtctatataagcagagctcgtttagtgaaccgtc

SEQ ID NO: 20957 - DNA, 363 bp, synthetic construct
  source 1..363: mol_type = other DNA
atcaagtgtatcatatgccaagtccgccccctattgacgtcaatgacggtaaatggcccgcctggcattatgcccagtacatgaccttacgggactttcctacttggcagtacatctacgtattagtcatcgctattaccatggtgatgcggttttggcagtacaccaatgggcgtggatagcggtttgactcacggggatttccaagtctccaccccattgacgtcaatgggagtttgttttggcaccaaaatcaacgggactttccaaaatgtcgtaataaccccgccccgttgacgcaaatgggcggtaggcgtgtacggtgggaggtctatataagcagagctcgtttagtgaaccgtc

SEQ ID NO: 20958 - DNA, 362 bp, synthetic construct
  source 1..362: mol_type = other DNA
tcaagtgtatcatatgccaagtccgccccctattgacgtcaatgacggtaaatggcccgcctggcattatgcccagtacatgaccttacgggactttcctacttggcagtacatctacgtattagtcatcgctattaccatggtgatgcggttttggcagtacaccaatgggcgtggatagcggtttgactcacggggatttccaagtctccaccccattgacgtcaatgggagtttgttttggcaccaaaatcaacgggactttccaaaatgtcgtaataaccccgccccgttgacgcaaatgggcggtaggcgtgtacggtgggaggtctatataagcagagctcgtttagtgaaccgtc

SEQ ID NO: 20959 - DNA, 361 bp, synthetic construct
  source 1..361: mol_type = other DNA
caagtgtatcatatgccaagtccgccccctattgacgtcaatgacggtaaatggcccgcctggcattatgcccagtacatgaccttacgggactttcctacttggcagtacatctacgtattagtcatcgctattaccatggtgatgcggttttggcagtacaccaatgggcgtggatagcggtttgactcacggggatttccaagtctccaccccattgacgtcaatgggagtttgttttggcaccaaaatcaacgggactttccaaaatgtcgtaataaccccgccccgttgacgcaaatgggcggtaggcgtgtacggtgggaggtctatataagcagagctcgtttagtgaaccgtc

SEQ ID NO: 20960 - DNA, 360 bp, synthetic construct
  source 1..360: mol_type = other DNA
aagtgtatcatatgccaagtccgccccctattgacgtcaatgacggtaaatggcccgcctggcattatgcccagtacatgaccttacgggactttcctacttggcagtacatctacgtattagtcatcgctattaccatggtgatgcggttttggcagtacaccaatgggcgtggatagcggtttgactcacggggatttccaagtctccaccccattgacgtcaatgggagtttgttttggcaccaaaatcaacgggactttccaaaatgtcgtaataaccccgccccgttgacgcaaatgggcggtaggcgtgtacggtgggaggtctatataagcagagctcgtttagtgaaccgtc

SEQ ID NO: 20961 - DNA, 359 bp, synthetic construct
  source 1..359: mol_type = other DNA
agtgtatcatatgccaagtccgccccctattgacgtcaatgacggtaaatggcccgcctggcattatgcccagtacatgaccttacgggactttcctacttggcagtacatctacgtattagtcatcgctattaccatggtgatgcggttttggcagtacaccaatgggcgtggatagcggtttgactcacggggatttccaagtctccaccccattgacgtcaatgggagtttgttttggcaccaaaatcaacgggactttccaaaatgtcgtaataaccccgccccgttgacgcaaatgggcggtaggcgtgtacggtgggaggtctatataagcagagctcgtttagtgaaccgtc

SEQ ID NO: 20962 - DNA, 358 bp, synthetic construct
  source 1..358: mol_type = other DNA
gtgtatcatatgccaagtccgccccctattgacgtcaatgacggtaaatggcccgcctggcattatgcccagtacatgaccttacgggactttcctacttggcagtacatctacgtattagtcatcgctattaccatggtgatgcggttttggcagtacaccaatgggcgtggatagcggtttgactcacggggatttccaagtctccaccccattgacgtcaatgggagtttgttttggcaccaaaatcaacgggactttccaaaatgtcgtaataaccccgccccgttgacgcaaatgggcggtaggcgtgtacggtgggaggtctatataagcagagctcgtttagtgaaccgtc

SEQ ID NO: 20963 - DNA, 357 bp, synthetic construct
  source 1..357: mol_type = other DNA
tgtatcatatgccaagtccgccccctattgacgtcaatgacggtaaatggcccgcctggcattatgcccagtacatgaccttacgggactttcctacttggcagtacatctacgtattagtcatcgctattaccatggtgatgcggttttggcagtacaccaatgggcgtggatagcggtttgactcacggggatttccaagtctccaccccattgacgtcaatgggagtttgttttggcaccaaaatcaacgggactttccaaaatgtcgtaataaccccgccccgttgacgcaaatgggcggtaggcgtgtacggtgggaggtctatataagcagagctcgtttagtgaaccgtc

SEQ ID NO: 20964 - DNA, 356 bp, synthetic construct
  source 1..356: mol_type = other DNA
gtatcatatgccaagtccgccccctattgacgtcaatgacggtaaatggcccgcctggcattatgcccagtacatgaccttacgggactttcctacttggcagtacatctacgtattagtcatcgctattaccatggtgatgcggttttggcagtacaccaatgggcgtggatagcggtttgactcacggggatttccaagtctccaccccattgacgtcaatgggagtttgttttggcaccaaaatcaacgggactttccaaaatgtcgtaataaccccgccccgttgacgcaaatgggcggtaggcgtgtacggtgggaggtctatataagcagagctcgtttagtgaaccgtc

SEQ ID NO: 20965 - DNA, 355 bp, synthetic construct
  source 1..355: mol_type = other DNA
tatcatatgccaagtccgccccctattgacgtcaatgacggtaaatggcccgcctggcattatgcccagtacatgaccttacgggactttcctacttggcagtacatctacgtattagtcatcgctattaccatggtgatgcggttttggcagtacaccaatgggcgtggatagcggtttgactcacggggatttccaagtctccaccccattgacgtcaatgggagtttgttttggcaccaaaatcaacgggactttccaaaatgtcgtaataaccccgccccgttgacgcaaatgggcggtaggcgtgtacggtgggaggtctatataagcagagctcgtttagtgaaccgtc

SEQ ID NO: 20966 - DNA, 354 bp, synthetic construct
  source 1..354: mol_type = other DNA
atcatatgccaagtccgccccctattgacgtcaatgacggtaaatggcccgcctggcattatgcccagtacatgaccttacgggactttcctacttggcagtacatctacgtattagtcatcgctattaccatggtgatgcggttttggcagtacaccaatgggcgtggatagcggtttgactcacggggatttccaagtctccaccccattgacgtcaatgggagtttgttttggcaccaaaatcaacgggactttccaaaatgtcgtaataaccccgccccgttgacgcaaatgggcggtaggcgtgtacggtgggaggtctatataagcagagctcgtttagtgaaccgtc

SEQ ID NO: 20967 - DNA, 353 bp, synthetic construct
  source 1..353: mol_type = other DNA
tcatatgccaagtccgccccctattgacgtcaatgacggtaaatggcccgcctggcattatgcccagtacatgaccttacgggactttcctacttggcagtacatctacgtattagtcatcgctattaccatggtgatgcggttttggcagtacaccaatgggcgtggatagcggtttgactcacggggatttccaagtctccaccccattgacgtcaatgggagtttgttttggcaccaaaatcaacgggactttccaaaatgtcgtaataaccccgccccgttgacgcaaatgggcggtaggcgtgtacggtgggaggtctatataagcagagctcgtttagtgaaccgtc

SEQ ID NO: 20968 - DNA, 352 bp, synthetic construct
  source 1..352: mol_type = other DNA
catatgccaagtccgccccctattgacgtcaatgacggtaaatggcccgcctggcattatgcccagtacatgaccttacgggactttcctacttggcagtacatctacgtattagtcatcgctattaccatggtgatgcggttttggcagtacaccaatgggcgtggatagcggtttgactcacggggatttccaagtctccaccccattgacgtcaatgggagtttgttttggcaccaaaatcaacgggactttccaaaatgtcgtaataaccccgccccgttgacgcaaatgggcggtaggcgtgtacggtgggaggtctatataagcagagctcgtttagtgaaccgtc

SEQ ID NO: 20969 - DNA, 351 bp, synthetic construct
  source 1..351: mol_type = other DNA
atatgccaagtccgccccctattgacgtcaatgacggtaaatggcccgcctggcattatgcccagtacatgaccttacgggactttcctacttggcagtacatctacgtattagtcatcgctattaccatggtgatgcggttttggcagtacaccaatgggcgtggatagcggtttgactcacggggatttccaagtctccaccccattgacgtcaatgggagtttgttttggcaccaaaatcaacgggactttccaaaatgtcgtaataaccccgccccgttgacgcaaatgggcggtaggcgtgtacggtgggaggtctatataagcagagctcgtttagtgaaccgtc

SEQ ID NO: 20970 - DNA, 350 bp, synthetic construct
  source 1..350: mol_type = other DNA
tatgccaagtccgccccctattgacgtcaatgacggtaaatggcccgcctggcattatgcccagtacatgaccttacgggactttcctacttggcagtacatctacgtattagtcatcgctattaccatggtgatgcggttttggcagtacaccaatgggcgtggatagcggtttgactcacggggatttccaagtctccaccccattgacgtcaatgggagtttgttttggcaccaaaatcaacgggactttccaaaatgtcgtaataaccccgccccgttgacgcaaatgggcggtaggcgtgtacggtgggaggtctatataagcagagctcgtttagtgaaccgtc

SEQ ID NO: 20971 - DNA, 349 bp, synthetic construct
  source 1..349: mol_type = other DNA
atgccaagtccgccccctattgacgtcaatgacggtaaatggcccgcctggcattatgcccagtacatgaccttacgggactttcctacttggcagtacatctacgtattagtcatcgctattaccatggtgatgcggttttggcagtacaccaatgggcgtggatagcggtttgactcacggggatttccaagtctccaccccattgacgtcaatgggagtttgttttggcaccaaaatcaacgggactttccaaaatgtcgtaataaccccgccccgttgacgcaaatgggcggtaggcgtgtacggtgggaggtctatataagcagagctcgtttagtgaaccgtc

SEQ ID NO: 20972 - DNA, 348 bp, synthetic construct
  source 1..348: mol_type = other DNA
tgccaagtccgccccctattgacgtcaatgacggtaaatggcccgcctggcattatgcccagtacatgaccttacgggactttcctacttggcagtacatctacgtattagtcatcgctattaccatggtgatgcggttttggcagtacaccaatgggcgtggatagcggtttgactcacggggatttccaagtctccaccccattgacgtcaatgggagtttgttttggcaccaaaatcaacgggactttccaaaatgtcgtaataaccccgccccgttgacgcaaatgggcggtaggcgtgtacggtgggaggtctatataagcagagctcgtttagtgaaccgtc

SEQ ID NO: 20973 - DNA, 347 bp, synthetic construct
  source 1..347: mol_type = other DNA
gccaagtccgccccctattgacgtcaatgacggtaaatggcccgcctggcattatgcccagtacatgaccttacgggactttcctacttggcagtacatctacgtattagtcatcgctattaccatggtgatgcggttttggcagtacaccaatgggcgtggatagcggtttgactcacggggatttccaagtctccaccccattgacgtcaatgggagtttgttttggcaccaaaatcaacgggactttccaaaatgtcgtaataaccccgccccgttgacgcaaatgggcggtaggcgtgtacggtgggaggtctatataagcagagctcgtttagtgaaccgtc

SEQ ID NO: 20974 - DNA, 346 bp, synthetic construct
  source 1..346: mol_type = other DNA
ccaagtccgccccctattgacgtcaatgacggtaaatggcccgcctggcattatgcccagtacatgaccttacgggactttcctacttggcagtacatctacgtattagtcatcgctattaccatggtgatgcggttttggcagtacaccaatgggcgtggatagcggtttgactcacggggatttccaagtctccaccccattgacgtcaatgggagtttgttttggcaccaaaatcaacgggactttccaaaatgtcgtaataaccccgccccgttgacgcaaatgggcggtaggcgtgtacggtgggaggtctatataagcagagctcgtttagtgaaccgtc

SEQ ID NO: 20975 - DNA, 345 bp, synthetic construct
  source 1..345: mol_type = other DNA
caagtccgccccctattgacgtcaatgacggtaaatggcccgcctggcattatgcccagtacatgaccttacgggactttcctacttggcagtacatctacgtattagtcatcgctattaccatggtgatgcggttttggcagtacaccaatgggcgtggatagcggtttgactcacggggatttccaagtctccaccccattgacgtcaatgggagtttgttttggcaccaaaatcaacgggactttccaaaatgtcgtaataaccccgccccgttgacgcaaatgggcggtaggcgtgtacggtgggaggtctatataagcagagctcgtttagtgaaccgtc

SEQ ID NO: 20976 - DNA, 344 bp, synthetic construct
  source 1..344: mol_type = other DNA
aagtccgccccctattgacgtcaatgacggtaaatggcccgcctggcattatgcccagtacatgaccttacgggactttcctacttggcagtacatctacgtattagtcatcgctattaccatggtgatgcggttttggcagtacaccaatgggcgtggatagcggtttgactcacggggatttccaagtctccaccccattgacgtcaatgggagtttgttttggcaccaaaatcaacgggactttccaaaatgtcgtaataaccccgccccgttgacgcaaatgggcggtaggcgtgtacggtgggaggtctatataagcagagctcgtttagtgaaccgtc

SEQ ID NO: 20977 - DNA, 343 bp, synthetic construct
  source 1..343: mol_type = other DNA
agtccgccccctattgacgtcaatgacggtaaatggcccgcctggcattatgcccagtacatgaccttacgggactttcctacttggcagtacatctacgtattagtcatcgctattaccatggtgatgcggttttggcagtacaccaatgggcgtggatagcggtttgactcacggggatttccaagtctccaccccattgacgtcaatgggagtttgttttggcaccaaaatcaacgggactttccaaaatgtcgtaataaccccgccccgttgacgcaaatgggcggtaggcgtgtacggtgggaggtctatataagcagagctcgtttagtgaaccgtc

SEQ ID NO: 20978 - DNA, 342 bp, synthetic construct
  source 1..342: mol_type = other DNA
gtccgccccctattgacgtcaatgacggtaaatggcccgcctggcattatgcccagtacatgaccttacgggactttcctacttggcagtacatctacgtattagtcatcgctattaccatggtgatgcggttttggcagtacaccaatgggcgtggatagcggtttgactcacggggatttccaagtctccaccccattgacgtcaatgggagtttgttttggcaccaaaatcaacgggactttccaaaatgtcgtaataaccccgccccgttgacgcaaatgggcggtaggcgtgtacggtgggaggtctatataagcagagctcgtttagtgaaccgtc

SEQ ID NO: 20979 - DNA, 341 bp, synthetic construct
  source 1..341: mol_type = other DNA
tccgccccctattgacgtcaatgacggtaaatggcccgcctggcattatgcccagtacatgaccttacgggactttcctacttggcagtacatctacgtattagtcatcgctattaccatggtgatgcggttttggcagtacaccaatgggcgtggatagcggtttgactcacggggatttccaagtctccaccccattgacgtcaatgggagtttgttttggcaccaaaatcaacgggactttccaaaatgtcgtaataaccccgccccgttgacgcaaatgggcggtaggcgtgtacggtgggaggtctatataagcagagctcgtttagtgaaccgtc

SEQ ID NO: 20980 - DNA, 340 bp, synthetic construct
  source 1..340: mol_type = other DNA
ccgccccctattgacgtcaatgacggtaaatggcccgcctggcattatgcccagtacatgaccttacgggactttcctacttggcagtacatctacgtattagtcatcgctattaccatggtgatgcggttttggcagtacaccaatgggcgtggatagcggtttgactcacggggatttccaagtctccaccccattgacgtcaatgggagtttgttttggcaccaaaatcaacgggactttccaaaatgtcgtaataaccccgccccgttgacgcaaatgggcggtaggcgtgtacggtgggaggtctatataagcagagctcgtttagtgaaccgtc

SEQ ID NO: 20981 - DNA, 339 bp, synthetic construct
  source 1..339: mol_type = other DNA
cgccccctattgacgtcaatgacggtaaatggcccgcctggcattatgcccagtacatgaccttacgggactttcctacttggcagtacatctacgtattagtcatcgctattaccatggtgatgcggttttggcagtacaccaatgggcgtggatagcggtttgactcacggggatttccaagtctccaccccattgacgtcaatgggagtttgttttggcaccaaaatcaacgggactttccaaaatgtcgtaataaccccgccccgttgacgcaaatgggcggtaggcgtgtacggtgggaggtctatataagcagagctcgtttagtgaaccgtc

SEQ ID NO: 20982 - DNA, 338 bp, synthetic construct
  source 1..338: mol_type = other DNA
gccccctattgacgtcaatgacggtaaatggcccgcctggcattatgcccagtacatgaccttacgggactttcctacttggcagtacatctacgtattagtcatcgctattaccatggtgatgcggttttggcagtacaccaatgggcgtggatagcggtttgactcacggggatttccaagtctccaccccattgacgtcaatgggagtttgttttggcaccaaaatcaacgggactttccaaaatgtcgtaataaccccgccccgttgacgcaaatgggcggtaggcgtgtacggtgggaggtctatataagcagagctcgtttagtgaaccgtc

SEQ ID NO: 20983 - DNA, 337 bp, synthetic construct
  source 1..337: mol_type = other DNA
ccccctattgacgtcaatgacggtaaatggcccgcctggcattatgcccagtacatgaccttacgggactttcctacttggcagtacatctacgtattagtcatcgctattaccatggtgatgcggttttggcagtacaccaatgggcgtggatagcggtttgactcacggggatttccaagtctccaccccattgacgtcaatgggagtttgttttggcaccaaaatcaacgggactttccaaaatgtcgtaataaccccgccccgttgacgcaaatgggcggtaggcgtgtacggtgggaggtctatataagcagagctcgtttagtgaaccgtc

SEQ ID NO: 20984 - DNA, 336 bp, synthetic construct
  source 1..336: mol_type = other DNA
cccctattgacgtcaatgacggtaaatggcccgcctggcattatgcccagtacatgaccttacgggactttcctacttggcagtacatctacgtattagtcatcgctattaccatggtgatgcggttttggcagtacaccaatgggcgtggatagcggtttgactcacggggatttccaagtctccaccccattgacgtcaatgggagtttgttttggcaccaaaatcaacgggactttccaaaatgtcgtaataaccccgccccgttgacgcaaatgggcggtaggcgtgtacggtgggaggtctatataagcagagctcgtttagtgaaccgtc

SEQ ID NO: 20985 - DNA, 335 bp, synthetic construct
  source 1..335: mol_type = other DNA
ccctattgacgtcaatgacggtaaatggcccgcctggcattatgcccagtacatgaccttacgggactttcctacttggcagtacatctacgtattagtcatcgctattaccatggtgatgcggttttggcagtacaccaatgggcgtggatagcggtttgactcacggggatttccaagtctccaccccattgacgtcaatgggagtttgttttggcaccaaaatcaacgggactttccaaaatgtcgtaataaccccgccccgttgacgcaaatgggcggtaggcgtgtacggtgggaggtctatataagcagagctcgtttagtgaaccgtc

SEQ ID NO: 20986 - DNA, 334 bp, synthetic construct
  source 1..334: mol_type = other DNA
cctattgacgtcaatgacggtaaatggcccgcctggcattatgcccagtacatgaccttacgggactttcctacttggcagtacatctacgtattagtcatcgctattaccatggtgatgcggttttggcagtacaccaatgggcgtggatagcggtttgactcacggggatttccaagtctccaccccattgacgtcaatgggagtttgttttggcaccaaaatcaacgggactttccaaaatgtcgtaataaccccgccccgttgacgcaaatgggcggtaggcgtgtacggtgggaggtctatataagcagagctcgtttagtgaaccgtc

SEQ ID NO: 20987 - DNA, 333 bp, synthetic construct
  source 1..333: mol_type = other DNA
ctattgacgtcaatgacggtaaatggcccgcctggcattatgcccagtacatgaccttacgggactttcctacttggcagtacatctacgtattagtcatcgctattaccatggtgatgcggttttggcagtacaccaatgggcgtggatagcggtttgactcacggggatttccaagtctccaccccattgacgtcaatgggagtttgttttggcaccaaaatcaacgggactttccaaaatgtcgtaataaccccgccccgttgacgcaaatgggcggtaggcgtgtacggtgggaggtctatataagcagagctcgtttagtgaaccgtc

SEQ ID NO: 20988 - DNA, 332 bp, synthetic construct
  source 1..332: mol_type = other DNA
tattgacgtcaatgacggtaaatggcccgcctggcattatgcccagtacatgaccttacgggactttcctacttggcagtacatctacgtattagtcatcgctattaccatggtgatgcggttttggcagtacaccaatgggcgtggatagcggtttgactcacggggatttccaagtctccaccccattgacgtcaatgggagtttgttttggcaccaaaatcaacgggactttccaaaatgtcgtaataaccccgccccgttgacgcaaatgggcggtaggcgtgtacggtgggaggtctatataagcagagctcgtttagtgaaccgtc

SEQ ID NO: 20989 - DNA, 331 bp, synthetic construct
  source 1..331: mol_type = other DNA
attgacgtcaatgacggtaaatggcccgcctggcattatgcccagtacatgaccttacgggactttcctacttggcagtacatctacgtattagtcatcgctattaccatggtgatgcggttttggcagtacaccaatgggcgtggatagcggtttgactcacggggatttccaagtctccaccccattgacgtcaatgggagtttgttttggcaccaaaatcaacgggactttccaaaatgtcgtaataaccccgccccgttgacgcaaatgggcggtaggcgtgtacggtgggaggtctatataagcagagctcgtttagtgaaccgtc

SEQ ID NO: 20990 - DNA, 330 bp, synthetic construct
  source 1..330: mol_type = other DNA
ttgacgtcaatgacggtaaatggcccgcctggcattatgcccagtacatgaccttacgggactttcctacttggcagtacatctacgtattagtcatcgctattaccatggtgatgcggttttggcagtacaccaatgggcgtggatagcggtttgactcacggggatttccaagtctccaccccattgacgtcaatgggagtttgttttggcaccaaaatcaacgggactttccaaaatgtcgtaataaccccgccccgttgacgcaaatgggcggtaggcgtgtacggtgggaggtctatataagcagagctcgtttagtgaaccgtc

SEQ ID NO: 20991 - DNA, 329 bp, synthetic construct
  source 1..329: mol_type = other DNA
tgacgtcaatgacggtaaatggcccgcctggcattatgcccagtacatgaccttacgggactttcctacttggcagtacatctacgtattagtcatcgctattaccatggtgatgcggttttggcagtacaccaatgggcgtggatagcggtttgactcacggggatttccaagtctccaccccattgacgtcaatgggagtttgttttggcaccaaaatcaacgggactttccaaaatgtcgtaataaccccgccccgttgacgcaaatgggcggtaggcgtgtacggtgggaggtctatataagcagagctcgtttagtgaaccgtc

SEQ ID NO: 20992 - DNA, 328 bp, synthetic construct
  source 1..328: mol_type = other DNA
gacgtcaatgacggtaaatggcccgcctggcattatgcccagtacatgaccttacgggactttcctacttggcagtacatctacgtattagtcatcgctattaccatggtgatgcggttttggcagtacaccaatgggcgtggatagcggtttgactcacggggatttccaagtctccaccccattgacgtcaatgggagtttgttttggcaccaaaatcaacgggactttccaaaatgtcgtaataaccccgccccgttgacgcaaatgggcggtaggcgtgtacggtgggaggtctatataagcagagctcgtttagtgaaccgtc

SEQ ID NO: 20993 - DNA, 327 bp, synthetic construct
  source 1..327: mol_type = other DNA
acgtcaatgacggtaaatggcccgcctggcattatgcccagtacatgaccttacgggactttcctacttggcagtacatctacgtattagtcatcgctattaccatggtgatgcggttttggcagtacaccaatgggcgtggatagcggtttgactcacggggatttccaagtctccaccccattgacgtcaatgggagtttgttttggcaccaaaatcaacgggactttccaaaatgtcgtaataaccccgccccgttgacgcaaatgggcggtaggcgtgtacggtgggaggtctatataagcagagctcgtttagtgaaccgtc

SEQ ID NO: 20994 - DNA, 326 bp, synthetic construct
  source 1..326: mol_type = other DNA
cgtcaatgacggtaaatggcccgcctggcattatgcccagtacatgaccttacgggactttcctacttggcagtacatctacgtattagtcatcgctattaccatggtgatgcggttttggcagtacaccaatgggcgtggatagcggtttgactcacggggatttccaagtctccaccccattgacgtcaatgggagtttgttttggcaccaaaatcaacgggactttccaaaatgtcgtaataaccccgccccgttgacgcaaatgggcggtaggcgtgtacggtgggaggtctatataagcagagctcgtttagtgaaccgtc

SEQ ID NO: 20995 - DNA, 325 bp, synthetic construct
  source 1..325: mol_type = other DNA
gtcaatgacggtaaatggcccgcctggcattatgcccagtacatgaccttacgggactttcctacttggcagtacatctacgtattagtcatcgctattaccatggtgatgcggttttggcagtacaccaatgggcgtggatagcggtttgactcacggggatttccaagtctccaccccattgacgtcaatgggagtttgttttggcaccaaaatcaacgggactttccaaaatgtcgtaataaccccgccccgttgacgcaaatgggcggtaggcgtgtacggtgggaggtctatataagcagagctcgtttagtgaaccgtc

SEQ ID NO: 20996 - DNA, 324 bp, synthetic construct
  source 1..324: mol_type = other DNA
tcaatgacggtaaatggcccgcctggcattatgcccagtacatgaccttacgggactttcctacttggcagtacatctacgtattagtcatcgctattaccatggtgatgcggttttggcagtacaccaatgggcgtggatagcggtttgactcacggggatttccaagtctccaccccattgacgtcaatgggagtttgttttggcaccaaaatcaacgggactttccaaaatgtcgtaataaccccgccccgttgacgcaaatgggcggtaggcgtgtacggtgggaggtctatataagcagagctcgtttagtgaaccgtc

SEQ ID NO: 20997 - DNA, 323 bp, synthetic construct
  source 1..323: mol_type = other DNA
caatgacggtaaatggcccgcctggcattatgcccagtacatgaccttacgggactttcctacttggcagtacatctacgtattagtcatcgctattaccatggtgatgcggttttggcagtacaccaatgggcgtggatagcggtttgactcacggggatttccaagtctccaccccattgacgtcaatgggagtttgttttggcaccaaaatcaacgggactttccaaaatgtcgtaataaccccgccccgttgacgcaaatgggcggtaggcgtgtacggtgggaggtctatataagcagagctcgtttagtgaaccgtc

SEQ ID NO: 20998 - DNA, 322 bp, synthetic construct
  source 1..322: mol_type = other DNA
aatgacggtaaatggcccgcctggcattatgcccagtacatgaccttacgggactttcctacttggcagtacatctacgtattagtcatcgctattaccatggtgatgcggttttggcagtacaccaatgggcgtggatagcggtttgactcacggggatttccaagtctccaccccattgacgtcaatgggagtttgttttggcaccaaaatcaacgggactttccaaaatgtcgtaataaccccgccccgttgacgcaaatgggcggtaggcgtgtacggtgggaggtctatataagcagagctcgtttagtgaaccgtc

SEQ ID NO: 20999 - DNA, 321 bp, synthetic construct
  source 1..321: mol_type = other DNA
atgacggtaaatggcccgcctggcattatgcccagtacatgaccttacgggactttcctacttggcagtacatctacgtattagtcatcgctattaccatggtgatgcggttttggcagtacaccaatgggcgtggatagcggtttgactcacggggatttccaagtctccaccccattgacgtcaatgggagtttgttttggcaccaaaatcaacgggactttccaaaatgtcgtaataaccccgccccgttgacgcaaatgggcggtaggcgtgtacggtgggaggtctatataagcagagctcgtttagtgaaccgtc

SEQ ID NO: 21000 - DNA, 320 bp, synthetic construct
  source 1..320: mol_type = other DNA
tgacggtaaatggcccgcctggcattatgcccagtacatgaccttacgggactttcctacttggcagtacatctacgtattagtcatcgctattaccatggtgatgcggttttggcagtacaccaatgggcgtggatagcggtttgactcacggggatttccaagtctccaccccattgacgtcaatgggagtttgttttggcaccaaaatcaacgggactttccaaaatgtcgtaataaccccgccccgttgacgcaaatgggcggtaggcgtgtacggtgggaggtctatataagcagagctcgtttagtgaaccgtc

SEQ ID NO: 21001 - DNA, 319 bp, synthetic construct
  source 1..319: mol_type = other DNA
gacggtaaatggcccgcctggcattatgcccagtacatgaccttacgggactttcctacttggcagtacatctacgtattagtcatcgctattaccatggtgatgcggttttggcagtacaccaatgggcgtggatagcggtttgactcacggggatttccaagtctccaccccattgacgtcaatgggagtttgttttggcaccaaaatcaacgggactttccaaaatgtcgtaataaccccgccccgttgacgcaaatgggcggtaggcgtgtacggtgggaggtctatataagcagagctcgtttagtgaaccgtc

SEQ ID NO: 21002 - DNA, 318 bp, synthetic construct
  source 1..318: mol_type = other DNA
acggtaaatggcccgcctggcattatgcccagtacatgaccttacgggactttcctacttggcagtacatctacgtattagtcatcgctattaccatggtgatgcggttttggcagtacaccaatgggcgtggatagcggtttgactcacggggatttccaagtctccaccccattgacgtcaatgggagtttgttttggcaccaaaatcaacgggactttccaaaatgtcgtaataaccccgccccgttgacgcaaatgggcggtaggcgtgtacggtgggaggtctatataagcagagctcgtttagtgaaccgtc

SEQ ID NO: 21003 - DNA, 317 bp, synthetic construct
  source 1..317: mol_type = other DNA
cggtaaatggcccgcctggcattatgcccagtacatgaccttacgggactttcctacttggcagtacatctacgtattagtcatcgctattaccatggtgatgcggttttggcagtacaccaatgggcgtggatagcggtttgactcacggggatttccaagtctccaccccattgacgtcaatgggagtttgttttggcaccaaaatcaacgggactttccaaaatgtcgtaataaccccgccccgttgacgcaaatgggcggtaggcgtgtacggtgggaggtctatataagcagagctcgtttagtgaaccgtc

SEQ ID NO: 21004 - DNA, 316 bp, synthetic construct
  source 1..316: mol_type = other DNA
ggtaaatggcccgcctggcattatgcccagtacatgaccttacgggactttcctacttggcagtacatctacgtattagtcatcgctattaccatggtgatgcggttttggcagtacaccaatgggcgtggatagcggtttgactcacggggatttccaagtctccaccccattgacgtcaatgggagtttgttttggcaccaaaatcaacgggactttccaaaatgtcgtaataaccccgccccgttgacgcaaatgggcggtaggcgtgtacggtgggaggtctatataagcagagctcgtttagtgaaccgtc

SEQ ID NO: 21005 - DNA, 315 bp, synthetic construct
  source 1..315: mol_type = other DNA
gtaaatggcccgcctggcattatgcccagtacatgaccttacgggactttcctacttggcagtacatctacgtattagtcatcgctattaccatggtgatgcggttttggcagtacaccaatgggcgtggatagcggtttgactcacggggatttccaagtctccaccccattgacgtcaatgggagtttgttttggcaccaaaatcaacgggactttccaaaatgtcgtaataaccccgccccgttgacgcaaatgggcggtaggcgtgtacggtgggaggtctatataagcagagctcgtttagtgaaccgtc

SEQ ID NO: 21006 - DNA, 314 bp, synthetic construct
  source 1..314: mol_type = other DNA
taaatggcccgcctggcattatgcccagtacatgaccttacgggactttcctacttggcagtacatctacgtattagtcatcgctattaccatggtgatgcggttttggcagtacaccaatgggcgtggatagcggtttgactcacggggatttccaagtctccaccccattgacgtcaatgggagtttgttttggcaccaaaatcaacgggactttccaaaatgtcgtaataaccccgccccgttgacgcaaatgggcggtaggcgtgtacggtgggaggtctatataagcagagctcgtttagtgaaccgtc

SEQ ID NO: 21007 - DNA, 313 bp, synthetic construct
  source 1..313: mol_type = other DNA
aaatggcccgcctggcattatgcccagtacatgaccttacgggactttcctacttggcagtacatctacgtattagtcatcgctattaccatggtgatgcggttttggcagtacaccaatgggcgtggatagcggtttgactcacggggatttccaagtctccaccccattgacgtcaatgggagtttgttttggcaccaaaatcaacgggactttccaaaatgtcgtaataaccccgccccgttgacgcaaatgggcggtaggcgtgtacggtgggaggtctatataagcagagctcgtttagtgaaccgtc

SEQ ID NO: 21008 - DNA, 312 bp, synthetic construct
  source 1..312: mol_type = other DNA
aatggcccgcctggcattatgcccagtacatgaccttacgggactttcctacttggcagtacatctacgtattagtcatcgctattaccatggtgatgcggttttggcagtacaccaatgggcgtggatagcggtttgactcacggggatttccaagtctccaccccattgacgtcaatgggagtttgttttggcaccaaaatcaacgggactttccaaaatgtcgtaataaccccgccccgttgacgcaaatgggcggtaggcgtgtacggtgggaggtctatataagcagagctcgtttagtgaaccgtc

SEQ ID NO: 21009 - DNA, 311 bp, synthetic construct
  source 1..311: mol_type = other DNA
atggcccgcctggcattatgcccagtacatgaccttacgggactttcctacttggcagtacatctacgtattagtcatcgctattaccatggtgatgcggttttggcagtacaccaatgggcgtggatagcggtttgactcacggggatttccaagtctccaccccattgacgtcaatgggagtttgttttggcaccaaaatcaacgggactttccaaaatgtcgtaataaccccgccccgttgacgcaaatgggcggtaggcgtgtacggtgggaggtctatataagcagagctcgtttagtgaaccgtc

SEQ ID NO: 21010 - DNA, 310 bp, synthetic construct
  source 1..310: mol_type = other DNA
tggcccgcctggcattatgcccagtacatgaccttacgggactttcctacttggcagtacatctacgtattagtcatcgctattaccatggtgatgcggttttggcagtacaccaatgggcgtggatagcggtttgactcacggggatttccaagtctccaccccattgacgtcaatgggagtttgttttggcaccaaaatcaacgggactttccaaaatgtcgtaataaccccgccccgttgacgcaaatgggcggtaggcgtgtacggtgggaggtctatataagcagagctcgtttagtgaaccgtc

SEQ ID NO: 21011 - DNA, 309 bp, synthetic construct
  source 1..309: mol_type = other DNA
ggcccgcctggcattatgcccagtacatgaccttacgggactttcctacttggcagtacatctacgtattagtcatcgctattaccatggtgatgcggttttggcagtacaccaatgggcgtggatagcggtttgactcacggggatttccaagtctccaccccattgacgtcaatgggagtttgttttggcaccaaaatcaacgggactttccaaaatgtcgtaataaccccgccccgttgacgcaaatgggcggtaggcgtgtacggtgggaggtctatataagcagagctcgtttagtgaaccgtc

SEQ ID NO: 21012 - DNA, 308 bp, synthetic construct
  source 1..308: mol_type = other DNA
gcccgcctggcattatgcccagtacatgaccttacgggactttcctacttggcagtacatctacgtattagtcatcgctattaccatggtgatgcggttttggcagtacaccaatgggcgtggatagcggtttgactcacggggatttccaagtctccaccccattgacgtcaatgggagtttgttttggcaccaaaatcaacgggactttccaaaatgtcgtaataaccccgccccgttgacgcaaatgggcggtaggcgtgtacggtgggaggtctatataagcagagctcgtttagtgaaccgtc

SEQ ID NO: 21013 - DNA, 307 bp, synthetic construct
  source 1..307: mol_type = other DNA
cccgcctggcattatgcccagtacatgaccttacgggactttcctacttggcagtacatctacgtattagtcatcgctattaccatggtgatgcggttttggcagtacaccaatgggcgtggatagcggtttgactcacggggatttccaagtctccaccccattgacgtcaatgggagtttgttttggcaccaaaatcaacgggactttccaaaatgtcgtaataaccccgccccgttgacgcaaatgggcggtaggcgtgtacggtgggaggtctatataagcagagctcgtttagtgaaccgtc

SEQ ID NO: 21014 - DNA, 306 bp, synthetic construct
  source 1..306: mol_type = other DNA
ccgcctggcattatgcccagtacatgaccttacgggactttcctacttggcagtacatctacgtattagtcatcgctattaccatggtgatgcggttttggcagtacaccaatgggcgtggatagcggtttgactcacggggatttccaagtctccaccccattgacgtcaatgggagtttgttttggcaccaaaatcaacgggactttccaaaatgtcgtaataaccccgccccgttgacgcaaatgggcggtaggcgtgtacggtgggaggtctatataagcagagctcgtttagtgaaccgtc

SEQ ID NO: 21015 - DNA, 305 bp, synthetic construct
  source 1..305: mol_type = other DNA
cgcctggcattatgcccagtacatgaccttacgggactttcctacttggcagtacatctacgtattagtcatcgctattaccatggtgatgcggttttggcagtacaccaatgggcgtggatagcggtttgactcacggggatttccaagtctccaccccattgacgtcaatgggagtttgttttggcaccaaaatcaacgggactttccaaaatgtcgtaataaccccgccccgttgacgcaaatgggcggtaggcgtgtacggtgggaggtctatataagcagagctcgtttagtgaaccgtc

SEQ ID NO: 21016 - DNA, 304 bp, synthetic construct
  source 1..304: mol_type = other DNA
gcctggcattatgcccagtacatgaccttacgggactttcctacttggcagtacatctacgtattagtcatcgctattaccatggtgatgcggttttggcagtacaccaatgggcgtggatagcggtttgactcacggggatttccaagtctccaccccattgacgtcaatgggagtttgttttggcaccaaaatcaacgggactttccaaaatgtcgtaataaccccgccccgttgacgcaaatgggcggtaggcgtgtacggtgggaggtctatataagcagagctcgtttagtgaaccgtc

SEQ ID NO: 21017 - DNA, 303 bp, synthetic construct
  source 1..303: mol_type = other DNA
cctggcattatgcccagtacatgaccttacgggactttcctacttggcagtacatctacgtattagtcatcgctattaccatggtgatgcggttttggcagtacaccaatgggcgtggatagcggtttgactcacggggatttccaagtctccaccccattgacgtcaatgggagtttgttttggcaccaaaatcaacgggactttccaaaatgtcgtaataaccccgccccgttgacgcaaatgggcggtaggcgtgtacggtgggaggtctatataagcagagctcgtttagtgaaccgtc

SEQ ID NO: 21018 - DNA, 302 bp, synthetic construct
  source 1..302: mol_type = other DNA
ctggcattatgcccagtacatgaccttacgggactttcctacttggcagtacatctacgtattagtcatcgctattaccatggtgatgcggttttggcagtacaccaatgggcgtggatagcggtttgactcacggggatttccaagtctccaccccattgacgtcaatgggagtttgttttggcaccaaaatcaacgggactttccaaaatgtcgtaataaccccgccccgttgacgcaaatgggcggtaggcgtgtacggtgggaggtctatataagcagagctcgtttagtgaaccgtc

SEQ ID NO: 21019 - DNA, 301 bp, synthetic construct
  source 1..301: mol_type = other DNA
tggcattatgcccagtacatgaccttacgggactttcctacttggcagtacatctacgtattagtcatcgctattaccatggtgatgcggttttggcagtacaccaatgggcgtggatagcggtttgactcacggggatttccaagtctccaccccattgacgtcaatgggagtttgttttggcaccaaaatcaacgggactttccaaaatgtcgtaataaccccgccccgttgacgcaaatgggcggtaggcgtgtacggtgggaggtctatataagcagagctcgtttagtgaaccgtc

SEQ ID NO: 21020 - DNA, 300 bp, synthetic construct
  source 1..300: mol_type = other DNA
ggcattatgcccagtacatgaccttacgggactttcctacttggcagtacatctacgtattagtcatcgctattaccatggtgatgcggttttggcagtacaccaatgggcgtggatagcggtttgactcacggggatttccaagtctccaccccattgacgtcaatgggagtttgttttggcaccaaaatcaacgggactttccaaaatgtcgtaataaccccgccccgttgacgcaaatgggcggtaggcgtgtacggtgggaggtctatataagcagagctcgtttagtgaaccgtc

SEQ ID NO: 21021 - DNA, 299 bp, synthetic construct
  source 1..299: mol_type = other DNA
gcattatgcccagtacatgaccttacgggactttcctacttggcagtacatctacgtattagtcatcgctattaccatggtgatgcggttttggcagtacaccaatgggcgtggatagcggtttgactcacggggatttccaagtctccaccccattgacgtcaatgggagtttgttttggcaccaaaatcaacgggactttccaaaatgtcgtaataaccccgccccgttgacgcaaatgggcggtaggcgtgtacggtgggaggtctatataagcagagctcgtttagtgaaccgtc

SEQ ID NO: 21022 - DNA, 298 bp, synthetic construct
  source 1..298: mol_type = other DNA
cattatgcccagtacatgaccttacgggactttcctacttggcagtacatctacgtattagtcatcgctattaccatggtgatgcggttttggcagtacaccaatgggcgtggatagcggtttgactcacggggatttccaagtctccaccccattgacgtcaatgggagtttgttttggcaccaaaatcaacgggactttccaaaatgtcgtaataaccccgccccgttgacgcaaatgggcggtaggcgtgtacggtgggaggtctatataagcagagctcgtttagtgaaccgtc

SEQ ID NO: 21023 - DNA, 297 bp, synthetic construct
  source 1..297: mol_type = other DNA
attatgcccagtacatgaccttacgggactttcctacttggcagtacatctacgtattagtcatcgctattaccatggtgatgcggttttggcagtacaccaatgggcgtggatagcggtttgactcacggggatttccaagtctccaccccattgacgtcaatgggagtttgttttggcaccaaaatcaacgggactttccaaaatgtcgtaataaccccgccccgttgacgcaaatgggcggtaggcgtgtacggtgggaggtctatataagcagagctcgtttagtgaaccgtc

SEQ ID NO: 21024 - DNA, 296 bp, synthetic construct
  source 1..296: mol_type = other DNA
ttatgcccagtacatgaccttacgggactttcctacttggcagtacatctacgtattagtcatcgctattaccatggtgatgcggttttggcagtacaccaatgggcgtggatagcggtttgactcacggggatttccaagtctccaccccattgacgtcaatgggagtttgttttggcaccaaaatcaacgggactttccaaaatgtcgtaataaccccgccccgttgacgcaaatgggcggtaggcgtgtacggtgggaggtctatataagcagagctcgtttagtgaaccgtc

SEQ ID NO: 21025 - DNA, 295 bp, synthetic construct
  source 1..295: mol_type = other DNA
tatgcccagtacatgaccttacgggactttcctacttggcagtacatctacgtattagtcatcgctattaccatggtgatgcggttttggcagtacaccaatgggcgtggatagcggtttgactcacggggatttccaagtctccaccccattgacgtcaatgggagtttgttttggcaccaaaatcaacgggactttccaaaatgtcgtaataaccccgccccgttgacgcaaatgggcggtaggcgtgtacggtgggaggtctatataagcagagctcgtttagtgaaccgtc

SEQ ID NO: 21026 - DNA, 294 bp, synthetic construct
  source 1..294: mol_type = other DNA
atgcccagtacatgaccttacgggactttcctacttggcagtacatctacgtattagtcatcgctattaccatggtgatgcggttttggcagtacaccaatgggcgtggatagcggtttgactcacggggatttccaagtctccaccccattgacgtcaatgggagtttgttttggcaccaaaatcaacgggactttccaaaatgtcgtaataaccccgccccgttgacgcaaatgggcggtaggcgtgtacggtgggaggtctatataagcagagctcgtttagtgaaccgtc

SEQ ID NO: 21027 - DNA, 293 bp, synthetic construct
  source 1..293: mol_type = other DNA
tgcccagtacatgaccttacgggactttcctacttggcagtacatctacgtattagtcatcgctattaccatggtgatgcggttttggcagtacaccaatgggcgtggatagcggtttgactcacggggatttccaagtctccaccccattgacgtcaatgggagtttgttttggcaccaaaatcaacgggactttccaaaatgtcgtaataaccccgccccgttgacgcaaatgggcggtaggcgtgtacggtgggaggtctatataagcagagctcgtttagtgaaccgtc

SEQ ID NO: 21028 - DNA, 292 bp, synthetic construct
  source 1..292: mol_type = other DNA
gcccagtacatgaccttacgggactttcctacttggcagtacatctacgtattagtcatcgctattaccatggtgatgcggttttggcagtacaccaatgggcgtggatagcggtttgactcacggggatttccaagtctccaccccattgacgtcaatgggagtttgttttggcaccaaaatcaacgggactttccaaaatgtcgtaataaccccgccccgttgacgcaaatgggcggtaggcgtgtacggtgggaggtctatataagcagagctcgtttagtgaaccgtc

SEQ ID NO: 21029 - DNA, 291 bp, synthetic construct
  source 1..291: mol_type = other DNA
cccagtacatgaccttacgggactttcctacttggcagtacatctacgtattagtcatcgctattaccatggtgatgcggttttggcagtacaccaatgggcgtggatagcggtttgactcacggggatttccaagtctccaccccattgacgtcaatgggagtttgttttggcaccaaaatcaacgggactttccaaaatgtcgtaataaccccgccccgttgacgcaaatgggcggtaggcgtgtacggtgggaggtctatataagcagagctcgtttagtgaaccgtc

SEQ ID NO: 21030 - DNA, 290 bp, synthetic construct
  source 1..290: mol_type = other DNA
ccagtacatgaccttacgggactttcctacttggcagtacatctacgtattagtcatcgctattaccatggtgatgcggttttggcagtacaccaatgggcgtggatagcggtttgactcacggggatttccaagtctccaccccattgacgtcaatgggagtttgttttggcaccaaaatcaacgggactttccaaaatgtcgtaataaccccgccccgttgacgcaaatgggcggtaggcgtgtacggtgggaggtctatataagcagagctcgtttagtgaaccgtc

SEQ ID NO: 21031 - DNA, 289 bp, synthetic construct
  source 1..289: mol_type = other DNA
cagtacatgaccttacgggactttcctacttggcagtacatctacgtattagtcatcgctattaccatggtgatgcggttttggcagtacaccaatgggcgtggatagcggtttgactcacggggatttccaagtctccaccccattgacgtcaatgggagtttgttttggcaccaaaatcaacgggactttccaaaatgtcgtaataaccccgccccgttgacgcaaatgggcggtaggcgtgtacggtgggaggtctatataagcagagctcgtttagtgaaccgtc

SEQ ID NO: 21032 - DNA, 288 bp, synthetic construct
  source 1..288: mol_type = other DNA
agtacatgaccttacgggactttcctacttggcagtacatctacgtattagtcatcgctattaccatggtgatgcggttttggcagtacaccaatgggcgtggatagcggtttgactcacggggatttccaagtctccaccccattgacgtcaatgggagtttgttttggcaccaaaatcaacgggactttccaaaatgtcgtaataaccccgccccgttgacgcaaatgggcggtaggcgtgtacggtgggaggtctatataagcagagctcgtttagtgaaccgtc

SEQ ID NO: 21033 - DNA, 287 bp, synthetic construct
  source 1..287: mol_type = other DNA
gtacatgaccttacgggactttcctacttggcagtacatctacgtattagtcatcgctattaccatggtgatgcggttttggcagtacaccaatgggcgtggatagcggtttgactcacggggatttccaagtctccaccccattgacgtcaatgggagtttgttttggcaccaaaatcaacgggactttccaaaatgtcgtaataaccccgccccgttgacgcaaatgggcggtaggcgtgtacggtgggaggtctatataagcagagctcgtttagtgaaccgtc

SEQ ID NO: 21034 - DNA, 286 bp, synthetic construct
  source 1..286: mol_type = other DNA
tacatgaccttacgggactttcctacttggcagtacatctacgtattagtcatcgctattaccatggtgatgcggttttggcagtacaccaatgggcgtggatagcggtttgactcacggggatttccaagtctccaccccattgacgtcaatgggagtttgttttggcaccaaaatcaacgggactttccaaaatgtcgtaataaccccgccccgttgacgcaaatgggcggtaggcgtgtacggtgggaggtctatataagcagagctcgtttagtgaaccgtc

SEQ ID NO: 21035 - DNA, 285 bp, synthetic construct
  source 1..285: mol_type = other DNA
acatgaccttacgggactttcctacttggcagtacatctacgtattagtcatcgctattaccatggtgatgcggttttggcagtacaccaatgggcgtggatagcggtttgactcacggggatttccaagtctccaccccattgacgtcaatgggagtttgttttggcaccaaaatcaacgggactttccaaaatgtcgtaataaccccgccccgttgacgcaaatgggcggtaggcgtgtacggtgggaggtctatataagcagagctcgtttagtgaaccgtc

SEQ ID NO: 21036 - DNA, 284 bp, synthetic construct
  source 1..284: mol_type = other DNA
catgaccttacgggactttcctacttggcagtacatctacgtattagtcatcgctattaccatggtgatgcggttttggcagtacaccaatgggcgtggatagcggtttgactcacggggatttccaagtctccaccccattgacgtcaatgggagtttgttttggcaccaaaatcaacgggactttccaaaatgtcgtaataaccccgccccgttgacgcaaatgggcggtaggcgtgtacggtgggaggtctatataagcagagctcgtttagtgaaccgtc

SEQ ID NO: 21037 - DNA, 283 bp, synthetic construct
  source 1..283: mol_type = other DNA
atgaccttacgggactttcctacttggcagtacatctacgtattagtcatcgctattaccatggtgatgcggttttggcagtacaccaatgggcgtggatagcggtttgactcacggggatttccaagtctccaccccattgacgtcaatgggagtttgttttggcaccaaaatcaacgggactttccaaaatgtcgtaataaccccgccccgttgacgcaaatgggcggtaggcgtgtacggtgggaggtctatataagcagagctcgtttagtgaaccgtc

SEQ ID NO: 21038 - DNA, 282 bp, synthetic construct
  source 1..282: mol_type = other DNA
tgaccttacgggactttcctacttggcagtacatctacgtattagtcatcgctattaccatggtgatgcggttttggcagtacaccaatgggcgtggatagcggtttgactcacggggatttccaagtctccaccccattgacgtcaatgggagtttgttttggcaccaaaatcaacgggactttccaaaatgtcgtaataaccccgccccgttgacgcaaatgggcggtaggcgtgtacggtgggaggtctatataagcagagctcgtttagtgaaccgtc

SEQ ID NO: 21039 - DNA, 281 bp, synthetic construct
  source 1..281: mol_type = other DNA
gaccttacgggactttcctacttggcagtacatctacgtattagtcatcgctattaccatggtgatgcggttttggcagtacaccaatgggcgtggatagcggtttgactcacggggatttccaagtctccaccccattgacgtcaatgggagtttgttttggcaccaaaatcaacgggactttccaaaatgtcgtaataaccccgccccgttgacgcaaatgggcggtaggcgtgtacggtgggaggtctatataagcagagctcgtttagtgaaccgtc

SEQ ID NO: 21040 - DNA, 280 bp, synthetic construct
  source 1..280: mol_type = other DNA
accttacgggactttcctacttggcagtacatctacgtattagtcatcgctattaccatggtgatgcggttttggcagtacaccaatgggcgtggatagcggtttgactcacggggatttccaagtctccaccccattgacgtcaatgggagtttgttttggcaccaaaatcaacgggactttccaaaatgtcgtaataaccccgccccgttgacgcaaatgggcggtaggcgtgtacggtgggaggtctatataagcagagctcgtttagtgaaccgtc

SEQ ID NO: 21041 - DNA, 279 bp, synthetic construct
  source 1..279: mol_type = other DNA
ccttacgggactttcctacttggcagtacatctacgtattagtcatcgctattaccatggtgatgcggttttggcagtacaccaatgggcgtggatagcggtttgactcacggggatttccaagtctccaccccattgacgtcaatgggagtttgttttggcaccaaaatcaacgggactttccaaaatgtcgtaataaccccgccccgttgacgcaaatgggcggtaggcgtgtacggtgggaggtctatataagcagagctcgtttagtgaaccgtc

SEQ ID NO: 21042 - DNA, 278 bp, synthetic construct
  source 1..278: mol_type = other DNA
cttacgggactttcctacttggcagtacatctacgtattagtcatcgctattaccatggtgatgcggttttggcagtacaccaatgggcgtggatagcggtttgactcacggggatttccaagtctccaccccattgacgtcaatgggagtttgttttggcaccaaaatcaacgggactttccaaaatgtcgtaataaccccgccccgttgacgcaaatgggcggtaggcgtgtacggtgggaggtctatataagcagagctcgtttagtgaaccgtc

SEQ ID NO: 21043 - DNA, 277 bp, synthetic construct
  source 1..277: mol_type = other DNA
ttacgggactttcctacttggcagtacatctacgtattagtcatcgctattaccatggtgatgcggttttggcagtacaccaatgggcgtggatagcggtttgactcacggggatttccaagtctccaccccattgacgtcaatgggagtttgttttggcaccaaaatcaacgggactttccaaaatgtcgtaataaccccgccccgttgacgcaaatgggcggtaggcgtgtacggtgggaggtctatataagcagagctcgtttagtgaaccgtc

SEQ ID NO: 21044 - DNA, 276 bp, synthetic construct
  source 1..276: mol_type = other DNA
tacgggactttcctacttggcagtacatctacgtattagtcatcgctattaccatggtgatgcggttttggcagtacaccaatgggcgtggatagcggtttgactcacggggatttccaagtctccaccccattgacgtcaatgggagtttgttttggcaccaaaatcaacgggactttccaaaatgtcgtaataaccccgccccgttgacgcaaatgggcggtaggcgtgtacggtgggaggtctatataagcagagctcgtttagtgaaccgtc

SEQ ID NO: 21045 - DNA, 275 bp, synthetic construct
  source 1..275: mol_type = other DNA
acgggactttcctacttggcagtacatctacgtattagtcatcgctattaccatggtgatgcggttttggcagtacaccaatgggcgtggatagcggtttgactcacggggatttccaagtctccaccccattgacgtcaatgggagtttgttttggcaccaaaatcaacgggactttccaaaatgtcgtaataaccccgccccgttgacgcaaatgggcggtaggcgtgtacggtgggaggtctatataagcagagctcgtttagtgaaccgtc

SEQ ID NO: 21046 - DNA, 274 bp, synthetic construct
  source 1..274: mol_type = other DNA
cgggactttcctacttggcagtacatctacgtattagtcatcgctattaccatggtgatgcggttttggcagtacaccaatgggcgtggatagcggtttgactcacggggatttccaagtctccaccccattgacgtcaatgggagtttgttttggcaccaaaatcaacgggactttccaaaatgtcgtaataaccccgccccgttgacgcaaatgggcggtaggcgtgtacggtgggaggtctatataagcagagctcgtttagtgaaccgtc

SEQ ID NO: 21047 - DNA, 273 bp, synthetic construct
  source 1..273: mol_type = other DNA
gggactttcctacttggcagtacatctacgtattagtcatcgctattaccatggtgatgcggttttggcagtacaccaatgggcgtggatagcggtttgactcacggggatttccaagtctccaccccattgacgtcaatgggagtttgttttggcaccaaaatcaacgggactttccaaaatgtcgtaataaccccgccccgttgacgcaaatgggcggtaggcgtgtacggtgggaggtctatataagcagagctcgtttagtgaaccgtc

SEQ ID NO: 21048 - DNA, 272 bp, synthetic construct
  source 1..272: mol_type = other DNA
ggactttcctacttggcagtacatctacgtattagtcatcgctattaccatggtgatgcggttttggcagtacaccaatgggcgtggatagcggtttgactcacggggatttccaagtctccaccccattgacgtcaatgggagtttgttttggcaccaaaatcaacgggactttccaaaatgtcgtaataaccccgccccgttgacgcaaatgggcggtaggcgtgtacggtgggaggtctatataagcagagctcgtttagtgaaccgtc

SEQ ID NO: 21049 - DNA, 271 bp, synthetic construct
  source 1..271: mol_type = other DNA
gactttcctacttggcagtacatctacgtattagtcatcgctattaccatggtgatgcggttttggcagtacaccaatgggcgtggatagcggtttgactcacggggatttccaagtctccaccccattgacgtcaatgggagtttgttttggcaccaaaatcaacgggactttccaaaatgtcgtaataaccccgccccgttgacgcaaatgggcggtaggcgtgtacggtgggaggtctatataagcagagctcgtttagtgaaccgtc

SEQ ID NO: 21050 - DNA, 270 bp, synthetic construct
  source 1..270: mol_type = other DNA
actttcctacttggcagtacatctacgtattagtcatcgctattaccatggtgatgcggttttggcagtacaccaatgggcgtggatagcggtttgactcacggggatttccaagtctccaccccattgacgtcaatgggagtttgttttggcaccaaaatcaacgggactttccaaaatgtcgtaataaccccgccccgttgacgcaaatgggcggtaggcgtgtacggtgggaggtctatataagcagagctcgtttagtgaaccgtc

SEQ ID NO: 21051 - DNA, 269 bp, synthetic construct
  source 1..269: mol_type = other DNA
ctttcctacttggcagtacatctacgtattagtcatcgctattaccatggtgatgcggttttggcagtacaccaatgggcgtggatagcggtttgactcacggggatttccaagtctccaccccattgacgtcaatgggagtttgttttggcaccaaaatcaacgggactttccaaaatgtcgtaataaccccgccccgttgacgcaaatgggcggtaggcgtgtacggtgggaggtctatataagcagagctcgtttagtgaaccgtc

SEQ ID NO: 21052 - DNA, 268 bp, synthetic construct
  source 1..268: mol_type = other DNA
tttcctacttggcagtacatctacgtattagtcatcgctattaccatggtgatgcggttttggcagtacaccaatgggcgtggatagcggtttgactcacggggatttccaagtctccaccccattgacgtcaatgggagtttgttttggcaccaaaatcaacgggactttccaaaatgtcgtaataaccccgccccgttgacgcaaatgggcggtaggcgtgtacggtgggaggtctatataagcagagctcgtttagtgaaccgtc

SEQ ID NO: 21053 - DNA, 267 bp, synthetic construct
  source 1..267: mol_type = other DNA
ttcctacttggcagtacatctacgtattagtcatcgctattaccatggtgatgcggttttggcagtacaccaatgggcgtggatagcggtttgactcacggggatttccaagtctccaccccattgacgtcaatgggagtttgttttggcaccaaaatcaacgggactttccaaaatgtcgtaataaccccgccccgttgacgcaaatgggcggtaggcgtgtacggtgggaggtctatataagcagagctcgtttagtgaaccgtc

SEQ ID NO: 21054 - DNA, 266 bp, synthetic construct
  source 1..266: mol_type = other DNA
tcctacttggcagtacatctacgtattagtcatcgctattaccatggtgatgcggttttggcagtacaccaatgggcgtggatagcggtttgactcacggggatttccaagtctccaccccattgacgtcaatgggagtttgttttggcaccaaaatcaacgggactttccaaaatgtcgtaataaccccgccccgttgacgcaaatgggcggtaggcgtgtacggtgggaggtctatataagcagagctcgtttagtgaaccgtc

SEQ ID NO: 21055 - DNA, 265 bp, synthetic construct
  source 1..265: mol_type = other DNA
cctacttggcagtacatctacgtattagtcatcgctattaccatggtgatgcggttttggcagtacaccaatgggcgtggatagcggtttgactcacggggatttccaagtctccaccccattgacgtcaatgggagtttgttttggcaccaaaatcaacgggactttccaaaatgtcgtaataaccccgccccgttgacgcaaatgggcggtaggcgtgtacggtgggaggtctatataagcagagctcgtttagtgaaccgtc

SEQ ID NO: 21056 - DNA, 264 bp, synthetic construct
  source 1..264: mol_type = other DNA
ctacttggcagtacatctacgtattagtcatcgctattaccatggtgatgcggttttggcagtacaccaatgggcgtggatagcggtttgactcacggggatttccaagtctccaccccattgacgtcaatgggagtttgttttggcaccaaaatcaacgggactttccaaaatgtcgtaataaccccgccccgttgacgcaaatgggcggtaggcgtgtacggtgggaggtctatataagcagagctcgtttagtgaaccgtc

SEQ ID NO: 21057 - DNA, 263 bp, synthetic construct
  source 1..263: mol_type = other DNA
tacttggcagtacatctacgtattagtcatcgctattaccatggtgatgcggttttggcagtacaccaatgggcgtggatagcggtttgactcacggggatttccaagtctccaccccattgacgtcaatgggagtttgttttggcaccaaaatcaacgggactttccaaaatgtcgtaataaccccgccccgttgacgcaaatgggcggtaggcgtgtacggtgggaggtctatataagcagagctcgtttagtgaaccgtc

SEQ ID NO: 21058 - DNA, 262 bp, synthetic construct
  source 1..262: mol_type = other DNA
acttggcagtacatctacgtattagtcatcgctattaccatggtgatgcggttttggcagtacaccaatgggcgtggatagcggtttgactcacggggatttccaagtctccaccccattgacgtcaatgggagtttgttttggcaccaaaatcaacgggactttccaaaatgtcgtaataaccccgccccgttgacgcaaatgggcggtaggcgtgtacggtgggaggtctatataagcagagctcgtttagtgaaccgtc

SEQ ID NO: 21059 - DNA, 261 bp, synthetic construct
  source 1..261: mol_type = other DNA
cttggcagtacatctacgtattagtcatcgctattaccatggtgatgcggttttggcagtacaccaatgggcgtggatagcggtttgactcacggggatttccaagtctccaccccattgacgtcaatgggagtttgttttggcaccaaaatcaacgggactttccaaaatgtcgtaataaccccgccccgttgacgcaaatgggcggtaggcgtgtacggtgggaggtctatataagcagagctcgtttagtgaaccgtc

SEQ ID NO: 21060 - DNA, 260 bp, synthetic construct
  source 1..260: mol_type = other DNA
ttggcagtacatctacgtattagtcatcgctattaccatggtgatgcggttttggcagtacaccaatgggcgtggatagcggtttgactcacggggatttccaagtctccaccccattgacgtcaatgggagtttgttttggcaccaaaatcaacgggactttccaaaatgtcgtaataaccccgccccgttgacgcaaatgggcggtaggcgtgtacggtgggaggtctatataagcagagctcgtttagtgaaccgtc

SEQ ID NO: 21061 - DNA, 259 bp, synthetic construct
  source 1..259: mol_type = other DNA
tggcagtacatctacgtattagtcatcgctattaccatggtgatgcggttttggcagtacaccaatgggcgtggatagcggtttgactcacggggatttccaagtctccaccccattgacgtcaatgggagtttgttttggcaccaaaatcaacgggactttccaaaatgtcgtaataaccccgccccgttgacgcaaatgggcggtaggcgtgtacggtgggaggtctatataagcagagctcgtttagtgaaccgtc

SEQ ID NO: 21062 - DNA, 258 bp, synthetic construct
  source 1..258: mol_type = other DNA
ggcagtacatctacgtattagtcatcgctattaccatggtgatgcggttttggcagtacaccaatgggcgtggatagcggtttgactcacggggatttccaagtctccaccccattgacgtcaatgggagtttgttttggcaccaaaatcaacgggactttccaaaatgtcgtaataaccccgccccgttgacgcaaatgggcggtaggcgtgtacggtgggaggtctatataagcagagctcgtttagtgaaccgtc

SEQ ID NO: 21063 - DNA, 257 bp, synthetic construct
  source 1..257: mol_type = other DNA
gcagtacatctacgtattagtcatcgctattaccatggtgatgcggttttggcagtacaccaatgggcgtggatagcggtttgactcacggggatttccaagtctccaccccattgacgtcaatgggagtttgttttggcaccaaaatcaacgggactttccaaaatgtcgtaataaccccgccccgttgacgcaaatgggcggtaggcgtgtacggtgggaggtctatataagcagagctcgtttagtgaaccgtc

SEQ ID NO: 21064 - DNA, 256 bp, synthetic construct
  source 1..256: mol_type = other DNA
cagtacatctacgtattagtcatcgctattaccatggtgatgcggttttggcagtacaccaatgggcgtggatagcggtttgactcacggggatttccaagtctccaccccattgacgtcaatgggagtttgttttggcaccaaaatcaacgggactttccaaaatgtcgtaataaccccgccccgttgacgcaaatgggcggtaggcgtgtacggtgggaggtctatataagcagagctcgtttagtgaaccgtc

SEQ ID NO: 21065 - DNA, 255 bp, synthetic construct
  source 1..255: mol_type = other DNA
agtacatctacgtattagtcatcgctattaccatggtgatgcggttttggcagtacaccaatgggcgtggatagcggtttgactcacggggatttccaagtctccaccccattgacgtcaatgggagtttgttttggcaccaaaatcaacgggactttccaaaatgtcgtaataaccccgccccgttgacgcaaatgggcggtaggcgtgtacggtgggaggtctatataagcagagctcgtttagtgaaccgtc

SEQ ID NO: 21066 - DNA, 254 bp, synthetic construct
  source 1..254: mol_type = other DNA
gtacatctacgtattagtcatcgctattaccatggtgatgcggttttggcagtacaccaatgggcgtggatagcggtttgactcacggggatttccaagtctccaccccattgacgtcaatgggagtttgttttggcaccaaaatcaacgggactttccaaaatgtcgtaataaccccgccccgttgacgcaaatgggcggtaggcgtgtacggtgggaggtctatataagcagagctcgtttagtgaaccgtc

SEQ ID NO: 21067 - DNA, 253 bp, synthetic construct
  source 1..253: mol_type = other DNA
tacatctacgtattagtcatcgctattaccatggtgatgcggttttggcagtacaccaatgggcgtggatagcggtttgactcacggggatttccaagtctccaccccattgacgtcaatgggagtttgttttggcaccaaaatcaacgggactttccaaaatgtcgtaataaccccgccccgttgacgcaaatgggcggtaggcgtgtacggtgggaggtctatataagcagagctcgtttagtgaaccgtc

SEQ ID NO: 21068 - DNA, 252 bp, synthetic construct
  source 1..252: mol_type = other DNA
acatctacgtattagtcatcgctattaccatggtgatgcggttttggcagtacaccaatgggcgtggatagcggtttgactcacggggatttccaagtctccaccccattgacgtcaatgggagtttgttttggcaccaaaatcaacgggactttccaaaatgtcgtaataaccccgccccgttgacgcaaatgggcggtaggcgtgtacggtgggaggtctatataagcagagctcgtttagtgaaccgtc

SEQ ID NO: 21069 - DNA, 251 bp, synthetic construct
  source 1..251: mol_type = other DNA
catctacgtattagtcatcgctattaccatggtgatgcggttttggcagtacaccaatgggcgtggatagcggtttgactcacggggatttccaagtctccaccccattgacgtcaatgggagtttgttttggcaccaaaatcaacgggactttccaaaatgtcgtaataaccccgccccgttgacgcaaatgggcggtaggcgtgtacggtgggaggtctatataagcagagctcgtttagtgaaccgtc

SEQ ID NO: 21070 - DNA, 250 bp, synthetic construct
  source 1..250: mol_type = other DNA
atctacgtattagtcatcgctattaccatggtgatgcggttttggcagtacaccaatgggcgtggatagcggtttgactcacggggatttccaagtctccaccccattgacgtcaatgggagtttgttttggcaccaaaatcaacgggactttccaaaatgtcgtaataaccccgccccgttgacgcaaatgggcggtaggcgtgtacggtgggaggtctatataagcagagctcgtttagtgaaccgtc

SEQ ID NO: 21071 - DNA, 249 bp, synthetic construct
  source 1..249: mol_type = other DNA
tctacgtattagtcatcgctattaccatggtgatgcggttttggcagtacaccaatgggcgtggatagcggtttgactcacggggatttccaagtctccaccccattgacgtcaatgggagtttgttttggcaccaaaatcaacgggactttccaaaatgtcgtaataaccccgccccgttgacgcaaatgggcggtaggcgtgtacggtgggaggtctatataagcagagctcgtttagtgaaccgtc

SEQ ID NO: 21072 - DNA, 248 bp, synthetic construct
  source 1..248: mol_type = other DNA
ctacgtattagtcatcgctattaccatggtgatgcggttttggcagtacaccaatgggcgtggatagcggtttgactcacggggatttccaagtctccaccccattgacgtcaatgggagtttgttttggcaccaaaatcaacgggactttccaaaatgtcgtaataaccccgccccgttgacgcaaatgggcggtaggcgtgtacggtgggaggtctatataagcagagctcgtttagtgaaccgtc

SEQ ID NO: 21073 - DNA, 247 bp, synthetic construct
  source 1..247: mol_type = other DNA
tacgtattagtcatcgctattaccatggtgatgcggttttggcagtacaccaatgggcgtggatagcggtttgactcacggggatttccaagtctccaccccattgacgtcaatgggagtttgttttggcaccaaaatcaacgggactttccaaaatgtcgtaataaccccgccccgttgacgcaaatgggcggtaggcgtgtacggtgggaggtctatataagcagagctcgtttagtgaaccgtc

SEQ ID NO: 21074 - DNA, 246 bp, synthetic construct
  source 1..246: mol_type = other DNA
acgtattagtcatcgctattaccatggtgatgcggttttggcagtacaccaatgggcgtggatagcggtttgactcacggggatttccaagtctccaccccattgacgtcaatgggagtttgttttggcaccaaaatcaacgggactttccaaaatgtcgtaataaccccgccccgttgacgcaaatgggcggtaggcgtgtacggtgggaggtctatataagcagagctcgtttagtgaaccgtc

SEQ ID NO: 21075 - DNA, 245 bp, synthetic construct
  source 1..245: mol_type = other DNA
cgtattagtcatcgctattaccatggtgatgcggttttggcagtacaccaatgggcgtggatagcggtttgactcacggggatttccaagtctccaccccattgacgtcaatgggagtttgttttggcaccaaaatcaacgggactttccaaaatgtcgtaataaccccgccccgttgacgcaaatgggcggtaggcgtgtacggtgggaggtctatataagcagagctcgtttagtgaaccgtc

SEQ ID NO: 21076 - DNA, 244 bp, synthetic construct
  source 1..244: mol_type = other DNA
gtattagtcatcgctattaccatggtgatgcggttttggcagtacaccaatgggcgtggatagcggtttgactcacggggatttccaagtctccaccccattgacgtcaatgggagtttgttttggcaccaaaatcaacgggactttccaaaatgtcgtaataaccccgccccgttgacgcaaatgggcggtaggcgtgtacggtgggaggtctatataagcagagctcgtttagtgaaccgtc

SEQ ID NO: 21077 - DNA, 243 bp, synthetic construct
  source 1..243: mol_type = other DNA
tattagtcatcgctattaccatggtgatgcggttttggcagtacaccaatgggcgtggatagcggtttgactcacggggatttccaagtctccaccccattgacgtcaatgggagtttgttttggcaccaaaatcaacgggactttccaaaatgtcgtaataaccccgccccgttgacgcaaatgggcggtaggcgtgtacggtgggaggtctatataagcagagctcgtttagtgaaccgtc

SEQ ID NO: 21078 - DNA, 242 bp, synthetic construct
  source 1..242: mol_type = other DNA
attagtcatcgctattaccatggtgatgcggttttggcagtacaccaatgggcgtggatagcggtttgactcacggggatttccaagtctccaccccattgacgtcaatgggagtttgttttggcaccaaaatcaacgggactttccaaaatgtcgtaataaccccgccccgttgacgcaaatgggcggtaggcgtgtacggtgggaggtctatataagcagagctcgtttagtgaaccgtc

SEQ ID NO: 21079 - DNA, 241 bp, synthetic construct
  source 1..241: mol_type = other DNA
ttagtcatcgctattaccatggtgatgcggttttggcagtacaccaatgggcgtggatagcggtttgactcacggggatttccaagtctccaccccattgacgtcaatgggagtttgttttggcaccaaaatcaacgggactttccaaaatgtcgtaataaccccgccccgttgacgcaaatgggcggtaggcgtgtacggtgggaggtctatataagcagagctcgtttagtgaaccgtc

SEQ ID NO: 21080 - DNA, 240 bp, synthetic construct
  source 1..240: mol_type = other DNA
tagtcatcgctattaccatggtgatgcggttttggcagtacaccaatgggcgtggatagcggtttgactcacggggatttccaagtctccaccccattgacgtcaatgggagtttgttttggcaccaaaatcaacgggactttccaaaatgtcgtaataaccccgccccgttgacgcaaatgggcggtaggcgtgtacggtgggaggtctatataagcagagctcgtttagtgaaccgtc

SEQ ID NO: 21081 - DNA, 239 bp, synthetic construct
  source 1..239: mol_type = other DNA
agtcatcgctattaccatggtgatgcggttttggcagtacaccaatgggcgtggatagcggtttgactcacggggatttccaagtctccaccccattgacgtcaatgggagtttgttttggcaccaaaatcaacgggactttccaaaatgtcgtaataaccccgccccgttgacgcaaatgggcggtaggcgtgtacggtgggaggtctatataagcagagctcgtttagtgaaccgtc

SEQ ID NO: 21082 - DNA, 238 bp, synthetic construct
  source 1..238: mol_type = other DNA
gtcatcgctattaccatggtgatgcggttttggcagtacaccaatgggcgtggatagcggtttgactcacggggatttccaagtctccaccccattgacgtcaatgggagtttgttttggcaccaaaatcaacgggactttccaaaatgtcgtaataaccccgccccgttgacgcaaatgggcggtaggcgtgtacggtgggaggtctatataagcagagctcgtttagtgaaccgtc

SEQ ID NO: 21083 - DNA, 237 bp, synthetic construct
  source 1..237: mol_type = other DNA
tcatcgctattaccatggtgatgcggttttggcagtacaccaatgggcgtggatagcggtttgactcacggggatttccaagtctccaccccattgacgtcaatgggagtttgttttggcaccaaaatcaacgggactttccaaaatgtcgtaataaccccgccccgttgacgcaaatgggcggtaggcgtgtacggtgggaggtctatataagcagagctcgtttagtgaaccgtc

SEQ ID NO: 21084 - DNA, 236 bp, synthetic construct
  source 1..236: mol_type = other DNA
catcgctattaccatggtgatgcggttttggcagtacaccaatgggcgtggatagcggtttgactcacggggatttccaagtctccaccccattgacgtcaatgggagtttgttttggcaccaaaatcaacgggactttccaaaatgtcgtaataaccccgccccgttgacgcaaatgggcggtaggcgtgtacggtgggaggtctatataagcagagctcgtttagtgaaccgtc

SEQ ID NO: 21085 - DNA, 235 bp, synthetic construct
  source 1..235: mol_type = other DNA
atcgctattaccatggtgatgcggttttggcagtacaccaatgggcgtggatagcggtttgactcacggggatttccaagtctccaccccattgacgtcaatgggagtttgttttggcaccaaaatcaacgggactttccaaaatgtcgtaataaccccgccccgttgacgcaaatgggcggtaggcgtgtacggtgggaggtctatataagcagagctcgtttagtgaaccgtc

SEQ ID NO: 21086 - DNA, 234 bp, synthetic construct
  source 1..234: mol_type = other DNA
tcgctattaccatggtgatgcggttttggcagtacaccaatgggcgtggatagcggtttgactcacggggatttccaagtctccaccccattgacgtcaatgggagtttgttttggcaccaaaatcaacgggactttccaaaatgtcgtaataaccccgccccgttgacgcaaatgggcggtaggcgtgtacggtgggaggtctatataagcagagctcgtttagtgaaccgtc

SEQ ID NO: 21087 - DNA, 233 bp, synthetic construct
  source 1..233: mol_type = other DNA
cgctattaccatggtgatgcggttttggcagtacaccaatgggcgtggatagcggtttgactcacggggatttccaagtctccaccccattgacgtcaatgggagtttgttttggcaccaaaatcaacgggactttccaaaatgtcgtaataaccccgccccgttgacgcaaatgggcggtaggcgtgtacggtgggaggtctatataagcagagctcgtttagtgaaccgtc

SEQ ID NO: 21088 - DNA, 232 bp, synthetic construct
  source 1..232: mol_type = other DNA
gctattaccatggtgatgcggttttggcagtacaccaatgggcgtggatagcggtttgactcacggggatttccaagtctccaccccattgacgtcaatgggagtttgttttggcaccaaaatcaacgggactttccaaaatgtcgtaataaccccgccccgttgacgcaaatgggcggtaggcgtgtacggtgggaggtctatataagcagagctcgtttagtgaaccgtc

SEQ ID NO: 21089 - DNA, 231 bp, synthetic construct
  source 1..231: mol_type = other DNA
ctattaccatggtgatgcggttttggcagtacaccaatgggcgtggatagcggtttgactcacggggatttccaagtctccaccccattgacgtcaatgggagtttgttttggcaccaaaatcaacgggactttccaaaatgtcgtaataaccccgccccgttgacgcaaatgggcggtaggcgtgtacggtgggaggtctatataagcagagctcgtttagtgaaccgtc

SEQ ID NO: 21090 - DNA, 230 bp, synthetic construct
  source 1..230: mol_type = other DNA
tattaccatggtgatgcggttttggcagtacaccaatgggcgtggatagcggtttgactcacggggatttccaagtctccaccccattgacgtcaatgggagtttgttttggcaccaaaatcaacgggactttccaaaatgtcgtaataaccccgccccgttgacgcaaatgggcggtaggcgtgtacggtgggaggtctatataagcagagctcgtttagtgaaccgtc

SEQ ID NO: 21091 - DNA, 229 bp, synthetic construct
  source 1..229: mol_type = other DNA
attaccatggtgatgcggttttggcagtacaccaatgggcgtggatagcggtttgactcacggggatttccaagtctccaccccattgacgtcaatgggagtttgttttggcaccaaaatcaacgggactttccaaaatgtcgtaataaccccgccccgttgacgcaaatgggcggtaggcgtgtacggtgggaggtctatataagcagagctcgtttagtgaaccgtc

SEQ ID NO: 21092 - DNA, 228 bp, synthetic construct
  source 1..228: mol_type = other DNA
ttaccatggtgatgcggttttggcagtacaccaatgggcgtggatagcggtttgactcacggggatttccaagtctccaccccattgacgtcaatgggagtttgttttggcaccaaaatcaacgggactttccaaaatgtcgtaataaccccgccccgttgacgcaaatgggcggtaggcgtgtacggtgggaggtctatataagcagagctcgtttagtgaaccgtc

SEQ ID NO: 21093 - DNA, 227 bp, synthetic construct
  source 1..227: mol_type = other DNA
taccatggtgatgcggttttggcagtacaccaatgggcgtggatagcggtttgactcacggggatttccaagtctccaccccattgacgtcaatgggagtttgttttggcaccaaaatcaacgggactttccaaaatgtcgtaataaccccgccccgttgacgcaaatgggcggtaggcgtgtacggtgggaggtctatataagcagagctcgtttagtgaaccgtc

SEQ ID NO: 21094 - DNA, 226 bp, synthetic construct
  source 1..226: mol_type = other DNA
accatggtgatgcggttttggcagtacaccaatgggcgtggatagcggtttgactcacggggatttccaagtctccaccccattgacgtcaatgggagtttgttttggcaccaaaatcaacgggactttccaaaatgtcgtaataaccccgccccgttgacgcaaatgggcggtaggcgtgtacggtgggaggtctatataagcagagctcgtttagtgaaccgtc

SEQ ID NO: 21095 - DNA, 225 bp, synthetic construct
  source 1..225: mol_type = other DNA
ccatggtgatgcggttttggcagtacaccaatgggcgtggatagcggtttgactcacggggatttccaagtctccaccccattgacgtcaatgggagtttgttttggcaccaaaatcaacgggactttccaaaatgtcgtaataaccccgccccgttgacgcaaatgggcggtaggcgtgtacggtgggaggtctatataagcagagctcgtttagtgaaccgtc

SEQ ID NO: 21096 - DNA, 224 bp, synthetic construct
  source 1..224: mol_type = other DNA
catggtgatgcggttttggcagtacaccaatgggcgtggatagcggtttgactcacggggatttccaagtctccaccccattgacgtcaatgggagtttgttttggcaccaaaatcaacgggactttccaaaatgtcgtaataaccccgccccgttgacgcaaatgggcggtaggcgtgtacggtgggaggtctatataagcagagctcgtttagtgaaccgtc

SEQ ID NO: 21097 - DNA, 223 bp, synthetic construct
  source 1..223: mol_type = other DNA
atggtgatgcggttttggcagtacaccaatgggcgtggatagcggtttgactcacggggatttccaagtctccaccccattgacgtcaatgggagtttgttttggcaccaaaatcaacgggactttccaaaatgtcgtaataaccccgccccgttgacgcaaatgggcggtaggcgtgtacggtgggaggtctatataagcagagctcgtttagtgaaccgtc

SEQ ID NO: 21098 - DNA, 222 bp, synthetic construct
  source 1..222: mol_type = other DNA
tggtgatgcggttttggcagtacaccaatgggcgtggatagcggtttgactcacggggatttccaagtctccaccccattgacgtcaatgggagtttgttttggcaccaaaatcaacgggactttccaaaatgtcgtaataaccccgccccgttgacgcaaatgggcggtaggcgtgtacggtgggaggtctatataagcagagctcgtttagtgaaccgtc

SEQ ID NO: 21099 - DNA, 221 bp, synthetic construct
  source 1..221: mol_type = other DNA
ggtgatgcggttttggcagtacaccaatgggcgtggatagcggtttgactcacggggatttccaagtctccaccccattgacgtcaatgggagtttgttttggcaccaaaatcaacgggactttccaaaatgtcgtaataaccccgccccgttgacgcaaatgggcggtaggcgtgtacggtgggaggtctatataagcagagctcgtttagtgaaccgtc

SEQ ID NO: 21100 - DNA, 220 bp, synthetic construct
  source 1..220: mol_type = other DNA
gtgatgcggttttggcagtacaccaatgggcgtggatagcggtttgactcacggggatttccaagtctccaccccattgacgtcaatgggagtttgttttggcaccaaaatcaacgggactttccaaaatgtcgtaataaccccgccccgttgacgcaaatgggcggtaggcgtgtacggtgggaggtctatataagcagagctcgtttagtgaaccgtc

SEQ ID NO: 21101 - DNA, 219 bp, synthetic construct
  source 1..219: mol_type = other DNA
tgatgcggttttggcagtacaccaatgggcgtggatagcggtttgactcacggggatttccaagtctccaccccattgacgtcaatgggagtttgttttggcaccaaaatcaacgggactttccaaaatgtcgtaataaccccgccccgttgacgcaaatgggcggtaggcgtgtacggtgggaggtctatataagcagagctcgtttagtgaaccgtc

SEQ ID NO: 21102 - DNA, 218 bp, synthetic construct
  source 1..218: mol_type = other DNA
gatgcggttttggcagtacaccaatgggcgtggatagcggtttgactcacggggatttccaagtctccaccccattgacgtcaatgggagtttgttttggcaccaaaatcaacgggactttccaaaatgtcgtaataaccccgccccgttgacgcaaatgggcggtaggcgtgtacggtgggaggtctatataagcagagctcgtttagtgaaccgtc

SEQ ID NO: 21103 - DNA, 217 bp, synthetic construct
  source 1..217: mol_type = other DNA
atgcggttttggcagtacaccaatgggcgtggatagcggtttgactcacggggatttccaagtctccaccccattgacgtcaatgggagtttgttttggcaccaaaatcaacgggactttccaaaatgtcgtaataaccccgccccgttgacgcaaatgggcggtaggcgtgtacggtgggaggtctatataagcagagctcgtttagtgaaccgtc

SEQ ID NO: 21104 - DNA, 216 bp, synthetic construct
  source 1..216: mol_type = other DNA
tgcggttttggcagtacaccaatgggcgtggatagcggtttgactcacggggatttccaagtctccaccccattgacgtcaatgggagtttgttttggcaccaaaatcaacgggactttccaaaatgtcgtaataaccccgccccgttgacgcaaatgggcggtaggcgtgtacggtgggaggtctatataagcagagctcgtttagtgaaccgtc

SEQ ID NO: 21105 - DNA, 215 bp, synthetic construct
  source 1..215: mol_type = other DNA
gcggttttggcagtacaccaatgggcgtggatagcggtttgactcacggggatttccaagtctccaccccattgacgtcaatgggagtttgttttggcaccaaaatcaacgggactttccaaaatgtcgtaataaccccgccccgttgacgcaaatgggcggtaggcgtgtacggtgggaggtctatataagcagagctcgtttagtgaaccgtc

SEQ ID NO: 21106 - DNA, 214 bp, synthetic construct
  source 1..214: mol_type = other DNA
cggttttggcagtacaccaatgggcgtggatagcggtttgactcacggggatttccaagtctccaccccattgacgtcaatgggagtttgttttggcaccaaaatcaacgggactttccaaaatgtcgtaataaccccgccccgttgacgcaaatgggcggtaggcgtgtacggtgggaggtctatataagcagagctcgtttagtgaaccgtc

SEQ ID NO: 21107 - DNA, 213 bp, synthetic construct
  source 1..213: mol_type = other DNA
ggttttggcagtacaccaatgggcgtggatagcggtttgactcacggggatttccaagtctccaccccattgacgtcaatgggagtttgttttggcaccaaaatcaacgggactttccaaaatgtcgtaataaccccgccccgttgacgcaaatgggcggtaggcgtgtacggtgggaggtctatataagcagagctcgtttagtgaaccgtc

SEQ ID NO: 21108 - DNA, 212 bp, synthetic construct
  source 1..212: mol_type = other DNA
gttttggcagtacaccaatgggcgtggatagcggtttgactcacggggatttccaagtctccaccccattgacgtcaatgggagtttgttttggcaccaaaatcaacgggactttccaaaatgtcgtaataaccccgccccgttgacgcaaatgggcggtaggcgtgtacggtgggaggtctatataagcagagctcgtttagtgaaccgtc

SEQ ID NO: 21109 - DNA, 211 bp, synthetic construct
  source 1..211: mol_type = other DNA
ttttggcagtacaccaatgggcgtggatagcggtttgactcacggggatttccaagtctccaccccattgacgtcaatgggagtttgttttggcaccaaaatcaacgggactttccaaaatgtcgtaataaccccgccccgttgacgcaaatgggcggtaggcgtgtacggtgggaggtctatataagcagagctcgtttagtgaaccgtc

SEQ ID NO: 21110 - DNA, 210 bp, synthetic construct
  source 1..210: mol_type = other DNA
tttggcagtacaccaatgggcgtggatagcggtttgactcacggggatttccaagtctccaccccattgacgtcaatgggagtttgttttggcaccaaaatcaacgggactttccaaaatgtcgtaataaccccgccccgttgacgcaaatgggcggtaggcgtgtacggtgggaggtctatataagcagagctcgtttagtgaaccgtc

SEQ ID NO: 21111 - DNA, 209 bp, synthetic construct
  source 1..209: mol_type = other DNA
ttggcagtacaccaatgggcgtggatagcggtttgactcacggggatttccaagtctccaccccattgacgtcaatgggagtttgttttggcaccaaaatcaacgggactttccaaaatgtcgtaataaccccgccccgttgacgcaaatgggcggtaggcgtgtacggtgggaggtctatataagcagagctcgtttagtgaaccgtc

SEQ ID NO: 21112 - DNA, 208 bp, synthetic construct
  source 1..208: mol_type = other DNA
tggcagtacaccaatgggcgtggatagcggtttgactcacggggatttccaagtctccaccccattgacgtcaatgggagtttgttttggcaccaaaatcaacgggactttccaaaatgtcgtaataaccccgccccgttgacgcaaatgggcggtaggcgtgtacggtgggaggtctatataagcagagctcgtttagtgaaccgtc

SEQ ID NO: 21113 - DNA, 207 bp, synthetic construct
  source 1..207: mol_type = other DNA
ggcagtacaccaatgggcgtggatagcggtttgactcacggggatttccaagtctccaccccattgacgtcaatgggagtttgttttggcaccaaaatcaacgggactttccaaaatgtcgtaataaccccgccccgttgacgcaaatgggcggtaggcgtgtacggtgggaggtctatataagcagagctcgtttagtgaaccgtc

SEQ ID NO: 21114 - DNA, 206 bp, synthetic construct
  source 1..206: mol_type = other DNA
gcagtacaccaatgggcgtggatagcggtttgactcacggggatttccaagtctccaccccattgacgtcaatgggagtttgttttggcaccaaaatcaacgggactttccaaaatgtcgtaataaccccgccccgttgacgcaaatgggcggtaggcgtgtacggtgggaggtctatataagcagagctcgtttagtgaaccgtc

SEQ ID NO: 21115 - DNA, 205 bp, synthetic construct
  source 1..205: mol_type = other DNA
cagtacaccaatgggcgtggatagcggtttgactcacggggatttccaagtctccaccccattgacgtcaatgggagtttgttttggcaccaaaatcaacgggactttccaaaatgtcgtaataaccccgccccgttgacgcaaatgggcggtaggcgtgtacggtgggaggtctatataagcagagctcgtttagtgaaccgtc

SEQ ID NO: 21116 - DNA, 204 bp, synthetic construct
  source 1..204: mol_type = other DNA
agtacaccaatgggcgtggatagcggtttgactcacggggatttccaagtctccaccccattgacgtcaatgggagtttgttttggcaccaaaatcaacgggactttccaaaatgtcgtaataaccccgccccgttgacgcaaatgggcggtaggcgtgtacggtgggaggtctatataagcagagctcgtttagtgaaccgtc

SEQ ID NO: 21117 - DNA, 203 bp, synthetic construct
  source 1..203: mol_type = other DNA
gtacaccaatgggcgtggatagcggtttgactcacggggatttccaagtctccaccccattgacgtcaatgggagtttgttttggcaccaaaatcaacgggactttccaaaatgtcgtaataaccccgccccgttgacgcaaatgggcggtaggcgtgtacggtgggaggtctatataagcagagctcgtttagtgaaccgtc

SEQ ID NO: 21118 - DNA, 202 bp, synthetic construct
  source 1..202: mol_type = other DNA
tacaccaatgggcgtggatagcggtttgactcacggggatttccaagtctccaccccattgacgtcaatgggagtttgttttggcaccaaaatcaacgggactttccaaaatgtcgtaataaccccgccccgttgacgcaaatgggcggtaggcgtgtacggtgggaggtctatataagcagagctcgtttagtgaaccgtc

SEQ ID NO: 21119 - DNA, 201 bp, synthetic construct
  source 1..201: mol_type = other DNA
acaccaatgggcgtggatagcggtttgactcacggggatttccaagtctccaccccattgacgtcaatgggagtttgttttggcaccaaaatcaacgggactttccaaaatgtcgtaataaccccgccccgttgacgcaaatgggcggtaggcgtgtacggtgggaggtctatataagcagagctcgtttagtgaaccgtc

SEQ ID NO: 21120 - DNA, 200 bp, synthetic construct
  source 1..200: mol_type = other DNA
caccaatgggcgtggatagcggtttgactcacggggatttccaagtctccaccccattgacgtcaatgggagtttgttttggcaccaaaatcaacgggactttccaaaatgtcgtaataaccccgccccgttgacgcaaatgggcggtaggcgtgtacggtgggaggtctatataagcagagctcgtttagtgaaccgtc

SEQ ID NO: 21121 - DNA, 199 bp, synthetic construct
  source 1..199: mol_type = other DNA
accaatgggcgtggatagcggtttgactcacggggatttccaagtctccaccccattgacgtcaatgggagtttgttttggcaccaaaatcaacgggactttccaaaatgtcgtaataaccccgccccgttgacgcaaatgggcggtaggcgtgtacggtgggaggtctatataagcagagctcgtttagtgaaccgtc

SEQ ID NO: 21122 - DNA, 198 bp, synthetic construct
  source 1..198: mol_type = other DNA
ccaatgggcgtggatagcggtttgactcacggggatttccaagtctccaccccattgacgtcaatgggagtttgttttggcaccaaaatcaacgggactttccaaaatgtcgtaataaccccgccccgttgacgcaaatgggcggtaggcgtgtacggtgggaggtctatataagcagagctcgtttagtgaaccgtc

SEQ ID NO: 21123 - DNA, 197 bp, synthetic construct
  source 1..197: mol_type = other DNA
caatgggcgtggatagcggtttgactcacggggatttccaagtctccaccccattgacgtcaatgggagtttgttttggcaccaaaatcaacgggactttccaaaatgtcgtaataaccccgccccgttgacgcaaatgggcggtaggcgtgtacggtgggaggtctatataagcagagctcgtttagtgaaccgtc

SEQ ID NO: 21124 - DNA, 196 bp, synthetic construct
  source 1..196: mol_type = other DNA
aatgggcgtggatagcggtttgactcacggggatttccaagtctccaccccattgacgtcaatgggagtttgttttggcaccaaaatcaacgggactttccaaaatgtcgtaataaccccgccccgttgacgcaaatgggcggtaggcgtgtacggtgggaggtctatataagcagagctcgtttagtgaaccgtc

SEQ ID NO: 21125 - DNA, 195 bp, synthetic construct
  source 1..195: mol_type = other DNA
atgggcgtggatagcggtttgactcacggggatttccaagtctccaccccattgacgtcaatgggagtttgttttggcaccaaaatcaacgggactttccaaaatgtcgtaataaccccgccccgttgacgcaaatgggcggtaggcgtgtacggtgggaggtctatataagcagagctcgtttagtgaaccgtc

SEQ ID NO: 21126 - DNA, 194 bp, synthetic construct
  source 1..194: mol_type = other DNA
tgggcgtggatagcggtttgactcacggggatttccaagtctccaccccattgacgtcaatgggagtttgttttggcaccaaaatcaacgggactttccaaaatgtcgtaataaccccgccccgttgacgcaaatgggcggtaggcgtgtacggtgggaggtctatataagcagagctcgtttagtgaaccgtc

SEQ ID NO: 21127 - DNA, 193 bp, synthetic construct
  source 1..193: mol_type = other DNA
gggcgtggatagcggtttgactcacggggatttccaagtctccaccccattgacgtcaatgggagtttgttttggcaccaaaatcaacgggactttccaaaatgtcgtaataaccccgccccgttgacgcaaatgggcggtaggcgtgtacggtgggaggtctatataagcagagctcgtttagtgaaccgtc

SEQ ID NO: 21128 - DNA, 192 bp, synthetic construct
  source 1..192: mol_type = other DNA
ggcgtggatagcggtttgactcacggggatttccaagtctccaccccattgacgtcaatgggagtttgttttggcaccaaaatcaacgggactttccaaaatgtcgtaataaccccgccccgttgacgcaaatgggcggtaggcgtgtacggtgggaggtctatataagcagagctcgtttagtgaaccgtc

SEQ ID NO: 21129 - DNA, 191 bp, synthetic construct
  source 1..191: mol_type = other DNA
gcgtggatagcggtttgactcacggggatttccaagtctccaccccattgacgtcaatgggagtttgttttggcaccaaaatcaacgggactttccaaaatgtcgtaataaccccgccccgttgacgcaaatgggcggtaggcgtgtacggtgggaggtctatataagcagagctcgtttagtgaaccgtc

SEQ ID NO: 21130 - DNA, 190 bp, synthetic construct
  source 1..190: mol_type = other DNA
cgtggatagcggtttgactcacggggatttccaagtctccaccccattgacgtcaatgggagtttgttttggcaccaaaatcaacgggactttccaaaatgtcgtaataaccccgccccgttgacgcaaatgggcggtaggcgtgtacggtgggaggtctatataagcagagctcgtttagtgaaccgtc

SEQ ID NO: 21131 - DNA, 189 bp, synthetic construct
  source 1..189: mol_type = other DNA
gtggatagcggtttgactcacggggatttccaagtctccaccccattgacgtcaatgggagtttgttttggcaccaaaatcaacgggactttccaaaatgtcgtaataaccccgccccgttgacgcaaatgggcggtaggcgtgtacggtgggaggtctatataagcagagctcgtttagtgaaccgtc

SEQ ID NO: 21132 - DNA, 188 bp, synthetic construct
  source 1..188: mol_type = other DNA
tggatagcggtttgactcacggggatttccaagtctccaccccattgacgtcaatgggagtttgttttggcaccaaaatcaacgggactttccaaaatgtcgtaataaccccgccccgttgacgcaaatgggcggtaggcgtgtacggtgggaggtctatataagcagagctcgtttagtgaaccgtc

SEQ ID NO: 21133 - DNA, 187 bp, synthetic construct
  source 1..187: mol_type = other DNA
ggatagcggtttgactcacggggatttccaagtctccaccccattgacgtcaatgggagtttgttttggcaccaaaatcaacgggactttccaaaatgtcgtaataaccccgccccgttgacgcaaatgggcggtaggcgtgtacggtgggaggtctatataagcagagctcgtttagtgaaccgtc

SEQ ID NO: 21134 - DNA, 186 bp, synthetic construct
  source 1..186: mol_type = other DNA
gatagcggtttgactcacggggatttccaagtctccaccccattgacgtcaatgggagtttgttttggcaccaaaatcaacgggactttccaaaatgtcgtaataaccccgccccgttgacgcaaatgggcggtaggcgtgtacggtgggaggtctatataagcagagctcgtttagtgaaccgtc

SEQ ID NO: 21135 - DNA, 185 bp, synthetic construct
  source 1..185: mol_type = other DNA
atagcggtttgactcacggggatttccaagtctccaccccattgacgtcaatgggagtttgttttggcaccaaaatcaacgggactttccaaaatgtcgtaataaccccgccccgttgacgcaaatgggcggtaggcgtgtacggtgggaggtctatataagcagagctcgtttagtgaaccgtc

SEQ ID NO: 21136 - DNA, 184 bp, synthetic construct
  source 1..184: mol_type = other DNA
tagcggtttgactcacggggatttccaagtctccaccccattgacgtcaatgggagtttgttttggcaccaaaatcaacgggactttccaaaatgtcgtaataaccccgccccgttgacgcaaatgggcggtaggcgtgtacggtgggaggtctatataagcagagctcgtttagtgaaccgtc

SEQ ID NO: 21137 - DNA, 183 bp, synthetic construct
  source 1..183: mol_type = other DNA
agcggtttgactcacggggatttccaagtctccaccccattgacgtcaatgggagtttgttttggcaccaaaatcaacgggactttccaaaatgtcgtaataaccccgccccgttgacgcaaatgggcggtaggcgtgtacggtgggaggtctatataagcagagctcgtttagtgaaccgtc

SEQ ID NO: 21138 - DNA, 182 bp, synthetic construct
  source 1..182: mol_type = other DNA
gcggtttgactcacggggatttccaagtctccaccccattgacgtcaatgggagtttgttttggcaccaaaatcaacgggactttccaaaatgtcgtaataaccccgccccgttgacgcaaatgggcggtaggcgtgtacggtgggaggtctatataagcagagctcgtttagtgaaccgtc

SEQ ID NO: 21139 - DNA, 181 bp, synthetic construct
  source 1..181: mol_type = other DNA
cggtttgactcacggggatttccaagtctccaccccattgacgtcaatgggagtttgttttggcaccaaaatcaacgggactttccaaaatgtcgtaataaccccgccccgttgacgcaaatgggcggtaggcgtgtacggtgggaggtctatataagcagagctcgtttagtgaaccgtc

SEQ ID NO: 21140 - DNA, 180 bp, synthetic construct
  source 1..180: mol_type = other DNA
ggtttgactcacggggatttccaagtctccaccccattgacgtcaatgggagtttgttttggcaccaaaatcaacgggactttccaaaatgtcgtaataaccccgccccgttgacgcaaatgggcggtaggcgtgtacggtgggaggtctatataagcagagctcgtttagtgaaccgtc

SEQ ID NO: 21141 - DNA, 179 bp, synthetic construct
  source 1..179: mol_type = other DNA
gtttgactcacggggatttccaagtctccaccccattgacgtcaatgggagtttgttttggcaccaaaatcaacgggactttccaaaatgtcgtaataaccccgccccgttgacgcaaatgggcggtaggcgtgtacggtgggaggtctatataagcagagctcgtttagtgaaccgtc

SEQ ID NO: 21142 - DNA, 178 bp, synthetic construct
  source 1..178: mol_type = other DNA
tttgactcacggggatttccaagtctccaccccattgacgtcaatgggagtttgttttggcaccaaaatcaacgggactttccaaaatgtcgtaataaccccgccccgttgacgcaaatgggcggtaggcgtgtacggtgggaggtctatataagcagagctcgtttagtgaaccgtc

SEQ ID NO: 21143 - DNA, 177 bp, synthetic construct
  source 1..177: mol_type = other DNA
ttgactcacggggatttccaagtctccaccccattgacgtcaatgggagtttgttttggcaccaaaatcaacgggactttccaaaatgtcgtaataaccccgccccgttgacgcaaatgggcggtaggcgtgtacggtgggaggtctatataagcagagctcgtttagtgaaccgtc

SEQ ID NO: 21144 - DNA, 176 bp, synthetic construct
  source 1..176: mol_type = other DNA
tgactcacggggatttccaagtctccaccccattgacgtcaatgggagtttgttttggcaccaaaatcaacgggactttccaaaatgtcgtaataaccccgccccgttgacgcaaatgggcggtaggcgtgtacggtgggaggtctatataagcagagctcgtttagtgaaccgtc

SEQ ID NO: 21145 - DNA, 175 bp, synthetic construct
  source 1..175: mol_type = other DNA
gactcacggggatttccaagtctccaccccattgacgtcaatgggagtttgttttggcaccaaaatcaacgggactttccaaaatgtcgtaataaccccgccccgttgacgcaaatgggcggtaggcgtgtacggtgggaggtctatataagcagagctcgtttagtgaaccgtc

SEQ ID NO: 21146 - DNA, 174 bp, synthetic construct
  source 1..174: mol_type = other DNA
actcacggggatttccaagtctccaccccattgacgtcaatgggagtttgttttggcaccaaaatcaacgggactttccaaaatgtcgtaataaccccgccccgttgacgcaaatgggcggtaggcgtgtacggtgggaggtctatataagcagagctcgtttagtgaaccgtc

SEQ ID NO: 21147 - DNA, 173 bp, synthetic construct
  source 1..173: mol_type = other DNA
ctcacggggatttccaagtctccaccccattgacgtcaatgggagtttgttttggcaccaaaatcaacgggactttccaaaatgtcgtaataaccccgccccgttgacgcaaatgggcggtaggcgtgtacggtgggaggtctatataagcagagctcgtttagtgaaccgtc

SEQ ID NO: 21148 - DNA, 172 bp, synthetic construct
  source 1..172: mol_type = other DNA
tcacggggatttccaagtctccaccccattgacgtcaatgggagtttgttttggcaccaaaatcaacgggactttccaaaatgtcgtaataaccccgccccgttgacgcaaatgggcggtaggcgtgtacggtgggaggtctatataagcagagctcgtttagtgaaccgtc

SEQ ID NO: 21149 - DNA, 171 bp, synthetic construct
  source 1..171: mol_type = other DNA
cacggggatttccaagtctccaccccattgacgtcaatgggagtttgttttggcaccaaaatcaacgggactttccaaaatgtcgtaataaccccgccccgttgacgcaaatgggcggtaggcgtgtacggtgggaggtctatataagcagagctcgtttagtgaaccgtc

SEQ ID NO: 21150 - DNA, 170 bp, synthetic construct
  source 1..170: mol_type = other DNA
acggggatttccaagtctccaccccattgacgtcaatgggagtttgttttggcaccaaaatcaacgggactttccaaaatgtcgtaataaccccgccccgttgacgcaaatgggcggtaggcgtgtacggtgggaggtctatataagcagagctcgtttagtgaaccgtc

SEQ ID NO: 21151 - DNA, 169 bp, synthetic construct
  source 1..169: mol_type = other DNA
cggggatttccaagtctccaccccattgacgtcaatgggagtttgttttggcaccaaaatcaacgggactttccaaaatgtcgtaataaccccgccccgttgacgcaaatgggcggtaggcgtgtacggtgggaggtctatataagcagagctcgtttagtgaaccgtc

SEQ ID NO: 21152 - DNA, 168 bp, synthetic construct
  source 1..168: mol_type = other DNA
ggggatttccaagtctccaccccattgacgtcaatgggagtttgttttggcaccaaaatcaacgggactttccaaaatgtcgtaataaccccgccccgttgacgcaaatgggcggtaggcgtgtacggtgggaggtctatataagcagagctcgtttagtgaaccgtc

SEQ ID NO: 21153 - DNA, 167 bp, synthetic construct
  source 1..167: mol_type = other DNA
gggatttccaagtctccaccccattgacgtcaatgggagtttgttttggcaccaaaatcaacgggactttccaaaatgtcgtaataaccccgccccgttgacgcaaatgggcggtaggcgtgtacggtgggaggtctatataagcagagctcgtttagtgaaccgtc

SEQ ID NO: 21154 - DNA, 166 bp, synthetic construct
  source 1..166: mol_type = other DNA
ggatttccaagtctccaccccattgacgtcaatgggagtttgttttggcaccaaaatcaacgggactttccaaaatgtcgtaataaccccgccccgttgacgcaaatgggcggtaggcgtgtacggtgggaggtctatataagcagagctcgtttagtgaaccgtc

SEQ ID NO: 21155 - DNA, 165 bp, synthetic construct
  source 1..165: mol_type = other DNA
gatttccaagtctccaccccattgacgtcaatgggagtttgttttggcaccaaaatcaacgggactttccaaaatgtcgtaataaccccgccccgttgacgcaaatgggcggtaggcgtgtacggtgggaggtctatataagcagagctcgtttagtgaaccgtc

SEQ ID NO: 21156 - DNA, 164 bp, synthetic construct
  source 1..164: mol_type = other DNA
atttccaagtctccaccccattgacgtcaatgggagtttgttttggcaccaaaatcaacgggactttccaaaatgtcgtaataaccccgccccgttgacgcaaatgggcggtaggcgtgtacggtgggaggtctatataagcagagctcgtttagtgaaccgtc

SEQ ID NO: 21157 - DNA, 163 bp, synthetic construct
  source 1..163: mol_type = other DNA
tttccaagtctccaccccattgacgtcaatgggagtttgttttggcaccaaaatcaacgggactttccaaaatgtcgtaataaccccgccccgttgacgcaaatgggcggtaggcgtgtacggtgggaggtctatataagcagagctcgtttagtgaaccgtc

SEQ ID NO: 21158 - DNA, 162 bp, synthetic construct
  source 1..162: mol_type = other DNA
ttccaagtctccaccccattgacgtcaatgggagtttgttttggcaccaaaatcaacgggactttccaaaatgtcgtaataaccccgccccgttgacgcaaatgggcggtaggcgtgtacggtgggaggtctatataagcagagctcgtttagtgaaccgtc

SEQ ID NO: 21159 - DNA, 161 bp, synthetic construct
  source 1..161: mol_type = other DNA
tccaagtctccaccccattgacgtcaatgggagtttgttttggcaccaaaatcaacgggactttccaaaatgtcgtaataaccccgccccgttgacgcaaatgggcggtaggcgtgtacggtgggaggtctatataagcagagctcgtttagtgaaccgtc

SEQ ID NO: 21160 - DNA, 160 bp, synthetic construct
  source 1..160: mol_type = other DNA
ccaagtctccaccccattgacgtcaatgggagtttgttttggcaccaaaatcaacgggactttccaaaatgtcgtaataaccccgccccgttgacgcaaatgggcggtaggcgtgtacggtgggaggtctatataagcagagctcgtttagtgaaccgtc

SEQ ID NO: 21161 - DNA, 159 bp, synthetic construct
  source 1..159: mol_type = other DNA
caagtctccaccccattgacgtcaatgggagtttgttttggcaccaaaatcaacgggactttccaaaatgtcgtaataaccccgccccgttgacgcaaatgggcggtaggcgtgtacggtgggaggtctatataagcagagctcgtttagtgaaccgtc

SEQ ID NO: 21162 - DNA, 158 bp, synthetic construct
  source 1..158: mol_type = other DNA
aagtctccaccccattgacgtcaatgggagtttgttttggcaccaaaatcaacgggactttccaaaatgtcgtaataaccccgccccgttgacgcaaatgggcggtaggcgtgtacggtgggaggtctatataagcagagctcgtttagtgaaccgtc

SEQ ID NO: 21163 - DNA, 157 bp, synthetic construct
  source 1..157: mol_type = other DNA
agtctccaccccattgacgtcaatgggagtttgttttggcaccaaaatcaacgggactttccaaaatgtcgtaataaccccgccccgttgacgcaaatgggcggtaggcgtgtacggtgggaggtctatataagcagagctcgtttagtgaaccgtc

SEQ ID NO: 21164 - DNA, 156 bp, synthetic construct
  source 1..156: mol_type = other DNA
gtctccaccccattgacgtcaatgggagtttgttttggcaccaaaatcaacgggactttccaaaatgtcgtaataaccccgccccgttgacgcaaatgggcggtaggcgtgtacggtgggaggtctatataagcagagctcgtttagtgaaccgtc

SEQ ID NO: 21165 - DNA, 155 bp, synthetic construct
  source 1..155: mol_type = other DNA
tctccaccccattgacgtcaatgggagtttgttttggcaccaaaatcaacgggactttccaaaatgtcgtaataaccccgccccgttgacgcaaatgggcggtaggcgtgtacggtgggaggtctatataagcagagctcgtttagtgaaccgtc

SEQ ID NO: 21166 - DNA, 154 bp, synthetic construct
  source 1..154: mol_type = other DNA
ctccaccccattgacgtcaatgggagtttgttttggcaccaaaatcaacgggactttccaaaatgtcgtaataaccccgccccgttgacgcaaatgggcggtaggcgtgtacggtgggaggtctatataagcagagctcgtttagtgaaccgtc

SEQ ID NO: 21167 - DNA, 153 bp, synthetic construct
  source 1..153: mol_type = other DNA
tccaccccattgacgtcaatgggagtttgttttggcaccaaaatcaacgggactttccaaaatgtcgtaataaccccgccccgttgacgcaaatgggcggtaggcgtgtacggtgggaggtctatataagcagagctcgtttagtgaaccgtc

SEQ ID NO: 21168 - DNA, 152 bp, synthetic construct
  source 1..152: mol_type = other DNA
ccaccccattgacgtcaatgggagtttgttttggcaccaaaatcaacgggactttccaaaatgtcgtaataaccccgccccgttgacgcaaatgggcggtaggcgtgtacggtgggaggtctatataagcagagctcgtttagtgaaccgtc

SEQ ID NO: 21169 - DNA, 151 bp, synthetic construct
  source 1..151: mol_type = other DNA
caccccattgacgtcaatgggagtttgttttggcaccaaaatcaacgggactttccaaaatgtcgtaataaccccgccccgttgacgcaaatgggcggtaggcgtgtacggtgggaggtctatataagcagagctcgtttagtgaaccgtc

SEQ ID NO: 21170 - DNA, 150 bp, synthetic construct
  source 1..150: mol_type = other DNA
accccattgacgtcaatgggagtttgttttggcaccaaaatcaacgggactttccaaaatgtcgtaataaccccgccccgttgacgcaaatgggcggtaggcgtgtacggtgggaggtctatataagcagagctcgtttagtgaaccgtc

SEQ ID NO: 21171 - DNA, 149 bp, synthetic construct
  source 1..149: mol_type = other DNA
ccccattgacgtcaatgggagtttgttttggcaccaaaatcaacgggactttccaaaatgtcgtaataaccccgccccgttgacgcaaatgggcggtaggcgtgtacggtgggaggtctatataagcagagctcgtttagtgaaccgtc

SEQ ID NO: 21172 - DNA, 148 bp, synthetic construct
  source 1..148: mol_type = other DNA
cccattgacgtcaatgggagtttgttttggcaccaaaatcaacgggactttccaaaatgtcgtaataaccccgccccgttgacgcaaatgggcggtaggcgtgtacggtgggaggtctatataagcagagctcgtttagtgaaccgtc

SEQ ID NO: 21173 - DNA, 147 bp, synthetic construct
  source 1..147: mol_type = other DNA
ccattgacgtcaatgggagtttgttttggcaccaaaatcaacgggactttccaaaatgtcgtaataaccccgccccgttgacgcaaatgggcggtaggcgtgtacggtgggaggtctatataagcagagctcgtttagtgaaccgtc

SEQ ID NO: 21174 - DNA, 146 bp, synthetic construct
  source 1..146: mol_type = other DNA
cattgacgtcaatgggagtttgttttggcaccaaaatcaacgggactttccaaaatgtcgtaataaccccgccccgttgacgcaaatgggcggtaggcgtgtacggtgggaggtctatataagcagagctcgtttagtgaaccgtc

SEQ ID NO: 21175 - DNA, 145 bp, synthetic construct
  source 1..145: mol_type = other DNA
attgacgtcaatgggagtttgttttggcaccaaaatcaacgggactttccaaaatgtcgtaataaccccgccccgttgacgcaaatgggcggtaggcgtgtacggtgggaggtctatataagcagagctcgtttagtgaaccgtc

SEQ ID NO: 21176 - DNA, 144 bp, synthetic construct
  source 1..144: mol_type = other DNA
ttgacgtcaatgggagtttgttttggcaccaaaatcaacgggactttccaaaatgtcgtaataaccccgccccgttgacgcaaatgggcggtaggcgtgtacggtgggaggtctatataagcagagctcgtttagtgaaccgtc

SEQ ID NO: 21177 - DNA, 143 bp, synthetic construct
  source 1..143: mol_type = other DNA
tgacgtcaatgggagtttgttttggcaccaaaatcaacgggactttccaaaatgtcgtaataaccccgccccgttgacgcaaatgggcggtaggcgtgtacggtgggaggtctatataagcagagctcgtttagtgaaccgtc

SEQ ID NO: 21178 - DNA, 142 bp, synthetic construct
  source 1..142: mol_type = other DNA
gacgtcaatgggagtttgttttggcaccaaaatcaacgggactttccaaaatgtcgtaataaccccgccccgttgacgcaaatgggcggtaggcgtgtacggtgggaggtctatataagcagagctcgtttagtgaaccgtc

SEQ ID NO: 21179 - DNA, 141 bp, synthetic construct
  source 1..141: mol_type = other DNA
acgtcaatgggagtttgttttggcaccaaaatcaacgggactttccaaaatgtcgtaataaccccgccccgttgacgcaaatgggcggtaggcgtgtacggtgggaggtctatataagcagagctcgtttagtgaaccgtc

SEQ ID NO: 21180 - DNA, 140 bp, synthetic construct
  source 1..140: mol_type = other DNA
cgtcaatgggagtttgttttggcaccaaaatcaacgggactttccaaaatgtcgtaataaccccgccccgttgacgcaaatgggcggtaggcgtgtacggtgggaggtctatataagcagagctcgtttagtgaaccgtc

SEQ ID NO: 21181 - DNA, 139 bp, synthetic construct
  source 1..139: mol_type = other DNA
gtcaatgggagtttgttttggcaccaaaatcaacgggactttccaaaatgtcgtaataaccccgccccgttgacgcaaatgggcggtaggcgtgtacggtgggaggtctatataagcagagctcgtttagtgaaccgtc

SEQ ID NO: 21182 - DNA, 138 bp, synthetic construct
  source 1..138: mol_type = other DNA
tcaatgggagtttgttttggcaccaaaatcaacgggactttccaaaatgtcgtaataaccccgccccgttgacgcaaatgggcggtaggcgtgtacggtgggaggtctatataagcagagctcgtttagtgaaccgtc

SEQ ID NO: 21183 - DNA, 137 bp, synthetic construct
  source 1..137: mol_type = other DNA
caatgggagtttgttttggcaccaaaatcaacgggactttccaaaatgtcgtaataaccccgccccgttgacgcaaatgggcggtaggcgtgtacggtgggaggtctatataagcagagctcgtttagtgaaccgtc

SEQ ID NO: 21184 - DNA, 136 bp, synthetic construct
  source 1..136: mol_type = other DNA
aatgggagtttgttttggcaccaaaatcaacgggactttccaaaatgtcgtaataaccccgccccgttgacgcaaatgggcggtaggcgtgtacggtgggaggtctatataagcagagctcgtttagtgaaccgtc

SEQ ID NO: 21185 - DNA, 135 bp, synthetic construct
  source 1..135: mol_type = other DNA
atgggagtttgttttggcaccaaaatcaacgggactttccaaaatgtcgtaataaccccgccccgttgacgcaaatgggcggtaggcgtgtacggtgggaggtctatataagcagagctcgtttagtgaaccgtc

SEQ ID NO: 21186 - DNA, 134 bp, synthetic construct
  source 1..134: mol_type = other DNA
tgggagtttgttttggcaccaaaatcaacgggactttccaaaatgtcgtaataaccccgccccgttgacgcaaatgggcggtaggcgtgtacggtgggaggtctatataagcagagctcgtttagtgaaccgtc

SEQ ID NO: 21187 - DNA, 133 bp, synthetic construct
  source 1..133: mol_type = other DNA
gggagtttgttttggcaccaaaatcaacgggactttccaaaatgtcgtaataaccccgccccgttgacgcaaatgggcggtaggcgtgtacggtgggaggtctatataagcagagctcgtttagtgaaccgtc

SEQ ID NO: 21188 - DNA, 132 bp, synthetic construct
  source 1..132: mol_type = other DNA
ggagtttgttttggcaccaaaatcaacgggactttccaaaatgtcgtaataaccccgccccgttgacgcaaatgggcggtaggcgtgtacggtgggaggtctatataagcagagctcgtttagtgaaccgtc

SEQ ID NO: 21189 - DNA, 131 bp, synthetic construct
  source 1..131: mol_type = other DNA
gagtttgttttggcaccaaaatcaacgggactttccaaaatgtcgtaataaccccgccccgttgacgcaaatgggcggtaggcgtgtacggtgggaggtctatataagcagagctcgtttagtgaaccgtc

SEQ ID NO: 21190 - DNA, 130 bp, synthetic construct
  source 1..130: mol_type = other DNA
agtttgttttggcaccaaaatcaacgggactttccaaaatgtcgtaataaccccgccccgttgacgcaaatgggcggtaggcgtgtacggtgggaggtctatataagcagagctcgtttagtgaaccgtc

SEQ ID NO: 21191 - DNA, 129 bp, synthetic construct
  source 1..129: mol_type = other DNA
gtttgttttggcaccaaaatcaacgggactttccaaaatgtcgtaataaccccgccccgttgacgcaaatgggcggtaggcgtgtacggtgggaggtctatataagcagagctcgtttagtgaaccgtc

SEQ ID NO: 21192 - DNA, 128 bp, synthetic construct
  source 1..128: mol_type = other DNA
tttgttttggcaccaaaatcaacgggactttccaaaatgtcgtaataaccccgccccgttgacgcaaatgggcggtaggcgtgtacggtgggaggtctatataagcagagctcgtttagtgaaccgtc

SEQ ID NO: 21193 - DNA, 127 bp, synthetic construct
  source 1..127: mol_type = other DNA
ttgttttggcaccaaaatcaacgggactttccaaaatgtcgtaataaccccgccccgttgacgcaaatgggcggtaggcgtgtacggtgggaggtctatataagcagagctcgtttagtgaaccgtc

SEQ ID NO: 21194 - DNA, 126 bp, synthetic construct
  source 1..126: mol_type = other DNA
tgttttggcaccaaaatcaacgggactttccaaaatgtcgtaataaccccgccccgttgacgcaaatgggcggtaggcgtgtacggtgggaggtctatataagcagagctcgtttagtgaaccgtc

SEQ ID NO: 21195 - DNA, 125 bp, synthetic construct
  source 1..125: mol_type = other DNA
gttttggcaccaaaatcaacgggactttccaaaatgtcgtaataaccccgccccgttgacgcaaatgggcggtaggcgtgtacggtgggaggtctatataagcagagctcgtttagtgaaccgtc

SEQ ID NO: 21196 - DNA, 124 bp, synthetic construct
  source 1..124: mol_type = other DNA
ttttggcaccaaaatcaacgggactttccaaaatgtcgtaataaccccgccccgttgacgcaaatgggcggtaggcgtgtacggtgggaggtctatataagcagagctcgtttagtgaaccgtc

SEQ ID NO: 21197 - DNA, 123 bp, synthetic construct
  source 1..123: mol_type = other DNA
tttggcaccaaaatcaacgggactttccaaaatgtcgtaataaccccgccccgttgacgcaaatgggcggtaggcgtgtacggtgggaggtctatataagcagagctcgtttagtgaaccgtc

SEQ ID NO: 21198 - DNA, 122 bp, synthetic construct
  source 1..122: mol_type = other DNA
ttggcaccaaaatcaacgggactttccaaaatgtcgtaataaccccgccccgttgacgcaaatgggcggtaggcgtgtacggtgggaggtctatataagcagagctcgtttagtgaaccgtc

SEQ ID NO: 21199 - DNA, 121 bp, synthetic construct
  source 1..121: mol_type = other DNA
tggcaccaaaatcaacgggactttccaaaatgtcgtaataaccccgccccgttgacgcaaatgggcggtaggcgtgtacggtgggaggtctatataagcagagctcgtttagtgaaccgtc

SEQ ID NO: 21200 - DNA, 120 bp, synthetic construct
  source 1..120: mol_type = other DNA
ggcaccaaaatcaacgggactttccaaaatgtcgtaataaccccgccccgttgacgcaaatgggcggtaggcgtgtacggtgggaggtctatataagcagagctcgtttagtgaaccgtc

SEQ ID NO: 21201 - DNA, 119 bp, synthetic construct
  source 1..119: mol_type = other DNA
gcaccaaaatcaacgggactttccaaaatgtcgtaataaccccgccccgttgacgcaaatgggcggtaggcgtgtacggtgggaggtctatataagcagagctcgtttagtgaaccgtc

SEQ ID NO: 21202 - DNA, 118 bp, synthetic construct
  source 1..118: mol_type = other DNA
caccaaaatcaacgggactttccaaaatgtcgtaataaccccgccccgttgacgcaaatgggcggtaggcgtgtacggtgggaggtctatataagcagagctcgtttagtgaaccgtc

SEQ ID NO: 21203 - DNA, 117 bp, synthetic construct
  source 1..117: mol_type = other DNA
accaaaatcaacgggactttccaaaatgtcgtaataaccccgccccgttgacgcaaatgggcggtaggcgtgtacggtgggaggtctatataagcagagctcgtttagtgaaccgtc

SEQ ID NO: 21204 - DNA, 116 bp, synthetic construct
  source 1..116: mol_type = other DNA
ccaaaatcaacgggactttccaaaatgtcgtaataaccccgccccgttgacgcaaatgggcggtaggcgtgtacggtgggaggtctatataagcagagctcgtttagtgaaccgtc

SEQ ID NO: 21205 - DNA, 115 bp, synthetic construct
  source 1..115: mol_type = other DNA
caaaatcaacgggactttccaaaatgtcgtaataaccccgccccgttgacgcaaatgggcggtaggcgtgtacggtgggaggtctatataagcagagctcgtttagtgaaccgtc

SEQ ID NO: 21206 - DNA, 114 bp, synthetic construct
  source 1..114: mol_type = other DNA
aaaatcaacgggactttccaaaatgtcgtaataaccccgccccgttgacgcaaatgggcggtaggcgtgtacggtgggaggtctatataagcagagctcgtttagtgaaccgtc

SEQ ID NO: 21207 - DNA, 113 bp, synthetic construct
  source 1..113: mol_type = other DNA
aaatcaacgggactttccaaaatgtcgtaataaccccgccccgttgacgcaaatgggcggtaggcgtgtacggtgggaggtctatataagcagagctcgtttagtgaaccgtc

SEQ ID NO: 21208 - DNA, 112 bp, synthetic construct
  source 1..112: mol_type = other DNA
aatcaacgggactttccaaaatgtcgtaataaccccgccccgttgacgcaaatgggcggtaggcgtgtacggtgggaggtctatataagcagagctcgtttagtgaaccgtc

SEQ ID NO: 21209 - DNA, 111 bp, synthetic construct
  source 1..111: mol_type = other DNA
atcaacgggactttccaaaatgtcgtaataaccccgccccgttgacgcaaatgggcggtaggcgtgtacggtgggaggtctatataagcagagctcgtttagtgaaccgtc

SEQ ID NO: 21210 - DNA, 110 bp, synthetic construct
  source 1..110: mol_type = other DNA
tcaacgggactttccaaaatgtcgtaataaccccgccccgttgacgcaaatgggcggtaggcgtgtacggtgggaggtctatataagcagagctcgtttagtgaaccgtc

SEQ ID NO: 21211 - DNA, 109 bp, synthetic construct
  source 1..109: mol_type = other DNA
caacgggactttccaaaatgtcgtaataaccccgccccgttgacgcaaatgggcggtaggcgtgtacggtgggaggtctatataagcagagctcgtttagtgaaccgtc

SEQ ID NO: 21212 - DNA, 108 bp, synthetic construct
  source 1..108: mol_type = other DNA
aacgggactttccaaaatgtcgtaataaccccgccccgttgacgcaaatgggcggtaggcgtgtacggtgggaggtctatataagcagagctcgtttagtgaaccgtc

SEQ ID NO: 21213 - DNA, 107 bp, synthetic construct
  source 1..107: mol_type = other DNA
acgggactttccaaaatgtcgtaataaccccgccccgttgacgcaaatgggcggtaggcgtgtacggtgggaggtctatataagcagagctcgtttagtgaaccgtc

SEQ ID NO: 21214 - DNA, 106 bp, synthetic construct
  source 1..106: mol_type = other DNA
cgggactttccaaaatgtcgtaataaccccgccccgttgacgcaaatgggcggtaggcgtgtacggtgggaggtctatataagcagagctcgtttagtgaaccgtc

SEQ ID NO: 21215 - DNA, 105 bp, synthetic construct
  source 1..105: mol_type = other DNA
gggactttccaaaatgtcgtaataaccccgccccgttgacgcaaatgggcggtaggcgtgtacggtgggaggtctatataagcagagctcgtttagtgaaccgtc

SEQ ID NO: 21216 - DNA, 104 bp, synthetic construct
  source 1..104: mol_type = other DNA
ggactttccaaaatgtcgtaataaccccgccccgttgacgcaaatgggcggtaggcgtgtacggtgggaggtctatataagcagagctcgtttagtgaaccgtc

SEQ ID NO: 21217 - DNA, 103 bp, synthetic construct
  source 1..103: mol_type = other DNA
gactttccaaaatgtcgtaataaccccgccccgttgacgcaaatgggcggtaggcgtgtacggtgggaggtctatataagcagagctcgtttagtgaaccgtc

SEQ ID NO: 21218 - DNA, 102 bp, synthetic construct
  source 1..102: mol_type = other DNA
actttccaaaatgtcgtaataaccccgccccgttgacgcaaatgggcggtaggcgtgtacggtgggaggtctatataagcagagctcgtttagtgaaccgtc

SEQ ID NO: 21219 - DNA, 101 bp, synthetic construct
  source 1..101: mol_type = other DNA
ctttccaaaatgtcgtaataaccccgccccgttgacgcaaatgggcggtaggcgtgtacggtgggaggtctatataagcagagctcgtttagtgaaccgtc

SEQ ID NO: 21220 - DNA, 100 bp, synthetic construct
  source 1..100: mol_type = other DNA
tttccaaaatgtcgtaataaccccgccccgttgacgcaaatgggcggtaggcgtgtacggtgggaggtctatataagcagagctcgtttagtgaaccgtc

SEQ ID NO: 21221 - DNA, 99 bp, synthetic construct
  source 1..99: mol_type = other DNA
ttccaaaatgtcgtaataaccccgccccgttgacgcaaatgggcggtaggcgtgtacggtgggaggtctatataagcagagctcgtttagtgaaccgtc

SEQ ID NO: 21222 - DNA, 98 bp, synthetic construct
  source 1..98: mol_type = other DNA
tccaaaatgtcgtaataaccccgccccgttgacgcaaatgggcggtaggcgtgtacggtgggaggtctatataagcagagctcgtttagtgaaccgtc

SEQ ID NO: 21223 - DNA, 97 bp, synthetic construct
  source 1..97: mol_type = other DNA
ccaaaatgtcgtaataaccccgccccgttgacgcaaatgggcggtaggcgtgtacggtgggaggtctatataagcagagctcgtttagtgaaccgtc

SEQ ID NO: 21224 - DNA, 96 bp, synthetic construct
  source 1..96: mol_type = other DNA
caaaatgtcgtaataaccccgccccgttgacgcaaatgggcggtaggcgtgtacggtgggaggtctatataagcagagctcgtttagtgaaccgtc

SEQ ID NO: 21225 - DNA, 95 bp, synthetic construct
  source 1..95: mol_type = other DNA
aaaatgtcgtaataaccccgccccgttgacgcaaatgggcggtaggcgtgtacggtgggaggtctatataagcagagctcgtttagtgaaccgtc

SEQ ID NO: 21226 - DNA, 94 bp, synthetic construct
  source 1..94: mol_type = other DNA
aaatgtcgtaataaccccgccccgttgacgcaaatgggcggtaggcgtgtacggtgggaggtctatataagcagagctcgtttagtgaaccgtc

SEQ ID NO: 21227 - DNA, 93 bp, synthetic construct
  source 1..93: mol_type = other DNA
aatgtcgtaataaccccgccccgttgacgcaaatgggcggtaggcgtgtacggtgggaggtctatataagcagagctcgtttagtgaaccgtc

SEQ ID NO: 21228 - DNA, 92 bp, synthetic construct
  source 1..92: mol_type = other DNA
atgtcgtaataaccccgccccgttgacgcaaatgggcggtaggcgtgtacggtgggaggtctatataagcagagctcgtttagtgaaccgtc

SEQ ID NO: 21229 - DNA, 91 bp, synthetic construct
  source 1..91: mol_type = other DNA
tgtcgtaataaccccgccccgttgacgcaaatgggcggtaggcgtgtacggtgggaggtctatataagcagagctcgtttagtgaaccgtc

SEQ ID NO: 21230 - DNA, 90 bp, synthetic construct
  source 1..90: mol_type = other DNA
gtcgtaataaccccgccccgttgacgcaaatgggcggtaggcgtgtacggtgggaggtctatataagcagagctcgtttagtgaaccgtc

SEQ ID NO: 21231 - DNA, 89 bp, synthetic construct
  source 1..89: mol_type = other DNA
tcgtaataaccccgccccgttgacgcaaatgggcggtaggcgtgtacggtgggaggtctatataagcagagctcgtttagtgaaccgtc

SEQ ID NO: 21232 - DNA, 88 bp, synthetic construct
  source 1..88: mol_type = other DNA
cgtaataaccccgccccgttgacgcaaatgggcggtaggcgtgtacggtgggaggtctatataagcagagctcgtttagtgaaccgtc

SEQ ID NO: 21233 - DNA, 87 bp, synthetic construct
  source 1..87: mol_type = other DNA
gtaataaccccgccccgttgacgcaaatgggcggtaggcgtgtacggtgggaggtctatataagcagagctcgtttagtgaaccgtc

SEQ ID NO: 21234 - DNA, 86 bp, synthetic construct
  source 1..86: mol_type = other DNA
taataaccccgccccgttgacgcaaatgggcggtaggcgtgtacggtgggaggtctatataagcagagctcgtttagtgaaccgtc

SEQ ID NO: 21235 - DNA, 85 bp, synthetic construct
  source 1..85: mol_type = other DNA
aataaccccgccccgttgacgcaaatgggcggtaggcgtgtacggtgggaggtctatataagcagagctcgtttagtgaaccgtc

SEQ ID NO: 21236 - DNA, 84 bp, synthetic construct
  source 1..84: mol_type = other DNA
ataaccccgccccgttgacgcaaatgggcggtaggcgtgtacggtgggaggtctatataagcagagctcgtttagtgaaccgtc

SEQ ID NO: 21237 - DNA, 83 bp, synthetic construct
  source 1..83: mol_type = other DNA
taaccccgccccgttgacgcaaatgggcggtaggcgtgtacggtgggaggtctatataagcagagctcgtttagtgaaccgtc

SEQ ID NO: 21238 - DNA, 82 bp, synthetic construct
  source 1..82: mol_type = other DNA
aaccccgccccgttgacgcaaatgggcggtaggcgtgtacggtgggaggtctatataagcagagctcgtttagtgaaccgtc

SEQ ID NO: 21239 - DNA, 81 bp, synthetic construct
  source 1..81: mol_type = other DNA
accccgccccgttgacgcaaatgggcggtaggcgtgtacggtgggaggtctatataagcagagctcgtttagtgaaccgtc

SEQ ID NO: 21240 - DNA, 80 bp, synthetic construct
  source 1..80: mol_type = other DNA
ccccgccccgttgacgcaaatgggcggtaggcgtgtacggtgggaggtctatataagcagagctcgtttagtgaaccgtc

SEQ ID NO: 21241 - DNA, 79 bp, synthetic construct
  source 1..79: mol_type = other DNA
cccgccccgttgacgcaaatgggcggtaggcgtgtacggtgggaggtctatataagcagagctcgtttagtgaaccgtc

SEQ ID NO: 21242 - DNA, 78 bp, synthetic construct
  source 1..78: mol_type = other DNA
ccgccccgttgacgcaaatgggcggtaggcgtgtacggtgggaggtctatataagcagagctcgtttagtgaaccgtc

SEQ ID NO: 21243 - DNA, 77 bp, synthetic construct
  source 1..77: mol_type = other DNA
cgccccgttgacgcaaatgggcggtaggcgtgtacggtgggaggtctatataagcagagctcgtttagtgaaccgtc

SEQ ID NO: 21244 - DNA, 76 bp, synthetic construct
  source 1..76: mol_type = other DNA
gccccgttgacgcaaatgggcggtaggcgtgtacggtgggaggtctatataagcagagctcgtttagtgaaccgtc

SEQ ID NO: 21245 - DNA, 75 bp, synthetic construct
  source 1..75: mol_type = other DNA
ccccgttgacgcaaatgggcggtaggcgtgtacggtgggaggtctatataagcagagctcgtttagtgaaccgtc

SEQ ID NO: 21246 - DNA, 74 bp, synthetic construct
  source 1..74: mol_type = other DNA
cccgttgacgcaaatgggcggtaggcgtgtacggtgggaggtctatataagcagagctcgtttagtgaaccgtc

SEQ ID NO: 21247 - DNA, 73 bp, synthetic construct
  source 1..73: mol_type = other DNA
ccgttgacgcaaatgggcggtaggcgtgtacggtgggaggtctatataagcagagctcgtttagtgaaccgtc

SEQ ID NO: 21248 - DNA, 72 bp, synthetic construct
  source 1..72: mol_type = other DNA
cgttgacgcaaatgggcggtaggcgtgtacggtgggaggtctatataagcagagctcgtttagtgaaccgtc

SEQ ID NO: 21249 - DNA, 71 bp, synthetic construct
  source 1..71: mol_type = other DNA
gttgacgcaaatgggcggtaggcgtgtacggtgggaggtctatataagcagagctcgtttagtgaaccgtc

SEQ ID NO: 21250 - DNA, 70 bp, synthetic construct
  source 1..70: mol_type = other DNA
ttgacgcaaatgggcggtaggcgtgtacggtgggaggtctatataagcagagctcgtttagtgaaccgtc

SEQ ID NO: 21251 - DNA, 69 bp, synthetic construct
  source 1..69: mol_type = other DNA
tgacgcaaatgggcggtaggcgtgtacggtgggaggtctatataagcagagctcgtttagtgaaccgtc

SEQ ID NO: 21252 - DNA, 68 bp, synthetic construct
  source 1..68: mol_type = other DNA
gacgcaaatgggcggtaggcgtgtacggtgggaggtctatataagcagagctcgtttagtgaaccgtc

SEQ ID NO: 21253 - DNA, 67 bp, synthetic construct
  source 1..67: mol_type = other DNA
acgcaaatgggcggtaggcgtgtacggtgggaggtctatataagcagagctcgtttagtgaaccgtc

SEQ ID NO: 21254 - DNA, 66 bp, synthetic construct
  source 1..66: mol_type = other DNA
cgcaaatgggcggtaggcgtgtacggtgggaggtctatataagcagagctcgtttagtgaaccgtc

SEQ ID NO: 21255 - DNA, 65 bp, synthetic construct
  source 1..65: mol_type = other DNA
gcaaatgggcggtaggcgtgtacggtgggaggtctatataagcagagctcgtttagtgaaccgtc

SEQ ID NO: 21256 - DNA, 64 bp, synthetic construct
  source 1..64: mol_type = other DNA
caaatgggcggtaggcgtgtacggtgggaggtctatataagcagagctcgtttagtgaaccgtc

SEQ ID NO: 21257 - DNA, 63 bp, synthetic construct
  source 1..63: mol_type = other DNA
aaatgggcggtaggcgtgtacggtgggaggtctatataagcagagctcgtttagtgaaccgtc

SEQ ID NO: 21258 - DNA, 62 bp, synthetic construct
  source 1..62: mol_type = other DNA
aatgggcggtaggcgtgtacggtgggaggtctatataagcagagctcgtttagtgaaccgtc

SEQ ID NO: 21259 - DNA, 61 bp, synthetic construct
  source 1..61: mol_type = other DNA
atgggcggtaggcgtgtacggtgggaggtctatataagcagagctcgtttagtgaaccgtc

SEQ ID NO: 21260 - DNA, 60 bp, synthetic construct
  source 1..60: mol_type = other DNA
tgggcggtaggcgtgtacggtgggaggtctatataagcagagctcgtttagtgaaccgtc

SEQ ID NO: 21261 - DNA, 59 bp, synthetic construct
  source 1..59: mol_type = other DNA
gggcggtaggcgtgtacggtgggaggtctatataagcagagctcgtttagtgaaccgtc

SEQ ID NO: 21262 - DNA, 58 bp, synthetic construct
  source 1..58: mol_type = other DNA
ggcggtaggcgtgtacggtgggaggtctatataagcagagctcgtttagtgaaccgtc

SEQ ID NO: 21263 - DNA, 57 bp, synthetic construct
  source 1..57: mol_type = other DNA
gcggtaggcgtgtacggtgggaggtctatataagcagagctcgtttagtgaaccgtc

SEQ ID NO: 21264 - DNA, 56 bp, synthetic construct
  source 1..56: mol_type = other DNA
cggtaggcgtgtacggtgggaggtctatataagcagagctcgtttagtgaaccgtc

SEQ ID NO: 21265 - DNA, 55 bp, synthetic construct
  source 1..55: mol_type = other DNA
ggtaggcgtgtacggtgggaggtctatataagcagagctcgtttagtgaaccgtc

SEQ ID NO: 21266 - DNA, 54 bp, synthetic construct
  source 1..54: mol_type = other DNA
gtaggcgtgtacggtgggaggtctatataagcagagctcgtttagtgaaccgtc

SEQ ID NO: 21267 - DNA, 53 bp, synthetic construct
  source 1..53: mol_type = other DNA
taggcgtgtacggtgggaggtctatataagcagagctcgtttagtgaaccgtc

SEQ ID NO: 21268 - DNA, 52 bp, synthetic construct
  source 1..52: mol_type = other DNA
aggcgtgtacggtgggaggtctatataagcagagctcgtttagtgaaccgtc

SEQ ID NO: 21269 - DNA, 51 bp, synthetic construct
  source 1..51: mol_type = other DNA
ggcgtgtacggtgggaggtctatataagcagagctcgtttagtgaaccgtc

SEQ ID NO: 21270 - DNA, 50 bp, synthetic construct
  source 1..50: mol_type = other DNA
gcgtgtacggtgggaggtctatataagcagagctcgtttagtgaaccgtc

SEQ ID NO: 21271 - DNA, 49 bp, synthetic construct
  source 1..49: mol_type = other DNA
cgtgtacggtgggaggtctatataagcagagctcgtttagtgaaccgtc

SEQ ID NO: 21272 - DNA, 48 bp, synthetic construct
  source 1..48: mol_type = other DNA
gtgtacggtgggaggtctatataagcagagctcgtttagtgaaccgtc

SEQ ID NO: 21273 - DNA, 47 bp, synthetic construct
  source 1..47: mol_type = other DNA
tgtacggtgggaggtctatataagcagagctcgtttagtgaaccgtc

SEQ ID NO: 21274 - DNA, 46 bp, synthetic construct
  source 1..46: mol_type = other DNA
gtacggtgggaggtctatataagcagagctcgtttagtgaaccgtc

SEQ ID NO: 21275 - DNA, 45 bp, synthetic construct
  source 1..45: mol_type = other DNA
tacggtgggaggtctatataagcagagctcgtttagtgaaccgtc

SEQ ID NO: 21276 - DNA, 44 bp, synthetic construct
  source 1..44: mol_type = other DNA
acggtgggaggtctatataagcagagctcgtttagtgaaccgtc

SEQ ID NO: 21277 - DNA, 43 bp, synthetic construct
  source 1..43: mol_type = other DNA
cggtgggaggtctatataagcagagctcgtttagtgaaccgtc

SEQ ID NO: 21278 - DNA, 42 bp, synthetic construct
  source 1..42: mol_type = other DNA
ggtgggaggtctatataagcagagctcgtttagtgaaccgtc

SEQ ID NO: 21279 - DNA, 41 bp, synthetic construct
  source 1..41: mol_type = other DNA
gtgggaggtctatataagcagagctcgtttagtgaaccgtc

SEQ ID NO: 21280 - DNA, 40 bp, synthetic construct
  source 1..40: mol_type = other DNA
tgggaggtctatataagcagagctcgtttagtgaaccgtc

SEQ ID NO: 21281 - DNA, 39 bp, synthetic construct
  source 1..39: mol_type = other DNA
gggaggtctatataagcagagctcgtttagtgaaccgtc

SEQ ID NO: 21282 - DNA, 38 bp, synthetic construct
  source 1..38: mol_type = other DNA
ggaggtctatataagcagagctcgtttagtgaaccgtc

SEQ ID NO: 21283 - DNA, 37 bp, synthetic construct
  source 1..37: mol_type = other DNA
gaggtctatataagcagagctcgtttagtgaaccgtc

SEQ ID NO: 21284 - DNA, 36 bp, synthetic construct
  source 1..36: mol_type = other DNA
aggtctatataagcagagctcgtttagtgaaccgtc

SEQ ID NO: 21285 - DNA, 35 bp, synthetic construct
  source 1..35: mol_type = other DNA
ggtctatataagcagagctcgtttagtgaaccgtc

SEQ ID NO: 21286 - DNA, 34 bp, synthetic construct
  source 1..34: mol_type = other DNA
gtctatataagcagagctcgtttagtgaaccgtc

SEQ ID NO: 21287 - DNA, 33 bp, synthetic construct
  source 1..33: mol_type = other DNA
tctatataagcagagctcgtttagtgaaccgtc

SEQ ID NO: 21288 - DNA, 32 bp, synthetic construct
  source 1..32: mol_type = other DNA
ctatataagcagagctcgtttagtgaaccgtc

SEQ ID NO: 21289 - DNA, 31 bp, synthetic construct
  source 1..31: mol_type = other DNA
tatataagcagagctcgtttagtgaaccgtc

SEQ ID NO: 21290 - DNA, 30 bp, synthetic construct
  source 1..30: mol_type = other DNA
atataagcagagctcgtttagtgaaccgtc

SEQ ID NO: 21291 - DNA, 29 bp, synthetic construct
  source 1..29: mol_type = other DNA
tataagcagagctcgtttagtgaaccgtc

SEQ ID NO: 21292 - DNA, 28 bp, synthetic construct
  source 1..28: mol_type = other DNA
ataagcagagctcgtttagtgaaccgtc

SEQ ID NO: 21293 - DNA, 27 bp, synthetic construct
  source 1..27: mol_type = other DNA
taagcagagctcgtttagtgaaccgtc

SEQ ID NO: 21294 - DNA, 26 bp, synthetic construct
  source 1..26: mol_type = other DNA
aagcagagctcgtttagtgaaccgtc

SEQ ID NO: 21295 - DNA, 25 bp, synthetic construct
  source 1..25: mol_type = other DNA
agcagagctcgtttagtgaaccgtc

SEQ ID NO: 21296 - DNA, 24 bp, synthetic construct
  source 1..24: mol_type = other DNA
gcagagctcgtttagtgaaccgtc

SEQ ID NO: 21297 - DNA, 23 bp, synthetic construct
  source 1..23: mol_type = other DNA
cagagctcgtttagtgaaccgtc

SEQ ID NO: 21298 - DNA, 22 bp, synthetic construct
  source 1..22: mol_type = other DNA
agagctcgtttagtgaaccgtc

SEQ ID NO: 21299 - DNA, 21 bp, synthetic construct
  source 1..21: mol_type = other DNA
gagctcgtttagtgaaccgtc

SEQ ID NO: 21300 - DNA, 20 bp, synthetic construct
  source 1..20: mol_type = other DNA
agctcgtttagtgaaccgtc

SEQ ID NO: 21301 - DNA, 19 bp, synthetic construct
  source 1..19: mol_type = other DNA
gctcgtttagtgaaccgtc

SEQ ID NO: 21302 - DNA, 18 bp, synthetic construct
  source 1..18: mol_type = other DNA
ctcgtttagtgaaccgtc

SEQ ID NO: 21303 - DNA, 17 bp, synthetic construct
  source 1..17: mol_type = other DNA
tcgtttagtgaaccgtc

SEQ ID NO: 21304 - DNA, 16 bp, synthetic construct
  source 1..16: mol_type = other DNA
cgtttagtgaaccgtc

SEQ ID NO: 21305 - DNA, 15 bp, synthetic construct
  source 1..15: mol_type = other DNA
gtttagtgaaccgtc

SEQ ID NO: 21306 - DNA, 14 bp, synthetic construct
  source 1..14: mol_type = other DNA
tttagtgaaccgtc

SEQ ID NO: 21307 - DNA, 13 bp, synthetic construct
  source 1..13: mol_type = other DNA
ttagtgaaccgtc

SEQ ID NO: 21308 - DNA, 12 bp, synthetic construct
  source 1..12: mol_type = other DNA
tagtgaaccgtc

SEQ ID NO: 21309 - DNA, 11 bp, synthetic construct
  source 1..11: mol_type = other DNA
agtgaaccgtc

SEQ ID NO: 21310 - DNA, 10 bp, synthetic construct
  source 1..10: mol_type = other DNA
gtgaaccgtc

SEQ ID NO: 21311 - DNA, 500 bp, synthetic construct
  source 1..500: mol_type = other DNA
gcccgcctggctgaccgcccaacgacccccgcccattgacgtcaataatgacgtatgttcccatagtaacgccaatagggactttccattgacgtcaatgggtggagtatttacggtaaactgcccacttggcagtacatcaagtgtatcatatgccaagtccgccccctattgacgtcaatgacggtaaatggcccgcctggcattatgcccagtacatgaccttacgggactttcctacttggcagtacatctacgtattagtcatcgctattaccatggtgatgcggttttggcagtacaccaatgggcgtggatagcggtttgactcacggggatttccaagtctccaccccattgacgtcaatgggagtttgttttggcaccaaaatcaacgggactttccaaaatgtcgtaataaccccgccccgttgacgcaaatgggcggtaggcgtgtacggtgggaggtctatataagcagagctcgtttagtgaaccgt

SEQ ID NO: 21312 - DNA, 500 bp, synthetic construct
  source 1..500: mol_type = other DNA
ggcccgcctggctgaccgcccaacgacccccgcccattgacgtcaataatgacgtatgttcccatagtaacgccaatagggactttccattgacgtcaatgggtggagtatttacggtaaactgcccacttggcagtacatcaagtgtatcatatgccaagtccgccccctattgacgtcaatgacggtaaatggcccgcctggcattatgcccagtacatgaccttacgggactttcctacttggcagtacatctacgtattagtcatcgctattaccatggtgatgcggttttggcagtacaccaatgggcgtggatagcggtttgactcacggggatttccaagtctccaccccattgacgtcaatgggagtttgttttggcaccaaaatcaacgggactttccaaaatgtcgtaataaccccgccccgttgacgcaaatgggcggtaggcgtgtacggtgggaggtctatataagcagagctcgtttagtgaaccg

SEQ ID NO: 21313 - DNA, 500 bp, synthetic construct
  source 1..500: mol_type = other DNA
tggcccgcctggctgaccgcccaacgacccccgcccattgacgtcaataatgacgtatgttcccatagtaacgccaatagggactttccattgacgtcaatgggtggagtatttacggtaaactgcccacttggcagtacatcaagtgtatcatatgccaagtccgccccctattgacgtcaatgacggtaaatggcccgcctggcattatgcccagtacatgaccttacgggactttcctacttggcagtacatctacgtattagtcatcgctattaccatggtgatgcggttttggcagtacaccaatgggcgtggatagcggtttgactcacggggatttccaagtctccaccccattgacgtcaatgggagtttgttttggcaccaaaatcaacgggactttccaaaatgtcgtaataaccccgccccgttgacgcaaatgggcggtaggcgtgtacggtgggaggtctatataagcagagctcgtttagtgaacc

SEQ ID NO: 21314 - DNA, 500 bp, synthetic construct
  source 1..500: mol_type = other DNA
atggcccgcctggctgaccgcccaacgacccccgcccattgacgtcaataatgacgtatgttcccatagtaacgccaatagggactttccattgacgtcaatgggtggagtatttacggtaaactgcccacttggcagtacatcaagtgtatcatatgccaagtccgccccctattgacgtcaatgacggtaaatggcccgcctggcattatgcccagtacatgaccttacgggactttcctacttggcagtacatctacgtattagtcatcgctattaccatggtgatgcggttttggcagtacaccaatgggcgtggatagcggtttgactcacggggatttccaagtctccaccccattgacgtcaatgggagtttgttttggcaccaaaatcaacgggactttccaaaatgtcgtaataaccccgccccgttgacgcaaatgggcggtaggcgtgtacggtgggaggtctatataagcagagctcgtttagtgaac

SEQ ID NO: 21315 - DNA, 500 bp, synthetic construct
  source 1..500: mol_type = other DNA
aatggcccgcctggctgaccgcccaacgacccccgcccattgacgtcaataatgacgtatgttcccatagtaacgccaatagggactttccattgacgtcaatgggtggagtatttacggtaaactgcccacttggcagtacatcaagtgtatcatatgccaagtccgccccctattgacgtcaatgacggtaaatggcccgcctggcattatgcccagtacatgaccttacgggactttcctacttggcagtacatctacgtattagtcatcgctattaccatggtgatgcggttttggcagtacaccaatgggcgtggatagcggtttgactcacggggatttccaagtctccaccccattgacgtcaatgggagtttgttttggcaccaaaatcaacgggactttccaaaatgtcgtaataaccccgccccgttgacgcaaatgggcggtaggcgtgtacggtgggaggtctatataagcagagctcgtttagtgaa

SEQ ID NO: 21316 - DNA, 500 bp, synthetic construct
  source 1..500: mol_type = other DNA
aaatggcccgcctggctgaccgcccaacgacccccgcccattgacgtcaataatgacgtatgttcccatagtaacgccaatagggactttccattgacgtcaatgggtggagtatttacggtaaactgcccacttggcagtacatcaagtgtatcatatgccaagtccgccccctattgacgtcaatgacggtaaatggcccgcctggcattatgcccagtacatgaccttacgggactttcctacttggcagtacatctacgtattagtcatcgctattaccatggtgatgcggttttggcagtacaccaatgggcgtggatagcggtttgactcacggggatttccaagtctccaccccattgacgtcaatgggagtttgttttggcaccaaaatcaacgggactttccaaaatgtcgtaataaccccgccccgttgacgcaaatgggcggtaggcgtgtacggtgggaggtctatataagcagagctcgtttagtga

SEQ ID NO: 21317 - DNA, 500 bp, synthetic construct
  source 1..500: mol_type = other DNA
taaatggcccgcctggctgaccgcccaacgacccccgcccattgacgtcaataatgacgtatgttcccatagtaacgccaatagggactttccattgacgtcaatgggtggagtatttacggtaaactgcccacttggcagtacatcaagtgtatcatatgccaagtccgccccctattgacgtcaatgacggtaaatggcccgcctggcattatgcccagtacatgaccttacgggactttcctacttggcagtacatctacgtattagtcatcgctattaccatggtgatgcggttttggcagtacaccaatgggcgtggatagcggtttgactcacggggatttccaagtctccaccccattgacgtcaatgggagtttgttttggcaccaaaatcaacgggactttccaaaatgtcgtaataaccccgccccgttgacgcaaatgggcggtaggcgtgtacggtgggaggtctatataagcagagctcgtttagtg

SEQ ID NO: 21318 - DNA, 500 bp, synthetic construct
  source 1..500: mol_type = other DNA
gtaaatggcccgcctggctgaccgcccaacgacccccgcccattgacgtcaataatgacgtatgttcccatagtaacgccaatagggactttccattgacgtcaatgggtggagtatttacggtaaactgcccacttggcagtacatcaagtgtatcatatgccaagtccgccccctattgacgtcaatgacggtaaatggcccgcctggcattatgcccagtacatgaccttacgggactttcctacttggcagtacatctacgtattagtcatcgctattaccatggtgatgcggttttggcagtacaccaatgggcgtggatagcggtttgactcacggggatttccaagtctccaccccattgacgtcaatgggagtttgttttggcaccaaaatcaacgggactttccaaaatgtcgtaataaccccgccccgttgacgcaaatgggcggtaggcgtgtacggtgggaggtctatataagcagagctcgtttagt

SEQ ID NO: 21319 - DNA, 500 bp, synthetic construct
  source 1..500: mol_type = other DNA
ggtaaatggcccgcctggctgaccgcccaacgacccccgcccattgacgtcaataatgacgtatgttcccatagtaacgccaatagggactttccattgacgtcaatgggtggagtatttacggtaaactgcccacttggcagtacatcaagtgtatcatatgccaagtccgccccctattgacgtcaatgacggtaaatggcccgcctggcattatgcccagtacatgaccttacgggactttcctacttggcagtacatctacgtattagtcatcgctattaccatggtgatgcggttttggcagtacaccaatgggcgtggatagcggtttgactcacggggatttccaagtctccaccccattgacgtcaatgggagtttgttttggcaccaaaatcaacgggactttccaaaatgtcgtaataaccccgccccgttgacgcaaatgggcggtaggcgtgtacggtgggaggtctatataagcagagctcgtttag

SEQ ID NO: 21320 - DNA, 500 bp, synthetic construct
  source 1..500: mol_type = other DNA
cggtaaatggcccgcctggctgaccgcccaacgacccccgcccattgacgtcaataatgacgtatgttcccatagtaacgccaatagggactttccattgacgtcaatgggtggagtatttacggtaaactgcccacttggcagtacatcaagtgtatcatatgccaagtccgccccctattgacgtcaatgacggtaaatggcccgcctggcattatgcccagtacatgaccttacgggactttcctacttggcagtacatctacgtattagtcatcgctattaccatggtgatgcggttttggcagtacaccaatgggcgtggatagcggtttgactcacggggatttccaagtctccaccccattgacgtcaatgggagtttgttttggcaccaaaatcaacgggactttccaaaatgtcgtaataaccccgccccgttgacgcaaatgggcggtaggcgtgtacggtgggaggtctatataagcagagctcgttta

SEQ ID NO: 21321 - DNA, 500 bp, synthetic construct
  source 1..500: mol_type = other DNA
acggtaaatggcccgcctggctgaccgcccaacgacccccgcccattgacgtcaataatgacgtatgttcccatagtaacgccaatagggactttccattgacgtcaatgggtggagtatttacggtaaactgcccacttggcagtacatcaagtgtatcatatgccaagtccgccccctattgacgtcaatgacggtaaatggcccgcctggcattatgcccagtacatgaccttacgggactttcctacttggcagtacatctacgtattagtcatcgctattaccatggtgatgcggttttggcagtacaccaatgggcgtggatagcggtttgactcacggggatttccaagtctccaccccattgacgtcaatgggagtttgttttggcaccaaaatcaacgggactttccaaaatgtcgtaataaccccgccccgttgacgcaaatgggcggtaggcgtgtacggtgggaggtctatataagcagagctcgttt

SEQ ID NO: 21322 - DNA, 500 bp, synthetic construct
  source 1..500: mol_type = other DNA
tacggtaaatggcccgcctggctgaccgcccaacgacccccgcccattgacgtcaataatgacgtatgttcccatagtaacgccaatagggactttccattgacgtcaatgggtggagtatttacggtaaactgcccacttggcagtacatcaagtgtatcatatgccaagtccgccccctattgacgtcaatgacggtaaatggcccgcctggcattatgcccagtacatgaccttacgggactttcctacttggcagtacatctacgtattagtcatcgctattaccatggtgatgcggttttggcagtacaccaatgggcgtggatagcggtttgactcacggggatttccaagtctccaccccattgacgtcaatgggagtttgttttggcaccaaaatcaacgggactttccaaaatgtcgtaataaccccgccccgttgacgcaaatgggcggtaggcgtgtacggtgggaggtctatataagcagagctcgtt

SEQ ID NO: 21323 - DNA, 500 bp, synthetic construct
  source 1..500: mol_type = other DNA
ttacggtaaatggcccgcctggctgaccgcccaacgacccccgcccattgacgtcaataatgacgtatgttcccatagtaacgccaatagggactttccattgacgtcaatgggtggagtatttacggtaaactgcccacttggcagtacatcaagtgtatcatatgccaagtccgccccctattgacgtcaatgacggtaaatggcccgcctggcattatgcccagtacatgaccttacgggactttcctacttggcagtacatctacgtattagtcatcgctattaccatggtgatgcggttttggcagtacaccaatgggcgtggatagcggtttgactcacggggatttccaagtctccaccccattgacgtcaatgggagtttgttttggcaccaaaatcaacgggactttccaaaatgtcgtaataaccccgccccgttgacgcaaatgggcggtaggcgtgtacggtgggaggtctatataagcagagctcgt

SEQ ID NO: 21324 - DNA, 500 bp, synthetic construct
  source 1..500: mol_type = other DNA
cttacggtaaatggcccgcctggctgaccgcccaacgacccccgcccattgacgtcaataatgacgtatgttcccatagtaacgccaatagggactttccattgacgtcaatgggtggagtatttacggtaaactgcccacttggcagtacatcaagtgtatcatatgccaagtccgccccctattgacgtcaatgacggtaaatggcccgcctggcattatgcccagtacatgaccttacgggactttcctacttggcagtacatctacgtattagtcatcgctattaccatggtgatgcggttttggcagtacaccaatgggcgtggatagcggtttgactcacggggatttccaagtctccaccccattgacgtcaatgggagtttgttttggcaccaaaatcaacgggactttccaaaatgtcgtaataaccccgccccgttgacgcaaatgggcggtaggcgtgtacggtgggaggtctatataagcagagctcg

SEQ ID NO: 21325 - DNA, 500 bp, synthetic construct
  source 1..500: mol_type = other DNA
acttacggtaaatggcccgcctggctgaccgcccaacgacccccgcccattgacgtcaataatgacgtatgttcccatagtaacgccaatagggactttccattgacgtcaatgggtggagtatttacggtaaactgcccacttggcagtacatcaagtgtatcatatgccaagtccgccccctattgacgtcaatgacggtaaatggcccgcctggcattatgcccagtacatgaccttacgggactttcctacttggcagtacatctacgtattagtcatcgctattaccatggtgatgcggttttggcagtacaccaatgggcgtggatagcggtttgactcacggggatttccaagtctccaccccattgacgtcaatgggagtttgttttggcaccaaaatcaacgggactttccaaaatgtcgtaataaccccgccccgttgacgcaaatgggcggtaggcgtgtacggtgggaggtctatataagcagagctc

SEQ ID NO: 21326 - DNA, 500 bp, synthetic construct
  source 1..500: mol_type = other DNA
aacttacggtaaatggcccgcctggctgaccgcccaacgacccccgcccattgacgtcaataatgacgtatgttcccatagtaacgccaatagggactttccattgacgtcaatgggtggagtatttacggtaaactgcccacttggcagtacatcaagtgtatcatatgccaagtccgccccctattgacgtcaatgacggtaaatggcccgcctggcattatgcccagtacatgaccttacgggactttcctacttggcagtacatctacgtattagtcatcgctattaccatggtgatgcggttttggcagtacaccaatgggcgtggatagcggtttgactcacggggatttccaagtctccaccccattgacgtcaatgggagtttgttttggcaccaaaatcaacgggactttccaaaatgtcgtaataaccccgccccgttgacgcaaatgggcggtaggcgtgtacggtgggaggtctatataagcagagct

SEQ ID NO: 21327 - DNA, 500 bp, synthetic construct
  source 1..500: mol_type = other DNA
taacttacggtaaatggcccgcctggctgaccgcccaacgacccccgcccattgacgtcaataatgacgtatgttcccatagtaacgccaatagggactttccattgacgtcaatgggtggagtatttacggtaaactgcccacttggcagtacatcaagtgtatcatatgccaagtccgccccctattgacgtcaatgacggtaaatggcccgcctggcattatgcccagtacatgaccttacgggactttcctacttggcagtacatctacgtattagtcatcgctattaccatggtgatgcggttttggcagtacaccaatgggcgtggatagcggtttgactcacggggatttccaagtctccaccccattgacgtcaatgggagtttgttttggcaccaaaatcaacgggactttccaaaatgtcgtaataaccccgccccgttgacgcaaatgggcggtaggcgtgtacggtgggaggtctatataagcagagc

SEQ ID NO: 21328 - DNA, 500 bp, synthetic construct
  source 1..500: mol_type = other DNA
ataacttacggtaaatggcccgcctggctgaccgcccaacgacccccgcccattgacgtcaataatgacgtatgttcccatagtaacgccaatagggactttccattgacgtcaatgggtggagtatttacggtaaactgcccacttggcagtacatcaagtgtatcatatgccaagtccgccccctattgacgtcaatgacggtaaatggcccgcctggcattatgcccagtacatgaccttacgggactttcctacttggcagtacatctacgtattagtcatcgctattaccatggtgatgcggttttggcagtacaccaatgggcgtggatagcggtttgactcacggggatttccaagtctccaccccattgacgtcaatgggagtttgttttggcaccaaaatcaacgggactttccaaaatgtcgtaataaccccgccccgttgacgcaaatgggcggtaggcgtgtacggtgggaggtctatataagcagag

SEQ ID NO: 21329 - DNA, 500 bp, synthetic construct
  source 1..500: mol_type = other DNA
cataacttacggtaaatggcccgcctggctgaccgcccaacgacccccgcccattgacgtcaataatgacgtatgttcccatagtaacgccaatagggactttccattgacgtcaatgggtggagtatttacggtaaactgcccacttggcagtacatcaagtgtatcatatgccaagtccgccccctattgacgtcaatgacggtaaatggcccgcctggcattatgcccagtacatgaccttacgggactttcctacttggcagtacatctacgtattagtcatcgctattaccatggtgatgcggttttggcagtacaccaatgggcgtggatagcggtttgactcacggggatttccaagtctccaccccattgacgtcaatgggagtttgttttggcaccaaaatcaacgggactttccaaaatgtcgtaataaccccgccccgttgacgcaaatgggcggtaggcgtgtacggtgggaggtctatataagcaga

SEQ ID NO: 21330 - DNA, 500 bp, synthetic construct
  source 1..500: mol_type = other DNA
acataacttacggtaaatggcccgcctggctgaccgcccaacgacccccgcccattgacgtcaataatgacgtatgttcccatagtaacgccaatagggactttccattgacgtcaatgggtggagtatttacggtaaactgcccacttggcagtacatcaagtgtatcatatgccaagtccgccccctattgacgtcaatgacggtaaatggcccgcctggcattatgcccagtacatgaccttacgggactttcctacttggcagtacatctacgtattagtcatcgctattaccatggtgatgcggttttggcagtacaccaatgggcgtggatagcggtttgactcacggggatttccaagtctccaccccattgacgtcaatgggagtttgttttggcaccaaaatcaacgggactttccaaaatgtcgtaataaccccgccccgttgacgcaaatgggcggtaggcgtgtacggtgggaggtctatataagcag

SEQ ID NO: 21331 - DNA, 500 bp, synthetic construct
  source 1..500: mol_type = other DNA
atctacgtattagtcatcgctattaccatggtgatgcggttttggcagtacaccaatgggcgtggatagcggtttgactcacggggatttccaagtctccaccccattgacgtcaatgggagtttgttttggcaccaaaatcaacgggactttccaaaatgtcgtaataaccccgccccgttgacgcaaatgggcggtaggcgtgtacggtgggaggtctatataagcagagctcgtttagtgaaccgtcagaattttgtaatacgactcactatagggcggccgggaattcgccaccatggtgagcaagggcgaggagctgttcaccggggtggtgcccatcctggtcgagctggacggcgacgtaaacggccacaagttcagcgtgtccggcgagggcgagggcgatgccacctacggcaagctgaccctgaagttcatctgcaccaccggcaagctgcccgtgccctggcccaccctcgtgaccaccctgacgtacg

SEQ ID NO: 21332 - DNA, 500 bp, synthetic construct
  source 1..500: mol_type = other DNA
catctacgtattagtcatcgctattaccatggtgatgcggttttggcagtacaccaatgggcgtggatagcggtttgactcacggggatttccaagtctccaccccattgacgtcaatgggagtttgttttggcaccaaaatcaacgggactttccaaaatgtcgtaataaccccgccccgttgacgcaaatgggcggtaggcgtgtacggtgggaggtctatataagcagagctcgtttagtgaaccgtcagaattttgtaatacgactcactatagggcggccgggaattcgccaccatggtgagcaagggcgaggagctgttcaccggggtggtgcccatcctggtcgagctggacggcgacgtaaacggccacaagttcagcgtgtccggcgagggcgagggcgatgccacctacggcaagctgaccctgaagttcatctgcaccaccggcaagctgcccgtgccctggcccaccctcgtgaccaccctgacgtac

SEQ ID NO: 21333 - DNA, 500 bp, synthetic construct
  source 1..500: mol_type = other DNA
acatctacgtattagtcatcgctattaccatggtgatgcggttttggcagtacaccaatgggcgtggatagcggtttgactcacggggatttccaagtctccaccccattgacgtcaatgggagtttgttttggcaccaaaatcaacgggactttccaaaatgtcgtaataaccccgccccgttgacgcaaatgggcggtaggcgtgtacggtgggaggtctatataagcagagctcgtttagtgaaccgtcagaattttgtaatacgactcactatagggcggccgggaattcgccaccatggtgagcaagggcgaggagctgttcaccggggtggtgcccatcctggtcgagctggacggcgacgtaaacggccacaagttcagcgtgtccggcgagggcgagggcgatgccacctacggcaagctgaccctgaagttcatctgcaccaccggcaagctgcccgtgccctggcccaccctcgtgaccaccctgacgta

SEQ ID NO: 21334 - DNA, 500 bp, synthetic construct
  source 1..500: mol_type = other DNA
tacatctacgtattagtcatcgctattaccatggtgatgcggttttggcagtacaccaatgggcgtggatagcggtttgactcacggggatttccaagtctccaccccattgacgtcaatgggagtttgttttggcaccaaaatcaacgggactttccaaaatgtcgtaataaccccgccccgttgacgcaaatgggcggtaggcgtgtacggtgggaggtctatataagcagagctcgtttagtgaaccgtcagaattttgtaatacgactcactatagggcggccgggaattcgccaccatggtgagcaagggcgaggagctgttcaccggggtggtgcccatcctggtcgagctggacggcgacgtaaacggccacaagttcagcgtgtccggcgagggcgagggcgatgccacctacggcaagctgaccctgaagttcatctgcaccaccggcaagctgcccgtgccctggcccaccctcgtgaccaccctgacgt

SEQ ID NO: 21335 - DNA, 500 bp, synthetic construct
  source 1..500: mol_type = other DNA
gtacatctacgtattagtcatcgctattaccatggtgatgcggttttggcagtacaccaatgggcgtggatagcggtttgactcacggggatttccaagtctccaccccattgacgtcaatgggagtttgttttggcaccaaaatcaacgggactttccaaaatgtcgtaataaccccgccccgttgacgcaaatgggcggtaggcgtgtacggtgggaggtctatataagcagagctcgtttagtgaaccgtcagaattttgtaatacgactcactatagggcggccgggaattcgccaccatggtgagcaagggcgaggagctgttcaccggggtggtgcccatcctggtcgagctggacggcgacgtaaacggccacaagttcagcgtgtccggcgagggcgagggcgatgccacctacggcaagctgaccctgaagttcatctgcaccaccggcaagctgcccgtgccctggcccaccctcgtgaccaccctgacg

SEQ ID NO: 21336 - DNA, 500 bp, synthetic construct
  source 1..500: mol_type = other DNA
agtacatctacgtattagtcatcgctattaccatggtgatgcggttttggcagtacaccaatgggcgtggatagcggtttgactcacggggatttccaagtctccaccccattgacgtcaatgggagtttgttttggcaccaaaatcaacgggactttccaaaatgtcgtaataaccccgccccgttgacgcaaatgggcggtaggcgtgtacggtgggaggtctatataagcagagctcgtttagtgaaccgtcagaattttgtaatacgactcactatagggcggccgggaattcgccaccatggtgagcaagggcgaggagctgttcaccggggtggtgcccatcctggtcgagctggacggcgacgtaaacggccacaagttcagcgtgtccggcgagggcgagggcgatgccacctacggcaagctgaccctgaagttcatctgcaccaccggcaagctgcccgtgccctggcccaccctcgtgaccaccctgac

SEQ ID NO: 21337 - DNA, 500 bp, synthetic construct
  source 1..500: mol_type = other DNA
cagtacatctacgtattagtcatcgctattaccatggtgatgcggttttggcagtacaccaatgggcgtggatagcggtttgactcacggggatttccaagtctccaccccattgacgtcaatgggagtttgttttggcaccaaaatcaacgggactttccaaaatgtcgtaataaccccgccccgttgacgcaaatgggcggtaggcgtgtacggtgggaggtctatataagcagagctcgtttagtgaaccgtcagaattttgtaatacgactcactatagggcggccgggaattcgccaccatggtgagcaagggcgaggagctgttcaccggggtggtgcccatcctggtcgagctggacggcgacgtaaacggccacaagttcagcgtgtccggcgagggcgagggcgatgccacctacggcaagctgaccctgaagttcatctgcaccaccggcaagctgcccgtgccctggcccaccctcgtgaccaccctga

SEQ ID NO: 21338 - DNA, 500 bp, synthetic construct
  source 1..500: mol_type = other DNA
gcagtacatctacgtattagtcatcgctattaccatggtgatgcggttttggcagtacaccaatgggcgtggatagcggtttgactcacggggatttccaagtctccaccccattgacgtcaatgggagtttgttttggcaccaaaatcaacgggactttccaaaatgtcgtaataaccccgccccgttgacgcaaatgggcggtaggcgtgtacggtgggaggtctatataagcagagctcgtttagtgaaccgtcagaattttgtaatacgactcactatagggcggccgggaattcgccaccatggtgagcaagggcgaggagctgttcaccggggtggtgcccatcctggtcgagctggacggcgacgtaaacggccacaagttcagcgtgtccggcgagggcgagggcgatgccacctacggcaagctgaccctgaagttcatctgcaccaccggcaagctgcccgtgccctggcccaccctcgtgaccaccctg

SEQ ID NO: 21339 - DNA, 500 bp, synthetic construct
  source 1..500: mol_type = other DNA
ggcagtacatctacgtattagtcatcgctattaccatggtgatgcggttttggcagtacaccaatgggcgtggatagcggtttgactcacggggatttccaagtctccaccccattgacgtcaatgggagtttgttttggcaccaaaatcaacgggactttccaaaatgtcgtaataaccccgccccgttgacgcaaatgggcggtaggcgtgtacggtgggaggtctatataagcagagctcgtttagtgaaccgtcagaattttgtaatacgactcactatagggcggccgggaattcgccaccatggtgagcaagggcgaggagctgttcaccggggtggtgcccatcctggtcgagctggacggcgacgtaaacggccacaagttcagcgtgtccggcgagggcgagggcgatgccacctacggcaagctgaccctgaagttcatctgcaccaccggcaagctgcccgtgccctggcccaccctcgtgaccaccct

SEQ ID NO: 21340 - DNA, 500 bp, synthetic construct
  source 1..500: mol_type = other DNA
tggcagtacatctacgtattagtcatcgctattaccatggtgatgcggttttggcagtacaccaatgggcgtggatagcggtttgactcacggggatttccaagtctccaccccattgacgtcaatgggagtttgttttggcaccaaaatcaacgggactttccaaaatgtcgtaataaccccgccccgttgacgcaaatgggcggtaggcgtgtacggtgggaggtctatataagcagagctcgtttagtgaaccgtcagaattttgtaatacgactcactatagggcggccgggaattcgccaccatggtgagcaagggcgaggagctgttcaccggggtggtgcccatcctggtcgagctggacggcgacgtaaacggccacaagttcagcgtgtccggcgagggcgagggcgatgccacctacggcaagctgaccctgaagttcatctgcaccaccggcaagctgcccgtgccctggcccaccctcgtgaccaccc

SEQ ID NO: 21341 - DNA, 500 bp, synthetic construct
  source 1..500: mol_type = other DNA
ttggcagtacatctacgtattagtcatcgctattaccatggtgatgcggttttggcagtacaccaatgggcgtggatagcggtttgactcacggggatttccaagtctccaccccattgacgtcaatgggagtttgttttggcaccaaaatcaacgggactttccaaaatgtcgtaataaccccgccccgttgacgcaaatgggcggtaggcgtgtacggtgggaggtctatataagcagagctcgtttagtgaaccgtcagaattttgtaatacgactcactatagggcggccgggaattcgccaccatggtgagcaagggcgaggagctgttcaccggggtggtgcccatcctggtcgagctggacggcgacgtaaacggccacaagttcagcgtgtccggcgagggcgagggcgatgccacctacggcaagctgaccctgaagttcatctgcaccaccggcaagctgcccgtgccctggcccaccctcgtgaccacc

SEQ ID NO: 21342 - DNA, 500 bp, synthetic construct
  source 1..500: mol_type = other DNA
cttggcagtacatctacgtattagtcatcgctattaccatggtgatgcggttttggcagtacaccaatgggcgtggatagcggtttgactcacggggatttccaagtctccaccccattgacgtcaatgggagtttgttttggcaccaaaatcaacgggactttccaaaatgtcgtaataaccccgccccgttgacgcaaatgggcggtaggcgtgtacggtgggaggtctatataagcagagctcgtttagtgaaccgtcagaattttgtaatacgactcactatagggcggccgggaattcgccaccatggtgagcaagggcgaggagctgttcaccggggtggtgcccatcctggtcgagctggacggcgacgtaaacggccacaagttcagcgtgtccggcgagggcgagggcgatgccacctacggcaagctgaccctgaagttcatctgcaccaccggcaagctgcccgtgccctggcccaccctcgtgaccac

SEQ ID NO: 21343 - DNA, 500 bp, synthetic construct
  source 1..500: mol_type = other DNA
acttggcagtacatctacgtattagtcatcgctattaccatggtgatgcggttttggcagtacaccaatgggcgtggatagcggtttgactcacggggatttccaagtctccaccccattgacgtcaatgggagtttgttttggcaccaaaatcaacgggactttccaaaatgtcgtaataaccccgccccgttgacgcaaatgggcggtaggcgtgtacggtgggaggtctatataagcagagctcgtttagtgaaccgtcagaattttgtaatacgactcactatagggcggccgggaattcgccaccatggtgagcaagggcgaggagctgttcaccggggtggtgcccatcctggtcgagctggacggcgacgtaaacggccacaagttcagcgtgtccggcgagggcgagggcgatgccacctacggcaagctgaccctgaagttcatctgcaccaccggcaagctgcccgtgccctggcccaccctcgtgacca

SEQ ID NO: 21344 - DNA, 500 bp, synthetic construct
  source 1..500: mol_type = other DNA
tacttggcagtacatctacgtattagtcatcgctattaccatggtgatgcggttttggcagtacaccaatgggcgtggatagcggtttgactcacggggatttccaagtctccaccccattgacgtcaatgggagtttgttttggcaccaaaatcaacgggactttccaaaatgtcgtaataaccccgccccgttgacgcaaatgggcggtaggcgtgtacggtgggaggtctatataagcagagctcgtttagtgaaccgtcagaattttgtaatacgactcactatagggcggccgggaattcgccaccatggtgagcaagggcgaggagctgttcaccggggtggtgcccatcctggtcgagctggacggcgacgtaaacggccacaagttcagcgtgtccggcgagggcgagggcgatgccacctacggcaagctgaccctgaagttcatctgcaccaccggcaagctgcccgtgccctggcccaccctcgtgacc

SEQ ID NO: 21345 - DNA, 500 bp, synthetic construct
  source 1..500: mol_type = other DNA
ctacttggcagtacatctacgtattagtcatcgctattaccatggtgatgcggttttggcagtacaccaatgggcgtggatagcggtttgactcacggggatttccaagtctccaccccattgacgtcaatgggagtttgttttggcaccaaaatcaacgggactttccaaaatgtcgtaataaccccgccccgttgacgcaaatgggcggtaggcgtgtacggtgggaggtctatataagcagagctcgtttagtgaaccgtcagaattttgtaatacgactcactatagggcggccgggaattcgccaccatggtgagcaagggcgaggagctgttcaccggggtggtgcccatcctggtcgagctggacggcgacgtaaacggccacaagttcagcgtgtccggcgagggcgagggcgatgccacctacggcaagctgaccctgaagttcatctgcaccaccggcaagctgcccgtgccctggcccaccctcgtgac

SEQ ID NO: 21346 - DNA, 500 bp, synthetic construct
  source 1..500: mol_type = other DNA
cctacttggcagtacatctacgtattagtcatcgctattaccatggtgatgcggttttggcagtacaccaatgggcgtggatagcggtttgactcacggggatttccaagtctccaccccattgacgtcaatgggagtttgttttggcaccaaaatcaacgggactttccaaaatgtcgtaataaccccgccccgttgacgcaaatgggcggtaggcgtgtacggtgggaggtctatataagcagagctcgtttagtgaaccgtcagaattttgtaatacgactcactatagggcggccgggaattcgccaccatggtgagcaagggcgaggagctgttcaccggggtggtgcccatcctggtcgagctggacggcgacgtaaacggccacaagttcagcgtgtccggcgagggcgagggcgatgccacctacggcaagctgaccctgaagttcatctgcaccaccggcaagctgcccgtgccctggcccaccctcgtga

SEQ ID NO: 21347 - DNA, 500 bp, synthetic construct
  source 1..500: mol_type = other DNA
tcctacttggcagtacatctacgtattagtcatcgctattaccatggtgatgcggttttggcagtacaccaatgggcgtggatagcggtttgactcacggggatttccaagtctccaccccattgacgtcaatgggagtttgttttggcaccaaaatcaacgggactttccaaaatgtcgtaataaccccgccccgttgacgcaaatgggcggtaggcgtgtacggtgggaggtctatataagcagagctcgtttagtgaaccgtcagaattttgtaatacgactcactatagggcggccgggaattcgccaccatggtgagcaagggcgaggagctgttcaccggggtggtgcccatcctggtcgagctggacggcgacgtaaacggccacaagttcagcgtgtccggcgagggcgagggcgatgccacctacggcaagctgaccctgaagttcatctgcaccaccggcaagctgcccgtgccctggcccaccctcgtg

SEQ ID NO: 21348 - DNA, 500 bp, synthetic construct
  source 1..500: mol_type = other DNA
ttcctacttggcagtacatctacgtattagtcatcgctattaccatggtgatgcggttttggcagtacaccaatgggcgtggatagcggtttgactcacggggatttccaagtctccaccccattgacgtcaatgggagtttgttttggcaccaaaatcaacgggactttccaaaatgtcgtaataaccccgccccgttgacgcaaatgggcggtaggcgtgtacggtgggaggtctatataagcagagctcgtttagtgaaccgtcagaattttgtaatacgactcactatagggcggccgggaattcgccaccatggtgagcaagggcgaggagctgttcaccggggtggtgcccatcctggtcgagctggacggcgacgtaaacggccacaagttcagcgtgtccggcgagggcgagggcgatgccacctacggcaagctgaccctgaagttcatctgcaccaccggcaagctgcccgtgccctggcccaccctcgt

SEQ ID NO: 21349 - DNA, 500 bp, synthetic construct
  source 1..500: mol_type = other DNA
tttcctacttggcagtacatctacgtattagtcatcgctattaccatggtgatgcggttttggcagtacaccaatgggcgtggatagcggtttgactcacggggatttccaagtctccaccccattgacgtcaatgggagtttgttttggcaccaaaatcaacgggactttccaaaatgtcgtaataaccccgccccgttgacgcaaatgggcggtaggcgtgtacggtgggaggtctatataagcagagctcgtttagtgaaccgtcagaattttgtaatacgactcactatagggcggccgggaattcgccaccatggtgagcaagggcgaggagctgttcaccggggtggtgcccatcctggtcgagctggacggcgacgtaaacggccacaagttcagcgtgtccggcgagggcgagggcgatgccacctacggcaagctgaccctgaagttcatctgcaccaccggcaagctgcccgtgccctggcccaccctcg

SEQ ID NO: 21350 - DNA, 500 bp, synthetic construct
  source 1..500: mol_type = other DNA
ctttcctacttggcagtacatctacgtattagtcatcgctattaccatggtgatgcggttttggcagtacaccaatgggcgtggatagcggtttgactcacggggatttccaagtctccaccccattgacgtcaatgggagtttgttttggcaccaaaatcaacgggactttccaaaatgtcgtaataaccccgccccgttgacgcaaatgggcggtaggcgtgtacggtgggaggtctatataagcagagctcgtttagtgaaccgtcagaattttgtaatacgactcactatagggcggccgggaattcgccaccatggtgagcaagggcgaggagctgttcaccggggtggtgcccatcctggtcgagctggacggcgacgtaaacggccacaagttcagcgtgtccggcgagggcgagggcgatgccacctacggcaagctgaccctgaagttcatctgcaccaccggcaagctgcccgtgccctggcccaccctc

SEQ ID NO: 21351 - DNA, 500 bp, synthetic construct
  source 1..500: mol_type = other DNA
actttcctacttggcagtacatctacgtattagtcatcgctattaccatggtgatgcggttttggcagtacaccaatgggcgtggatagcggtttgactcacggggatttccaagtctccaccccattgacgtcaatgggagtttgttttggcaccaaaatcaacgggactttccaaaatgtcgtaataaccccgccccgttgacgcaaatgggcggtaggcgtgtacggtgggaggtctatataagcagagctcgtttagtgaaccgtcagaattttgtaatacgactcactatagggcggccgggaattcgccaccatggtgagcaagggcgaggagctgttcaccggggtggtgcccatcctggtcgagctggacggcgacgtaaacggccacaagttcagcgtgtccggcgagggcgagggcgatgccacctacggcaagctgaccctgaagttcatctgcaccaccggcaagctgcccgtgccctggcccaccct

SEQ ID NO: 21352 - DNA, 10 bp, synthetic construct
  source 1..10: mol_type = other DNA
gcgtgcagtg

SEQ ID NO: 21353 - DNA, 11 bp, synthetic construct
  source 1..11: mol_type = other DNA
gcgtgcagtgc

SEQ ID NO: 21354 - DNA, 12 bp, synthetic construct
  source 1..12: mol_type = other DNA
gcgtgcagtgct

SEQ ID NO: 21355 - DNA, 13 bp, synthetic construct
  source 1..13: mol_type = other DNA
gcgtgcagtgctt

SEQ ID NO: 21356 - DNA, 14 bp, synthetic construct
  source 1..14: mol_type = other DNA
gcgtgcagtgcttc

SEQ ID NO: 21357 - DNA, 15 bp, synthetic construct
  source 1..15: mol_type = other DNA
gcgtgcagtgcttcg

SEQ ID NO: 21358 - DNA, 16 bp, synthetic construct
  source 1..16: mol_type = other DNA
gcgtgcagtgcttcgg

SEQ ID NO: 21359 - DNA, 17 bp, synthetic construct
  source 1..17: mol_type = other DNA
gcgtgcagtgcttcggc

SEQ ID NO: 21360 - DNA, 20 bp, synthetic construct
  source 1..20: mol_type = other DNA
cagtacatgaccttacggga

SEQ ID NO: 21361 - DNA, 16 bp, synthetic construct
  source 1..16: mol_type = other DNA
acatgaccttacggga

SEQ ID NO: 21362 - DNA, 62 bp, synthetic construct
  source 1..62: mol_type = other DNA
cactcctccccatcctctccctctgtccctctgtccctctgaccctgcactgtcccagcacc

SEQ ID NO: 21363 - DNA, 122 bp, synthetic construct
  source 1..122: mol_type = other DNA
caggacacagccttggatcaggacagagacttgggggccatcctgcccctccaacccgacatgtgtacctcagctttttccctcacttgcatcaataaagcttctgtgtttggaacagctaa

SEQ ID NO: 21364 - RNA, 47 nt, synthetic construct
  source 1..47: mol_type = other RNA
gggaaataagagagaaaagaagagtaagaagaaatataagagccacc

SEQ ID NO: 21365 - RNA, 110 nt, synthetic construct
  source 1..110: mol_type = other RNA
tgataataggctggagcctcggtggccatgcttcttgccccttgggcctccccccagcccctcctccccttcctgcacccgtacccccgtggtctttgaataaagtctga

SEQ ID NO: 21366 - DNA, 20 bp, synthetic construct
  source 1..20: mol_type = other DNA
actaacatacaactaacata

SEQ ID NO: 21367 - DNA, 20 bp, synthetic construct
  source 1..20: mol_type = other DNA
gccgaagcactgcacgccgt

SEQ ID NO: 21368 - DNA, 20 bp, synthetic construct
  source 1..20: mol_type = other DNA
agaagtcgtgctgcttcatg

SEQ ID NO: 21369 - DNA, 47 bp, synthetic construct
  source 1..47: mol_type = other DNA
accctgacctacggcgtgcagtgcttcggccgctaccccgatcacat

SEQ ID NO: 21370 - DNA, 13 bp, synthetic construct
  source 1..13: mol_type = other DNA
gaagcagcacgac

SEQ ID NO: 21371 - protein, 2112 aa, synthetic construct
MPAAKRVKLDGGDKKYSIGLDIGTNSVGWAVITDEYKVPSKKFKVLGNTDRHSIKKNLIGALLFDSGETAEATRLKRTARRRYTRRKNRICYLQEIFSNEMAKVDDSFFHRLEESFLVEEDKKHERHPIFGNIVDEVAYHEKYPTIYHLRKKLVDSTDKADLRLIYLALAHMIKFRGHFLIEGDLNPDNSDVDKLFIQLVQTYNQLFEENPINASGVDAKAILSARLSKSRRLENLIAQLPGEKKNGLFGNLIALSLGLTPNFKSNFDLAEDAKLQLSKDTYDDDLDNLLAQIGDQYADLFLAAKNLSDAILLSDILRVNTEITKAPLSASMIKRYDEHHQDLTLLKALVRQQLPEKYKEIFFDQSKNGYAGYIDGGASQEEFYKFIKPILEKMDGTEELLVKLNREDLLRKQRTFDNGSIPHQIHLGELHAILRRQEDFYPFLKDNREKIEKILTFRIPYYVGPLARGNSRFAWMTRKSEETITPWNFEEVVDKGASAQSFIERMTNFDKNLPNEKVLPKHSLLYEYFTVYNELTKVKYVTEGMRKPAFLSGEQKKAIVDLLFKTNRKVTVKQLKEDYFKKIECFDSVEISGVEDRFNASLGTYHDLLKIIKDKDFLDNEENEDILEDIVLTLTLFEDREMIEERLKTYAHLFDDKVMKQLKRRRYTGWGRLSRKLINGIRDKQSGKTILDFLKSDGFANRNFMQLIHDDSLTFKEDIQKAQVSGQGDSLHEHIANLAGSPAIKKGILQTVKVVDELVKVMGRHKPENIVIEMARENQTTQKGQKNSRERMKRIEEGIKELGSQILKEHPVENTQLQNEKLYLYYLQNGRDMYVDQELDINRLSDYDVDHIVPQSFLKDDSIDNKVLTRSDKARGKSDNVPSEEVVKKMKNYWRQLLNAKLITQRKFDNLTKAERGGLSELDKAGFIKRQLVETRQITKHVAQILDSRMNTKYDENDKLIREVKVITLKSKLVSDFRKDFQFYKVREINNYHHAHDAYLNAVVGTALIKKYPKLESEFVYGDYKVYDVRKMIAKSEQEIGKATAKYFFYSNIMNFFKTEITLANGEIRKRPLIETNGETGEIVWDKGRDFATVRKVLSMPQVNIVKKTEVQTGGFSKESILPKRNSDKLIARKKDWDPKKYGGFDSPTVAYSVLVVAKVEKGKSKKLKSVKELLGITIMERSSFEKNPIDFLEAKGYKEVKKDLIIKLPKYSLFELENGRKRMLASAGELQKGNELALPSKYVNFLYLASHYEKLKGSPEDNEQKQLFVEQHKHYLDEIIEQISEFSKRVILADANLDKVLSAYNKHRDKPIREQAENIIHLFTLTNLGAPAAFKYFDTTIDRKRYTSTKEVLDATLIHQSITGLYETRIDLSQLGGDGGGGGGSGGGGSGGGGSGGGGSGGGGSGGTAPLEEEYRLFLEAPIQNVTLLEQWKREIPKVWAEINPPGLASTQAPIHVQLLSTALPVRVRQYPITLEAKRSLRETIRKFRAAGILRPVHSPWNTPLLPVRKSGTSEYRMVQDLREVNKRVETIHPTVPNPYTLLSLLPPDRIWYSVLDLKDAFFCIPLAPESQLIFAFEWADAEEGESGQLTWTRLPQGFKNSPTLFDEALNRDLQGFRLDHPSVSLLQYVDDLLIAADTQAACLSATRDLLMTLAELGYRVSGKKAQLCQEEVTYLGFKIHKGSRSLSNSRTQAILQIPVPKTKRQVREFLGTIGYCRLWIPGFAELAQPLYAATRGGNDPLVWGEKEEEAFQSLKLALTQPPALALPSLDKPFQLFVEETSGAAKGVLTQALGPWKRPVAYLSKRLDPVAAGWPRCLRAIAAAALLTREASKLTFGQDIEITSSHNLESLLRSPPDKWLTNARITQYQVLLLDPPRVRFKQTAALNPATLLPETDDTLPIHHCLDTLDSLTSTRPDLTDQPLAQAEATLFTDGSSYIRDGKRYAGAAVVTLDSVIWAEPLPIGTSAQKAELIALTKALEWSKDKSVNIYTDSRYAFATLHVHGMIYRERGLLTAGGKAIKNAPEILALLTAVWLPKRVAVMHCKGHQKDDAPTSTGNRRADEVAREVAIRPLSTQATISAGKRTADGSEFEKRTADGSEFESPKKKAKVE

SEQ ID NO: 21372 - protein, 2098 aa, synthetic construct
MPAAKRVKLDGGDKKYSIGLDIGTNSVGWAVITDEYKVPSKKFKVLGNTDRHSIKKNLIGALLFDSGETAEATRLKRTARRRYTRRKNRICYLQEIFSNEMAKVDDSFFHRLEESFLVEEDKKHERHPIFGNIVDEVAYHEKYPTIYHLRKKLVDSTDKADLRLIYLALAHMIKFRGHFLIEGDLNPDNSDVDKLFIQLVQTYNQLFEENPINASGVDAKAILSARLSKSRRLENLIAQLPGEKKNGLFGNLIALSLGLTPNFKSNFDLAEDAKLQLSKDTYDDDLDNLLAQIGDQYADLFLAAKNLSDAILLSDILRVNTEITKAPLSASMIKRYDEHHQDLTLLKALVRQQLPEKYKEIFFDQSKNGYAGYIDGGASQEEFYKFIKPILEKMDGTEELLVKLNREDLLRKQRTFDNGSIPHQIHLGELHAILRRQEDFYPFLKDNREKIEKILTFRIPYYVGPLARGNSRFAWMTRKSEETITPWNFEEVVDKGASAQSFIERMTNFDKNLPNEKVLPKHSLLYEYFTVYNELTKVKYVTEGMRKPAFLSGEQKKAIVDLLFKTNRKVTVKQLKEDYFKKIECFDSVEISGVEDRFNASLGTYHDLLKIIKDKDFLDNEENEDILEDIVLTLTLFEDREMIEERLKTYAHLFDDKVMKQLKRRRYTGWGRLSRKLINGIRDKQSGKTILDFLKSDGFANRNFMQLIHDDSLTFKEDIQKAQVSGQGDSLHEHIANLAGSPAIKKGILQTVKVVDELVKVMGRHKPENIVIEMARENQTTQKGQKNSRERMKRIEEGIKELGSQILKEHPVENTQLQNEKLYLYYLQNGRDMYVDQELDINRLSDYDVDHIVPQSFLKDDSIDNKVLTRSDKARGKSDNVPSEEVVKKMKNYWRQLLNAKLITQRKFDNLTKAERGGLSELDKAGFIKRQLVETRQITKHVAQILDSRMNTKYDENDKLIREVKVITLKSKLVSDFRKDFQFYKVREINNYHHAHDAYLNAVVGTALIKKYPKLESEFVYGDYKVYDVRKMIAKSEQEIGKATAKYFFYSNIMNFFKTEITLANGEIRKRPLIETNGETGEIVWDKGRDFATVRKVLSMPQVNIVKKTEVQTGGFSKESILPKRNSDKLIARKKDWDPKKYGGFDSPTVAYSVLVVAKVEKGKSKKLKSVKELLGITIMERSSFEKNPIDFLEAKGYKEVKKDLIIKLPKYSLFELENGRKRMLASAGELQKGNELALPSKYVNFLYLASHYEKLKGSPEDNEQKQLFVEQHKHYLDEIIEQISEFSKRVILADANLDKVLSAYNKHRDKPIREQAENIIHLFTLTNLGAPAAFKYFDTTIDRKRYTSTKEVLDATLIHQSITGLYETRIDLSQLGGDGGPAPEAAAKGGGGGTAPLEEEYRLFLEAPIQNVTLLEQWKREIPKVWAEINPPGLASTQAPIHVQLLSTALPVRVRQYPITLEAKRSLRETIRKFRAAGILRPVHSPWNTPLLPVRKSGTSEYRMVQDLREVNKRVETIHPTVPNPYTLLSLLPPDRIWYSVLDLKDAFFCIPLAPESQLIFAFEWADAEEGESGQLTWTRLPQGFKNSPTLFDEALNRDLQGFRLDHPSVSLLQYVDDLLIAADTQAACLSATRDLLMTLAELGYRVSGKKAQLCQEEVTYLGFKIHKGSRSLSNSRTQAILQIPVPKTKRQVREFLGTIGYCRLWIPGFAELAQPLYAATRGGNDPLVWGEKEEEAFQSLKLALTQPPALALPSLDKPFQLFVEETSGAAKGVLTQALGPWKRPVAYLSKRLDPVAAGWPRCLRAIAAAALLTREASKLTFGQDIEITSSHNLESLLRSPPDKWLTNARITQYQVLLLDPPRVRFKQTAALNPATLLPETDDTLPIHHCLDTLDSLTSTRPDLTDQPLAQAEATLFTDGSSYIRDGKRYAGAAVVTLDSVIWAEPLPIGTSAQKAELIALTKALEWSKDKSVNIYTDSRYAFATLHVHGMIYRERGLLTAGGKAIKNAPEILALLTAVWLPKRVAVMHCKGHQKDDAPTSTGNRRADEVAREVAIRPLSTQATISAGKRTADGSEFEKRTADGSEFESPKKKAKVE

SEQ ID NO: 21373 - protein, 2090 aa, synthetic construct
MPAAKRVKLDGGDKKYSIGLDIGTNSVGWAVITDEYKVPSKKFKVLGNTDRHSIKKNLIGALLFDSGETAEATRLKRTARRRYTRRKNRICYLQEIFSNEMAKVDDSFFHRLEESFLVEEDKKHERHPIFGNIVDEVAYHEKYPTIYHLRKKLVDSTDKADLRLIYLALAHMIKFRGHFLIEGDLNPDNSDVDKLFIQLVQTYNQLFEENPINASGVDAKAILSARLSKSRRLENLIAQLPGEKKNGLFGNLIALSLGLTPNFKSNFDLAEDAKLQLSKDTYDDDLDNLLAQIGDQYADLFLAAKNLSDAILLSDILRVNTEITKAPLSASMIKRYDEHHQDLTLLKALVRQQLPEKYKEIFFDQSKNGYAGYIDGGASQEEFYKFIKPILEKMDGTEELLVKLNREDLLRKQRTFDNGSIPHQIHLGELHAILRRQEDFYPFLKDNREKIEKILTFRIPYYVGPLARGNSRFAWMTRKSEETITPWNFEEVVDKGASAQSFIERMTNFDKNLPNEKVLPKHSLLYEYFTVYNELTKVKYVTEGMRKPAFLSGEQKKAIVDLLFKTNRKVTVKQLKEDYFKKIECFDSVEISGVEDRFNASLGTYHDLLKIIKDKDFLDNEENEDILEDIVLTLTLFEDREMIEERLKTYAHLFDDKVMKQLKRRRYTGWGRLSRKLINGIRDKQSGKTILDFLKSDGFANRNFMQLIHDDSLTFKEDIQKAQVSGQGDSLHEHIANLAGSPAIKKGILQTVKVVDELVKVMGRHKPENIVIEMARENQTTQKGQKNSRERMKRIEEGIKELGSQILKEHPVENTQLQNEKLYLYYLQNGRDMYVDQELDINRLSDYDVDHIVPQSFLKDDSIDNKVLTRSDKARGKSDNVPSEEVVKKMKNYWRQLLNAKLITQRKFDNLTKAERGGLSELDKAGFIKRQLVETRQITKHVAQILDSRMNTKYDENDKLIREVKVITLKSKLVSDFRKDFQFYKVREINNYHHAHDAYLNAVVGTALIKKYPKLESEFVYGDYKVYDVRKMIAKSEQEIGKATAKYFFYSNIMNFFKTEITLANGEIRKRPLIETNGETGEIVWDKGRDFATVRKVLSMPQVNIVKKTEVQTGGFSKESILPKRNSDKLIARKKDWDPKKYGGFDSPTVAYSVLVVAKVEKGKSKKLKSVKELLGITIMERSSFEKNPIDFLEAKGYKEVKKDLIIKLPKYSLFELENGRKRMLASAGELQKGNELALPSKYVNFLYLASHYEKLKGSPEDNEQKQLFVEQHKHYLDEIIEQISEFSKRVILADANLDKVLSAYNKHRDKPIREQAENIIHLFTLTNLGAPAAFKYFDTTIDRKRYTSTKEVLDATLIHQSITGLYETRIDLSQLGGDGGGGGGGTAPLEEEYRLFLEAPIQNVTLLEQWKREIPKVWAEINPPGLASTQAPIHVQLLSTALPVRVRQYPITLEAKRSLRETIRKFRAAGILRPVHSPWNTPLLPVRKSGTSEYRMVQDLREVNKRVETIHPTVPNPYTLLSLLPPDRIWYSVLDLKDAFFCIPLAPESQLIFAFEWADAEEGESGQLTWTRLPQGFKNSPTLFDEALNRDLQGFRLDHPSVSLLQYVDDLLIAADTQAACLSATRDLLMTLAELGYRVSGKKAQLCQEEVTYLGFKIHKGSRSLSNSRTQAILQIPVPKTKRQVREFLGTIGYCRLWIPGFAELAQPLYAATRGGNDPLVWGEKEEEAFQSLKLALTQPPALALPSLDKPFQLFVEETSGAAKGVLTQALGPWKRPVAYLSKRLDPVAAGWPRCLRAIAAAALLTREASKLTFGQDIEITSSHNLESLLRSPPDKWLTNARITQYQVLLLDPPRVRFKQTAALNPATLLPETDDTLPIHHCLDTLDSLTSTRPDLTDQPLAQAEATLFTDGSSYIRDGKRYAGAAVVTLDSVIWAEPLPIGTSAQKAELIALTKALEWSKDKSVNIYTDSRYAFATLHVHGMIYRERGLLTAGGKAIKNAPEILALLTAVWLPKRVAVMHCKGHQKDDAPTSTGNRRADEVAREVAIRPLSTQATISAGKRTADGSEFEKRTADGSEFESPKKKAKVE

SEQ ID NO: 21374 - protein, 2098 aa, synthetic construct
MPAAKRVKLDGGDKKYSIGLDIGTNSVGWAVITDEYKVPSKKFKVLGNTDRHSIKKNLIGALLFDSGETAEATRLKRTARRRYTRRKNRICYLQEIFSNEMAKVDDSFFHRLEESFLVEEDKKHERHPIFGNIVDEVAYHEKYPTIYHLRKKLVDSTDKADLRLIYLALAHMIKFRGHFLIEGDLNPDNSDVDKLFIQLVQTYNQLFEENPINASGVDAKAILSARLSKSRRLENLIAQLPGEKKNGLFGNLIALSLGLTPNFKSNFDLAEDAKLQLSKDTYDDDLDNLLAQIGDQYADLFLAAKNLSDAILLSDILRVNTEITKAPLSASMIKRYDEHHQDLTLLKALVRQQLPEKYKEIFFDQSKNGYAGYIDGGASQEEFYKFIKPILEKMDGTEELLVKLNREDLLRKQRTFDNGSIPHQIHLGELHAILRRQEDFYPFLKDNREKIEKILTFRIPYYVGPLARGNSRFAWMTRKSEETITPWNFEEVVDKGASAQSFIERMTNFDKNLPNEKVLPKHSLLYEYFTVYNELTKVKYVTEGMRKPAFLSGEQKKAIVDLLFKTNRKVTVKQLKEDYFKKIECFDSVEISGVEDRFNASLGTYHDLLKIIKDKDFLDNEENEDILEDIVLTLTLFEDREMIEERLKTYAHLFDDKVMKQLKRRRYTGWGRLSRKLINGIRDKQSGKTILDFLKSDGFANRNFMQLIHDDSLTFKEDIQKAQVSGQGDSLHEHIANLAGSPAIKKGILQTVKVVDELVKVMGRHKPENIVIEMARENQTTQKGQKNSRERMKRIEEGIKELGSQILKEHPVENTQLQNEKLYLYYLQNGRDMYVDQELDINRLSDYDVDHIVPQSFLKDDSIDNKVLTRSDKARGKSDNVPSEEVVKKMKNYWRQLLNAKLITQRKFDNLTKAERGGLSELDKAGFIKRQLVETRQITKHVAQILDSRMNTKYDENDKLIREVKVITLKSKLVSDFRKDFQFYKVREINNYHHAHDAYLNAVVGTALIKKYPKLESEFVYGDYKVYDVRKMIAKSEQEIGKATAKYFFYSNIMNFFKTEITLANGEIRKRPLIETNGETGEIVWDKGRDFATVRKVLSMPQVNIVKKTEVQTGGFSKESILPKRNSDKLIARKKDWDPKKYGGFDSPTVAYSVLVVAKVEKGKSKKLKSVKELLGITIMERSSFEKNPIDFLEAKGYKEVKKDLIIKLPKYSLFELENGRKRMLASAGELQKGNELALPSKYVNFLYLASHYEKLKGSPEDNEQKQLFVEQHKHYLDEIIEQISEFSKRVILADANLDKVLSAYNKHRDKPIREQAENIIHLFTLTNLGAPAAFKYFDTTIDRKRYTSTKEVLDATLIHQSITGLYETRIDLSQLGGDGGGGGGSSEAAAKGGTAPLEEEYRLFLEAPIQNVTLLEQWKREIPKVWAEINPPGLASTQAPIHVQLLSTALPVRVRQYPITLEAKRSLRETIRKFRAAGILRPVHSPWNTPLLPVRKSGTSEYRMVQDLREVNKRVETIHPTVPNPYTLLSLLPPDRIWYSVLDLKDAFFCIPLAPESQLIFAFEWADAEEGESGQLTWTRLPQGFKNSPTLFDEALNRDLQGFRLDHPSVSLLQYVDDLLIAADTQAACLSATRDLLMTLAELGYRVSGKKAQLCQEEVTYLGFKIHKGSRSLSNSRTQAILQIPVPKTKRQVREFLGTIGYCRLWIPGFAELAQPLYAATRGGNDPLVWGEKEEEAFQSLKLALTQPPALALPSLDKPFQLFVEETSGAAKGVLTQALGPWKRPVAYLSKRLDPVAAGWPRCLRAIAAAALLTREASKLTFGQDIEITSSHNLESLLRSPPDKWLTNARITQYQVLLLDPPRVRFKQTAALNPATLLPETDDTLPIHHCLDTLDSLTSTRPDLTDQPLAQAEATLFTDGSSYIRDGKRYAGAAVVTLDSVIWAEPLPIGTSAQKAELIALTKALEWSKDKSVNIYTDSRYAFATLHVHGMIYRERGLLTAGGKAIKNAPEILALLTAVWLPKRVAVMHCKGHQKDDAPTSTGNRRADEVAREVAIRPLSTQATISAGKRTADGSEFEKRTADGSEFESPKKKAKVE

SEQ ID NO: 21375 - protein, 2098 aa, synthetic construct
MPAAKRVKLDGGDKKYSIGLDIGTNSVGWAVITDEYKVPSKKFKVLGNTDRHSIKKNLIGALLFDSGETAEATRLKRTARRRYTRRKNRICYLQEIFSNEMAKVDDSFFHRLEESFLVEEDKKHERHPIFGNIVDEVAYHEKYPTIYHLRKKLVDSTDKADLRLIYLALAHMIKFRGHFLIEGDLNPDNSDVDKLFIQLVQTYNQLFEENPINASGVDAKAILSARLSKSRRLENLIAQLPGEKKNGLFGNLIALSLGLTPNFKSNFDLAEDAKLQLSKDTYDDDLDNLLAQIGDQYADLFLAAKNLSDAILLSDILRVNTEITKAPLSASMIKRYDEHHQDLTLLKALVRQQLPEKYKEIFFDQSKNGYAGYIDGGASQEEFYKFIKPILEKMDGTEELLVKLNREDLLRKQRTFDNGSIPHQIHLGELHAILRRQEDFYPFLKDNREKIEKILTFRIPYYVGPLARGNSRFAWMTRKSEETITPWNFEEVVDKGASAQSFIERMTNFDKNLPNEKVLPKHSLLYEYFTVYNELTKVKYVTEGMRKPAFLSGEQKKAIVDLLFKTNRKVTVKQLKEDYFKKIECFDSVEISGVEDRFNASLGTYHDLLKIIKDKDFLDNEENEDILEDIVLTLTLFEDREMIEERLKTYAHLFDDKVMKQLKRRRYTGWGRLSRKLINGIRDKQSGKTILDFLKSDGFANRNFMQLIHDDSLTFKEDIQKAQVSGQGDSLHEHIANLAGSPAIKKGILQTVKVVDELVKVMGRHKPENIVIEMARENQTTQKGQKNSRERMKRIEEGIKELGSQILKEHPVENTQLQNEKLYLYYLQNGRDMYVDQELDINRLSDYDVDHIVPQSFLKDDSIDNKVLTRSDKARGKSDNVPSEEVVKKMKNYWRQLLNAKLITQRKFDNLTKAERGGLSELDKAGFIKRQLVETRQITKHVAQILDSRMNTKYDENDKLIREVKVITLKSKLVSDFRKDFQFYKVREINNYHHAHDAYLNAVVGTALIKKYPKLESEFVYGDYKVYDVRKMIAKSEQEIGKATAKYFFYSNIMNFFKTEITLANGEIRKRPLIETNGETGEIVWDKGRDFATVRKVLSMPQVNIVKKTEVQTGGFSKESILPKRNSDKLIARKKDWDPKKYGGFDSPTVAYSVLVVAKVEKGKSKKLKSVKELLGITIMERSSFEKNPIDFLEAKGYKEVKKDLIIKLPKYSLFELENGRKRMLASAGELQKGNELALPSKYVNFLYLASHYEKLKGSPEDNEQKQLFVEQHKHYLDEIIEQISEFSKRVILADANLDKVLSAYNKHRDKPIREQAENIIHLFTLTNLGAPAAFKYFDTTIDRKRYTSTKEVLDATLIHQSITGLYETRIDLSQLGGDGGGGSEAAAKGGGGGTAPLEEEYRLFLEAPIQNVTLLEQWKREIPKVWAEINPPGLASTQAPIHVQLLSTALPVRVRQYPITLEAKRSLRETIRKFRAAGILRPVHSPWNTPLLPVRKSGTSEYRMVQDLREVNKRVETIHPTVPNPYTLLSLLPPDRIWYSVLDLKDAFFCIPLAPESQLIFAFEWADAEEGESGQLTWTRLPQGFKNSPTLFDEALNRDLQGFRLDHPSVSLLQYVDDLLIAADTQAACLSATRDLLMTLAELGYRVSGKKAQLCQEEVTYLGFKIHKGSRSLSNSRTQAILQIPVPKTKRQVREFLGTIGYCRLWIPGFAELAQPLYAATRGGNDPLVWGEKEEEAFQSLKLALTQPPALALPSLDKPFQLFVEETSGAAKGVLTQALGPWKRPVAYLSKRLDPVAAGWPRCLRAIAAAALLTREASKLTFGQDIEITSSHNLESLLRSPPDKWLTNARITQYQVLLLDPPRVRFKQTAALNPATLLPETDDTLPIHHCLDTLDSLTSTRPDLTDQPLAQAEATLFTDGSSYIRDGKRYAGAAVVTLDSVIWAEPLPIGTSAQKAELIALTKALEWSKDKSVNIYTDSRYAFATLHVHGMIYRERGLLTAGGKAIKNAPEILALLTAVWLPKRVAVMHCKGHQKDDAPTSTGNRRADEVAREVAIRPLSTQATISAGKRTADGSEFEKRTADGSEFESPKKKAKVE

SEQ ID NO: 21376 - protein, 2093 aa, synthetic construct
MPAAKRVKLDGGDKKYSIGLDIGTNSVGWAVITDEYKVPSKKFKVLGNTDRHSIKKNLIGALLFDSGETAEATRLKRTARRRYTRRKNRICYLQEIFSNEMAKVDDSFFHRLEESFLVEEDKKHERHPIFGNIVDEVAYHEKYPTIYHLRKKLVDSTDKADLRLIYLALAHMIKFRGHFLIEGDLNPDNSDVDKLFIQLVQTYNQLFEENPINASGVDAKAILSARLSKSRRLENLIAQLPGEKKNGLFGNLIALSLGLTPNFKSNFDLAEDAKLQLSKDTYDDDLDNLLAQIGDQYADLFLAAKNLSDAILLSDILRVNTEITKAPLSASMIKRYDEHHQDLTLLKALVRQQLPEKYKEIFFDQSKNGYAGYIDGGASQEEFYKFIKPILEKMDGTEELLVKLNREDLLRKQRTFDNGSIPHQIHLGELHAILRRQEDFYPFLKDNREKIEKILTFRIPYYVGPLARGNSRFAWMTRKSEETITPWNFEEVVDKGASAQSFIERMTNFDKNLPNEKVLPKHSLLYEYFTVYNELTKVKYVTEGMRKPAFLSGEQKKAIVDLLFKTNRKVTVKQLKEDYFKKIECFDSVEISGVEDRFNASLGTYHDLLKIIKDKDFLDNEENEDILEDIVLTLTLFEDREMIEERLKTYAHLFDDKVMKQLKRRRYTGWGRLSRKLINGIRDKQSGKTILDFLKSDGFANRNFMQLIHDDSLTFKEDIQKAQVSGQGDSLHEHIANLAGSPAIKKGILQTVKVVDELVKVMGRHKPENIVIEMARENQTTQKGQKNSRERMKRIEEGIKELGSQILKEHPVENTQLQNEKLYLYYLQNGRDMYVDQELDINRLSDYDVDHIVPQSFLKDDSIDNKVLTRSDKARGKSDNVPSEEVVKKMKNYWRQLLNAKLITQRKFDNLTKAERGGLSELDKAGFIKRQLVETRQITKHVAQILDSRMNTKYDENDKLIREVKVITLKSKLVSDFRKDFQFYKVREINNYHHAHDAYLNAVVGTALIKKYPKLESEFVYGDYKVYDVRKMIAKSEQEIGKATAKYFFYSNIMNFFKTEITLANGEIRKRPLIETNGETGEIVWDKGRDFATVRKVLSMPQVNIVKKTEVQTGGFSKESILPKRNSDKLIARKKDWDPKKYGGFDSPTVAYSVLVVAKVEKGKSKKLKSVKELLGITIMERSSFEKNPIDFLEAKGYKEVKKDLIIKLPKYSLFELENGRKRMLASAGELQKGNELALPSKYVNFLYLASHYEKLKGSPEDNEQKQLFVEQHKHYLDEIIEQISEFSKRVILADANLDKVLSAYNKHRDKPIREQAENIIHLFTLTNLGAPAAFKYFDTTIDRKRYTSTKEVLDATLIHQSITGLYETRIDLSQLGGDGGGGSGSSGGTAPLEEEYRLFLEAPIQNVTLLEQWKREIPKVWAEINPPGLASTQAPIHVQLLSTALPVRVRQYPITLEAKRSLRETIRKFRAAGILRPVHSPWNTPLLPVRKSGTSEYRMVQDLREVNKRVETIHPTVPNPYTLLSLLPPDRIWYSVLDLKDAFFCIPLAPESQLIFAFEWADAEEGESGQLTWTRLPQGFKNSPTLFDEALNRDLQGFRLDHPSVSLLQYVDDLLIAADTQAACLSATRDLLMTLAELGYRVSGKKAQLCQEEVTYLGFKIHKGSRSLSNSRTQAILQIPVPKTKRQVREFLGTIGYCRLWIPGFAELAQPLYAATRGGNDPLVWGEKEEEAFQSLKLALTQPPALALPSLDKPFQLFVEETSGAAKGVLTQALGPWKRPVAYLSKRLDPVAAGWPRCLRAIAAAALLTREASKLTFGQDIEITSSHNLESLLRSPPDKWLTNARITQYQVLLLDPPRVRFKQTAALNPATLLPETDDTLPIHHCLDTLDSLTSTRPDLTDQPLAQAEATLFTDGSSYIRDGKRYAGAAVVTLDSVIWAEPLPIGTSAQKAELIALTKALEWSKDKSVNIYTDSRYAFATLHVHGMIYRERGLLTAGGKAIKNAPEILALLTAVWLPKRVAVMHCKGHQKDDAPTSTGNRRADEVAREVAIRPLSTQATISAGKRTADGSEFEKRTADGSEFESPKKKAKVE

SEQ ID NO: 21377 - protein, 2093 aa, synthetic construct
MPAAKRVKLDGGDKKYSIGLDIGTNSVGWAVITDEYKVPSKKFKVLGNTDRHSIKKNLIGALLFDSGETAEATRLKRTARRRYTRRKNRICYLQEIFSNEMAKVDDSFFHRLEESFLVEEDKKHERHPIFGNIVDEVAYHEKYPTIYHLRKKLVDSTDKADLRLIYLALAHMIKFRGHFLIEGDLNPDNSDVDKLFIQLVQTYNQLFEENPINASGVDAKAILSARLSKSRRLENLIAQLPGEKKNGLFGNLIALSLGLTPNFKSNFDLAEDAKLQLSKDTYDDDLDNLLAQIGDQYADLFLAAKNLSDAILLSDILRVNTEITKAPLSASMIKRYDEHHQDLTLLKALVRQQLPEKYKEIFFDQSKNGYAGYIDGGASQEEFYKFIKPILEKMDGTEELLVKLNREDLLRKQRTFDNGSIPHQIHLGELHAILRRQEDFYPFLKDNREKIEKILTFRIPYYVGPLARGNSRFAWMTRKSEETITPWNFEEVVDKGASAQSFIERMTNFDKNLPNEKVLPKHSLLYEYFTVYNELTKVKYVTEGMRKPAFLSGEQKKAIVDLLFKTNRKVTVKQLKEDYFKKIECFDSVEISGVEDRFNASLGTYHDLLKIIKDKDFLDNEENEDILEDIVLTLTLFEDREMIEERLKTYAHLFDDKVMKQLKRRRYTGWGRLSRKLINGIRDKQSGKTILDFLKSDGFANRNFMQLIHDDSLTFKEDIQKAQVSGQGDSLHEHIANLAGSPAIKKGILQTVKVVDELVKVMGRHKPENIVIEMARENQTTQKGQKNSRERMKRIEEGIKELGSQILKEHPVENTQLQNEKLYLYYLQNGRDMYVDQELDINRLSDYDVDHIVPQSFLKDDSIDNKVLTRSDKARGKSDNVPSEEVVKKMKNYWRQLLNAKLITQRKFDNLTKAERGGLSELDKAGFIKRQLVETRQITKHVAQILDSRMNTKYDENDKLIREVKVITLKSKLVSDFRKDFQFYKVREINNYHHAHDAYLNAVVGTALIKKYPKLESEFVYGDYKVYDVRKMIAKSEQEIGKATAKYFFYSNIMNFFKTEITLANGEIRKRPLIETNGETGEIVWDKGRDFATVRKVLSMPQVNIVKKTEVQTGGFSKESILPKRNSDKLIARKKDWDPKKYGGFDSPTVAYSVLVVAKVEKGKSKKLKSVKELLGITIMERSSFEKNPIDFLEAKGYKEVKKDLIIKLPKYSLFELENGRKRMLASAGELQKGNELALPSKYVNFLYLASHYEKLKGSPEDNEQKQLFVEQHKHYLDEIIEQISEFSKRVILADANLDKVLSAYNKHRDKPIREQAENIIHLFTLTNLGAPAAFKYFDTTIDRKRYTSTKEVLDATLIHQSITGLYETRIDLSQLGGDGGGGSPAPGGTAPLEEEYRLFLEAPIQNVTLLEQWKREIPKVWAEINPPGLASTQAPIHVQLLSTALPVRVRQYPITLEAKRSLRETIRKFRAAGILRPVHSPWNTPLLPVRKSGTSEYRMVQDLREVNKRVETIHPTVPNPYTLLSLLPPDRIWYSVLDLKDAFFCIPLAPESQLIFAFEWADAEEGESGQLTWTRLPQGFKNSPTLFDEALNRDLQGFRLDHPSVSLLQYVDDLLIAADTQAACLSATRDLLMTLAELGYRVSGKKAQLCQEEVTYLGFKIHKGSRSLSNSRTQAILQIPVPKTKRQVREFLGTIGYCRLWIPGFAELAQPLYAATRGGNDPLVWGEKEEEAFQSLKLALTQPPALALPSLDKPFQLFVEETSGAAKGVLTQALGPWKRPVAYLSKRLDPVAAGWPRCLRAIAAAALLTREASKLTFGQDIEITSSHNLESLLRSPPDKWLTNARITQYQVLLLDPPRVRFKQTAALNPATLLPETDDTLPIHHCLDTLDSLTSTRPDLTDQPLAQAEATLFTDGSSYIRDGKRYAGAAVVTLDSVIWAEPLPIGTSAQKAELIALTKALEWSKDKSVNIYTDSRYAFATLHVHGMIYRERGLLTAGGKAIKNAPEILALLTAVWLPKRVAVMHCKGHQKDDAPTSTGNRRADEVAREVAIRPLSTQATISAGKRTADGSEFEKRTADGSEFESPKKKAKVE

SEQ ID NO: 21378 - protein, 2097 aa, synthetic construct
MPAAKRVKLDGGDKKYSIGLDIGTNSVGWAVITDEYKVPSKKFKVLGNTDRHSIKKNLIGALLFDSGETAEATRLKRTARRRYTRRKNRICYLQEIFSNEMAKVDDSFFHRLEESFLVEEDKKHERHPIFGNIVDEVAYHEKYPTIYHLRKKLVDSTDKADLRLIYLALAHMIKFRGHFLIEGDLNPDNSDVDKLFIQLVQTYNQLFEENPINASGVDAKAILSARLSKSRRLENLIAQLPGEKKNGLFGNLIALSLGLTPNFKSNFDLAEDAKLQLSKDTYDDDLDNLLAQIGDQYADLFLAAKNLSDAILLSDILRVNTEITKAPLSASMIKRYDEHHQDLTLLKALVRQQLPEKYKEIFFDQSKNGYAGYIDGGASQEEFYKFIKPILEKMDGTEELLVKLNREDLLRKQRTFDNGSIPHQIHLGELHAILRRQEDFYPFLKDNREKIEKILTFRIPYYVGPLARGNSRFAWMTRKSEETITPWNFEEVVDKGASAQSFIERMTNFDKNLPNEKVLPKHSLLYEYFTVYNELTKVKYVTEGMRKPAFLSGEQKKAIVDLLFKTNRKVTVKQLKEDYFKKIECFDSVEISGVEDRFNASLGTYHDLLKIIKDKDFLDNEENEDILEDIVLTLTLFEDREMIEERLKTYAHLFDDKVMKQLKRRRYTGWGRLSRKLINGIRDKQSGKTILDFLKSDGFANRNFMQLIHDDSLTFKEDIQKAQVSGQGDSLHEHIANLAGSPAIKKGILQTVKVVDELVKVMGRHKPENIVIEMARENQTTQKGQKNSRERMKRIEEGIKELGSQILKEHPVENTQLQNEKLYLYYLQNGRDMYVDQELDINRLSDYDVDHIVPQSFLKDDSIDNKVLTRSDKARGKSDNVPSEEVVKKMKNYWRQLLNAKLITQRKFDNLTKAERGGLSELDKAGFIKRQLVETRQITKHVAQILDSRMNTKYDENDKLIREVKVITLKSKLVSDFRKDFQFYKVREINNYHHAHDAYLNAVVGTALIKKYPKLESEFVYGDYKVYDVRKMIAKSEQEIGKATAKYFFYSNIMNFFKTEITLANGEIRKRPLIETNGETGEIVWDKGRDFATVRKVLSMPQVNIVKKTEVQTGGFSKESILPKRNSDKLIARKKDWDPKKYGGFDSPTVAYSVLVVAKVEKGKSKKLKSVKELLGITIMERSSFEKNPIDFLEAKGYKEVKKDLIIKLPKYSLFELENGRKRMLASAGELQKGNELALPSKYVNFLYLASHYEKLKGSPEDNEQKQLFVEQHKHYLDEIIEQISEFSKRVILADANLDKVLSAYNKHRDKPIREQAENIIHLFTLTNLGAPAAFKYFDTTIDRKRYTSTKEVLDATLIHQSITGLYETRIDLSQLGGDGGGGGGSGGGGSGGTAPLEEEYRLFLEAPIQNVTLLEQWKREIPKVWAEINPPGLASTQAPIHVQLLSTALPVRVRQYPITLEAKRSLRETIRKFRAAGILRPVHSPWNTPLLPVRKSGTSEYRMVQDLREVNKRVETIHPTVPNPYTLLSLLPPDRIWYSVLDLKDAFFCIPLAPESQLIFAFEWADAEEGESGQLTWTRLPQGFKNSPTLFDEALNRDLQGFRLDHPSVSLLQYVDDLLIAADTQAACLSATRDLLMTLAELGYRVSGKKAQLCQEEVTYLGFKIHKGSRSLSNSRTQAILQIPVPKTKRQVREFLGTIGYCRLWIPGFAELAQPLYAATRGGNDPLVWGEKEEEAFQSLKLALTQPPALALPSLDKPFQLFVEETSGAAKGVLTQALGPWKRPVAYLSKRLDPVAAGWPRCLRAIAAAALLTREASKLTFGQDIEITSSHNLESLLRSPPDKWLTNARITQYQVLLLDPPRVRFKQTAALNPATLLPETDDTLPIHHCLDTLDSLTSTRPDLTDQPLAQAEATLFTDGSSYIRDGKRYAGAAVVTLDSVIWAEPLPIGTSAQKAELIALTKALEWSKDKSVNIYTDSRYAFATLHVHGMIYRERGLLTAGGKAIKNAPEILALLTAVWLPKRVAVMHCKGHQKDDAPTSTGNRRADEVAREVAIRPLSTQATISAGKRTADGSEFEKRTADGSEFESPKKKAKVE

SEQ ID NO: 21379 - protein, 2097 aa, synthetic construct
MPAAKRVKLDGGDKKYSIGLDIGTNSVGWAVITDEYKVPSKKFKVLGNTDRHSIKKNLIGALLFDSGETAEATRLKRTARRRYTRRKNRICYLQEIFSNEMAKVDDSFFHRLEESFLVEEDKKHERHPIFGNIVDEVAYHEKYPTIYHLRKKLVDSTDKADLRLIYLALAHMIKFRGHFLIEGDLNPDNSDVDKLFIQLVQTYNQLFEENPINASGVDAKAILSARLSKSRRLENLIAQLPGEKKNGLFGNLIALSLGLTPNFKSNFDLAEDAKLQLSKDTYDDDLDNLLAQIGDQYADLFLAAKNLSDAILLSDILRVNTEITKAPLSASMIKRYDEHHQDLTLLKALVRQQLPEKYKEIFFDQSKNGYAGYIDGGASQEEFYKFIKPILEKMDGTEELLVKLNREDLLRKQRTFDNGSIPHQIHLGELHAILRRQEDFYPFLKDNREKIEKILTFRIPYYVGPLARGNSRFAWMTRKSEETITPWNFEEVVDKGASAQSFIERMTNFDKNLPNEKVLPKHSLLYEYFTVYNELTKVKYVTEGMRKPAFLSGEQKKAIVDLLFKTNRKVTVKQLKEDYFKKIECFDSVEISGVEDRFNASLGTYHDLLKIIKDKDFLDNEENEDILEDIVLTLTLFEDREMIEERLKTYAHLFDDKVMKQLKRRRYTGWGRLSRKLINGIRDKQSGKTILDFLKSDGFANRNFMQLIHDDSLTFKEDIQKAQVSGQGDSLHEHIANLAGSPAIKKGILQTVKVVDELVKVMGRHKPENIVIEMARENQTTQKGQKNSRERMKRIEEGIKELGSQILKEHPVENTQLQNEKLYLYYLQNGRDMYVDQELDINRLSDYDVDHIVPQSFLKDDSIDNKVLTRSDKARGKSDNVPSEEVVKKMKNYWRQLLNAKLITQRKFDNLTKAERGGLSELDKAGFIKRQLVETRQITKHVAQILDSRMNTKYDENDKLIREVKVITLKSKLVSDFRKDFQFYKVREINNYHHAHDAYLNAVVGTALIKKYPKLESEFVYGDYKVYDVRKMIAKSEQEIGKATAKYFFYSNIMNFFKTEITLANGEIRKRPLIETNGETGEIVWDKGRDFATVRKVLSMPQVNIVKKTEVQTGGFSKESILPKRNSDKLIARKKDWDPKKYGGFDSPTVAYSVLVVAKVEKGKSKKLKSVKELLGITIMERSSFEKNPIDFLEAKGYKEVKKDLIIKLPKYSLFELENGRKRMLASAGELQKGNELALPSKYVNFLYLASHYEKLKGSPEDNEQKQLFVEQHKHYLDEIIEQISEFSKRVILADANLDKVLSAYNKHRDKPIREQAENIIHLFTLTNLGAPAAFKYFDTTIDRKRYTSTKEVLDATLIHQSITGLYETRIDLSQLGGDGGEAAAKEAAAKGGTAPLEEEYRLFLEAPIQNVTLLEQWKREIPKVWAEINPPGLASTQAPIHVQLLSTALPVRVRQYPITLEAKRSLRETIRKFRAAGILRPVHSPWNTPLLPVRKSGTSEYRMVQDLREVNKRVETIHPTVPNPYTLLSLLPPDRIWYSVLDLKDAFFCIPLAPESQLIFAFEWADAEEGESGQLTWTRLPQGFKNSPTLFDEALNRDLQGFRLDHPSVSLLQYVDDLLIAADTQAACLSATRDLLMTLAELGYRVSGKKAQLCQEEVTYLGFKIHKGSRSLSNSRTQAILQIPVPKTKRQVREFLGTIGYCRLWIPGFAELAQPLYAATRGGNDPLVWGEKEEEAFQSLKLALTQPPALALPSLDKPFQLFVEETSGAAKGVLTQALGPWKRPVAYLSKRLDPVAAGWPRCLRAIAAAALLTREASKLTFGQDIEITSSHNLESLLRSPPDKWLTNARITQYQVLLLDPPRVRFKQTAALNPATLLPETDDTLPIHHCLDTLDSLTSTRPDLTDQPLAQAEATLFTDGSSYIRDGKRYAGAAVVTLDSVIWAEPLPIGTSAQKAELIALTKALEWSKDKSVNIYTDSRYAFATLHVHGMIYRERGLLTAGGKAIKNAPEILALLTAVWLPKRVAVMHCKGHQKDDAPTSTGNRRADEVAREVAIRPLSTQATISAGKRTADGSEFEKRTADGSEFESPKKKAKVE

SEQ ID NO: 21380 - protein, 2098 aa, synthetic construct
MPAAKRVKLDGGDKKYSIGLDIGTNSVGWAVITDEYKVPSKKFKVLGNTDRHSIKKNLIGALLFDSGETAEATRLKRTARRRYTRRKNRICYLQEIFSNEMAKVDDSFFHRLEESFLVEEDKKHERHPIFGNIVDEVAYHEKYPTIYHLRKKLVDSTDKADLRLIYLALAHMIKFRGHFLIEGDLNPDNSDVDKLFIQLVQTYNQLFEENPINASGVDAKAILSARLSKSRRLENLIAQLPGEKKNGLFGNLIALSLGLTPNFKSNFDLAEDAKLQLSKDTYDDDLDNLLAQIGDQYADLFLAAKNLSDAILLSDILRVNTEITKAPLSASMIKRYDEHHQDLTLLKALVRQQLPEKYKEIFFDQSKNGYAGYIDGGASQEEFYKFIKPILEKMDGTEELLVKLNREDLLRKQRTFDNGSIPHQIHLGELHAILRRQEDFYPFLKDNREKIEKILTFRIPYYVGPLARGNSRFAWMTRKSEETITPWNFEEVVDKGASAQSFIERMTNFDKNLPNEKVLPKHSLLYEYFTVYNELTKVKYVTEGMRKPAFLSGEQKKAIVDLLFKTNRKVTVKQLKEDYFKKIECFDSVEISGVEDRFNASLGTYHDLLKIIKDKDFLDNEENEDILEDIVLTLTLFEDREMIEERLKTYAHLFDDKVMKQLKRRRYTGWGRLSRKLINGIRDKQSGKTILDFLKSDGFANRNFMQLIHDDSLTFKEDIQKAQVSGQGDSLHEHIANLAGSPAIKKGILQTVKVVDELVKVMGRHKPENIVIEMARENQTTQKGQKNSRERMKRIEEGIKELGSQILKEHPVENTQLQNEKLYLYYLQNGRDMYVDQELDINRLSDYDVDHIVPQSFLKDDSIDNKVLTRSDKARGKSDNVPSEEVVKKMKNYWRQLLNAKLITQRKFDNLTKAERGGLSELDKAGFIKRQLVETRQITKHVAQILDSRMNTKYDENDKLIREVKVITLKSKLVSDFRKDFQFYKVREINNYHHAHDAYLNAVVGTALIKKYPKLESEFVYGDYKVYDVRKMIAKSEQEIGKATAKYFFYSNIMNFFKTEITLANGEIRKRPLIETNGETGEIVWDKGRDFATVRKVLSMPQVNIVKKTEVQTGGFSKESILPKRNSDKLIARKKDWDPKKYGGFDSPTVAYSVLVVAKVEKGKSKKLKSVKELLGITIMERSSFEKNPIDFLEAKGYKEVKKDLIIKLPKYSLFELENGRKRMLASAGELQKGNELALPSKYVNFLYLASHYEKLKGSPEDNEQKQLFVEQHKHYLDEIIEQISEFSKRVILADANLDKVLSAYNKHRDKPIREQAENIIHLFTLTNLGAPAAFKYFDTTIDRKRYTSTKEVLDATLIHQSITGLYETRIDLSQLGGDGGGGSEAAAKPAPGGTAPLEEEYRLFLEAPIQNVTLLEQWKREIPKVWAEINPPGLASTQAPIHVQLLSTALPVRVRQYPITLEAKRSLRETIRKFRAAGILRPVHSPWNTPLLPVRKSGTSEYRMVQDLREVNKRVETIHPTVPNPYTLLSLLPPDRIWYSVLDLKDAFFCIPLAPESQLIFAFEWADAEEGESGQLTWTRLPQGFKNSPTLFDEALNRDLQGFRLDHPSVSLLQYVDDLLIAADTQAACLSATRDLLMTLAELGYRVSGKKAQLCQEEVTYLGFKIHKGSRSLSNSRTQAILQIPVPKTKRQVREFLGTIGYCRLWIPGFAELAQPLYAATRGGNDPLVWGEKEEEAFQSLKLALTQPPALALPSLDKPFQLFVEETSGAAKGVLTQALGPWKRPVAYLSKRLDPVAAGWPRCLRAIAAAALLTREASKLTFGQDIEITSSHNLESLLRSPPDKWLTNARITQYQVLLLDPPRVRFKQTAALNPATLLPETDDTLPIHHCLDTLDSLTSTRPDLTDQPLAQAEATLFTDGSSYIRDGKRYAGAAVVTLDSVIWAEPLPIGTSAQKAELIALTKALEWSKDKSVNIYTDSRYAFATLHVHGMIYRERGLLTAGGKAIKNAPEILALLTAVWLPKRVAVMHCKGHQKDDAPTSTGNRRADEVAREVAIRPLSTQATISAGKRTADGSEFEKRTADGSEFESPKKKAKVE

SEQ ID NO: 21381 - protein, 2093 aa, synthetic construct
MPAAKRVKLDGGDKKYSIGLDIGTNSVGWAVITDEYKVPSKKFKVLGNTDRHSIKKNLIGALLFDSGETAEATRLKRTARRRYTRRKNRICYLQEIFSNEMAKVDDSFFHRLEESFLVEEDKKHERHPIFGNIVDEVAYHEKYPTIYHLRKKLVDSTDKADLRLIYLALAHMIKFRGHFLIEGDLNPDNSDVDKLFIQLVQTYNQLFEENPINASGVDAKAILSARLSKSRRLENLIAQLPGEKKNGLFGNLIALSLGLTPNFKSNFDLAEDAKLQLSKDTYDDDLDNLLAQIGDQYADLFLAAKNLSDAILLSDILRVNTEITKAPLSASMIKRYDEHHQDLTLLKALVRQQLPEKYKEIFFDQSKNGYAGYIDGGASQEEFYKFIKPILEKMDGTEELLVKLNREDLLRKQRTFDNGSIPHQIHLGELHAILRRQEDFYPFLKDNREKIEKILTFRIPYYVGPLARGNSRFAWMTRKSEETITPWNFEEVVDKGASAQSFIERMTNFDKNLPNEKVLPKHSLLYEYFTVYNELTKVKYVTEGMRKPAFLSGEQKKAIVDLLFKTNRKVTVKQLKEDYFKKIECFDSVEISGVEDRFNASLGTYHDLLKIIKDKDFLDNEENEDILEDIVLTLTLFEDREMIEERLKTYAHLFDDKVMKQLKRRRYTGWGRLSRKLINGIRDKQSGKTILDFLKSDGFANRNFMQLIHDDSLTFKEDIQKAQVSGQGDSLHEHIANLAGSPAIKKGILQTVKVVDELVKVMGRHKPENIVIEMARENQTTQKGQKNSRERMKRIEEGIKELGSQILKEHPVENTQLQNEKLYLYYLQNGRDMYVDQELDINRLSDYDVDHIVPQSFLKDDSIDNKVLTRSDKARGKSDNVPSEEVVKKMKNYWRQLLNAKLITQRKFDNLTKAERGGLSELDKAGFIKRQLVETRQITKHVAQILDSRMNTKYDENDKLIREVKVITLKSKLVSDFRKDFQFYKVREINNYHHAHDAYLNAVVGTALIKKYPKLESEFVYGDYKVYDVRKMIAKSEQEIGKATAKYFFYSNIMNFFKTEITLANGEIRKRPLIETNGETGEIVWDKGRDFATVRKVLSMPQVNIVKKTEVQTGGFSKESILPKRNSDKLIARKKDWDPKKYGGFDSPTVAYSVLVVAKVEKGKSKKLKSVKELLGITIMERSSFEKNPIDFLEAKGYKEVKKDLIIKLPKYSLFELENGRKRMLASAGELQKGNELALPSKYVNFLYLASHYEKLKGSPEDNEQKQLFVEQHKHYLDEIIEQISEFSKRVILADANLDKVLSAYNKHRDKPIREQAENIIHLFTLTNLGAPAAFKYFDTTIDRKRYTSTKEVLDATLIHQSITGLYETRIDLSQLGGDGGGGSGGGGGTAPLEEEYRLFLEAPIQNVTLLEQWKREIPKVWAEINPPGLASTQAPIHVQLLSTALPVRVRQYPITLEAKRSLRETIRKFRAAGILRPVHSPWNTPLLPVRKSGTSEYRMVQDLREVNKRVETIHPTVPNPYTLLSLLPPDRIWYSVLDLKDAFFCIPLAPESQLIFAFEWADAEEGESGQLTWTRLPQGFKNSPTLFDEALNRDLQGFRLDHPSVSLLQYVDDLLIAADTQAACLSATRDLLMTLAELGYRVSGKKAQLCQEEVTYLGFKIHKGSRSLSNSRTQAILQIPVPKTKRQVREFLGTIGYCRLWIPGFAELAQPLYAATRGGNDPLVWGEKEEEAFQSLKLALTQPPALALPSLDKPFQLFVEETSGAAKGVLTQALGPWKRPVAYLSKRLDPVAAGWPRCLRAIAAAALLTREASKLTFGQDIEITSSHNLESLLRSPPDKWLTNARITQYQVLLLDPPRVRFKQTAALNPATLLPETDDTLPIHHCLDTLDSLTSTRPDLTDQPLAQAEATLFTDGSSYIRDGKRYAGAAVVTLDSVIWAEPLPIGTSAQKAELIALTKALEWSKDKSVNIYTDSRYAFATLHVHGMIYRERGLLTAGGKAIKNAPEILALLTAVWLPKRVAVMHCKGHQKDDAPTSTGNRRADEVAREVAIRPLSTQATISAGKRTADGSEFEKRTADGSEFESPKKKAKVE

SEQ ID NO: 21382 - protein, 2103 aa, synthetic construct
MPAAKRVKLDGGDKKYSIGLDIGTNSVGWAVITDEYKVPSKKFKVLGNTDRHSIKKNLIGALLFDSGETAEATRLKRTARRRYTRRKNRICYLQEIFSNEMAKVDDSFFHRLEESFLVEEDKKHERHPIFGNIVDEVAYHEKYPTIYHLRKKLVDSTDKADLRLIYLALAHMIKFRGHFLIEGDLNPDNSDVDKLFIQLVQTYNQLFEENPINASGVDAKAILSARLSKSRRLENLIAQLPGEKKNGLFGNLIALSLGLTPNFKSNFDLAEDAKLQLSKDTYDDDLDNLLAQIGDQYADLFLAAKNLSDAILLSDILRVNTEITKAPLSASMIKRYDEHHQDLTLLKALVRQQLPEKYKEIFFDQSKNGYAGYIDGGASQEEFYKFIKPILEKMDGTEELLVKLNREDLLRKQRTFDNGSIPHQIHLGELHAILRRQEDFYPFLKDNREKIEKILTFRIPYYVGPLARGNSRFAWMTRKSEETITPWNFEEVVDKGASAQSFIERMTNFDKNLPNEKVLPKHSLLYEYFTVYNELTKVKYVTEGMRKPAFLSGEQKKAIVDLLFKTNRKVTVKQLKEDYFKKIECFDSVEISGVEDRFNASLGTYHDLLKIIKDKDFLDNEENEDILEDIVLTLTLFEDREMIEERLKTYAHLFDDKVMKQLKRRRYTGWGRLSRKLINGIRDKQSGKTILDFLKSDGFANRNFMQLIHDDSLTFKEDIQKAQVSGQGDSLHEHIANLAGSPAIKKGILQTVKVVDELVKVMGRHKPENIVIEMARENQTTQKGQKNSRERMKRIEEGIKELGSQILKEHPVENTQLQNEKLYLYYLQNGRDMYVDQELDINRLSDYDVDHIVPQSFLKDDSIDNKVLTRSDKARGKSDNVPSEEVVKKMKNYWRQLLNAKLITQRKFDNLTKAERGGLSELDKAGFIKRQLVETRQITKHVAQILDSRMNTKYDENDKLIREVKVITLKSKLVSDFRKDFQFYKVREINNYHHAHDAYLNAVVGTALIKKYPKLESEFVYGDYKVYDVRKMIAKSEQEIGKATAKYFFYSNIMNFFKTEITLANGEIRKRPLIETNGETGEIVWDKGRDFATVRKVLSMPQVNIVKKTEVQTGGFSKESILPKRNSDKLIARKKDWDPKKYGGFDSPTVAYSVLVVAKVEKGKSKKLKSVKELLGITIMERSSFEKNPIDFLEAKGYKEVKKDLIIKLPKYSLFELENGRKRMLASAGELQKGNELALPSKYVNFLYLASHYEKLKGSPEDNEQKQLFVEQHKHYLDEIIEQISEFSKRVILADANLDKVLSAYNKHRDKPIREQAENIIHLFTLTNLGAPAAFKYFDTTIDRKRYTSTKEVLDATLIHQSITGLYETRIDLSQLGGDGGSGSETPGTSESATPESGGTAPLEEEYRLFLEAPIQNVTLLEQWKREIPKVWAEINPPGLASTQAPIHVQLLSTALPVRVRQYPITLEAKRSLRETIRKFRAAGILRPVHSPWNTPLLPVRKSGTSEYRMVQDLREVNKRVETIHPTVPNPYTLLSLLPPDRIWYSVLDLKDAFFCIPLAPESQLIFAFEWADAEEGESGQLTWTRLPQGFKNSPTLFDEALNRDLQGFRLDHPSVSLLQYVDDLLIAADTQAACLSATRDLLMTLAELGYRVSGKKAQLCQEEVTYLGFKIHKGSRSLSNSRTQAILQIPVPKTKRQVREFLGTIGYCRLWIPGFAELAQPLYAATRGGNDPLVWGEKEEEAFQSLKLALTQPPALALPSLDKPFQLFVEETSGAAKGVLTQALGPWKRPVAYLSKRLDPVAAGWPRCLRAIAAAALLTREASKLTFGQDIEITSSHNLESLLRSPPDKWLTNARITQYQVLLLDPPRVRFKQTAALNPATLLPETDDTLPIHHCLDTLDSLTSTRPDLTDQPLAQAEATLFTDGSSYIRDGKRYAGAAVVTLDSVIWAEPLPIGTSAQKAELIALTKALEWSKDKSVNIYTDSRYAFATLHVHGMIYRERGLLTAGGKAIKNAPEILALLTAVWLPKRVAVMHCKGHQKDDAPTSTGNRRADEVAREVAIRPLSTQATISAGKRTADGSEFEKRTADGSEFESPKKKAKVE

SEQ ID NO: 21383 - protein, 2099 aa, synthetic construct
MPAAKRVKLDGGDKKYSIGLDIGTNSVGWAVITDEYKVPSKKFKVLGNTDRHSIKKNLIGALLFDSGETAEATRLKRTARRRYTRRKNRICYLQEIFSNEMAKVDDSFFHRLEESFLVEEDKKHERHPIFGNIVDEVAYHEKYPTIYHLRKKLVDSTDKADLRLIYLALAHMIKFRGHFLIEGDLNPDNSDVDKLFIQLVQTYNQLFEENPINASGVDAKAILSARLSKSRRLENLIAQLPGEKKNGLFGNLIALSLGLTPNFKSNFDLAEDAKLQLSKDTYDDDLDNLLAQIGDQYADLFLAAKNLSDAILLSDILRVNTEITKAPLSASMIKRYDEHHQDLTLLKALVRQQLPEKYKEIFFDQSKNGYAGYIDGGASQEEFYKFIKPILEKMDGTEELLVKLNREDLLRKQRTFDNGSIPHQIHLGELHAILRRQEDFYPFLKDNREKIEKILTFRIPYYVGPLARGNSRFAWMTRKSEETITPWNFEEVVDKGASAQSFIERMTNFDKNLPNEKVLPKHSLLYEYFTVYNELTKVKYVTEGMRKPAFLSGEQKKAIVDLLFKTNRKVTVKQLKEDYFKKIECFDSVEISGVEDRFNASLGTYHDLLKIIKDKDFLDNEENEDILEDIVLTLTLFEDREMIEERLKTYAHLFDDKVMKQLKRRRYTGWGRLSRKLINGIRDKQSGKTILDFLKSDGFANRNFMQLIHDDSLTFKEDIQKAQVSGQGDSLHEHIANLAGSPAIKKGILQTVKVVDELVKVMGRHKPENIVIEMARENQTTQKGQKNSRERMKRIEEGIKELGSQILKEHPVENTQLQNEKLYLYYLQNGRDMYVDQELDINRLSDYDVDHIVPQSFLKDDSIDNKVLTRSDKARGKSDNVPSEEVVKKMKNYWRQLLNAKLITQRKFDNLTKAERGGLSELDKAGFIKRQLVETRQITKHVAQILDSRMNTKYDENDKLIREVKVITLKSKLVSDFRKDFQFYKVREINNYHHAHDAYLNAVVGTALIKKYPKLESEFVYGDYKVYDVRKMIAKSEQEIGKATAKYFFYSNIMNFFKTEITLANGEIRKRPLIETNGETGEIVWDKGRDFATVRKVLSMPQVNIVKKTEVQTGGFSKESILPKRNSDKLIARKKDWDPKKYGGFDSPTVAYSVLVVAKVEKGKSKKLKSVKELLGITIMERSSFEKNPIDFLEAKGYKEVKKDLIIKLPKYSLFELENGRKRMLASAGELQKGNELALPSKYVNFLYLASHYEKLKGSPEDNEQKQLFVEQHKHYLDEIIEQISEFSKRVILADANLDKVLSAYNKHRDKPIREQAENIIHLFTLTNLGAPAAFKYFDTTIDRKRYTSTKEVLDATLIHQSITGLYETRIDLSQLGGDGGGSAGSAAGSGEFGGTAPLEEEYRLFLEAPIQNVTLLEQWKREIPKVWAEINPPGLASTQAPIHVQLLSTALPVRVRQYPITLEAKRSLRETIRKFRAAGILRPVHSPWNTPLLPVRKSGTSEYRMVQDLREVNKRVETIHPTVPNPYTLLSLLPPDRIWYSVLDLKDAFFCIPLAPESQLIFAFEWADAEEGESGQLTWTRLPQGFKNSPTLFDEALNRDLQGFRLDHPSVSLLQYVDDLLIAADTQAACLSATRDLLMTLAELGYRVSGKKAQLCQEEVTYLGFKIHKGSRSLSNSRTQAILQIPVPKTKRQVREFLGTIGYCRLWIPGFAELAQPLYAATRGGNDPLVWGEKEEEAFQSLKLALTQPPALALPSLDKPFQLFVEETSGAAKGVLTQALGPWKRPVAYLSKRLDPVAAGWPRCLRAIAAAALLTREASKLTFGQDIEITSSHNLESLLRSPPDKWLTNARITQYQVLLLDPPRVRFKQTAALNPATLLPETDDTLPIHHCLDTLDSLTSTRPDLTDQPLAQAEATLFTDGSSYIRDGKRYAGAAVVTLDSVIWAEPLPIGTSAQKAELIALTKALEWSKDKSVNIYTDSRYAFATLHVHGMIYRERGLLTAGGKAIKNAPEILALLTAVWLPKRVAVMHCKGHQKDDAPTSTGNRRADEVAREVAIRPLSTQATISAGKRTADGSEFEKRTADGSEFESPKKKAKVE

SEQ ID NO: 21384 - protein, 2096 aa, synthetic construct
MPAAKRVKLDGGDKKYSIGLDIGTNSVGWAVITDEYKVPSKKFKVLGNTDRHSIKKNLIGALLFDSGETAEATRLKRTARRRYTRRKNRICYLQEIFSNEMAKVDDSFFHRLEESFLVEEDKKHERHPIFGNIVDEVAYHEKYPTIYHLRKKLVDSTDKADLRLIYLALAHMIKFRGHFLIEGDLNPDNSDVDKLFIQLVQTYNQLFEENPINASGVDAKAILSARLSKSRRLENLIAQLPGEKKNGLFGNLIALSLGLTPNFKSNFDLAEDAKLQLSKDTYDDDLDNLLAQIGDQYADLFLAAKNLSDAILLSDILRVNTEITKAPLSASMIKRYDEHHQDLTLLKALVRQQLPEKYKEIFFDQSKNGYAGYIDGGASQEEFYKFIKPILEKMDGTEELLVKLNREDLLRKQRTFDNGSIPHQIHLGELHAILRRQEDFYPFLKDNREKIEKILTFRIPYYVGPLARGNSRFAWMTRKSEETITPWNFEEVVDKGASAQSFIERMTNFDKNLPNEKVLPKHSLLYEYFTVYNELTKVKYVTEGMRKPAFLSGEQKKAIVDLLFKTNRKVTVKQLKEDYFKKIECFDSVEISGVEDRFNASLGTYHDLLKIIKDKDFLDNEENEDILEDIVLTLTLFEDREMIEERLKTYAHLFDDKVMKQLKRRRYTGWGRLSRKLINGIRDKQSGKTILDFLKSDGFANRNFMQLIHDDSLTFKEDIQKAQVSGQGDSLHEHIANLAGSPAIKKGILQTVKVVDELVKVMGRHKPENIVIEMARENQTTQKGQKNSRERMKRIEEGIKELGSQILKEHPVENTQLQNEKLYLYYLQNGRDMYVDQELDINRLSDYDVDHIVPQSFLKDDSIDNKVLTRSDKARGKSDNVPSEEVVKKMKNYWRQLLNAKLITQRKFDNLTKAERGGLSELDKAGFIKRQLVETRQITKHVAQILDSRMNTKYDENDKLIREVKVITLKSKLVSDFRKDFQFYKVREINNYHHAHDAYLNAVVGTALIKKYPKLESEFVYGDYKVYDVRKMIAKSEQEIGKATAKYFFYSNIMNFFKTEITLANGEIRKRPLIETNGETGEIVWDKGRDFATVRKVLSMPQVNIVKKTEVQTGGFSKESILPKRNSDKLIARKKDWDPKKYGGFDSPTVAYSVLVVAKVEKGKSKKLKSVKELLGITIMERSSFEKNPIDFLEAKGYKEVKKDLIIKLPKYSLFELENGRKRMLASAGELQKGNELALPSKYVNFLYLASHYEKLKGSPEDNEQKQLFVEQHKHYLDEIIEQISEFSKRVILADANLDKVLSAYNKHRDKPIREQAENIIHLFTLTNLGAPAAFKYFDTTIDRKRYTSTKEVLDATLIHQSITGLYETRIDLSQLGGDGGGGGPAPGGSGGTAPLEEEYRLFLEAPIQNVTLLEQWKREIPKVWAEINPPGLASTQAPIHVQLLSTALPVRVRQYPITLEAKRSLRETIRKFRAAGILRPVHSPWNTPLLPVRKSGTSEYRMVQDLREVNKRVETIHPTVPNPYTLLSLLPPDRIWYSVLDLKDAFFCIPLAPESQLIFAFEWADAEEGESGQLTWTRLPQGFKNSPTLFDEALNRDLQGFRLDHPSVSLLQYVDDLLIAADTQAACLSATRDLLMTLAELGYRVSGKKAQLCQEEVTYLGFKIHKGSRSLSNSRTQAILQIPVPKTKRQVREFLGTIGYCRLWIPGFAELAQPLYAATRGGNDPLVWGEKEEEAFQSLKLALTQPPALALPSLDKPFQLFVEETSGAAKGVLTQALGPWKRPVAYLSKRLDPVAAGWPRCLRAIAAAALLTREASKLTFGQDIEITSSHNLESLLRSPPDKWLTNARITQYQVLLLDPPRVRFKQTAALNPATLLPETDDTLPIHHCLDTLDSLTSTRPDLTDQPLAQAEATLFTDGSSYIRDGKRYAGAAVVTLDSVIWAEPLPIGTSAQKAELIALTKALEWSKDKSVNIYTDSRYAFATLHVHGMIYRERGLLTAGGKAIKNAPEILALLTAVWLPKRVAVMHCKGHQKDDAPTSTGNRRADEVAREVAIRPLSTQATISAGKRTADGSEFEKRTADGSEFESPKKKAKVE

SEQ ID NO: 21385 - protein, 2098 aa, synthetic construct
MPAAKRVKLDGGDKKYSIGLDIGTNSVGWAVITDEYKVPSKKFKVLGNTDRHSIKKNLIGALLFDSGETAEATRLKRTARRRYTRRKNRICYLQEIFSNEMAKVDDSFFHRLEESFLVEEDKKHERHPIFGNIVDEVAYHEKYPTIYHLRKKLVDSTDKADLRLIYLALAHMIKFRGHFLIEGDLNPDNSDVDKLFIQLVQTYNQLFEENPINASGVDAKAILSARLSKSRRLENLIAQLPGEKKNGLFGNLIALSLGLTPNFKSNFDLAEDAKLQLSKDTYDDDLDNLLAQIGDQYADLFLAAKNLSDAILLSDILRVNTEITKAPLSASMIKRYDEHHQDLTLLKALVRQQLPEKYKEIFFDQSKNGYAGYIDGGASQEEFYKFIKPILEKMDGTEELLVKLNREDLLRKQRTFDNGSIPHQIHLGELHAILRRQEDFYPFLKDNREKIEKILTFRIPYYVGPLARGNSRFAWMTRKSEETITPWNFEEVVDKGASAQSFIERMTNFDKNLPNEKVLPKHSLLYEYFTVYNELTKVKYVTEGMRKPAFLSGEQKKAIVDLLFKTNRKVTVKQLKEDYFKKIECFDSVEISGVEDRFNASLGTYHDLLKIIKDKDFLDNEENEDILEDIVLTLTLFEDREMIEERLKTYAHLFDDKVMKQLKRRRYTGWGRLSRKLINGIRDKQSGKTILDFLKSDGFANRNFMQLIHDDSLTFKEDIQKAQVSGQGDSLHEHIANLAGSPAIKKGILQTVKVVDELVKVMGRHKPENIVIEMARENQTTQKGQKNSRERMKRIEEGIKELGSQILKEHPVENTQLQNEKLYLYYLQNGRDMYVDQELDINRLSDYDVDHIVPQSFLKDDSIDNKVLTRSDKARGKSDNVPSEEVVKKMKNYWRQLLNAKLITQRKFDNLTKAERGGLSELDKAGFIKRQLVETRQITKHVAQILDSRMNTKYDENDKLIREVKVITLKSKLVSDFRKDFQFYKVREINNYHHAHDAYLNAVVGTALIKKYPKLESEFVYGDYKVYDVRKMIAKSEQEIGKATAKYFFYSNIMNFFKTEITLANGEIRKRPLIETNGETGEIVWDKGRDFATVRKVLSMPQVNIVKKTEVQTGGFSKESILPKRNSDKLIARKKDWDPKKYGGFDSPTVAYSVLVVAKVEKGKSKKLKSVKELLGITIMERSSFEKNPIDFLEAKGYKEVKKDLIIKLPKYSLFELENGRKRMLASAGELQKGNELALPSKYVNFLYLASHYEKLKGSPEDNEQKQLFVEQHKHYLDEIIEQISEFSKRVILADANLDKVLSAYNKHRDKPIREQAENIIHLFTLTNLGAPAAFKYFDTTIDRKRYTSTKEVLDATLIHQSITGLYETRIDLSQLGGDGGGSSGGGEAAAKGGTAPLEEEYRLFLEAPIQNVTLLEQWKREIPKVWAEINPPGLASTQAPIHVQLLSTALPVRVRQYPITLEAKRSLRETIRKFRAAGILRPVHSPWNTPLLPVRKSGTSEYRMVQDLREVNKRVETIHPTVPNPYTLLSLLPPDRIWYSVLDLKDAFFCIPLAPESQLIFAFEWADAEEGESGQLTWTRLPQGFKNSPTLFDEALNRDLQGFRLDHPSVSLLQYVDDLLIAADTQAACLSATRDLLMTLAELGYRVSGKKAQLCQEEVTYLGFKIHKGSRSLSNSRTQAILQIPVPKTKRQVREFLGTIGYCRLWIPGFAELAQPLYAATRGGNDPLVWGEKEEEAFQSLKLALTQPPALALPSLDKPFQLFVEETSGAAKGVLTQALGPWKRPVAYLSKRLDPVAAGWPRCLRAIAAAALLTREASKLTFGQDIEITSSHNLESLLRSPPDKWLTNARITQYQVLLLDPPRVRFKQTAALNPATLLPETDDTLPIHHCLDTLDSLTSTRPDLTDQPLAQAEATLFTDGSSYIRDGKRYAGAAVVTLDSVIWAEPLPIGTSAQKAELIALTKALEWSKDKSVNIYTDSRYAFATLHVHGMIYRERGLLTAGGKAIKNAPEILALLTAVWLPKRVAVMHCKGHQKDDAPTSTGNRRADEVAREVAIRPLSTQATISAGKRTADGSEFEKRTADGSEFESPKKKAKVE

SEQ ID NO: 21386 - protein, 1998 aa, synthetic construct
MPAAKRVKLDGGDKKYSIGLDIGTNSVGWAVITDEYKVPSKKFKVLGNTDRHSIKKNLIGALLFDSGETAEATRLKRTARRRYTRRKNRICYLQEIFSNEMAKVDDSFFHRLEESFLVEEDKKHERHPIFGNIVDEVAYHEKYPTIYHLRKKLVDSTDKADLRLIYLALAHMIKFRGHFLIEGDLNPDNSDVDKLFIQLVQTYNQLFEENPINASGVDAKAILSARLSKSRRLENLIAQLPGEKKNGLFGNLIALSLGLTPNFKSNFDLAEDAKLQLSKDTYDDDLDNLLAQIGDQYADLFLAAKNLSDAILLSDILRVNTEITKAPLSASMIKRYDEHHQDLTLLKALVRQQLPEKYKEIFFDQSKNGYAGYIDGGASQEEFYKFIKPILEKMDGTEELLVKLNREDLLRKQRTFDNGSIPHQIHLGELHAILRRQEDFYPFLKDNREKIEKILTFRIPYYVGPLARGNSRFAWMTRKSEETITPWNFEEVVDKGASAQSFIERMTNFDKNLPNEKVLPKHSLLYEYFTVYNELTKVKYVTEGMRKPAFLSGEQKKAIVDLLFKTNRKVTVKQLKEDYFKKIECFDSVEISGVEDRFNASLGTYHDLLKIIKDKDFLDNEENEDILEDIVLTLTLFEDREMIEERLKTYAHLFDDKVMKQLKRRRYTGWGRLSRKLINGIRDKQSGKTILDFLKSDGFANRNFMQLIHDDSLTFKEDIQKAQVSGQGDSLHEHIANLAGSPAIKKGILQTVKVVDELVKVMGRHKPENIVIEMARENQTTQKGQKNSRERMKRIEEGIKELGSQILKEHPVENTQLQNEKLYLYYLQNGRDMYVDQELDINRLSDYDVDHIVPQSFLKDDSIDNKVLTRSDKARGKSDNVPSEEVVKKMKNYWRQLLNAKLITQRKFDNLTKAERGGLSELDKAGFIKRQLVETRQITKHVAQILDSRMNTKYDENDKLIREVKVITLKSKLVSDFRKDFQFYKVREINNYHHAHDAYLNAVVGTALIKKYPKLESEFVYGDYKVYDVRKMIAKSEQEIGKATAKYFFYSNIMNFFKTEITLANGEIRKRPLIETNGETGEIVWDKGRDFATVRKVLSMPQVNIVKKTEVQTGGFSKESILPKRNSDKLIARKKDWDPKKYGGFDSPTVAYSVLVVAKVEKGKSKKLKSVKELLGITIMERSSFEKNPIDFLEAKGYKEVKKDLIIKLPKYSLFELENGRKRMLASAGELQKGNELALPSKYVNFLYLASHYEKLKGSPEDNEQKQLFVEQHKHYLDEIIEQISEFSKRVILADANLDKVLSAYNKHRDKPIREQAENIIHLFTLTNLGAPAAFKYFDTTIDRKRYTSTKEVLDATLIHQSITGLYETRIDLSQLGGDGGPAPEAAAKGGGVLDTPPSHIGLEHLPPPPEVPQFPLNLERLQALQDLVHRSLEAGYISPWDGPGNNPVFPVRKPNGAWRFVHDLRATNALTKPIPALSPGPPDLTAIPTHPPHIICLDLKDAFFQIPVEDRFRFYLSFTLPSPGGLQPHRRFAWRVLPQGFINSPALFERALQEPLRQVSAAFSQSLLVSYMDDILYASPTEEQRSQCYQALAARLRDLGFQVASEKTSQTPSPVPFLGQMVHEQIVTYQSLPTLQISSPISLHQLQAVLGDLQWVSRGTPTTRRPLQLLYSSLKRHHDPRAIIQLSPEQLQGIAELRQALSHNARSRYNEQEPLLAYVHLTRAGSTLVLFQKGAQFPLAYFQTPLTDNQASPWGLLLLLGCQYLQTQALSSYAKPILKYYHNLPKTSLDNWIQSSEDPRVQELLQLWPQISSQGIQPPGPWKTLITRAEVFLTPQFSPDPIPAALCLFSDGATGRGAYCLWKDHLLDFQAVPAPESAQKGELAGLLAGLAAAPPEPVNIWVDSKYLYSLLRTLVLGAWLQPDPVPSYALLYKSLLRHPAIVVGHVRSHSSASHPIASLNNYVDQLAGKRTADGSEFEKRTADGSEFESPKKKAKVE

SEQ ID NO: 21387 - protein, 2116 aa, synthetic construct
MPAAKRVKLDGGDKKYSIGLDIGTNSVGWAVITDEYKVPSKKFKVLGNTDRHSIKKNLIGALLFDSGETAEATRLKRTARRRYTRRKNRICYLQEIFSNEMAKVDDSFFHRLEESFLVEEDKKHERHPIFGNIVDEVAYHEKYPTIYHLRKKLVDSTDKADLRLIYLALAHMIKFRGHFLIEGDLNPDNSDVDKLFIQLVQTYNQLFEENPINASGVDAKAILSARLSKSRRLENLIAQLPGEKKNGLFGNLIALSLGLTPNFKSNFDLAEDAKLQLSKDTYDDDLDNLLAQIGDQYADLFLAAKNLSDAILLSDILRVNTEITKAPLSASMIKRYDEHHQDLTLLKALVRQQLPEKYKEIFFDQSKNGYAGYIDGGASQEEFYKFIKPILEKMDGTEELLVKLNREDLLRKQRTFDNGSIPHQIHLGELHAILRRQEDFYPFLKDNREKIEKILTFRIPYYVGPLARGNSRFAWMTRKSEETITPWNFEEVVDKGASAQSFIERMTNFDKNLPNEKVLPKHSLLYEYFTVYNELTKVKYVTEGMRKPAFLSGEQKKAIVDLLFKTNRKVTVKQLKEDYFKKIECFDSVEISGVEDRFNASLGTYHDLLKIIKDKDFLDNEENEDILEDIVLTLTLFEDREMIEERLKTYAHLFDDKVMKQLKRRRYTGWGRLSRKLINGIRDKQSGKTILDFLKSDGFANRNFMQLIHDDSLTFKEDIQKAQVSGQGDSLHEHIANLAGSPAIKKGILQTVKVVDELVKVMGRHKPENIVIEMARENQTTQKGQKNSRERMKRIEEGIKELGSQILKEHPVENTQLQNEKLYLYYLQNGRDMYVDQELDINRLSDYDVDHIVPQSFLKDDSIDNKVLTRSDKARGKSDNVPSEEVVKKMKNYWRQLLNAKLITQRKFDNLTKAERGGLSELDKAGFIKRQLVETRQITKHVAQILDSRMNTKYDENDKLIREVKVITLKSKLVSDFRKDFQFYKVREINNYHHAHDAYLNAVVGTALIKKYPKLESEFVYGDYKVYDVRKMIAKSEQEIGKATAKYFFYSNIMNFFKTEITLANGEIRKRPLIETNGETGEIVWDKGRDFATVRKVLSMPQVNIVKKTEVQTGGFSKESILPKRNSDKLIARKKDWDPKKYGGFDSPTVAYSVLVVAKVEKGKSKKLKSVKELLGITIMERSSFEKNPIDFLEAKGYKEVKKDLIIKLPKYSLFELENGRKRMLASAGELQKGNELALPSKYVNFLYLASHYEKLKGSPEDNEQKQLFVEQHKHYLDEIIEQISEFSKRVILADANLDKVLSAYNKHRDKPIREQAENIIHLFTLTNLGAPAAFKYFDTTIDRKRYTSTKEVLDATLIHQSITGLYETRIDLSQLGGDGGEAAAKPAPGGGGGWVQEISDSRPMLHIYLNGRRFLGLLNTGADKTCIAGRDWPANWPIHQTESSLQGLGMACGVARSSQPLRWQHEDKSGIIHPFVIPTLPFTLWGRDIMKDIKVRLMTDSPDDSQDLMIGAIESNLFADQISWKSDQPVWLNQWPLKQEKLQALQQLVTEQLQLGHLEESNSPWNTPVFVIKKKSGKWRLLQDLRAVNATMHDMGALQPGLPSPVAPPKGWEIIIIDLQDCFFNIKLHPEDCKRFAFSVPSPNFKRPYQRFQWKVLPQGMKNSPTLCQKFVDKAILTVRDKYQDSYIVHYMDDILLAHPSRSIVDEILTSMIQALNKHGLVVSTEKIQKYDNLKYLGTHIQGDSVSYQKLQIRTDKLRTLNDFQKLLGNINWIRPFLKLTTGELKPLFEILNPDSNPISTRKLTPEACKALQLMNERLSTARVKRLDLSQPWSLCILKTEYTPTACLWQDGVVEWIHLPHISPKVITPYDIFCTQLIIKGRHRSKELFSKDPDYIVVPYTKVQFDLLLQEKEDWPISLLGFLGEVHFHLPKDPLLTFTLQTAIIFPHMTSTTPLEKGIVIFTDGSANGRSVTYIQGREPIIKENTQNTAQQAEIVAVITAFEEVSQPFNLYTDSKYVTGLFPEIETATLSPRTKIYTELKHLQRLIHKRQEKFYIGHIRGHTGLPGPLAQGNAYADSLTRILTAGKRTADGSEFEKRTADGSEFESPKKKAKVE

SEQ ID NO: 21388 - protein, 2116 aa, synthetic construct
MPAAKRVKLDGGDKKYSIGLDIGTNSVGWAVITDEYKVPSKKFKVLGNTDRHSIKKNLIGALLFDSGETAEATRLKRTARRRYTRRKNRICYLQEIFSNEMAKVDDSFFHRLEESFLVEEDKKHERHPIFGNIVDEVAYHEKYPTIYHLRKKLVDSTDKADLRLIYLALAHMIKFRGHFLIEGDLNPDNSDVDKLFIQLVQTYNQLFEENPINASGVDAKAILSARLSKSRRLENLIAQLPGEKKNGLFGNLIALSLGLTPNFKSNFDLAEDAKLQLSKDTYDDDLDNLLAQIGDQYADLFLAAKNLSDAILLSDILRVNTEITKAPLSASMIKRYDEHHQDLTLLKALVRQQLPEKYKEIFFDQSKNGYAGYIDGGASQEEFYKFIKPILEKMDGTEELLVKLNREDLLRKQRTFDNGSIPHQIHLGELHAILRRQEDFYPFLKDNREKIEKILTFRIPYYVGPLARGNSRFAWMTRKSEETITPWNFEEVVDKGASAQSFIERMTNFDKNLPNEKVLPKHSLLYEYFTVYNELTKVKYVTEGMRKPAFLSGEQKKAIVDLLFKTNRKVTVKQLKEDYFKKIECFDSVEISGVEDRFNASLGTYHDLLKIIKDKDFLDNEENEDILEDIVLTLTLFEDREMIEERLKTYAHLFDDKVMKQLKRRRYTGWGRLSRKLINGIRDKQSGKTILDFLKSDGFANRNFMQLIHDDSLTFKEDIQKAQVSGQGDSLHEHIANLAGSPAIKKGILQTVKVVDELVKVMGRHKPENIVIEMARENQTTQKGQKNSRERMKRIEEGIKELGSQILKEHPVENTQLQNEKLYLYYLQNGRDMYVDQELDINRLSDYDVDHIVPQSFLKDDSIDNKVLTRSDKARGKSDNVPSEEVVKKMKNYWRQLLNAKLITQRKFDNLTKAERGGLSELDKAGFIKRQLVETRQITKHVAQILDSRMNTKYDENDKLIREVKVITLKSKLVSDFRKDFQFYKVREINNYHHAHDAYLNAVVGTALIKKYPKLESEFVYGDYKVYDVRKMIAKSEQEIGKATAKYFFYSNIMNFFKTEITLANGEIRKRPLIETNGETGEIVWDKGRDFATVRKVLSMPQVNIVKKTEVQTGGFSKESILPKRNSDKLIARKKDWDPKKYGGFDSPTVAYSVLVVAKVEKGKSKKLKSVKELLGITIMERSSFEKNPIDFLEAKGYKEVKKDLIIKLPKYSLFELENGRKRMLASAGELQKGNELALPSKYVNFLYLASHYEKLKGSPEDNEQKQLFVEQHKHYLDEIIEQISEFSKRVILADANLDKVLSAYNKHRDKPIREQAENIIHLFTLTNLGAPAAFKYFDTTIDRKRYTSTKEVLDATLIHQSITGLYETRIDLSQLGGDGGGGSGSSEAAAKGGVQEISDSRPMLHIYLNGRRFLGLLDTGADKTCIAGRDWPANWPIHQTESSLQGLGMACGVARSSQPLRWQHEDKSGIIHPFVIPTLPFTLWGRDIMKDIKVRLMTDSPDDSQDLMIGAIESNLFADQISWKSDQPVWLNQWPLKQEKLQALQQLVTEQLQLGHLEESNSPWNTPVFVIKKKSGKWRLLQDLRAVNATMHDMGALQPGLPSPPAVPKGWEIIIIDLQDCFFNIKLHPEDCKRFAFSVPSPNFKRPYQRFQWKVLPQGMKNSPTLCQKFVDKAILTVRDKYQDSYIVHYMDDILLAHPSRSIVDEILTSMIQALNKHGLVVSTEKIQKYDNLKYLGTHIQGDSVSYQKLQIRTDKLRTLNDFQKLLGNINWIRPFLKLTTGELKPLFEILNPDSNPISTRKLTPEACKALQLMNERLSTARVKRLDLSQPWSLCILKTEYTPTACLWQDGVVEWIHLPHISPKVITPYDIFCTQLIIKGRHRSKELFSKDPDYIVVPYTKVQFDLLLQEKEDWPISLLGFLGEVHFHLPKDPLLTFTLQTAIIFPHMTSTTPLEKGIVIFTDGSANGRSVTYIQGREPIIKENTQNTAQQAEIVAVITAFEEVSQPFNLYTDSKYVTGLFPEIETATLSPRTKIYTELKHLQRLIHKRQEKFYIGHIRGHTGLPGPLAQGNAYADSLTRILTAAGKRTADGSEFEKRTADGSEFESPKKKAKVE

SEQ ID NO: 21389 - protein, 2116 aa, synthetic construct
MPAAKRVKLDGGDKKYSIGLDIGTNSVGWAVITDEYKVPSKKFKVLGNTDRHSIKKNLIGALLFDSGETAEATRLKRTARRRYTRRKNRICYLQEIFSNEMAKVDDSFFHRLEESFLVEEDKKHERHPIFGNIVDEVAYHEKYPTIYHLRKKLVDSTDKADLRLIYLALAHMIKFRGHFLIEGDLNPDNSDVDKLFIQLVQTYNQLFEENPINASGVDAKAILSARLSKSRRLENLIAQLPGEKKNGLFGNLIALSLGLTPNFKSNFDLAEDAKLQLSKDTYDDDLDNLLAQIGDQYADLFLAAKNLSDAILLSDILRVNTEITKAPLSASMIKRYDEHHQDLTLLKALVRQQLPEKYKEIFFDQSKNGYAGYIDGGASQEEFYKFIKPILEKMDGTEELLVKLNREDLLRKQRTFDNGSIPHQIHLGELHAILRRQEDFYPFLKDNREKIEKILTFRIPYYVGPLARGNSRFAWMTRKSEETITPWNFEEVVDKGASAQSFIERMTNFDKNLPNEKVLPKHSLLYEYFTVYNELTKVKYVTEGMRKPAFLSGEQKKAIVDLLFKTNRKVTVKQLKEDYFKKIECFDSVEISGVEDRFNASLGTYHDLLKIIKDKDFLDNEENEDILEDIVLTLTLFEDREMIEERLKTYAHLFDDKVMKQLKRRRYTGWGRLSRKLINGIRDKQSGKTILDFLKSDGFANRNFMQLIHDDSLTFKEDIQKAQVSGQGDSLHEHIANLAGSPAIKKGILQTVKVVDELVKVMGRHKPENIVIEMARENQTTQKGQKNSRERMKRIEEGIKELGSQILKEHPVENTQLQNEKLYLYYLQNGRDMYVDQELDINRLSDYDVDHIVPQSFLKDDSIDNKVLTRSDKARGKSDNVPSEEVVKKMKNYWRQLLNAKLITQRKFDNLTKAERGGLSELDKAGFIKRQLVETRQITKHVAQILDSRMNTKYDENDKLIREVKVITLKSKLVSDFRKDFQFYKVREINNYHHAHDAYLNAVVGTALIKKYPKLESEFVYGDYKVYDVRKMIAKSEQEIGKATAKYFFYSNIMNFFKTEITLANGEIRKRPLIETNGETGEIVWDKGRDFATVRKVLSMPQVNIVKKTEVQTGGFSKESILPKRNSDKLIARKKDWDPKKYGGFDSPTVAYSVLVVAKVEKGKSKKLKSVKELLGITIMERSSFEKNPIDFLEAKGYKEVKKDLIIKLPKYSLFELENGRKRMLASAGELQKGNELALPSKYVNFLYLASHYEKLKGSPEDNEQKQLFVEQHKHYLDEIIEQISEFSKRVILADANLDKVLSAYNKHRDKPIREQAENIIHLFTLTNLGAPAAFKYFDTTIDRKRYTSTKEVLDATLIHQSITGLYETRIDLSQLGGDGGEAAAKGGSGSSGGVQEISDSRPMLHIYLNGRRFLGLLDTGADKTCIAGRDWPANWPIHQTESSLQGLGMACGVARSSQPLRWQHEDKSGIIHPFVIPTLPFTLWGRDIMKDIKVRLMTDSPDDSQDLMIGAIESNLFADQISWKSDQPVWLNQWPLKQEKLQALQQLVTEQLQLGHLEESNSPWNTPVFVIKKKSGKWRLLQDLRAVNATMHDMGALQPGLPSPVAVPKGWEIIIIDLQDCFFNIKLHPEDCKRFAFSVPSPNFKRPYQRFQWKVLPQGMKNSPTLCQKFVDKAILTVRDKYQDSYIVHYMDDILLAHPSRSIVDEILTSMIQALNKHGLVVSTEKIQKYDNLKYLGTHIQGDSVSYQKLQIRTDKLRTLNDFQKLLGNINWIRPFLKLTTGELKPLFEILNPDSNPISTRKLTPEACKALQLMNERLSTARVKRLDLSQPWSLCILKTEYTPTACLWQDGVVEWIHLPHISPKVITPYDIFCTQLIIKGRHRSKELFSKDPDYIVVPYTKVQFDLLLQEKEDWPISLLGFLGEVHFHLPKDPLLTFTLQTAIIFPHMTSTTPLEKGIVIFTDGSANGRSVTYIQGREPIIKENTQNTAQQAEIVAVITAFEEVSQPFNLYTDSKYVTGLFPEIETATLSPRTKIYTELKHLQRLIHKRQEKFYIGHIRGHTGLPGPLAQGNAYADSLTRILTAAGKRTADGSEFEKRTADGSEFESPKKKAKVE

SEQ ID NO: 21390 - protein, 2116 aa, synthetic construct
MPAAKRVKLDGGDKKYSIGLDIGTNSVGWAVITDEYKVPSKKFKVLGNTDRHSIKKNLIGALLFDSGETAEATRLKRTARRRYTRRKNRICYLQEIFSNEMAKVDDSFFHRLEESFLVEEDKKHERHPIFGNIVDEVAYHEKYPTIYHLRKKLVDSTDKADLRLIYLALAHMIKFRGHFLIEGDLNPDNSDVDKLFIQLVQTYNQLFEENPINASGVDAKAILSARLSKSRRLENLIAQLPGEKKNGLFGNLIALSLGLTPNFKSNFDLAEDAKLQLSKDTYDDDLDNLLAQIGDQYADLFLAAKNLSDAILLSDILRVNTEITKAPLSASMIKRYDEHHQDLTLLKALVRQQLPEKYKEIFFDQSKNGYAGYIDGGASQEEFYKFIKPILEKMDGTEELLVKLNREDLLRKQRTFDNGSIPHQIHLGELHAILRRQEDFYPFLKDNREKIEKILTFRIPYYVGPLARGNSRFAWMTRKSEETITPWNFEEVVDKGASAQSFIERMTNFDKNLPNEKVLPKHSLLYEYFTVYNELTKVKYVTEGMRKPAFLSGEQKKAIVDLLFKTNRKVTVKQLKEDYFKKIECFDSVEISGVEDRFNASLGTYHDLLKIIKDKDFLDNEENEDILEDIVLTLTLFEDREMIEERLKTYAHLFDDKVMKQLKRRRYTGWGRLSRKLINGIRDKQSGKTILDFLKSDGFANRNFMQLIHDDSLTFKEDIQKAQVSGQGDSLHEHIANLAGSPAIKKGILQTVKVVDELVKVMGRHKPENIVIEMARENQTTQKGQKNSRERMKRIEEGIKELGSQILKEHPVENTQLQNEKLYLYYLQNGRDMYVDQELDINRLSDYDVDHIVPQSFLKDDSIDNKVLTRSDKARGKSDNVPSEEVVKKMKNYWRQLLNAKLITQRKFDNLTKAERGGLSELDKAGFIKRQLVETRQITKHVAQILDSRMNTKYDENDKLIREVKVITLKSKLVSDFRKDFQFYKVREINNYHHAHDAYLNAVVGTALIKKYPKLESEFVYGDYKVYDVRKMIAKSEQEIGKATAKYFFYSNIMNFFKTEITLANGEIRKRPLIETNGETGEIVWDKGRDFATVRKVLSMPQVNIVKKTEVQTGGFSKESILPKRNSDKLIARKKDWDPKKYGGFDSPTVAYSVLVVAKVEKGKSKKLKSVKELLGITIMERSSFEKNPIDFLEAKGYKEVKKDLIIKLPKYSLFELENGRKRMLASAGELQKGNELALPSKYVNFLYLASHYEKLKGSPEDNEQKQLFVEQHKHYLDEIIEQISEFSKRVILADANLDKVLSAYNKHRDKPIREQAENIIHLFTLTNLGAPAAFKYFDTTIDRKRYTSTKEVLDATLIHQSITGLYETRIDLSQLGGDGGEAAAKGGGGGSGGVQEISDSRPMLHIYLNGRRFLGLLDTGADKTCIAGRDWPANWPIHQTESSLQGLGMACGVARSSQPLRWQHEDKSGIIHPFVIPTLPFTLWGRDIMKDIKVRLMTDSPDDSQDLMIGAIESNLFADQISWKSDQPVWLNQWPLKQEKLQALQQLVTEQLQLGHLEESNSPWNTPVFVIKKKSGKWRLLQDLRAVNATMHDMGALQPGLPSPVAVPKGWEIIIIDLQDCFFNIKLHPEDCKRFAFSVPSPNFKRPYQRFQWKVLPQGMKNSPTLCQKFVDKAILTVRDKYQDSYIVHYMDDILLAHPSRSIVDEILTSMIQALNKHGLVVSTEKIQKYDNLKYLGTHIQGDSVSYQKLQIRTDKLRTLNDFQKLLGNINWIRPFLKLTTGELKPLFEILNPDSNPISTRKLTPEACKALQLMNERLSTARVKRLDLSQPWSLCILKTEYTPTACLWQDGVVEWIHLPHISPKVITPYDIFCTQLIIKGRHRSKELFSKDPDYIVVPYTKVQFDLLLQEKEDWPISLLGFLGEVHFHLPKDPLLTFTLQTAIIFPHMTSTTPLEKGIVIFTDGSANGRSVTYIQGREPIIKENTQNTAQQAEIVAVITAFEEVSQPFNLYTDSKYVTGLFPEIETATLSPRTKIYTELKHLQRLIHKRQEKFYIGHIRGHTGLPGPLAQGNAYADSLTRILTAAGKRTADGSEFEKRTADGSEFESPKKKAKVE

SEQ ID NO: 21391 - protein, 2116 aa, synthetic construct
MPAAKRVKLDGGDKKYSIGLDIGTNSVGWAVITDEYKVPSKKFKVLGNTDRHSIKKNLIGALLFDSGETAEATRLKRTARRRYTRRKNRICYLQEIFSNEMAKVDDSFFHRLEESFLVEEDKKHERHPIFGNIVDEVAYHEKYPTIYHLRKKLVDSTDKADLRLIYLALAHMIKFRGHFLIEGDLNPDNSDVDKLFIQLVQTYNQLFEENPINASGVDAKAILSARLSKSRRLENLIAQLPGEKKNGLFGNLIALSLGLTPNFKSNFDLAEDAKLQLSKDTYDDDLDNLLAQIGDQYADLFLAAKNLSDAILLSDILRVNTEITKAPLSASMIKRYDEHHQDLTLLKALVRQQLPEKYKEIFFDQSKNGYAGYIDGGASQEEFYKFIKPILEKMDGTEELLVKLNREDLLRKQRTFDNGSIPHQIHLGELHAILRRQEDFYPFLKDNREKIEKILTFRIPYYVGPLARGNSRFAWMTRKSEETITPWNFEEVVDKGASAQSFIERMTNFDKNLPNEKVLPKHSLLYEYFTVYNELTKVKYVTEGMRKPAFLSGEQKKAIVDLLFKTNRKVTVKQLKEDYFKKIECFDSVEISGVEDRFNASLGTYHDLLKIIKDKDFLDNEENEDILEDIVLTLTLFEDREMIEERLKTYAHLFDDKVMKQLKRRRYTGWGRLSRKLINGIRDKQSGKTILDFLKSDGFANRNFMQLIHDDSLTFKEDIQKAQVSGQGDSLHEHIANLAGSPAIKKGILQTVKVVDELVKVMGRHKPENIVIEMARENQTTQKGQKNSRERMKRIEEGIKELGSQILKEHPVENTQLQNEKLYLYYLQNGRDMYVDQELDINRLSDYDVDHIVPQSFLKDDSIDNKVLTRSDKARGKSDNVPSEEVVKKMKNYWRQLLNAKLITQRKFDNLTKAERGGLSELDKAGFIKRQLVETRQITKHVAQILDSRMNTKYDENDKLIREVKVITLKSKLVSDFRKDFQFYKVREINNYHHAHDAYLNAVVGTALIKKYPKLESEFVYGDYKVYDVRKMIAKSEQEIGKATAKYFFYSNIMNFFKTEITLANGEIRKRPLIETNGETGEIVWDKGRDFATVRKVLSMPQVNIVKKTEVQTGGFSKESILPKRNSDKLIARKKDWDPKKYGGFDSPTVAYSVLVVAKVEKGKSKKLKSVKELLGITIMERSSFEKNPIDFLEAKGYKEVKKDLIIKLPKYSLFELENGRKRMLASAGELQKGNELALPSKYVNFLYLASHYEKLKGSPEDNEQKQLFVEQHKHYLDEIIEQISEFSKRVILADANLDKVLSAYNKHRDKPIREQAENIIHLFTLTNLGAPAAFKYFDTTIDRKRYTSTKEVLDATLIHQSITGLYETRIDLSQLGGDGGEAAAKPAPGGSGGVQEISDSRPMLHIYLNGRRFLGLLDTGADKTCIAGRDWPANWPIHQTESSLQGLGMACGVARSSQPLRWQHEDKSGIIHPFVIPTLPFTLWGRDIMKDIKVRLMTDSPDDSQDLMIGAIESNLFADQISWKSDQPVWLNQWPLKQEKLQALQQLVTEQLQLGHLEESNSPWNTPVFVIKKKSGKWRLLQDLRAVNATMHDMGALQPGLPSPVAVPKGWEIIIIDLQDCFFNIKLHPEDCKRFAFSVPSPNFKRPYQRFQWKVLPQGMKNSPTLCQKFVDKAILTVRDKYQDSYIVHYMDDILLAHPSRSIVDEILTSMIQALNKHGLVVSTEKIQKYDNLKYLGTHIQGDSVSYQKLQIRTDKLRTLNDFQKLLGNINWIRPFLKLTTGELKPLFEILNPDSNPISTRKLTPEACKALQLMNERLSTARVKRLDLSQPWSLCILKTEYTPTACLWQDGVVEWIHLPHISPKVITPYDIFCTQLIIKGRHRSKELFSKDPDYIVVPYTKVQFDLLLQEKEDWPISLLGFLGEVHFHLPKDPLLTFTLQTAIIFPHMTSTTPLEKGIVIFTDGSANGRSVTYIQGREPIIKENTQNTAQQAEIVAVITAFEEVSQPFNLYTDSKYVTGLFPEIETATLSPRTKIYTELKHLQRLIHKRQEKFYIGHIRGHTGLPGPLAQGNAYADSLTRILTAAGKRTADGSEFEKRTADGSEFESPKKKAKVE

SEQ ID NO: 21392 - protein, 2113 aa, synthetic construct
MPAAKRVKLDGGDKKYSIGLDIGTNSVGWAVITDEYKVPSKKFKVLGNTDRHSIKKNLIGALLFDSGETAEATRLKRTARRRYTRRKNRICYLQEIFSNEMAKVDDSFFHRLEESFLVEEDKKHERHPIFGNIVDEVAYHEKYPTIYHLRKKLVDSTDKADLRLIYLALAHMIKFRGHFLIEGDLNPDNSDVDKLFIQLVQTYNQLFEENPINASGVDAKAILSARLSKSRRLENLIAQLPGEKKNGLFGNLIALSLGLTPNFKSNFDLAEDAKLQLSKDTYDDDLDNLLAQIGDQYADLFLAAKNLSDAILLSDILRVNTEITKAPLSASMIKRYDEHHQDLTLLKALVRQQLPEKYKEIFFDQSKNGYAGYIDGGASQEEFYKFIKPILEKMDGTEELLVKLNREDLLRKQRTFDNGSIPHQIHLGELHAILRRQEDFYPFLKDNREKIEKILTFRIPYYVGPLARGNSRFAWMTRKSEETITPWNFEEVVDKGASAQSFIERMTNFDKNLPNEKVLPKHSLLYEYFTVYNELTKVKYVTEGMRKPAFLSGEQKKAIVDLLFKTNRKVTVKQLKEDYFKKIECFDSVEISGVEDRFNASLGTYHDLLKIIKDKDFLDNEENEDILEDIVLTLTLFEDREMIEERLKTYAHLFDDKVMKQLKRRRYTGWGRLSRKLINGIRDKQSGKTILDFLKSDGFANRNFMQLIHDDSLTFKEDIQKAQVSGQGDSLHEHIANLAGSPAIKKGILQTVKVVDELVKVMGRHKPENIVIEMARENQTTQKGQKNSRERMKRIEEGIKELGSQILKEHPVENTQLQNEKLYLYYLQNGRDMYVDQELDINRLSDYDVDHIVPQSFLKDDSIDNKVLTRSDKARGKSDNVPSEEVVKKMKNYWRQLLNAKLITQRKFDNLTKAERGGLSELDKAGFIKRQLVETRQITKHVAQILDSRMNTKYDENDKLIREVKVITLKSKLVSDFRKDFQFYKVREINNYHHAHDAYLNAVVGTALIKKYPKLESEFVYGDYKVYDVRKMIAKSEQEIGKATAKYFFYSNIMNFFKTEITLANGEIRKRPLIETNGETGEIVWDKGRDFATVRKVLSMPQVNIVKKTEVQTGGFSKESILPKRNSDKLIARKKDWDPKKYGGFDSPTVAYSVLVVAKVEKGKSKKLKSVKELLGITIMERSSFEKNPIDFLEAKGYKEVKKDLIIKLPKYSLFELENGRKRMLASAGELQKGNELALPSKYVNFLYLASHYEKLKGSPEDNEQKQLFVEQHKHYLDEIIEQISEFSKRVILADANLDKVLSAYNKHRDKPIREQAENIIHLFTLTNLGAPAAFKYFDTTIDRKRYTSTKEVLDATLIHQSITGLYETRIDLSQLGGDGGGGSEAAAKGGVQEISDSRPMLHIYLNGRRFLGLLDTGADKTCIAGRDWPANWPIHQTESSLQGLGMACGVARSSQPLRWQHEDKSGIIHPFVIPTLPFTLWGRDIMKDIKVRLMTDSPDDSQDLMIGAIESNLFADQISWKSDQPVWLNQWPLKQEKLQALQQLVTEQLQLGHLEESNSPWNTPVFVIKKKSGKWRLLQDLRAVNATMHDMGALQPGLPSPVAVPKGWEIIIIDLQDCFFNIKLHPEDCKRFAFSVPSPNFKRPYQRFQWKVLPQGMKNSPTLCQKFVDKAILTVRDKYQDSYIVHYMDDILLAHPSRSIVDEILTSMIQALNKHGLVVSTEKIQKYDNLKYLGTHIQGDSVSYQKLQIRTDKLRTLNDFQKLLGNINWIRPFLKLTTGELKPLFEILNPDSNPISTRKLTPEACKALQLMNERLSTARVKRLDLSQPWSLCILKTEYTPTACLWQDGVVEWIHLPHISPKVITPYDIFCTQLIIKGRHRSKELFSKDPDYIVVPYTKVQFDLLLQEKEDWPISLLGFLGEVHFHLPKDPLLTFTLQTAIIFPHMTSTTPLEKGIVIFTDGSANGRSVTYIQGREPIIKENTQNTAQQAEIVAVITAFEEVSQPFNLYTDSKYVTGLFPEIETATLSPRTKIYTELKHLQRLIHKRQEKFYIGHIRGHTGLPGPLAQGNAYADSLTRILTAAGKRTADGSEFEKRTADGSEFESPKKKAKVE

SEQ ID NO: 21393 - protein, 2111 aa, synthetic construct
MPAAKRVKLDGGDKKYSIGLDIGTNSVGWAVITDEYKVPSKKFKVLGNTDRHSIKKNLIGALLFDSGETAEATRLKRTARRRYTRRKNRICYLQEIFSNEMAKVDDSFFHRLEESFLVEEDKKHERHPIFGNIVDEVAYHEKYPTIYHLRKKLVDSTDKADLRLIYLALAHMIKFRGHFLIEGDLNPDNSDVDKLFIQLVQTYNQLFEENPINASGVDAKAILSARLSKSRRLENLIAQLPGEKKNGLFGNLIALSLGLTPNFKSNFDLAEDAKLQLSKDTYDDDLDNLLAQIGDQYADLFLAAKNLSDAILLSDILRVNTEITKAPLSASMIKRYDEHHQDLTLLKALVRQQLPEKYKEIFFDQSKNGYAGYIDGGASQEEFYKFIKPILEKMDGTEELLVKLNREDLLRKQRTFDNGSIPHQIHLGELHAILRRQEDFYPFLKDNREKIEKILTFRIPYYVGPLARGNSRFAWMTRKSEETITPWNFEEVVDKGASAQSFIERMTNFDKNLPNEKVLPKHSLLYEYFTVYNELTKVKYVTEGMRKPAFLSGEQKKAIVDLLFKTNRKVTVKQLKEDYFKKIECFDSVEISGVEDRFNASLGTYHDLLKIIKDKDFLDNEENEDILEDIVLTLTLFEDREMIEERLKTYAHLFDDKVMKQLKRRRYTGWGRLSRKLINGIRDKQSGKTILDFLKSDGFANRNFMQLIHDDSLTFKEDIQKAQVSGQGDSLHEHIANLAGSPAIKKGILQTVKVVDELVKVMGRHKPENIVIEMARENQTTQKGQKNSRERMKRIEEGIKELGSQILKEHPVENTQLQNEKLYLYYLQNGRDMYVDQELDINRLSDYDVDHIVPQSFLKDDSIDNKVLTRSDKARGKSDNVPSEEVVKKMKNYWRQLLNAKLITQRKFDNLTKAERGGLSELDKAGFIKRQLVETRQITKHVAQILDSRMNTKYDENDKLIREVKVITLKSKLVSDFRKDFQFYKVREINNYHHAHDAYLNAVVGTALIKKYPKLESEFVYGDYKVYDVRKMIAKSEQEIGKATAKYFFYSNIMNFFKTEITLANGEIRKRPLIETNGETGEIVWDKGRDFATVRKVLSMPQVNIVKKTEVQTGGFSKESILPKRNSDKLIARKKDWDPKKYGGFDSPTVAYSVLVVAKVEKGKSKKLKSVKELLGITIMERSSFEKNPIDFLEAKGYKEVKKDLIIKLPKYSLFELENGRKRMLASAGELQKGNELALPSKYVNFLYLASHYEKLKGSPEDNEQKQLFVEQHKHYLDEIIEQISEFSKRVILADANLDKVLSAYNKHRDKPIREQAENIIHLFTLTNLGAPAAFKYFDTTIDRKRYTSTKEVLDATLIHQSITGLYETRIDLSQLGGDGGGSSGGGGGVQEISDSRPMLHIYLNGRRFLGLLDTGADKTCIAGRDWPANWPIHQTESSLQGLGMACGVARSSQPLRWQHEDKSGIIHPFVIPTLPFTLWGRDIMKDIKVRLMTDSPDDSQDLMIGAIESNLFADQISWKSDQPVWLNQWPLKQEKLQALQQLVTEQLQLGHLEESNSPWNTPVFVIKKKSGKWRLLQDLRAVNATMHDMGALQPGLPSPVAVPKGWEIIIIDLQDCFFNIKLHPEDCKRFAFSVPSPNFKRPYQRFQWKVLPQGMKNSPTLCQKFVDKAILTVRDKYQDSYIVHYMDDILLAHPSRSIVDEILTSMIQALNKHGLVVSTEKIQKYDNLKYLGTHIQGDSVSYQKLQIRTDKLRTLNDFQKLLGNINWIRPFLKLTTGELKPLFEILNPDSNPISTRKLTPEACKALQLMNERLSTARVKRLDLSQPWSLCILKTEYTPTACLWQDGVVEWIHLPHISPKVITPYDIFCTQLIIKGRHRSKELFSKDPDYIVVPYTKVQFDLLLQEKEDWPISLLGFLGEVHFHLPKDPLLTFTLQTAIIFPHMTSTTPLEKGIVIFTDGSANGRSVTYIQGREPIIKENTQNTAQQAEIVAVITAFEEVSQPFNLYTDSKYVTGLFPEIETATLSPRTKIYTELKHLQRLIHKRQEKFYIGHIRGHTGLPGPLAQGNAYADSLTRILTAAGKRTADGSEFEKRTADGSEFESPKKKAKVE

SEQ ID NO: 21394 - protein, 2114 aa, synthetic construct
MPAAKRVKLDGGDKKYSIGLDIGTNSVGWAVITDEYKVPSKKFKVLGNTDRHSIKKNLIGALLFDSGETAEATRLKRTARRRYTRRKNRICYLQEIFSNEMAKVDDSFFHRLEESFLVEEDKKHERHPIFGNIVDEVAYHEKYPTIYHLRKKLVDSTDKADLRLIYLALAHMIKFRGHFLIEGDLNPDNSDVDKLFIQLVQTYNQLFEENPINASGVDAKAILSARLSKSRRLENLIAQLPGEKKNGLFGNLIALSLGLTPNFKSNFDLAEDAKLQLSKDTYDDDLDNLLAQIGDQYADLFLAAKNLSDAILLSDILRVNTEITKAPLSASMIKRYDEHHQDLTLLKALVRQQLPEKYKEIFFDQSKNGYAGYIDGGASQEEFYKFIKPILEKMDGTEELLVKLNREDLLRKQRTFDNGSIPHQIHLGELHAILRRQEDFYPFLKDNREKIEKILTFRIPYYVGPLARGNSRFAWMTRKSEETITPWNFEEVVDKGASAQSFIERMTNFDKNLPNEKVLPKHSLLYEYFTVYNELTKVKYVTEGMRKPAFLSGEQKKAIVDLLFKTNRKVTVKQLKEDYFKKIECFDSVEISGVEDRFNASLGTYHDLLKIIKDKDFLDNEENEDILEDIVLTLTLFEDREMIEERLKTYAHLFDDKVMKQLKRRRYTGWGRLSRKLINGIRDKQSGKTILDFLKSDGFANRNFMQLIHDDSLTFKEDIQKAQVSGQGDSLHEHIANLAGSPAIKKGILQTVKVVDELVKVMGRHKPENIVIEMARENQTTQKGQKNSRERMKRIEEGIKELGSQILKEHPVENTQLQNEKLYLYYLQNGRDMYVDQELDINRLSDYDVDHIVPQSFLKDDSIDNKVLTRSDKARGKSDNVPSEEVVKKMKNYWRQLLNAKLITQRKFDNLTKAERGGLSELDKAGFIKRQLVETRQITKHVAQILDSRMNTKYDENDKLIREVKVITLKSKLVSDFRKDFQFYKVREINNYHHAHDAYLNAVVGTALIKKYPKLESEFVYGDYKVYDVRKMIAKSEQEIGKATAKYFFYSNIMNFFKTEITLANGEIRKRPLIETNGETGEIVWDKGRDFATVRKVLSMPQVNIVKKTEVQTGGFSKESILPKRNSDKLIARKKDWDPKKYGGFDSPTVAYSVLVVAKVEKGKSKKLKSVKELLGITIMERSSFEKNPIDFLEAKGYKEVKKDLIIKLPKYSLFELENGRKRMLASAGELQKGNELALPSKYVNFLYLASHYEKLKGSPEDNEQKQLFVEQHKHYLDEIIEQISEFSKRVILADANLDKVLSAYNKHRDKPIREQAENIIHLFTLTNLGAPAAFKYFDTTIDRKRYTSTKEVLDATLIHQSITGLYETRIDLSQLGGDGGGGGPAPGSSGGVQEISDSRPMLHIYLNGRRFLGLLDTGADKTCIAGRDWPANWPIHQTESSLQGLGMACGVARSSQPLRWQHEDKSGIIHPFVIPTLPFTLWGRDIMKDIKVRLMTDSPDDSQDLMIGAIESNLFADQISWKSDQPVWLNQWPLKQEKLQALQQLVTEQLQLGHLEESNSPWNTPVFVIKKKSGKWRLLQDLRAVNATMHDMGALQPGLPSPVAVPKGWEIIIIDLQDCFFNIKLHPEDCKRFAFSVPSPNFKRPYQRFQWKVLPQGMKNSPTLCQKFVDKAILTVRDKYQDSYIVHYMDDILLAHPSRSIVDEILTSMIQALNKHGLVVSTEKIQKYDNLKYLGTHIQGDSVSYQKLQIRTDKLRTLNDFQKLLGNINWIRPFLKLTTGELKPLFEILNPDSNPISTRKLTPEACKALQLMNERLSTARVKRLDLSQPWSLCILKTEYTPTACLWQDGVVEWIHLPHISPKVITPYDIFCTQLIIKGRHRSKELFSKDPDYIVVPYTKVQFDLLLQEKEDWPISLLGFLGEVHFHLPKDPLLTFTLQTAIIFPHMTSTTPLEKGIVIFTDGSANGRSVTYIQGREPIIKENTQNTAQQAEIVAVITAFEEVSQPFNLYTDSKYVTGLFPEIETATLSPRTKIYTELKHLQRLIHKRQEKFYIGHIRGHTGLPGPLAQGNAYADSLTRILTAAGKRTADGSEFEKRTADGSEFESPKKKAKVE

SEQ ID NO: 21395 - protein, 2010 aa, synthetic construct
MPAAKRVKLDGGDKKYSIGLDIGTNSVGWAVITDEYKVPSKKFKVLGNTDRHSIKKNLIGALLFDSGETAEATRLKRTARRRYTRRKNRICYLQEIFSNEMAKVDDSFFHRLEESFLVEEDKKHERHPIFGNIVDEVAYHEKYPTIYHLRKKLVDSTDKADLRLIYLALAHMIKFRGHFLIEGDLNPDNSDVDKLFIQLVQTYNQLFEENPINASGVDAKAILSARLSKSRRLENLIAQLPGEKKNGLFGNLIALSLGLTPNFKSNFDLAEDAKLQLSKDTYDDDLDNLLAQIGDQYADLFLAAKNLSDAILLSDILRVNTEITKAPLSASMIKRYDEHHQDLTLLKALVRQQLPEKYKEIFFDQSKNGYAGYIDGGASQEEFYKFIKPILEKMDGTEELLVKLNREDLLRKQRTFDNGSIPHQIHLGELHAILRRQEDFYPFLKDNREKIEKILTFRIPYYVGPLARGNSRFAWMTRKSEETITPWNFEEVVDKGASAQSFIERMTNFDKNLPNEKVLPKHSLLYEYFTVYNELTKVKYVTEGMRKPAFLSGEQKKAIVDLLFKTNRKVTVKQLKEDYFKKIECFDSVEISGVEDRFNASLGTYHDLLKIIKDKDFLDNEENEDILEDIVLTLTLFEDREMIEERLKTYAHLFDDKVMKQLKRRRYTGWGRLSRKLINGIRDKQSGKTILDFLKSDGFANRNFMQLIHDDSLTFKEDIQKAQVSGQGDSLHEHIANLAGSPAIKKGILQTVKVVDELVKVMGRHKPENIVIEMARENQTTQKGQKNSRERMKRIEEGIKELGSQILKEHPVENTQLQNEKLYLYYLQNGRDMYVDQELDINRLSDYDVDHIVPQSFLKDDSIDNKVLTRSDKARGKSDNVPSEEVVKKMKNYWRQLLNAKLITQRKFDNLTKAERGGLSELDKAGFIKRQLVETRQITKHVAQILDSRMNTKYDENDKLIREVKVITLKSKLVSDFRKDFQFYKVREINNYHHAHDAYLNAVVGTALIKKYPKLESEFVYGDYKVYDVRKMIAKSEQEIGKATAKYFFYSNIMNFFKTEITLANGEIRKRPLIETNGETGEIVWDKGRDFATVRKVLSMPQVNIVKKTEVQTGGFSKESILPKRNSDKLIARKKDWDPKKYGGFDSPTVAYSVLVVAKVEKGKSKKLKSVKELLGITIMERSSFEKNPIDFLEAKGYKEVKKDLIIKLPKYSLFELENGRKRMLASAGELQKGNELALPSKYVNFLYLASHYEKLKGSPEDNEQKQLFVEQHKHYLDEIIEQISEFSKRVILADANLDKVLSAYNKHRDKPIREQAENIIHLFTLTNLGAPAAFKYFDTTIDRKRYTSTKEVLDATLIHQSITGLYETRIDLSQLGGDGGGGGEAAAKGSSGGLTAAIDILAPQQCAEPITWKSDEPVWVDQWPLTNDKLAAAQQLVQEQLEAGHITESSSPWNTPIFVIKKKSGKWRLLQDLRAVNATMVLMGALQPGLPSPVAIPQGYLKIIIDLKDCFFSIPLHPSDQKRFAFSLPSTNFKEPMQRFQWKVLPQGMANSPTLCQKYVATAIHKVRHAWKQMYIIHYMDDILIAGKDGQQVLQCFDQLKQELTAAGLHIAPEKVQLQDPYTYLGFELNGPKITNQKAVIRKDKLQTLNDFQKLLGDINWLRPYLKLTTGDLKPLFDTLKGDSDPNSHRSLSKEALASLEKVETAIAEQFVTHINYSLPLIFLIFNTALTPTGLFWQDNPIMWIHLPASPKKVLLPYYDAIADLIILGRDHSKKYFGIEPSTIIQPYSKSQIDWLMQNTEMWPIACASFVGILDNHYPPNKLIQFCKLHTFVFPQIISKTPLNNALLVFTDGSSTGMAAYTLTDTTIKFQTNLNSAQLVELQALIAVLSAFPNQPLNIYTDSAYLAHSIPLLETVAQIKHISETAKLFLQCQQLIYNRSIPFYIGHVRAHSGLPGPIAQGNQRADLATKIVASNINTAGKRTADGSEFEKRTADGSEFESPKKKAKVE

SEQ ID NO: 21396 - protein, 2008 aa, synthetic construct
MPAAKRVKLDGGDKKYSIGLDIGTNSVGWAVITDEYKVPSKKFKVLGNTDRHSIKKNLIGALLFDSGETAEATRLKRTARRRYTRRKNRICYLQEIFSNEMAKVDDSFFHRLEESFLVEEDKKHERHPIFGNIVDEVAYHEKYPTIYHLRKKLVDSTDKADLRLIYLALAHMIKFRGHFLIEGDLNPDNSDVDKLFIQLVQTYNQLFEENPINASGVDAKAILSARLSKSRRLENLIAQLPGEKKNGLFGNLIALSLGLTPNFKSNFDLAEDAKLQLSKDTYDDDLDNLLAQIGDQYADLFLAAKNLSDAILLSDILRVNTEITKAPLSASMIKRYDEHHQDLTLLKALVRQQLPEKYKEIFFDQSKNGYAGYIDGGASQEEFYKFIKPILEKMDGTEELLVKLNREDLLRKQRTFDNGSIPHQIHLGELHAILRRQEDFYPFLKDNREKIEKILTFRIPYYVGPLARGNSRFAWMTRKSEETITPWNFEEVVDKGASAQSFIERMTNFDKNLPNEKVLPKHSLLYEYFTVYNELTKVKYVTEGMRKPAFLSGEQKKAIVDLLFKTNRKVTVKQLKEDYFKKIECFDSVEISGVEDRFNASLGTYHDLLKIIKDKDFLDNEENEDILEDIVLTLTLFEDREMIEERLKTYAHLFDDKVMKQLKRRRYTGWGRLSRKLINGIRDKQSGKTILDFLKSDGFANRNFMQLIHDDSLTFKEDIQKAQVSGQGDSLHEHIANLAGSPAIKKGILQTVKVVDELVKVMGRHKPENIVIEMARENQTTQKGQKNSRERMKRIEEGIKELGSQILKEHPVENTQLQNEKLYLYYLQNGRDMYVDQELDINRLSDYDVDHIVPQSFLKDDSIDNKVLTRSDKARGKSDNVPSEEVVKKMKNYWRQLLNAKLITQRKFDNLTKAERGGLSELDKAGFIKRQLVETRQITKHVAQILDSRMNTKYDENDKLIREVKVITLKSKLVSDFRKDFQFYKVREINNYHHAHDAYLNAVVGTALIKKYPKLESEFVYGDYKVYDVRKMIAKSEQEIGKATAKYFFYSNIMNFFKTEITLANGEIRKRPLIETNGETGEIVWDKGRDFATVRKVLSMPQVNIVKKTEVQTGGFSKESILPKRNSDKLIARKKDWDPKKYGGFDSPTVAYSVLVVAKVEKGKSKKLKSVKELLGITIMERSSFEKNPIDFLEAKGYKEVKKDLIIKLPKYSLFELENGRKRMLASAGELQKGNELALPSKYVNFLYLASHYEKLKGSPEDNEQKQLFVEQHKHYLDEIIEQISEFSKRVILADANLDKVLSAYNKHRDKPIREQAENIIHLFTLTNLGAPAAFKYFDTTIDRKRYTSTKEVLDATLIHQSITGLYETRIDLSQLGGDGGGSSPAPGGGGGLTAAIDILAPQQCAEPITWKSDEPVWVDQWPLTNDKLAAAQQLVQEQLEAGHITESSSPWNTPIFVIKKKSGKWRLLQDLRAVNATMVLMGALQPGLPSPVAPPQGYLKIIIDLKDCFFSIPLHPSDQKRFAFSLPSTNFKEPMQRFQWKVLPQGMANSPTLCQKYVATAIHKVRHAWKQMYIIHYMDDILIAGKDGQQVLQCFDQLKQELTAAGLHIAPEKVQLQDPYTYLGFELNGPKITNQKAVIRKDKLQTLNDFQKLLGDINWLRPYLKLTTGDLKPLFDTLKPDSDPNSHRSLSKEALASLEKVETAIAEQFVTHINYSLPLIFLIFNTALTPTGLFWQDNPIMWIHLPASPKKVLLPYYDAIADLIILGRDHSKKYFGIEPSTIIQPYSKSQIDWLMQNTEMWPIACASFVGILDNHYPPNKLIQFCKLHTFVFPQIISKTPLNNALLVFTDGSSTGMAAYTLTDTTIKFQTNLNSAQLVELQALIAVLSAFPNQPLNIYTDSAYLAHSIPLLETVAQIKHISETAKLFLQCQQLIYNRSIPFYIGHVRAHSGLPGPIAQGNQRADLATKIVASNINTAGKRTADGSEFEKRTADGSEFESPKKKAKVE

SEQ ID NO: 21397 - protein, 2085 aa, synthetic construct
MPAAKRVKLDGGDKKYSIGLDIGTNSVGWAVITDEYKVPSKKFKVLGNTDRHSIKKNLIGALLFDSGETAEATRLKRTARRRYTRRKNRICYLQEIFSNEMAKVDDSFFHRLEESFLVEEDKKHERHPIFGNIVDEVAYHEKYPTIYHLRKKLVDSTDKADLRLIYLALAHMIKFRGHFLIEGDLNPDNSDVDKLFIQLVQTYNQLFEENPINASGVDAKAILSARLSKSRRLENLIAQLPGEKKNGLFGNLIALSLGLTPNFKSNFDLAEDAKLQLSKDTYDDDLDNLLAQIGDQYADLFLAAKNLSDAILLSDILRVNTEITKAPLSASMIKRYDEHHQDLTLLKALVRQQLPEKYKEIFFDQSKNGYAGYIDGGASQEEFYKFIKPILEKMDGTEELLVKLNREDLLRKQRTFDNGSIPHQIHLGELHAILRRQEDFYPFLKDNREKIEKILTFRIPYYVGPLARGNSRFAWMTRKSEETITPWNFEEVVDKGASAQSFIERMTNFDKNLPNEKVLPKHSLLYEYFTVYNELTKVKYVTEGMRKPAFLSGEQKKAIVDLLFKTNRKVTVKQLKEDYFKKIECFDSVEISGVEDRFNASLGTYHDLLKIIKDKDFLDNEENEDILEDIVLTLTLFEDREMIEERLKTYAHLFDDKVMKQLKRRRYTGWGRLSRKLINGIRDKQSGKTILDFLKSDGFANRNFMQLIHDDSLTFKEDIQKAQVSGQGDSLHEHIANLAGSPAIKKGILQTVKVVDELVKVMGRHKPENIVIEMARENQTTQKGQKNSRERMKRIEEGIKELGSQILKEHPVENTQLQNEKLYLYYLQNGRDMYVDQELDINRLSDYDVDHIVPQSFLKDDSIDNKVLTRSDKARGKSDNVPSEEVVKKMKNYWRQLLNAKLITQRKFDNLTKAERGGLSELDKAGFIKRQLVETRQITKHVAQILDSRMNTKYDENDKLIREVKVITLKSKLVSDFRKDFQFYKVREINNYHHAHDAYLNAVVGTALIKKYPKLESEFVYGDYKVYDVRKMIAKSEQEIGKATAKYFFYSNIMNFFKTEITLANGEIRKRPLIETNGETGEIVWDKGRDFATVRKVLSMPQVNIVKKTEVQTGGFSKESILPKRNSDKLIARKKDWDPKKYGGFDSPTVAYSVLVVAKVEKGKSKKLKSVKELLGITIMERSSFEKNPIDFLEAKGYKEVKKDLIIKLPKYSLFELENGRKRMLASAGELQKGNELALPSKYVNFLYLASHYEKLKGSPEDNEQKQLFVEQHKHYLDEIIEQISEFSKRVILADANLDKVLSAYNKHRDKPIREQAENIIHLFTLTNLGAPAAFKYFDTTIDRKRYTSTKEVLDATLIHQSITGLYETRIDLSQLGGDGGEAAAKGSSGGLDDEYRLYSPLVKPDQNIQFWLEQFPQAWAETAGMGLAKQVPPQVIQLKASATPVSVRQYPLSKEAQEGIRPHVQRLIQQGILVPVQSPWNTPLLPVRKPGTNDYRPVQDLREVNKRVQDIHPTVPNPYNLLCALPPQRSWYTVLDLKDAFFCLRLHPTSQPLFAFEWRDPGTGRTGQLTWTRLPQGFKNSPTIFNEALHRDLANFRIQHPQVTLLQYVDDLLLAGATKQDCLEGTKALLLELSDLGYRASAKKAQICRREVTYLGYSLRDGQRWLTEARKKTVVQIPAPTTAKQVREFLGKAGFCRLFIPGFATLAAPLYPLTKPKGEFSWAPEHQKAFDAIKKALLSAPALALPDVTKPFTLYVDERKGVARGVLTQTLGPWRRPVAYLSKKLDPVASGWPVCLKAIAAVAILVKDADKLTLGQNITVIAPHALENIVRQPPDRWMTNARMTHYQSLLLTERVTFAPPAALNPATLLPEETDEPVTHDCHQLLIEETGVRKDLTDIPLTGEVLTWFTDGSSYVVEGKRMAGAAVVDGTRTIWASSLPEGTSAQKAELMALTQALRLAEGKSINIYTDSRYAFATAHVHGAIYKQRGWLTSAGREIKNKEEILSLLEALHLPKRLAIIHCPGHQKAKDPISRGNQMADRVAKQAAQGVNLLPAGKRTADGSEFEKRTADGSEFESPKKKAKVE

SEQ ID NO: 21398 - protein, 2088 aa, synthetic construct
MPAAKRVKLDGGDKKYSIGLDIGTNSVGWAVITDEYKVPSKKFKVLGNTDRHSIKKNLIGALLFDSGETAEATRLKRTARRRYTRRKNRICYLQEIFSNEMAKVDDSFFHRLEESFLVEEDKKHERHPIFGNIVDEVAYHEKYPTIYHLRKKLVDSTDKADLRLIYLALAHMIKFRGHFLIEGDLNPDNSDVDKLFIQLVQTYNQLFEENPINASGVDAKAILSARLSKSRRLENLIAQLPGEKKNGLFGNLIALSLGLTPNFKSNFDLAEDAKLQLSKDTYDDDLDNLLAQIGDQYADLFLAAKNLSDAILLSDILRVNTEITKAPLSASMIKRYDEHHQDLTLLKALVRQQLPEKYKEIFFDQSKNGYAGYIDGGASQEEFYKFIKPILEKMDGTEELLVKLNREDLLRKQRTFDNGSIPHQIHLGELHAILRRQEDFYPFLKDNREKIEKILTFRIPYYVGPLARGNSRFAWMTRKSEETITPWNFEEVVDKGASAQSFIERMTNFDKNLPNEKVLPKHSLLYEYFTVYNELTKVKYVTEGMRKPAFLSGEQKKAIVDLLFKTNRKVTVKQLKEDYFKKIECFDSVEISGVEDRFNASLGTYHDLLKIIKDKDFLDNEENEDILEDIVLTLTLFEDREMIEERLKTYAHLFDDKVMKQLKRRRYTGWGRLSRKLINGIRDKQSGKTILDFLKSDGFANRNFMQLIHDDSLTFKEDIQKAQVSGQGDSLHEHIANLAGSPAIKKGILQTVKVVDELVKVMGRHKPENIVIEMARENQTTQKGQKNSRERMKRIEEGIKELGSQILKEHPVENTQLQNEKLYLYYLQNGRDMYVDQELDINRLSDYDVDHIVPQSFLKDDSIDNKVLTRSDKARGKSDNVPSEEVVKKMKNYWRQLLNAKLITQRKFDNLTKAERGGLSELDKAGFIKRQLVETRQITKHVAQILDSRMNTKYDENDKLIREVKVITLKSKLVSDFRKDFQFYKVREINNYHHAHDAYLNAVVGTALIKKYPKLESEFVYGDYKVYDVRKMIAKSEQEIGKATAKYFFYSNIMNFFKTEITLANGEIRKRPLIETNGETGEIVWDKGRDFATVRKVLSMPQVNIVKKTEVQTGGFSKESILPKRNSDKLIARKKDWDPKKYGGFDSPTVAYSVLVVAKVEKGKSKKLKSVKELLGITIMERSSFEKNPIDFLEAKGYKEVKKDLIIKLPKYSLFELENGRKRMLASAGELQKGNELALPSKYVNFLYLASHYEKLKGSPEDNEQKQLFVEQHKHYLDEIIEQISEFSKRVILADANLDKVLSAYNKHRDKPIREQAENIIHLFTLTNLGAPAAFKYFDTTIDRKRYTSTKEVLDATLIHQSITGLYETRIDLSQLGGDGGEAAAKGGSPAPGGLDDEYRLYSPLVKPDQNIQFWLEQFPQAWAETAGMGLAKQVPPQVIQLKASATPVSVRQYPLSKEAQEGIRPHVQRLIQQGILVPVQSPWNTPLLPVRKPGTNDYRPVQDLREVNKRVQDIHPTVPNPYNLLCALPPQRSWYTVLDLKDAFFCLRLHPTSQPLFAFEWRDPGTGRTGQLTWTRLPQGFKNSPTIFNEALHRDLANFRIQHPQVTLLQYVDDLLLAGATKQDCLEGTKALLLELSDLGYRASAKKAQICRREVTYLGYSLRDGQRWLTEARKKTVVQIPAPTTAKQVREFLGKAGFCRLFIPGFATLAAPLYPLTKPKGEFSWAPEHQKAFDAIKKALLSAPALALPDVTKPFTLYVDERKGVARGVLTQTLGPWRRPVAYLSKKLDPVASGWPVCLKAIAAVAILVKDADKLTLGQNITVIAPHALENIVRQPPDRWMTNARMTHYQSLLLTERVTFAPPAALNPATLLPEETDEPVTHDCHQLLIEETGVRKDLTDIPLTGEVLTWFTDGSSYVVEGKRMAGAAVVDGTRTIWASSLPEGTSAQKAELMALTQALRLAEGKSINIYTDSRYAFATAHVHGAIYKQRGWLTSAGREIKNKEEILSLLEALHLPKRLAIIHCPGHQKAKDPISRGNQMADRVAKQAAQGVNLLPAGKRTADGSEFEKRTADGSEFESPKKKAKVE

SEQ ID NO: 21399 - protein, 2123 aa, synthetic construct
MPAAKRVKLDGGDKKYSIGLDIGTNSVGWAVITDEYKVPSKKFKVLGNTDRHSIKKNLIGALLFDSGETAEATRLKRTARRRYTRRKNRICYLQEIFSNEMAKVDDSFFHRLEESFLVEEDKKHERHPIFGNIVDEVAYHEKYPTIYHLRKKLVDSTDKADLRLIYLALAHMIKFRGHFLIEGDLNPDNSDVDKLFIQLVQTYNQLFEENPINASGVDAKAILSARLSKSRRLENLIAQLPGEKKNGLFGNLIALSLGLTPNFKSNFDLAEDAKLQLSKDTYDDDLDNLLAQIGDQYADLFLAAKNLSDAILLSDILRVNTEITKAPLSASMIKRYDEHHQDLTLLKALVRQQLPEKYKEIFFDQSKNGYAGYIDGGASQEEFYKFIKPILEKMDGTEELLVKLNREDLLRKQRTFDNGSIPHQIHLGELHAILRRQEDFYPFLKDNREKIEKILTFRIPYYVGPLARGNSRFAWMTRKSEETITPWNFEEVVDKGASAQSFIERMTNFDKNLPNEKVLPKHSLLYEYFTVYNELTKVKYVTEGMRKPAFLSGEQKKAIVDLLFKTNRKVTVKQLKEDYFKKIECFDSVEISGVEDRFNASLGTYHDLLKIIKDKDFLDNEENEDILEDIVLTLTLFEDREMIEERLKTYAHLFDDKVMKQLKRRRYTGWGRLSRKLINGIRDKQSGKTILDFLKSDGFANRNFMQLIHDDSLTFKEDIQKAQVSGQGDSLHEHIANLAGSPAIKKGILQTVKVVDELVKVMGRHKPENIVIEMARENQTTQKGQKNSRERMKRIEEGIKELGSQILKEHPVENTQLQNEKLYLYYLQNGRDMYVDQELDINRLSDYDVDHIVPQSFLKDDSIDNKVLTRSDKARGKSDNVPSEEVVKKMKNYWRQLLNAKLITQRKFDNLTKAERGGLSELDKAGFIKRQLVETRQITKHVAQILDSRMNTKYDENDKLIREVKVITLKSKLVSDFRKDFQFYKVREINNYHHAHDAYLNAVVGTALIKKYPKLESEFVYGDYKVYDVRKMIAKSEQEIGKATAKYFFYSNIMNFFKTEITLANGEIRKRPLIETNGETGEIVWDKGRDFATVRKVLSMPQVNIVKKTEVQTGGFSKESILPKRNSDKLIARKKDWDPKKYGGFDSPTVAYSVLVVAKVEKGKSKKLKSVKELLGITIMERSSFEKNPIDFLEAKGYKEVKKDLIIKLPKYSLFELENGRKRMLASAGELQKGNELALPSKYVNFLYLASHYEKLKGSPEDNEQKQLFVEQHKHYLDEIIEQISEFSKRVILADANLDKVLSAYNKHRDKPIREQAENIIHLFTLTNLGAPAAFKYFDTTIDRKRYTSTKEVLDATLIHQSITGLYETRIDLSQLGGDGGAEAAAKEAAAKEAAAKEAAAKALEAEAAAKEAAAKEAAAKEAAAKAGGLDDEYRLYSPLVKPDQNIQFWLEQFPQAWAETAGMGLAKQVPPQVIQLKASATPVSVRQYPLSKEAQEGIRPHVQRLIQQGILVPVQSPWNTPLLPVRKPGTNDYRPVQDLREVNKRVQDIHPTVPNPYNLLCALPPQRSWYTVLDLKDAFFCLRLHPTSQPLFAFEWRDPGTGRTGQLTWTRLPQGFKNSPTIFNEALHRDLANFRIQHPQVTLLQYVDDLLLAGATKQDCLEGTKALLLELSDLGYRASAKKAQICRREVTYLGYSLRDGQRWLTEARKKTVVQIPAPTTAKQVREFLGKAGFCRLFIPGFATLAAPLYPLTKPKGEFSWAPEHQKAFDAIKKALLSAPALALPDVTKPFTLYVDERKGVARGVLTQTLGPWRRPVAYLSKKLDPVASGWPVCLKAIAAVAILVKDADKLTLGQNITVIAPHALENIVRQPPDRWMTNARMTHYQSLLLTERVTFAPPAALNPATLLPEETDEPVTHDCHQLLIEETGVRKDLTDIPLTGEVLTWFTDGSSYVVEGKRMAGAAVVDGTRTIWASSLPEGTSAQKAELMALTQALRLAEGKSINIYTDSRYAFATAHVHGAIYKQRGWLTSAGREIKNKEEILSLLEALHLPKRLAIIHCPGHQKAKDPISRGNQMADRVAKQAAQGVNLLPAGKRTADGSEFEKRTADGSEFESPKKKAKVE

SEQ ID NO: 21400 - protein, 2089 aa, synthetic construct
MPAAKRVKLDGGDKKYSIGLDIGTNSVGWAVITDEYKVPSKKFKVLGNTDRHSIKKNLIGALLFDSGETAEATRLKRTARRRYTRRKNRICYLQEIFSNEMAKVDDSFFHRLEESFLVEEDKKHERHPIFGNIVDEVAYHEKYPTIYHLRKKLVDSTDKADLRLIYLALAHMIKFRGHFLIEGDLNPDNSDVDKLFIQLVQTYNQLFEENPINASGVDAKAILSARLSKSRRLENLIAQLPGEKKNGLFGNLIALSLGLTPNFKSNFDLAEDAKLQLSKDTYDDDLDNLLAQIGDQYADLFLAAKNLSDAILLSDILRVNTEITKAPLSASMIKRYDEHHQDLTLLKALVRQQLPEKYKEIFFDQSKNGYAGYIDGGASQEEFYKFIKPILEKMDGTEELLVKLNREDLLRKQRTFDNGSIPHQIHLGELHAILRRQEDFYPFLKDNREKIEKILTFRIPYYVGPLARGNSRFAWMTRKSEETITPWNFEEVVDKGASAQSFIERMTNFDKNLPNEKVLPKHSLLYEYFTVYNELTKVKYVTEGMRKPAFLSGEQKKAIVDLLFKTNRKVTVKQLKEDYFKKIECFDSVEISGVEDRFNASLGTYHDLLKIIKDKDFLDNEENEDILEDIVLTLTLFEDREMIEERLKTYAHLFDDKVMKQLKRRRYTGWGRLSRKLINGIRDKQSGKTILDFLKSDGFANRNFMQLIHDDSLTFKEDIQKAQVSGQGDSLHEHIANLAGSPAIKKGILQTVKVVDELVKVMGRHKPENIVIEMARENQTTQKGQKNSRERMKRIEEGIKELGSQILKEHPVENTQLQNEKLYLYYLQNGRDMYVDQELDINRLSDYDVDHIVPQSFLKDDSIDNKVLTRSDKARGKSDNVPSEEVVKKMKNYWRQLLNAKLITQRKFDNLTKAERGGLSELDKAGFIKRQLVETRQITKHVAQILDSRMNTKYDENDKLIREVKVITLKSKLVSDFRKDFQFYKVREINNYHHAHDAYLNAVVGTALIKKYPKLESEFVYGDYKVYDVRKMIAKSEQEIGKATAKYFFYSNIMNFFKTEITLANGEIRKRPLIETNGETGEIVWDKGRDFATVRKVLSMPQVNIVKKTEVQTGGFSKESILPKRNSDKLIARKKDWDPKKYGGFDSPTVAYSVLVVAKVEKGKSKKLKSVKELLGITIMERSSFEKNPIDFLEAKGYKEVKKDLIIKLPKYSLFELENGRKRMLASAGELQKGNELALPSKYVNFLYLASHYEKLKGSPEDNEQKQLFVEQHKHYLDEIIEQISEFSKRVILADANLDKVLSAYNKHRDKPIREQAENIIHLFTLTNLGAPAAFKYFDTTIDRKRYTSTKEVLDATLIHQSITGLYETRIDLSQLGGDGGGGGGSGGGGSGGTLQLDDEYRLYSPLVKPDQNIQFWLEQFPQAWAETAGMGLAKQVPPQVIQLKASATPVSVRQYPLSKEAQEGIRPHVQRLIQQGILVPVQSPWNTPLLPVRKPGTNDYRPVQDLREVNKRVQDIHPTVPNPYNLLCALPPQRSWYTVLDLKDAFFCLRLHPTSQPLFAFEWRDPGTGRTGQLTWTRLPQGFKNSPTIFDEALHRDLANFRIQHPQVTLLQYVDDLLLAGATKQDCLEGTKALLLELSDLGYRASAKKAQICRREVTYLGYSLRDGQRWLTEARKKTVVQIPAPTTAKQVREFLGTAGFCRLWIPGFATLAAPLYPLTKEKGEFSWAPEHQKAFDAIKKALLSAPALALPDVTKPFTLYVDERKGVARGVLTQTLGPWRRPVAYLSKKLDPVASGWPVCLKAIAAVAILVKDADKLTLGQNITVIAPHALENIVRQPPDRWMTNARMTHYQSLLLTERVTFAPPAALNPATLLPEETDEPVTHDCHQLLIEETGVRKDLTDIPLTGEVLTWFTDGSSYVVEGKRMAGAAVVDGTRTIWASSLPEGTSAQKAELMALTQALRLAEGKSINIYTDSRYAFATAHVHGAIYKQRGLLTSAGREIKNKEEILSLLEALHLPKRLAIIHCPGHQKAKDPISRGNQMADRVAKQAAQGVNLLAGKRTADGSEFEKRTADGSEFESPKKKAKVE

SEQ ID NO: 21401 - protein, 2091 aa, synthetic construct
MPAAKRVKLDGGDKKYSIGLDIGTNSVGWAVITDEYKVPSKKFKVLGNTDRHSIKKNLIGALLFDSGETAEATRLKRTARRRYTRRKNRICYLQEIFSNEMAKVDDSFFHRLEESFLVEEDKKHERHPIFGNIVDEVAYHEKYPTIYHLRKKLVDSTDKADLRLIYLALAHMIKFRGHFLIEGDLNPDNSDVDKLFIQLVQTYNQLFEENPINASGVDAKAILSARLSKSRRLENLIAQLPGEKKNGLFGNLIALSLGLTPNFKSNFDLAEDAKLQLSKDTYDDDLDNLLAQIGDQYADLFLAAKNLSDAILLSDILRVNTEITKAPLSASMIKRYDEHHQDLTLLKALVRQQLPEKYKEIFFDQSKNGYAGYIDGGASQEEFYKFIKPILEKMDGTEELLVKLNREDLLRKQRTFDNGSIPHQIHLGELHAILRRQEDFYPFLKDNREKIEKILTFRIPYYVGPLARGNSRFAWMTRKSEETITPWNFEEVVDKGASAQSFIERMTNFDKNLPNEKVLPKHSLLYEYFTVYNELTKVKYVTEGMRKPAFLSGEQKKAIVDLLFKTNRKVTVKQLKEDYFKKIECFDSVEISGVEDRFNASLGTYHDLLKIIKDKDFLDNEENEDILEDIVLTLTLFEDREMIEERLKTYAHLFDDKVMKQLKRRRYTGWGRLSRKLINGIRDKQSGKTILDFLKSDGFANRNFMQLIHDDSLTFKEDIQKAQVSGQGDSLHEHIANLAGSPAIKKGILQTVKVVDELVKVMGRHKPENIVIEMARENQTTQKGQKNSRERMKRIEEGIKELGSQILKEHPVENTQLQNEKLYLYYLQNGRDMYVDQELDINRLSDYDVDHIVPQSFLKDDSIDNKVLTRSDKARGKSDNVPSEEVVKKMKNYWRQLLNAKLITQRKFDNLTKAERGGLSELDKAGFIKRQLVETRQITKHVAQILDSRMNTKYDENDKLIREVKVITLKSKLVSDFRKDFQFYKVREINNYHHAHDAYLNAVVGTALIKKYPKLESEFVYGDYKVYDVRKMIAKSEQEIGKATAKYFFYSNIMNFFKTEITLANGEIRKRPLIETNGETGEIVWDKGRDFATVRKVLSMPQVNIVKKTEVQTGGFSKESILPKRNSDKLIARKKDWDPKKYGGFDSPTVAYSVLVVAKVEKGKSKKLKSVKELLGITIMERSSFEKNPIDFLEAKGYKEVKKDLIIKLPKYSLFELENGRKRMLASAGELQKGNELALPSKYVNFLYLASHYEKLKGSPEDNEQKQLFVEQHKHYLDEIIEQISEFSKRVILADANLDKVLSAYNKHRDKPIREQAENIIHLFTLTNLGAPAAFKYFDTTIDRKRYTSTKEVLDATLIHQSITGLYETRIDLSQLGGDGGGSSGSSGSSGSSGGTLQLDDEYRLYSPLVKPDQNIQFWLEQFPQAWAETAGMGLAKQVPPQVIQLKASATPVSVRQYPLSKEAQEGIRPHVQRLIQQGILVPVQSPWNTPLLPVRKPGTNDYRPVQDLREVNKRVQDIHPTVPNPYNLLCALPPQRSWYTVLDLKDAFFCLRLHPTSQPLFAFEWRDPGTGRTGQLTWTRLPQGFKNSPTIFDEALHRDLANFRIQHPQVTLLQYVDDLLLAGATKQDCLEGTKALLLELSDLGYRASAKKAQICRREVTYLGYSLRDGQRWLTEARKKTVVQIPAPTTAKQVREFLGTAGFCRLWIPGFATLAAPLYPLTKEKGEFSWAPEHQKAFDAIKKALLSAPALALPDVTKPFTLYVDERKGVARGVLTQTLGPWRRPVAYLSKKLDPVASGWPVCLKAIAAVAILVKDADKLTLGQNITVIAPHALENIVRQPPDRWMTNARMTHYQSLLLTERVTFAPPAALNPATLLPEETDEPVTHDCHQLLIEETGVRKDLTDIPLTGEVLTWFTDGSSYVVEGKRMAGAAVVDGTRTIWASSLPEGTSAQKAELMALTQALRLAEGKSINIYTDSRYAFATAHVHGAIYKQRGLLTSAGREIKNKEEILSLLEALHLPKRLAIIHCPGHQKAKDPISRGNQMADRVAKQAAQGVNLLAGKRTADGSEFEKRTADGSEFESPKKKAKVE

SEQ ID NO: 21402 - protein, 2090 aa, synthetic construct
MPAAKRVKLDGGDKKYSIGLDIGTNSVGWAVITDEYKVPSKKFKVLGNTDRHSIKKNLIGALLFDSGETAEATRLKRTARRRYTRRKNRICYLQEIFSNEMAKVDDSFFHRLEESFLVEEDKKHERHPIFGNIVDEVAYHEKYPTIYHLRKKLVDSTDKADLRLIYLALAHMIKFRGHFLIEGDLNPDNSDVDKLFIQLVQTYNQLFEENPINASGVDAKAILSARLSKSRRLENLIAQLPGEKKNGLFGNLIALSLGLTPNFKSNFDLAEDAKLQLSKDTYDDDLDNLLAQIGDQYADLFLAAKNLSDAILLSDILRVNTEITKAPLSASMIKRYDEHHQDLTLLKALVRQQLPEKYKEIFFDQSKNGYAGYIDGGASQEEFYKFIKPILEKMDGTEELLVKLNREDLLRKQRTFDNGSIPHQIHLGELHAILRRQEDFYPFLKDNREKIEKILTFRIPYYVGPLARGNSRFAWMTRKSEETITPWNFEEVVDKGASAQSFIERMTNFDKNLPNEKVLPKHSLLYEYFTVYNELTKVKYVTEGMRKPAFLSGEQKKAIVDLLFKTNRKVTVKQLKEDYFKKIECFDSVEISGVEDRFNASLGTYHDLLKIIKDKDFLDNEENEDILEDIVLTLTLFEDREMIEERLKTYAHLFDDKVMKQLKRRRYTGWGRLSRKLINGIRDKQSGKTILDFLKSDGFANRNFMQLIHDDSLTFKEDIQKAQVSGQGDSLHEHIANLAGSPAIKKGILQTVKVVDELVKVMGRHKPENIVIEMARENQTTQKGQKNSRERMKRIEEGIKELGSQILKEHPVENTQLQNEKLYLYYLQNGRDMYVDQELDINRLSDYDVDHIVPQSFLKDDSIDNKVLTRSDKARGKSDNVPSEEVVKKMKNYWRQLLNAKLITQRKFDNLTKAERGGLSELDKAGFIKRQLVETRQITKHVAQILDSRMNTKYDENDKLIREVKVITLKSKLVSDFRKDFQFYKVREINNYHHAHDAYLNAVVGTALIKKYPKLESEFVYGDYKVYDVRKMIAKSEQEIGKATAKYFFYSNIMNFFKTEITLANGEIRKRPLIETNGETGEIVWDKGRDFATVRKVLSMPQVNIVKKTEVQTGGFSKESILPKRNSDKLIARKKDWDPKKYGGFDSPTVAYSVLVVAKVEKGKSKKLKSVKELLGITIMERSSFEKNPIDFLEAKGYKEVKKDLIIKLPKYSLFELENGRKRMLASAGELQKGNELALPSKYVNFLYLASHYEKLKGSPEDNEQKQLFVEQHKHYLDEIIEQISEFSKRVILADANLDKVLSAYNKHRDKPIREQAENIIHLFTLTNLGAPAAFKYFDTTIDRKRYTSTKEVLDATLIHQSITGLYETRIDLSQLGGDGGPAPGSSEAAAKGGTLQLDDEYRLYSPLVKPDQNIQFWLEQFPQAWAETAGMGLAKQVPPQVIQLKASATPVSVRQYPLSKEAQEGIRPHVQRLIQQGILVPVQSPWNTPLLPVRKPGTNDYRPVQDLREVNKRVQDIHPTVPNPYNLLCALPPQRSWYTVLDLKDAFFCLRLHPTSQPLFAFEWRDPGTGRTGQLTWTRLPQGFKNSPTIFDEALHRDLANFRIQHPQVTLLQYVDDLLLAGATKQDCLEGTKALLLELSDLGYRASAKKAQICRREVTYLGYSLRDGQRWLTEARKKTVVQIPAPTTAKQVREFLGTAGFCRLWIPGFATLAAPLYPLTKEKGEFSWAPEHQKAFDAIKKALLSAPALALPDVTKPFTLYVDERKGVARGVLTQTLGPWRRPVAYLSKKLDPVASGWPVCLKAIAAVAILVKDADKLTLGQNITVIAPHALENIVRQPPDRWMTNARMTHYQSLLLTERVTFAPPAALNPATLLPEETDEPVTHDCHQLLIEETGVRKDLTDIPLTGEVLTWFTDGSSYVVEGKRMAGAAVVDGTRTIWASSLPEGTSAQKAELMALTQALRLAEGKSINIYTDSRYAFATAHVHGAIYKQRGLLTSAGREIKNKEEILSLLEALHLPKRLAIIHCPGHQKAKDPISRGNQMADRVAKQAAQGVNLLAGKRTADGSEFEKRTADGSEFESPKKKAKVE

SEQ ID NO: 21403 - protein, 2085 aa, synthetic construct
MPAAKRVKLDGGDKKYSIGLDIGTNSVGWAVITDEYKVPSKKFKVLGNTDRHSIKKNLIGALLFDSGETAEATRLKRTARRRYTRRKNRICYLQEIFSNEMAKVDDSFFHRLEESFLVEEDKKHERHPIFGNIVDEVAYHEKYPTIYHLRKKLVDSTDKADLRLIYLALAHMIKFRGHFLIEGDLNPDNSDVDKLFIQLVQTYNQLFEENPINASGVDAKAILSARLSKSRRLENLIAQLPGEKKNGLFGNLIALSLGLTPNFKSNFDLAEDAKLQLSKDTYDDDLDNLLAQIGDQYADLFLAAKNLSDAILLSDILRVNTEITKAPLSASMIKRYDEHHQDLTLLKALVRQQLPEKYKEIFFDQSKNGYAGYIDGGASQEEFYKFIKPILEKMDGTEELLVKLNREDLLRKQRTFDNGSIPHQIHLGELHAILRRQEDFYPFLKDNREKIEKILTFRIPYYVGPLARGNSRFAWMTRKSEETITPWNFEEVVDKGASAQSFIERMTNFDKNLPNEKVLPKHSLLYEYFTVYNELTKVKYVTEGMRKPAFLSGEQKKAIVDLLFKTNRKVTVKQLKEDYFKKIECFDSVEISGVEDRFNASLGTYHDLLKIIKDKDFLDNEENEDILEDIVLTLTLFEDREMIEERLKTYAHLFDDKVMKQLKRRRYTGWGRLSRKLINGIRDKQSGKTILDFLKSDGFANRNFMQLIHDDSLTFKEDIQKAQVSGQGDSLHEHIANLAGSPAIKKGILQTVKVVDELVKVMGRHKPENIVIEMARENQTTQKGQKNSRERMKRIEEGIKELGSQILKEHPVENTQLQNEKLYLYYLQNGRDMYVDQELDINRLSDYDVDHIVPQSFLKDDSIDNKVLTRSDKARGKSDNVPSEEVVKKMKNYWRQLLNAKLITQRKFDNLTKAERGGLSELDKAGFIKRQLVETRQITKHVAQILDSRMNTKYDENDKLIREVKVITLKSKLVSDFRKDFQFYKVREINNYHHAHDAYLNAVVGTALIKKYPKLESEFVYGDYKVYDVRKMIAKSEQEIGKATAKYFFYSNIMNFFKTEITLANGEIRKRPLIETNGETGEIVWDKGRDFATVRKVLSMPQVNIVKKTEVQTGGFSKESILPKRNSDKLIARKKDWDPKKYGGFDSPTVAYSVLVVAKVEKGKSKKLKSVKELLGITIMERSSFEKNPIDFLEAKGYKEVKKDLIIKLPKYSLFELENGRKRMLASAGELQKGNELALPSKYVNFLYLASHYEKLKGSPEDNEQKQLFVEQHKHYLDEIIEQISEFSKRVILADANLDKVLSAYNKHRDKPIREQAENIIHLFTLTNLGAPAAFKYFDTTIDRKRYTSTKEVLDATLIHQSITGLYETRIDLSQLGGDGGGGSGSSGGTLQLDDEYRLYSPLVKPDQNIQFWLEQFPQAWAETAGMGLAKQVPPQVIQLKASATPVSVRQYPLSKEAQEGIRPHVQRLIQQGILVPVQSPWNTPLLPVRKPGTNDYRPVQDLREVNKRVQDIHPTVPNPYNLLCALPPQRSWYTVLDLKDAFFCLRLHPTSQPLFAFEWRDPGTGRTGQLTWTRLPQGFKNSPTIFDEALHRDLANFRIQHPQVTLLQYVDDLLLAGATKQDCLEGTKALLLELSDLGYRASAKKAQICRREVTYLGYSLRDGQRWLTEARKKTVVQIPAPTTAKQVREFLGTAGFCRLWIPGFATLAAPLYPLTKEKGEFSWAPEHQKAFDAIKKALLSAPALALPDVTKPFTLYVDERKGVARGVLTQTLGPWRRPVAYLSKKLDPVASGWPVCLKAIAAVAILVKDADKLTLGQNITVIAPHALENIVRQPPDRWMTNARMTHYQSLLLTERVTFAPPAALNPATLLPEETDEPVTHDCHQLLIEETGVRKDLTDIPLTGEVLTWFTDGSSYVVEGKRMAGAAVVDGTRTIWASSLPEGTSAQKAELMALTQALRLAEGKSINIYTDSRYAFATAHVHGAIYKQRGLLTSAGREIKNKEEILSLLEALHLPKRLAIIHCPGHQKAKDPISRGNQMADRVAKQAAQGVNLLAGKRTADGSEFEKRTADGSEFESPKKKAKVE

SEQ ID NO: 21404 - protein, 2088 aa, synthetic construct
MPAAKRVKLDGGDKKYSIGLDIGTNSVGWAVITDEYKVPSKKFKVLGNTDRHSIKKNLIGALLFDSGETAEATRLKRTARRRYTRRKNRICYLQEIFSNEMAKVDDSFFHRLEESFLVEEDKKHERHPIFGNIVDEVAYHEKYPTIYHLRKKLVDSTDKADLRLIYLALAHMIKFRGHFLIEGDLNPDNSDVDKLFIQLVQTYNQLFEENPINASGVDAKAILSARLSKSRRLENLIAQLPGEKKNGLFGNLIALSLGLTPNFKSNFDLAEDAKLQLSKDTYDDDLDNLLAQIGDQYADLFLAAKNLSDAILLSDILRVNTEITKAPLSASMIKRYDEHHQDLTLLKALVRQQLPEKYKEIFFDQSKNGYAGYIDGGASQEEFYKFIKPILEKMDGTEELLVKLNREDLLRKQRTFDNGSIPHQIHLGELHAILRRQEDFYPFLKDNREKIEKILTFRIPYYVGPLARGNSRFAWMTRKSEETITPWNFEEVVDKGASAQSFIERMTNFDKNLPNEKVLPKHSLLYEYFTVYNELTKVKYVTEGMRKPAFLSGEQKKAIVDLLFKTNRKVTVKQLKEDYFKKIECFDSVEISGVEDRFNASLGTYHDLLKIIKDKDFLDNEENEDILEDIVLTLTLFEDREMIEERLKTYAHLFDDKVMKQLKRRRYTGWGRLSRKLINGIRDKQSGKTILDFLKSDGFANRNFMQLIHDDSLTFKEDIQKAQVSGQGDSLHEHIANLAGSPAIKKGILQTVKVVDELVKVMGRHKPENIVIEMARENQTTQKGQKNSRERMKRIEEGIKELGSQILKEHPVENTQLQNEKLYLYYLQNGRDMYVDQELDINRLSDYDVDHIVPQSFLKDDSIDNKVLTRSDKARGKSDNVPSEEVVKKMKNYWRQLLNAKLITQRKFDNLTKAERGGLSELDKAGFIKRQLVETRQITKHVAQILDSRMNTKYDENDKLIREVKVITLKSKLVSDFRKDFQFYKVREINNYHHAHDAYLNAVVGTALIKKYPKLESEFVYGDYKVYDVRKMIAKSEQEIGKATAKYFFYSNIMNFFKTEITLANGEIRKRPLIETNGETGEIVWDKGRDFATVRKVLSMPQVNIVKKTEVQTGGFSKESILPKRNSDKLIARKKDWDPKKYGGFDSPTVAYSVLVVAKVEKGKSKKLKSVKELLGITIMERSSFEKNPIDFLEAKGYKEVKKDLIIKLPKYSLFELENGRKRMLASAGELQKGNELALPSKYVNFLYLASHYEKLKGSPEDNEQKQLFVEQHKHYLDEIIEQISEFSKRVILADANLDKVLSAYNKHRDKPIREQAENIIHLFTLTNLGAPAAFKYFDTTIDRKRYTSTKEVLDATLIHQSITGLYETRIDLSQLGGDGGPAPGSSGGGGGTLQLDDEYRLYSPLVKPDQNIQFWLEQFPQAWAETAGMGLAKQVPPQVIQLKASATPVSVRQYPLSKEAQEGIRPHVQRLIQQGILVPVQSPWNTPLLPVRKPGTNDYRPVQDLREVNKRVQDIHPTVPNPYNLLCALPPQRSWYTVLDLKDAFFCLRLHPTSQPLFAFEWRDPGTGRTGQLTWTRLPQGFKNSPTIFDEALHRDLANFRIQHPQVTLLQYVDDLLLAGATKQDCLEGTKALLLELSDLGYRASAKKAQICRREVTYLGYSLRDGQRWLTEARKKTVVQIPAPTTAKQVREFLGTAGFCRLWIPGFATLAAPLYPLTKEKGEFSWAPEHQKAFDAIKKALLSAPALALPDVTKPFTLYVDERKGVARGVLTQTLGPWRRPVAYLSKKLDPVASGWPVCLKAIAAVAILVKDADKLTLGQNITVIAPHALENIVRQPPDRWMTNARMTHYQSLLLTERVTFAPPAALNPATLLPEETDEPVTHDCHQLLIEETGVRKDLTDIPLTGEVLTWFTDGSSYVVEGKRMAGAAVVDGTRTIWASSLPEGTSAQKAELMALTQALRLAEGKSINIYTDSRYAFATAHVHGAIYKQRGLLTSAGREIKNKEEILSLLEALHLPKRLAIIHCPGHQKAKDPISRGNQMADRVAKQAAQGVNLLAGKRTADGSEFEKRTADGSEFESPKKKAKVE

SEQ ID NO: 21405 - protein, 2088 aa, synthetic construct
MPAAKRVKLDGGDKKYSIGLDIGTNSVGWAVITDEYKVPSKKFKVLGNTDRHSIKKNLIGALLFDSGETAEATRLKRTARRRYTRRKNRICYLQEIFSNEMAKVDDSFFHRLEESFLVEEDKKHERHPIFGNIVDEVAYHEKYPTIYHLRKKLVDSTDKADLRLIYLALAHMIKFRGHFLIEGDLNPDNSDVDKLFIQLVQTYNQLFEENPINASGVDAKAILSARLSKSRRLENLIAQLPGEKKNGLFGNLIALSLGLTPNFKSNFDLAEDAKLQLSKDTYDDDLDNLLAQIGDQYADLFLAAKNLSDAILLSDILRVNTEITKAPLSASMIKRYDEHHQDLTLLKALVRQQLPEKYKEIFFDQSKNGYAGYIDGGASQEEFYKFIKPILEKMDGTEELLVKLNREDLLRKQRTFDNGSIPHQIHLGELHAILRRQEDFYPFLKDNREKIEKILTFRIPYYVGPLARGNSRFAWMTRKSEETITPWNFEEVVDKGASAQSFIERMTNFDKNLPNEKVLPKHSLLYEYFTVYNELTKVKYVTEGMRKPAFLSGEQKKAIVDLLFKTNRKVTVKQLKEDYFKKIECFDSVEISGVEDRFNASLGTYHDLLKIIKDKDFLDNEENEDILEDIVLTLTLFEDREMIEERLKTYAHLFDDKVMKQLKRRRYTGWGRLSRKLINGIRDKQSGKTILDFLKSDGFANRNFMQLIHDDSLTFKEDIQKAQVSGQGDSLHEHIANLAGSPAIKKGILQTVKVVDELVKVMGRHKPENIVIEMARENQTTQKGQKNSRERMKRIEEGIKELGSQILKEHPVENTQLQNEKLYLYYLQNGRDMYVDQELDINRLSDYDVDHIVPQSFLKDDSIDNKVLTRSDKARGKSDNVPSEEVVKKMKNYWRQLLNAKLITQRKFDNLTKAERGGLSELDKAGFIKRQLVETRQITKHVAQILDSRMNTKYDENDKLIREVKVITLKSKLVSDFRKDFQFYKVREINNYHHAHDAYLNAVVGTALIKKYPKLESEFVYGDYKVYDVRKMIAKSEQEIGKATAKYFFYSNIMNFFKTEITLANGEIRKRPLIETNGETGEIVWDKGRDFATVRKVLSMPQVNIVKKTEVQTGGFSKESILPKRNSDKLIARKKDWDPKKYGGFDSPTVAYSVLVVAKVEKGKSKKLKSVKELLGITIMERSSFEKNPIDFLEAKGYKEVKKDLIIKLPKYSLFELENGRKRMLASAGELQKGNELALPSKYVNFLYLASHYEKLKGSPEDNEQKQLFVEQHKHYLDEIIEQISEFSKRVILADANLDKVLSAYNKHRDKPIREQAENIIHLFTLTNLGAPAAFKYFDTTIDRKRYTSTKEVLDATLIHQSITGLYETRIDLSQLGGDGGGGGPAPGSSGGTLQLDDEYRLYSPLVKPDQNIQFWLEQFPQAWAETAGMGLAKQVPPQVIQLKASATPVSVRQYPLSKEAQEGIRPHVQRLIQQGILVPVQSPWNTPLLPVRKPGTNDYRPVQDLREVNKRVQDIHPTVPNPYNLLCALPPQRSWYTVLDLKDAFFCLRLHPTSQPLFAFEWRDPGTGRTGQLTWTRLPQGFKNSPTIFDEALHRDLANFRIQHPQVTLLQYVDDLLLAGATKQDCLEGTKALLLELSDLGYRASAKKAQICRREVTYLGYSLRDGQRWLTEARKKTVVQIPAPTTAKQVREFLGTAGFCRLWIPGFATLAAPLYPLTKEKGEFSWAPEHQKAFDAIKKALLSAPALALPDVTKPFTLYVDERKGVARGVLTQTLGPWRRPVAYLSKKLDPVASGWPVCLKAIAAVAILVKDADKLTLGQNITVIAPHALENIVRQPPDRWMTNARMTHYQSLLLTERVTFAPPAALNPATLLPEETDEPVTHDCHQLLIEETGVRKDLTDIPLTGEVLTWFTDGSSYVVEGKRMAGAAVVDGTRTIWASSLPEGTSAQKAELMALTQALRLAEGKSINIYTDSRYAFATAHVHGAIYKQRGLLTSAGREIKNKEEILSLLEALHLPKRLAIIHCPGHQKAKDPISRGNQMADRVAKQAAQGVNLLAGKRTADGSEFEKRTADGSEFESPKKKAKVE

SEQ ID NO: 21406 - protein, 2090 aa, synthetic construct
MPAAKRVKLDGGDKKYSIGLDIGTNSVGWAVITDEYKVPSKKFKVLGNTDRHSIKKNLIGALLFDSGETAEATRLKRTARRRYTRRKNRICYLQEIFSNEMAKVDDSFFHRLEESFLVEEDKKHERHPIFGNIVDEVAYHEKYPTIYHLRKKLVDSTDKADLRLIYLALAHMIKFRGHFLIEGDLNPDNSDVDKLFIQLVQTYNQLFEENPINASGVDAKAILSARLSKSRRLENLIAQLPGEKKNGLFGNLIALSLGLTPNFKSNFDLAEDAKLQLSKDTYDDDLDNLLAQIGDQYADLFLAAKNLSDAILLSDILRVNTEITKAPLSASMIKRYDEHHQDLTLLKALVRQQLPEKYKEIFFDQSKNGYAGYIDGGASQEEFYKFIKPILEKMDGTEELLVKLNREDLLRKQRTFDNGSIPHQIHLGELHAILRRQEDFYPFLKDNREKIEKILTFRIPYYVGPLARGNSRFAWMTRKSEETITPWNFEEVVDKGASAQSFIERMTNFDKNLPNEKVLPKHSLLYEYFTVYNELTKVKYVTEGMRKPAFLSGEQKKAIVDLLFKTNRKVTVKQLKEDYFKKIECFDSVEISGVEDRFNASLGTYHDLLKIIKDKDFLDNEENEDILEDIVLTLTLFEDREMIEERLKTYAHLFDDKVMKQLKRRRYTGWGRLSRKLINGIRDKQSGKTILDFLKSDGFANRNFMQLIHDDSLTFKEDIQKAQVSGQGDSLHEHIANLAGSPAIKKGILQTVKVVDELVKVMGRHKPENIVIEMARENQTTQKGQKNSRERMKRIEEGIKELGSQILKEHPVENTQLQNEKLYLYYLQNGRDMYVDQELDINRLSDYDVDHIVPQSFLKDDSIDNKVLTRSDKARGKSDNVPSEEVVKKMKNYWRQLLNAKLITQRKFDNLTKAERGGLSELDKAGFIKRQLVETRQITKHVAQILDSRMNTKYDENDKLIREVKVITLKSKLVSDFRKDFQFYKVREINNYHHAHDAYLNAVVGTALIKKYPKLESEFVYGDYKVYDVRKMIAKSEQEIGKATAKYFFYSNIMNFFKTEITLANGEIRKRPLIETNGETGEIVWDKGRDFATVRKVLSMPQVNIVKKTEVQTGGFSKESILPKRNSDKLIARKKDWDPKKYGGFDSPTVAYSVLVVAKVEKGKSKKLKSVKELLGITIMERSSFEKNPIDFLEAKGYKEVKKDLIIKLPKYSLFELENGRKRMLASAGELQKGNELALPSKYVNFLYLASHYEKLKGSPEDNEQKQLFVEQHKHYLDEIIEQISEFSKRVILADANLDKVLSAYNKHRDKPIREQAENIIHLFTLTNLGAPAAFKYFDTTIDRKRYTSTKEVLDATLIHQSITGLYETRIDLSQLGGDGGGGGEAAAKPAPGGTLQLDDEYRLYSPLVKPDQNIQFWLEQFPQAWAETAGMGLAKQVPPQVIQLKASATPVSVRQYPLSKEAQEGIRPHVQRLIQQGILVPVQSPWNTPLLPVRKPGTNDYRPVQDLREVNKRVQDIHPTVPNPYNLLCALPPQRSWYTVLDLKDAFFCLRLHPTSQPLFAFEWRDPGTGRTGQLTWTRLPQGFKNSPTIFDEALHRDLANFRIQHPQVTLLQYVDDLLLAGATKQDCLEGTKALLLELSDLGYRASAKKAQICRREVTYLGYSLRDGQRWLTEARKKTVVQIPAPTTAKQVREFLGTAGFCRLWIPGFATLAAPLYPLTKEKGEFSWAPEHQKAFDAIKKALLSAPALALPDVTKPFTLYVDERKGVARGVLTQTLGPWRRPVAYLSKKLDPVASGWPVCLKAIAAVAILVKDADKLTLGQNITVIAPHALENIVRQPPDRWMTNARMTHYQSLLLTERVTFAPPAALNPATLLPEETDEPVTHDCHQLLIEETGVRKDLTDIPLTGEVLTWFTDGSSYVVEGKRMAGAAVVDGTRTIWASSLPEGTSAQKAELMALTQALRLAEGKSINIYTDSRYAFATAHVHGAIYKQRGLLTSAGREIKNKEEILSLLEALHLPKRLAIIHCPGHQKAKDPISRGNQMADRVAKQAAQGVNLLAGKRTADGSEFEKRTADGSEFESPKKKAKVE

SEQ ID NO: 21407 - protein, 2085 aa, synthetic construct
MPAAKRVKLDGGDKKYSIGLDIGTNSVGWAVITDEYKVPSKKFKVLGNTDRHSIKKNLIGALLFDSGETAEATRLKRTARRRYTRRKNRICYLQEIFSNEMAKVDDSFFHRLEESFLVEEDKKHERHPIFGNIVDEVAYHEKYPTIYHLRKKLVDSTDKADLRLIYLALAHMIKFRGHFLIEGDLNPDNSDVDKLFIQLVQTYNQLFEENPINASGVDAKAILSARLSKSRRLENLIAQLPGEKKNGLFGNLIALSLGLTPNFKSNFDLAEDAKLQLSKDTYDDDLDNLLAQIGDQYADLFLAAKNLSDAILLSDILRVNTEITKAPLSASMIKRYDEHHQDLTLLKALVRQQLPEKYKEIFFDQSKNGYAGYIDGGASQEEFYKFIKPILEKMDGTEELLVKLNREDLLRKQRTFDNGSIPHQIHLGELHAILRRQEDFYPFLKDNREKIEKILTFRIPYYVGPLARGNSRFAWMTRKSEETITPWNFEEVVDKGASAQSFIERMTNFDKNLPNEKVLPKHSLLYEYFTVYNELTKVKYVTEGMRKPAFLSGEQKKAIVDLLFKTNRKVTVKQLKEDYFKKIECFDSVEISGVEDRFNASLGTYHDLLKIIKDKDFLDNEENEDILEDIVLTLTLFEDREMIEERLKTYAHLFDDKVMKQLKRRRYTGWGRLSRKLINGIRDKQSGKTILDFLKSDGFANRNFMQLIHDDSLTFKEDIQKAQVSGQGDSLHEHIANLAGSPAIKKGILQTVKVVDELVKVMGRHKPENIVIEMARENQTTQKGQKNSRERMKRIEEGIKELGSQILKEHPVENTQLQNEKLYLYYLQNGRDMYVDQELDINRLSDYDVDHIVPQSFLKDDSIDNKVLTRSDKARGKSDNVPSEEVVKKMKNYWRQLLNAKLITQRKFDNLTKAERGGLSELDKAGFIKRQLVETRQITKHVAQILDSRMNTKYDENDKLIREVKVITLKSKLVSDFRKDFQFYKVREINNYHHAHDAYLNAVVGTALIKKYPKLESEFVYGDYKVYDVRKMIAKSEQEIGKATAKYFFYSNIMNFFKTEITLANGEIRKRPLIETNGETGEIVWDKGRDFATVRKVLSMPQVNIVKKTEVQTGGFSKESILPKRNSDKLIARKKDWDPKKYGGFDSPTVAYSVLVVAKVEKGKSKKLKSVKELLGITIMERSSFEKNPIDFLEAKGYKEVKKDLIIKLPKYSLFELENGRKRMLASAGELQKGNELALPSKYVNFLYLASHYEKLKGSPEDNEQKQLFVEQHKHYLDEIIEQISEFSKRVILADANLDKVLSAYNKHRDKPIREQAENIIHLFTLTNLGAPAAFKYFDTTIDRKRYTSTKEVLDATLIHQSITGLYETRIDLSQLGGDGGGGSPAPGGTLQLDDEYRLYSPLVKPDQNIQFWLEQFPQAWAETAGMGLAKQVPPQVIQLKASATPVSVRQYPLSKEAQEGIRPHVQRLIQQGILVPVQSPWNTPLLPVRKPGTNDYRPVQDLREVNKRVQDIHPTVPNPYNLLCALPPQRSWYTVLDLKDAFFCLRLHPTSQPLFAFEWRDPGTGRTGQLTWTRLPQGFKNSPTIFDEALHRDLANFRIQHPQVTLLQYVDDLLLAGATKQDCLEGTKALLLELSDLGYRASAKKAQICRREVTYLGYSLRDGQRWLTEARKKTVVQIPAPTTAKQVREFLGTAGFCRLWIPGFATLAAPLYPLTKEKGEFSWAPEHQKAFDAIKKALLSAPALALPDVTKPFTLYVDERKGVARGVLTQTLGPWRRPVAYLSKKLDPVASGWPVCLKAIAAVAILVKDADKLTLGQNITVIAPHALENIVRQPPDRWMTNARMTHYQSLLLTERVTFAPPAALNPATLLPEETDEPVTHDCHQLLIEETGVRKDLTDIPLTGEVLTWFTDGSSYVVEGKRMAGAAVVDGTRTIWASSLPEGTSAQKAELMALTQALRLAEGKSINIYTDSRYAFATAHVHGAIYKQRGLLTSAGREIKNKEEILSLLEALHLPKRLAIIHCPGHQKAKDPISRGNQMADRVAKQAAQGVNLLAGKRTADGSEFEKRTADGSEFESPKKKAKVE

SEQ ID NO: 21408 - protein, 2085 aa, synthetic construct
MPAAKRVKLDGGDKKYSIGLDIGTNSVGWAVITDEYKVPSKKFKVLGNTDRHSIKKNLIGALLFDSGETAEATRLKRTARRRYTRRKNRICYLQEIFSNEMAKVDDSFFHRLEESFLVEEDKKHERHPIFGNIVDEVAYHEKYPTIYHLRKKLVDSTDKADLRLIYLALAHMIKFRGHFLIEGDLNPDNSDVDKLFIQLVQTYNQLFEENPINASGVDAKAILSARLSKSRRLENLIAQLPGEKKNGLFGNLIALSLGLTPNFKSNFDLAEDAKLQLSKDTYDDDLDNLLAQIGDQYADLFLAAKNLSDAILLSDILRVNTEITKAPLSASMIKRYDEHHQDLTLLKALVRQQLPEKYKEIFFDQSKNGYAGYIDGGASQEEFYKFIKPILEKMDGTEELLVKLNREDLLRKQRTFDNGSIPHQIHLGELHAILRRQEDFYPFLKDNREKIEKILTFRIPYYVGPLARGNSRFAWMTRKSEETITPWNFEEVVDKGASAQSFIERMTNFDKNLPNEKVLPKHSLLYEYFTVYNELTKVKYVTEGMRKPAFLSGEQKKAIVDLLFKTNRKVTVKQLKEDYFKKIECFDSVEISGVEDRFNASLGTYHDLLKIIKDKDFLDNEENEDILEDIVLTLTLFEDREMIEERLKTYAHLFDDKVMKQLKRRRYTGWGRLSRKLINGIRDKQSGKTILDFLKSDGFANRNFMQLIHDDSLTFKEDIQKAQVSGQGDSLHEHIANLAGSPAIKKGILQTVKVVDELVKVMGRHKPENIVIEMARENQTTQKGQKNSRERMKRIEEGIKELGSQILKEHPVENTQLQNEKLYLYYLQNGRDMYVDQELDINRLSDYDVDHIVPQSFLKDDSIDNKVLTRSDKARGKSDNVPSEEVVKKMKNYWRQLLNAKLITQRKFDNLTKAERGGLSELDKAGFIKRQLVETRQITKHVAQILDSRMNTKYDENDKLIREVKVITLKSKLVSDFRKDFQFYKVREINNYHHAHDAYLNAVVGTALIKKYPKLESEFVYGDYKVYDVRKMIAKSEQEIGKATAKYFFYSNIMNFFKTEITLANGEIRKRPLIETNGETGEIVWDKGRDFATVRKVLSMPQVNIVKKTEVQTGGFSKESILPKRNSDKLIARKKDWDPKKYGGFDSPTVAYSVLVVAKVEKGKSKKLKSVKELLGITIMERSSFEKNPIDFLEAKGYKEVKKDLIIKLPKYSLFELENGRKRMLASAGELQKGNELALPSKYVNFLYLASHYEKLKGSPEDNEQKQLFVEQHKHYLDEIIEQISEFSKRVILADANLDKVLSAYNKHRDKPIREQAENIIHLFTLTNLGAPAAFKYFDTTIDRKRYTSTKEVLDATLIHQSITGLYETRIDLSQLGGDGGGSSGSSGGTLQLDDEYRLYSPLVKPDQNIQFWLEQFPQAWAETAGMGLAKQVPPQVIQLKASATPVSVRQYPLSKEAQEGIRPHVQRLIQQGILVPVQSPWNTPLLPVRKPGTNDYRPVQDLREVNKRVQDIHPTVPNPYNLLCALPPQRSWYTVLDLKDAFFCLRLHPTSQPLFAFEWRDPGTGRTGQLTWTRLPQGFKNSPTIFDEALHRDLANFRIQHPQVTLLQYVDDLLLAGATKQDCLEGTKALLLELSDLGYRASAKKAQICRREVTYLGYSLRDGQRWLTEARKKTVVQIPAPTTAKQVREFLGTAGFCRLWIPGFATLAAPLYPLTKEKGEFSWAPEHQKAFDAIKKALLSAPALALPDVTKPFTLYVDERKGVARGVLTQTLGPWRRPVAYLSKKLDPVASGWPVCLKAIAAVAILVKDADKLTLGQNITVIAPHALENIVRQPPDRWMTNARMTHYQSLLLTERVTFAPPAALNPATLLPEETDEPVTHDCHQLLIEETGVRKDLTDIPLTGEVLTWFTDGSSYVVEGKRMAGAAVVDGTRTIWASSLPEGTSAQKAELMALTQALRLAEGKSINIYTDSRYAFATAHVHGAIYKQRGLLTSAGREIKNKEEILSLLEALHLPKRLAIIHCPGHQKAKDPISRGNQMADRVAKQAAQGVNLLAGKRTADGSEFEKRTADGSEFESPKKKAKVE

SEQ ID NO: 21409 - protein, 2091 aa, synthetic construct
MPAAKRVKLDGGDKKYSIGLDIGTNSVGWAVITDEYKVPSKKFKVLGNTDRHSIKKNLIGALLFDSGETAEATRLKRTARRRYTRRKNRICYLQEIFSNEMAKVDDSFFHRLEESFLVEEDKKHERHPIFGNIVDEVAYHEKYPTIYHLRKKLVDSTDKADLRLIYLALAHMIKFRGHFLIEGDLNPDNSDVDKLFIQLVQTYNQLFEENPINASGVDAKAILSARLSKSRRLENLIAQLPGEKKNGLFGNLIALSLGLTPNFKSNFDLAEDAKLQLSKDTYDDDLDNLLAQIGDQYADLFLAAKNLSDAILLSDILRVNTEITKAPLSASMIKRYDEHHQDLTLLKALVRQQLPEKYKEIFFDQSKNGYAGYIDGGASQEEFYKFIKPILEKMDGTEELLVKLNREDLLRKQRTFDNGSIPHQIHLGELHAILRRQEDFYPFLKDNREKIEKILTFRIPYYVGPLARGNSRFAWMTRKSEETITPWNFEEVVDKGASAQSFIERMTNFDKNLPNEKVLPKHSLLYEYFTVYNELTKVKYVTEGMRKPAFLSGEQKKAIVDLLFKTNRKVTVKQLKEDYFKKIECFDSVEISGVEDRFNASLGTYHDLLKIIKDKDFLDNEENEDILEDIVLTLTLFEDREMIEERLKTYAHLFDDKVMKQLKRRRYTGWGRLSRKLINGIRDKQSGKTILDFLKSDGFANRNFMQLIHDDSLTFKEDIQKAQVSGQGDSLHEHIANLAGSPAIKKGILQTVKVVDELVKVMGRHKPENIVIEMARENQTTQKGQKNSRERMKRIEEGIKELGSQILKEHPVENTQLQNEKLYLYYLQNGRDMYVDQELDINRLSDYDVDHIVPQSFLKDDSIDNKVLTRSDKARGKSDNVPSEEVVKKMKNYWRQLLNAKLITQRKFDNLTKAERGGLSELDKAGFIKRQLVETRQITKHVAQILDSRMNTKYDENDKLIREVKVITLKSKLVSDFRKDFQFYKVREINNYHHAHDAYLNAVVGTALIKKYPKLESEFVYGDYKVYDVRKMIAKSEQEIGKATAKYFFYSNIMNFFKTEITLANGEIRKRPLIETNGETGEIVWDKGRDFATVRKVLSMPQVNIVKKTEVQTGGFSKESILPKRNSDKLIARKKDWDPKKYGGFDSPTVAYSVLVVAKVEKGKSKKLKSVKELLGITIMERSSFEKNPIDFLEAKGYKEVKKDLIIKLPKYSLFELENGRKRMLASAGELQKGNELALPSKYVNFLYLASHYEKLKGSPEDNEQKQLFVEQHKHYLDEIIEQISEFSKRVILADANLDKVLSAYNKHRDKPIREQAENIIHLFTLTNLGAPAAFKYFDTTIDRKRYTSTKEVLDATLIHQSITGLYETRIDLSQLGGDGGGGSGGSGGSGGSGGTLQLDDEYRLYSPLVKPDQNIQFWLEQFPQAWAETAGMGLAKQVPPQVIQLKASATPVSVRQYPLSKEAQEGIRPHVQRLIQQGILVPVQSPWNTPLLPVRKPGTNDYRPVQDLREVNKRVQDIHPTVPNPYNLLCALPPQRSWYTVLDLKDAFFCLRLHPTSQPLFAFEWRDPGTGRTGQLTWTRLPQGFKNSPTIFDEALHRDLANFRIQHPQVTLLQYVDDLLLAGATKQDCLEGTKALLLELSDLGYRASAKKAQICRREVTYLGYSLRDGQRWLTEARKKTVVQIPAPTTAKQVREFLGTAGFCRLWIPGFATLAAPLYPLTKEKGEFSWAPEHQKAFDAIKKALLSAPALALPDVTKPFTLYVDERKGVARGVLTQTLGPWRRPVAYLSKKLDPVASGWPVCLKAIAAVAILVKDADKLTLGQNITVIAPHALENIVRQPPDRWMTNARMTHYQSLLLTERVTFAPPAALNPATLLPEETDEPVTHDCHQLLIEETGVRKDLTDIPLTGEVLTWFTDGSSYVVEGKRMAGAAVVDGTRTIWASSLPEGTSAQKAELMALTQALRLAEGKSINIYTDSRYAFATAHVHGAIYKQRGLLTSAGREIKNKEEILSLLEALHLPKRLAIIHCPGHQKAKDPISRGNQMADRVAKQAAQGVNLLAGKRTADGSEFEKRTADGSEFESPKKKAKVE

SEQ ID NO: 21410 - protein, 2090 aa, synthetic construct
MPAAKRVKLDGGDKKYSIGLDIGTNSVGWAVITDEYKVPSKKFKVLGNTDRHSIKKNLIGALLFDSGETAEATRLKRTARRRYTRRKNRICYLQEIFSNEMAKVDDSFFHRLEESFLVEEDKKHERHPIFGNIVDEVAYHEKYPTIYHLRKKLVDSTDKADLRLIYLALAHMIKFRGHFLIEGDLNPDNSDVDKLFIQLVQTYNQLFEENPINASGVDAKAILSARLSKSRRLENLIAQLPGEKKNGLFGNLIALSLGLTPNFKSNFDLAEDAKLQLSKDTYDDDLDNLLAQIGDQYADLFLAAKNLSDAILLSDILRVNTEITKAPLSASMIKRYDEHHQDLTLLKALVRQQLPEKYKEIFFDQSKNGYAGYIDGGASQEEFYKFIKPILEKMDGTEELLVKLNREDLLRKQRTFDNGSIPHQIHLGELHAILRRQEDFYPFLKDNREKIEKILTFRIPYYVGPLARGNSRFAWMTRKSEETITPWNFEEVVDKGASAQSFIERMTNFDKNLPNEKVLPKHSLLYEYFTVYNELTKVKYVTEGMRKPAFLSGEQKKAIVDLLFKTNRKVTVKQLKEDYFKKIECFDSVEISGVEDRFNASLGTYHDLLKIIKDKDFLDNEENEDILEDIVLTLTLFEDREMIEERLKTYAHLFDDKVMKQLKRRRYTGWGRLSRKLINGIRDKQSGKTILDFLKSDGFANRNFMQLIHDDSLTFKEDIQKAQVSGQGDSLHEHIANLAGSPAIKKGILQTVKVVDELVKVMGRHKPENIVIEMARENQTTQKGQKNSRERMKRIEEGIKELGSQILKEHPVENTQLQNEKLYLYYLQNGRDMYVDQELDINRLSDYDVDHIVPQSFLKDDSIDNKVLTRSDKARGKSDNVPSEEVVKKMKNYWRQLLNAKLITQRKFDNLTKAERGGLSELDKAGFIKRQLVETRQITKHVAQILDSRMNTKYDENDKLIREVKVITLKSKLVSDFRKDFQFYKVREINNYHHAHDAYLNAVVGTALIKKYPKLESEFVYGDYKVYDVRKMIAKSEQEIGKATAKYFFYSNIMNFFKTEITLANGEIRKRPLIETNGETGEIVWDKGRDFATVRKVLSMPQVNIVKKTEVQTGGFSKESILPKRNSDKLIARKKDWDPKKYGGFDSPTVAYSVLVVAKVEKGKSKKLKSVKELLGITIMERSSFEKNPIDFLEAKGYKEVKKDLIIKLPKYSLFELENGRKRMLASAGELQKGNELALPSKYVNFLYLASHYEKLKGSPEDNEQKQLFVEQHKHYLDEIIEQISEFSKRVILADANLDKVLSAYNKHRDKPIREQAENIIHLFTLTNLGAPAAFKYFDTTIDRKRYTSTKEVLDATLIHQSITGLYETRIDLSQLGGDGGEAAAKGGGPAPGGTLQLDDEYRLYSPLVKPDQNIQFWLEQFPQAWAETAGMGLAKQVPPQVIQLKASATPVSVRQYPLSKEAQEGIRPHVQRLIQQGILVPVQSPWNTPLLPVRKPGTNDYRPVQDLREVNKRVQDIHPTVPNPYNLLCALPPQRSWYTVLDLKDAFFCLRLHPTSQPLFAFEWRDPGTGRTGQLTWTRLPQGFKNSPTIFDEALHRDLANFRIQHPQVTLLQYVDDLLLAGATKQDCLEGTKALLLELSDLGYRASAKKAQICRREVTYLGYSLRDGQRWLTEARKKTVVQIPAPTTAKQVREFLGTAGFCRLWIPGFATLAAPLYPLTKEKGEFSWAPEHQKAFDAIKKALLSAPALALPDVTKPFTLYVDERKGVARGVLTQTLGPWRRPVAYLSKKLDPVASGWPVCLKAIAAVAILVKDADKLTLGQNITVIAPHALENIVRQPPDRWMTNARMTHYQSLLLTERVTFAPPAALNPATLLPEETDEPVTHDCHQLLIEETGVRKDLTDIPLTGEVLTWFTDGSSYVVEGKRMAGAAVVDGTRTIWASSLPEGTSAQKAELMALTQALRLAEGKSINIYTDSRYAFATAHVHGAIYKQRGLLTSAGREIKNKEEILSLLEALHLPKRLAIIHCPGHQKAKDPISRGNQMADRVAKQAAQGVNLLAGKRTADGSEFEKRTADGSEFESPKKKAKVE

SEQ ID NO: 21411 - protein, 2087 aa, synthetic construct; identical to SEQ ID NO: 362

SEQ ID NO: 21412 - protein, 2090 aa, synthetic construct; identical to SEQ ID NO: 350

SEQ ID NO: 21413 - protein, 2090 aa, synthetic construct
MPAAKRVKLDGGDKKYSIGLDIGTNSVGWAVITDEYKVPSKKFKVLGNTDRHSIKKNLIGALLFDSGETAEATRLKRTARRRYTRRKNRICYLQEIFSNEMAKVDDSFFHRLEESFLVEEDKKHERHPIFGNIVDEVAYHEKYPTIYHLRKKLVDSTDKADLRLIYLALAHMIKFRGHFLIEGDLNPDNSDVDKLFIQLVQTYNQLFEENPINASGVDAKAILSARLSKSRRLENLIAQLPGEKKNGLFGNLIALSLGLTPNFKSNFDLAEDAKLQLSKDTYDDDLDNLLAQIGDQYADLFLAAKNLSDAILLSDILRVNTEITKAPLSASMIKRYDEHHQDLTLLKALVRQQLPEKYKEIFFDQSKNGYAGYIDGGASQEEFYKFIKPILEKMDGTEELLVKLNREDLLRKQRTFDNGSIPHQIHLGELHAILRRQEDFYPFLKDNREKIEKILTFRIPYYVGPLARGNSRFAWMTRKSEETITPWNFEEVVDKGASAQSFIERMTNFDKNLPNEKVLPKHSLLYEYFTVYNELTKVKYVTEGMRKPAFLSGEQKKAIVDLLFKTNRKVTVKQLKEDYFKKIECFDSVEISGVEDRFNASLGTYHDLLKIIKDKDFLDNEENEDILEDIVLTLTLFEDREMIEERLKTYAHLFDDKVMKQLKRRRYTGWGRLSRKLINGIRDKQSGKTILDFLKSDGFANRNFMQLIHDDSLTFKEDIQKAQVSGQGDSLHEHIANLAGSPAIKKGILQTVKVVDELVKVMGRHKPENIVIEMARENQTTQKGQKNSRERMKRIEEGIKELGSQILKEHPVENTQLQNEKLYLYYLQNGRDMYVDQELDINRLSDYDVDHIVPQSFLKDDSIDNKVLTRSDKARGKSDNVPSEEVVKKMKNYWRQLLNAKLITQRKFDNLTKAERGGLSELDKAGFIKRQLVETRQITKHVAQILDSRMNTKYDENDKLIREVKVITLKSKLVSDFRKDFQFYKVREINNYHHAHDAYLNAVVGTALIKKYPKLESEFVYGDYKVYDVRKMIAKSEQEIGKATAKYFFYSNIMNFFKTEITLANGEIRKRPLIETNGETGEIVWDKGRDFATVRKVLSMPQVNIVKKTEVQTGGFSKESILPKRNSDKLIARKKDWDPKKYGGFDSPTVAYSVLVVAKVEKGKSKKLKSVKELLGITIMERSSFEKNPIDFLEAKGYKEVKKDLIIKLPKYSLFELENGRKRMLASAGELQKGNELALPSKYVNFLYLASHYEKLKGSPEDNEQKQLFVEQHKHYLDEIIEQISEFSKRVILADANLDKVLSAYNKHRDKPIREQAENIIHLFTLTNLGAPAAFKYFDTTIDRKRYTSTKEVLDATLIHQSITGLYETRIDLSQLGGDGGGSSEAAAKPAPGGTLQLDDEYRLYSPLVKPDQNIQFWLEQFPQAWAETAGMGLAKQVPPQVIQLKASATPVSVRQYPLSKEAQEGIRPHVQRLIQQGILVPVQSPWNTPLLPVRKPGTNDYRPVQDLREVNKRVQDIHPTVPNPYNLLCALPPQRSWYTVLDLKDAFFCLRLHPTSQPLFAFEWRDPGTGRTGQLTWTRLPQGFKNSPTIFNEALHRDLANFRIQHPQVTLLQYVDDLLLAGATKQDCLEGTKALLLELSDLGYRASAKKAQICRREVTYLGYSLRDGQRWLTEARKKTVVQIPAPTTAKQVREFLGTAGFCRLWIPGFATLAAPLYPLTKPKGEFSWAPEHQKAFDAIKKALLSAPALALPDVTKPFTLYVDERKGVARGVLTQTLGPWRRPVAYLSKKLDPVASGWPVCLKAIAAVAILVKDADKLTLGQNITVIAPHALENIVRQPPDRWMTNARMTHYQSLLLTERVTFAPPAALNPATLLPEETDEPVTHDCHQLLIEETGVRKDLTDIPLTGEVLTWFTDGSSYVVEGKRMAGAAVVDGTRTIWASSLPEGTSAQKAELMALTQALRLAEGKSINIYTDSRYAFATAHVHGAIYKQRGWLTSAGREIKNKEEILSLLEALHLPKRLAIIHCPGHQKAKDPISRGNQMADRVAKQAAQGVNLLAGKRTADGSEFEKRTADGSEFESPKKKAKVE

SEQ ID NO: 21414 - protein, 2109 aa, synthetic construct
MPAAKRVKLDGGDKKYSIGLDIGTNSVGWAVITDEYKVPSKKFKVLGNTDRHSIKKNLIGALLFDSGETAEATRLKRTARRRYTRRKNRICYLQEIFSNEMAKVDDSFFHRLEESFLVEEDKKHERHPIFGNIVDEVAYHEKYPTIYHLRKKLVDSTDKADLRLIYLALAHMIKFRGHFLIEGDLNPDNSDVDKLFIQLVQTYNQLFEENPINASGVDAKAILSARLSKSRRLENLIAQLPGEKKNGLFGNLIALSLGLTPNFKSNFDLAEDAKLQLSKDTYDDDLDNLLAQIGDQYADLFLAAKNLSDAILLSDILRVNTEITKAPLSASMIKRYDEHHQDLTLLKALVRQQLPEKYKEIFFDQSKNGYAGYIDGGASQEEFYKFIKPILEKMDGTEELLVKLNREDLLRKQRTFDNGSIPHQIHLGELHAILRRQEDFYPFLKDNREKIEKILTFRIPYYVGPLARGNSRFAWMTRKSEETITPWNFEEVVDKGASAQSFIERMTNFDKNLPNEKVLPKHSLLYEYFTVYNELTKVKYVTEGMRKPAFLSGEQKKAIVDLLFKTNRKVTVKQLKEDYFKKIECFDSVEISGVEDRFNASLGTYHDLLKIIKDKDFLDNEENEDILEDIVLTLTLFEDREMIEERLKTYAHLFDDKVMKQLKRRRYTGWGRLSRKLINGIRDKQSGKTILDFLKSDGFANRNFMQLIHDDSLTFKEDIQKAQVSGQGDSLHEHIANLAGSPAIKKGILQTVKVVDELVKVMGRHKPENIVIEMARENQTTQKGQKNSRERMKRIEEGIKELGSQILKEHPVENTQLQNEKLYLYYLQNGRDMYVDQELDINRLSDYDVDHIVPQSFLKDDSIDNKVLTRSDKARGKSDNVPSEEVVKKMKNYWRQLLNAKLITQRKFDNLTKAERGGLSELDKAGFIKRQLVETRQITKHVAQILDSRMNTKYDENDKLIREVKVITLKSKLVSDFRKDFQFYKVREINNYHHAHDAYLNAVVGTALIKKYPKLESEFVYGDYKVYDVRKMIAKSEQEIGKATAKYFFYSNIMNFFKTEITLANGEIRKRPLIETNGETGEIVWDKGRDFATVRKVLSMPQVNIVKKTEVQTGGFSKESILPKRNSDKLIARKKDWDPKKYGGFDSPTVAYSVLVVAKVEKGKSKKLKSVKELLGITIMERSSFEKNPIDFLEAKGYKEVKKDLIIKLPKYSLFELENGRKRMLASAGELQKGNELALPSKYVNFLYLASHYEKLKGSPEDNEQKQLFVEQHKHYLDEIIEQISEFSKRVILADANLDKVLSAYNKHRDKPIREQAENIIHLFTLTNLGAPAAFKYFDTTIDRKRYTSTKEVLDATLIHQSITGLYETRIDLSQLGGDGGEAAAKEAAAKEAAAKEAAAKEAAAKEAAAKGGTLQLDDEYRLYSPLVKPDQNIQFWLEQFPQAWAETAGMGLAKQVPPQVIQLKASATPVSVRQYPLSKEAQEGIRPHVQRLIQQGILVPVQSPWNTPLLPVRKPGTNDYRPVQDLREVNKRVQDIHPTVPNPYNLLCALPPQRSWYTVLDLKDAFFCLRLHPTSQPLFAFEWRDPGTGRTGQLTWTRLPQGFKNSPTIFNEALHRDLANFRIQHPQVTLLQYVDDLLLAGATKQDCLEGTKALLLELSDLGYRASAKKAQICRREVTYLGYSLRDGQRWLTEARKKTVVQIPAPTTAKQVREFLGTAGFCRLWIPGFATLAAPLYPLTKPKGEFSWAPEHQKAFDAIKKALLSAPALALPDVTKPFTLYVDERKGVARGVLTQTLGPWRRPVAYLSKKLDPVASGWPVCLKAIAAVAILVKDADKLTLGQNITVIAPHALENIVRQPPDRWMTNARMTHYQSLLLTERVTFAPPAALNPATLLPEETDEPVTHDCHQLLIEETGVRKDLTDIPLTGEVLTWFTDGSSYVVEGKRMAGAAVVDGTRTIWASSLPEGTSAQKAELMALTQALRLAEGKSINIYTDSRYAFATAHVHGAIYKQRGWLTSAGREIKNKEEILSLLEALHLPKRLAIIHCPGHQKAKDPISRGNQMADRVAKQAAQGVNLLAGKRTADGSEFEKRTADGSEFESPKKKAKVE

SEQ ID NO: 21415 - protein, 2094 aa, synthetic construct; identical to SEQ ID NO: 374

SEQ ID NO: 21416 - protein, 2082 aa, synthetic construct
MPAAKRVKLDGGDKKYSIGLDIGTNSVGWAVITDEYKVPSKKFKVLGNTDRHSIKKNLIGALLFDSGETAEATRLKRTARRRYTRRKNRICYLQEIFSNEMAKVDDSFFHRLEESFLVEEDKKHERHPIFGNIVDEVAYHEKYPTIYHLRKKLVDSTDKADLRLIYLALAHMIKFRGHFLIEGDLNPDNSDVDKLFIQLVQTYNQLFEENPINASGVDAKAILSARLSKSRRLENLIAQLPGEKKNGLFGNLIALSLGLTPNFKSNFDLAEDAKLQLSKDTYDDDLDNLLAQIGDQYADLFLAAKNLSDAILLSDILRVNTEITKAPLSASMIKRYDEHHQDLTLLKALVRQQLPEKYKEIFFDQSKNGYAGYIDGGASQEEFYKFIKPILEKMDGTEELLVKLNREDLLRKQRTFDNGSIPHQIHLGELHAILRRQEDFYPFLKDNREKIEKILTFRIPYYVGPLARGNSRFAWMTRKSEETITPWNFEEVVDKGASAQSFIERMTNFDKNLPNEKVLPKHSLLYEYFTVYNELTKVKYVTEGMRKPAFLSGEQKKAIVDLLFKTNRKVTVKQLKEDYFKKIECFDSVEISGVEDRFNASLGTYHDLLKIIKDKDFLDNEENEDILEDIVLTLTLFEDREMIEERLKTYAHLFDDKVMKQLKRRRYTGWGRLSRKLINGIRDKQSGKTILDFLKSDGFANRNFMQLIHDDSLTFKEDIQKAQVSGQGDSLHEHIANLAGSPAIKKGILQTVKVVDELVKVMGRHKPENIVIEMARENQTTQKGQKNSRERMKRIEEGIKELGSQILKEHPVENTQLQNEKLYLYYLQNGRDMYVDQELDINRLSDYDVDHIVPQSFLKDDSIDNKVLTRSDKARGKSDNVPSEEVVKKMKNYWRQLLNAKLITQRKFDNLTKAERGGLSELDKAGFIKRQLVETRQITKHVAQILDSRMNTKYDENDKLIREVKVITLKSKLVSDFRKDFQFYKVREINNYHHAHDAYLNAVVGTALIKKYPKLESEFVYGDYKVYDVRKMIAKSEQEIGKATAKYFFYSNIMNFFKTEITLANGEIRKRPLIETNGETGEIVWDKGRDFATVRKVLSMPQVNIVKKTEVQTGGFSKESILPKRNSDKLIARKKDWDPKKYGGFDSPTVAYSVLVVAKVEKGKSKKLKSVKELLGITIMERSSFEKNPIDFLEAKGYKEVKKDLIIKLPKYSLFELENGRKRMLASAGELQKGNELALPSKYVNFLYLASHYEKLKGSPEDNEQKQLFVEQHKHYLDEIIEQISEFSKRVILADANLDKVLSAYNKHRDKPIREQAENIIHLFTLTNLGAPAAFKYFDTTIDRKRYTSTKEVLDATLIHQSITGLYETRIDLSQLGGDGGGSSGGTLQLDDEYRLYSPLVKPDQNIQFWLEQFPQAWAETAGMGLAKQVPPQVIQLKASATPVSVRQYPLSKEAQEGIRPHVQRLIQQGILVPVQSPWNTPLLPVRKPGTNDYRPVQDLREVNKRVQDIHPTVPNPYNLLCALPPQRSWYTVLDLKDAFFCLRLHPTSQPLFAFEWRDPGTGRTGQLTWTRLPQGFKNSPTIFNEALHRDLANFRIQHPQVTLLQYVDDLLLAGATKQDCLEGTKALLLELSDLGYRASAKKAQICRREVTYLGYSLRDGQRWLTEARKKTVVQIPAPTTAKQVREFLGTAGFCRLWIPGFATLAAPLYPLTKPKGEFSWAPEHQKAFDAIKKALLSAPALALPDVTKPFTLYVDERKGVARGVLTQTLGPWRRPVAYLSKKLDPVASGWPVCLKAIAAVAILVKDADKLTLGQNITVIAPHALENIVRQPPDRWMTNARMTHYQSLLLTERVTFAPPAALNPATLLPEETDEPVTHDCHQLLIEETGVRKDLTDIPLTGEVLTWFTDGSSYVVEGKRMAGAAVVDGTRTIWASSLPEGTSAQKAELMALTQALRLAEGKSINIYTDSRYAFATAHVHGAIYKQRGWLTSAGREIKNKEEILSLLEALHLPKRLAIIHCPGHQKAKDPISRGNQMADRVAKQAAQGVNLLAGKRTADGSEFEKRTADGSEFESPKKKAKVE

SEQ ID NO: 21417 - protein, 2090 aa, synthetic construct
MPAAKRVKLDGGDKKYSIGLDIGTNSVGWAVITDEYKVPSKKFKVLGNTDRHSIKKNLIGALLFDSGETAEATRLKRTARRRYTRRKNRICYLQEIFSNEMAKVDDSFFHRLEESFLVEEDKKHERHPIFGNIVDEVAYHEKYPTIYHLRKKLVDSTDKADLRLIYLALAHMIKFRGHFLIEGDLNPDNSDVDKLFIQLVQTYNQLFEENPINASGVDAKAILSARLSKSRRLENLIAQLPGEKKNGLFGNLIALSLGLTPNFKSNFDLAEDAKLQLSKDTYDDDLDNLLAQIGDQYADLFLAAKNLSDAILLSDILRVNTEITKAPLSASMIKRYDEHHQDLTLLKALVRQQLPEKYKEIFFDQSKNGYAGYIDGGASQEEFYKFIKPILEKMDGTEELLVKLNREDLLRKQRTFDNGSIPHQIHLGELHAILRRQEDFYPFLKDNREKIEKILTFRIPYYVGPLARGNSRFAWMTRKSEETITPWNFEEVVDKGASAQSFIERMTNFDKNLPNEKVLPKHSLLYEYFTVYNELTKVKYVTEGMRKPAFLSGEQKKAIVDLLFKTNRKVTVKQLKEDYFKKIECFDSVEISGVEDRFNASLGTYHDLLKIIKDKDFLDNEENEDILEDIVLTLTLFEDREMIEERLKTYAHLFDDKVMKQLKRRRYTGWGRLSRKLINGIRDKQSGKTILDFLKSDGFANRNFMQLIHDDSLTFKEDIQKAQVSGQGDSLHEHIANLAGSPAIKKGILQTVKVVDELVKVMGRHKPENIVIEMARENQTTQKGQKNSRERMKRIEEGIKELGSQILKEHPVENTQLQNEKLYLYYLQNGRDMYVDQELDINRLSDYDVDHIVPQSFLKDDSIDNKVLTRSDKARGKSDNVPSEEVVKKMKNYWRQLLNAKLITQRKFDNLTKAERGGLSELDKAGFIKRQLVETRQITKHVAQILDSRMNTKYDENDKLIREVKVITLKSKLVSDFRKDFQFYKVREINNYHHAHDAYLNAVVGTALIKKYPKLESEFVYGDYKVYDVRKMIAKSEQEIGKATAKYFFYSNIMNFFKTEITLANGEIRKRPLIETNGETGEIVWDKGRDFATVRKVLSMPQVNIVKKTEVQTGGFSKESILPKRNSDKLIARKKDWDPKKYGGFDSPTVAYSVLVVAKVEKGKSKKLKSVKELLGITIMERSSFEKNPIDFLEAKGYKEVKKDLIIKLPKYSLFELENGRKRMLASAGELQKGNELALPSKYVNFLYLASHYEKLKGSPEDNEQKQLFVEQHKHYLDEIIEQISEFSKRVILADANLDKVLSAYNKHRDKPIREQAENIIHLFTLTNLGAPAAFKYFDTTIDRKRYTSTKEVLDATLIHQSITGLYETRIDLSQLGGDGGGGGGSSEAAAKGGTLQLDDEYRLYSPLVKPDQNIQFWLEQFPQAWAETAGMGLAKQVPPQVIQLKASATPVSVRQYPLSKEAQEGIRPHVQRLIQQGILVPVQSPWNTPLLPVRKPGTNDYRPVQDLREVNKRVQDIHPTVPNPYNLLCALPPQRSWYTVLDLKDAFFCLRLHPTSQPLFAFEWRDPGTGRTGQLTWTRLPQGFKNSPTIFNEALHRDLANFRIQHPQVTLLQYVDDLLLAGATKQDCLEGTKALLLELSDLGYRASAKKAQICRREVTYLGYSLRDGQRWLTEARKKTVVQIPAPTTAKQVREFLGTAGFCRLWIPGFATLAAPLYPLTKPKGEFSWAPEHQKAFDAIKKALLSAPALALPDVTKPFTLYVDERKGVARGVLTQTLGPWRRPVAYLSKKLDPVASGWPVCLKAIAAVAILVKDADKLTLGQNITVIAPHALENIVRQPPDRWMTNARMTHYQSLLLTERVTFAPPAALNPATLLPEETDEPVTHDCHQLLIEETGVRKDLTDIPLTGEVLTWFTDGSSYVVEGKRMAGAAVVDGTRTIWASSLPEGTSAQKAELMALTQALRLAEGKSINIYTDSRYAFATAHVHGAIYKQRGWLTSAGREIKNKEEILSLLEALHLPKRLAIIHCPGHQKAKDPISRGNQMADRVAKQAAQGVNLLAGKRTADGSEFEKRTADGSEFESPKKKAKVE

SEQ ID NO: 21418 - protein, 2095 aa, synthetic construct
MPAAKRVKLDGGDKKYSIGLDIGTNSVGWAVITDEYKVPSKKFKVLGNTDRHSIKKNLIGALLFDSGETAEATRLKRTARRRYTRRKNRICYLQEIFSNEMAKVDDSFFHRLEESFLVEEDKKHERHPIFGNIVDEVAYHEKYPTIYHLRKKLVDSTDKADLRLIYLALAHMIKFRGHFLIEGDLNPDNSDVDKLFIQLVQTYNQLFEENPINASGVDAKAILSARLSKSRRLENLIAQLPGEKKNGLFGNLIALSLGLTPNFKSNFDLAEDAKLQLSKDTYDDDLDNLLAQIGDQYADLFLAAKNLSDAILLSDILRVNTEITKAPLSASMIKRYDEHHQDLTLLKALVRQQLPEKYKEIFFDQSKNGYAGYIDGGASQEEFYKFIKPILEKMDGTEELLVKLNREDLLRKQRTFDNGSIPHQIHLGELHAILRRQEDFYPFLKDNREKIEKILTFRIPYYVGPLARGNSRFAWMTRKSEETITPWNFEEVVDKGASAQSFIERMTNFDKNLPNEKVLPKHSLLYEYFTVYNELTKVKYVTEGMRKPAFLSGEQKKAIVDLLFKTNRKVTVKQLKEDYFKKIECFDSVEISGVEDRFNASLGTYHDLLKIIKDKDFLDNEENEDILEDIVLTLTLFEDREMIEERLKTYAHLFDDKVMKQLKRRRYTGWGRLSRKLINGIRDKQSGKTILDFLKSDGFANRNFMQLIHDDSLTFKEDIQKAQVSGQGDSLHEHIANLAGSPAIKKGILQTVKVVDELVKVMGRHKPENIVIEMARENQTTQKGQKNSRERMKRIEEGIKELGSQILKEHPVENTQLQNEKLYLYYLQNGRDMYVDQELDINRLSDYDVDHIVPQSFLKDDSIDNKVLTRSDKARGKSDNVPSEEVVKKMKNYWRQLLNAKLITQRKFDNLTKAERGGLSELDKAGFIKRQLVETRQITKHVAQILDSRMNTKYDENDKLIREVKVITLKSKLVSDFRKDFQFYKVREINNYHHAHDAYLNAVVGTALIKKYPKLESEFVYGDYKVYDVRKMIAKSEQEIGKATAKYFFYSNIMNFFKTEITLANGEIRKRPLIETNGETGEIVWDKGRDFATVRKVLSMPQVNIVKKTEVQTGGFSKESILPKRNSDKLIARKKDWDPKKYGGFDSPTVAYSVLVVAKVEKGKSKKLKSVKELLGITIMERSSFEKNPIDFLEAKGYKEVKKDLIIKLPKYSLFELENGRKRMLASAGELQKGNELALPSKYVNFLYLASHYEKLKGSPEDNEQKQLFVEQHKHYLDEIIEQISEFSKRVILADANLDKVLSAYNKHRDKPIREQAENIIHLFTLTNLGAPAAFKYFDTTIDRKRYTSTKEVLDATLIHQSITGLYETRIDLSQLGGDGGSGSETPGTSESATPESGGTLQLDDEYRLYSPLVKPDQNIQFWLEQFPQAWAETAGMGLAKQVPPQVIQLKASATPVSVRQYPLSKEAQEGIRPHVQRLIQQGILVPVQSPWNTPLLPVRKPGTNDYRPVQDLREVNKRVQDIHPTVPNPYNLLCALPPQRSWYTVLDLKDAFFCLRLHPTSQPLFAFEWRDPGTGRTGQLTWTRLPQGFKNSPTIFNEALHRDLANFRIQHPQVTLLQYVDDLLLAGATKQDCLEGTKALLLELSDLGYRASAKKAQICRREVTYLGYSLRDGQRWLTEARKKTVVQIPAPTTAKQVREFLGTAGFCRLWIPGFATLAAPLYPLTKPKGEFSWAPEHQKAFDAIKKALLSAPALALPDVTKPFTLYVDERKGVARGVLTQTLGPWRRPVAYLSKKLDPVASGWPVCLKAIAAVAILVKDADKLTLGQNITVIAPHALENIVRQPPDRWMTNARMTHYQSLLLTERVTFAPPAALNPATLLPEETDEPVTHDCHQLLIEETGVRKDLTDIPLTGEVLTWFTDGSSYVVEGKRMAGAAVVDGTRTIWASSLPEGTSAQKAELMALTQALRLAEGKSINIYTDSRYAFATAHVHGAIYKQRGWLTSAGREIKNKEEILSLLEALHLPKRLAIIHCPGHQKAKDPISRGNQMADRVAKQAAQGVNLLAGKRTADGSEFEKRTADGSEFESPKKKAKVE

SEQ ID NO: 21419 - protein, 2085 aa, synthetic construct; identical to SEQ ID NO: 386

SEQ ID NO: 21420 - protein, 2090 aa, synthetic construct
MPAAKRVKLDGGDKKYSIGLDIGTNSVGWAVITDEYKVPSKKFKVLGNTDRHSIKKNLIGALLFDSGETAEATRLKRTARRRYTRRKNRICYLQEIFSNEMAKVDDSFFHRLEESFLVEEDKKHERHPIFGNIVDEVAYHEKYPTIYHLRKKLVDSTDKADLRLIYLALAHMIKFRGHFLIEGDLNPDNSDVDKLFIQLVQTYNQLFEENPINASGVDAKAILSARLSKSRRLENLIAQLPGEKKNGLFGNLIALSLGLTPNFKSNFDLAEDAKLQLSKDTYDDDLDNLLAQIGDQYADLFLAAKNLSDAILLSDILRVNTEITKAPLSASMIKRYDEHHQDLTLLKALVRQQLPEKYKEIFFDQSKNGYAGYIDGGASQEEFYKFIKPILEKMDGTEELLVKLNREDLLRKQRTFDNGSIPHQIHLGELHAILRRQEDFYPFLKDNREKIEKILTFRIPYYVGPLARGNSRFAWMTRKSEETITPWNFEEVVDKGASAQSFIERMTNFDKNLPNEKVLPKHSLLYEYFTVYNELTKVKYVTEGMRKPAFLSGEQKKAIVDLLFKTNRKVTVKQLKEDYFKKIECFDSVEISGVEDRFNASLGTYHDLLKIIKDKDFLDNEENEDILEDIVLTLTLFEDREMIEERLKTYAHLFDDKVMKQLKRRRYTGWGRLSRKLINGIRDKQSGKTILDFLKSDGFANRNFMQLIHDDSLTFKEDIQKAQVSGQGDSLHEHIANLAGSPAIKKGILQTVKVVDELVKVMGRHKPENIVIEMARENQTTQKGQKNSRERMKRIEEGIKELGSQILKEHPVENTQLQNEKLYLYYLQNGRDMYVDQELDINRLSDYDVDHIVPQSFLKDDSIDNKVLTRSDKARGKSDNVPSEEVVKKMKNYWRQLLNAKLITQRKFDNLTKAERGGLSELDKAGFIKRQLVETRQITKHVAQILDSRMNTKYDENDKLIREVKVITLKSKLVSDFRKDFQFYKVREINNYHHAHDAYLNAVVGTALIKKYPKLESEFVYGDYKVYDVRKMIAKSEQEIGKATAKYFFYSNIMNFFKTEITLANGEIRKRPLIETNGETGEIVWDKGRDFATVRKVLSMPQVNIVKKTEVQTGGFSKESILPKRNSDKLIARKKDWDPKKYGGFDSPTVAYSVLVVAKVEKGKSKKLKSVKELLGITIMERSSFEKNPIDFLEAKGYKEVKKDLIIKLPKYSLFELENGRKRMLASAGELQKGNELALPSKYVNFLYLASHYEKLKGSPEDNEQKQLFVEQHKHYLDEIIEQISEFSKRVILADANLDKVLSAYNKHRDKPIREQAENIIHLFTLTNLGAPAAFKYFDTTIDRKRYTSTKEVLDATLIHQSITGLYETRIDLSQLGGDGGPAPEAAAKGGGGGTLQLDDEYRLYSPLVKPDQNIQFWLEQFPQAWAETAGMGLAKQVPPQVIQLKASATPVSVRQYPLSKEAQEGIRPHVQRLIQQGILVPVQSPWNTPLLPVRKPGTNDYRPVQDLREVNKRVQDIHPTVPNPYNLLCALPPQRSWYTVLDLKDAFFCLRLHPTSQPLFAFEWRDPGTGRTGQLTWTRLPQGFKNSPTIFNEALHRDLANFRIQHPQVTLLQYVDDLLLAGATKQDCLEGTKALLLELSDLGYRASAKKAQICRREVTYLGYSLRDGQRWLTEARKKTVVQIPAPTTAKQVREFLGTAGFCRLWIPGFATLAAPLYPLTKPKGEFSWAPEHQKAFDAIKKALLSAPALALPDVTKPFTLYVDERKGVARGVLTQTLGPWRRPVAYLSKKLDPVASGWPVCLKAIAAVAILVKDADKLTLGQNITVIAPHALENIVRQPPDRWMTNARMTHYQSLLLTERVTFAPPAALNPATLLPEETDEPVTHDCHQLLIEETGVRKDLTDIPLTGEVLTWFTDGSSYVVEGKRMAGAAVVDGTRTIWASSLPEGTSAQKAELMALTQALRLAEGKSINIYTDSRYAFATAHVHGAIYKQRGWLTSAGREIKNKEEILSLLEALHLPKRLAIIHCPGHQKAKDPISRGNQMADRVAKQAAQGVNLLAGKRTADGSEFEKRTADGSEFESPKKKAKVE

SEQ ID NO: 21421 - protein, 2085 aa, synthetic construct; identical to SEQ ID NO: 356

SEQ ID NO: 21422 - protein, 2087 aa, synthetic construct
MPAAKRVKLDGGDKKYSIGLDIGTNSVGWAVITDEYKVPSKKFKVLGNTDRHSIKKNLIGALLFDSGETAEATRLKRTARRRYTRRKNRICYLQEIFSNEMAKVDDSFFHRLEESFLVEEDKKHERHPIFGNIVDEVAYHEKYPTIYHLRKKLVDSTDKADLRLIYLALAHMIKFRGHFLIEGDLNPDNSDVDKLFIQLVQTYNQLFEENPINASGVDAKAILSARLSKSRRLENLIAQLPGEKKNGLFGNLIALSLGLTPNFKSNFDLAEDAKLQLSKDTYDDDLDNLLAQIGDQYADLFLAAKNLSDAILLSDILRVNTEITKAPLSASMIKRYDEHHQDLTLLKALVRQQLPEKYKEIFFDQSKNGYAGYIDGGASQEEFYKFIKPILEKMDGTEELLVKLNREDLLRKQRTFDNGSIPHQIHLGELHAILRRQEDFYPFLKDNREKIEKILTFRIPYYVGPLARGNSRFAWMTRKSEETITPWNFEEVVDKGASAQSFIERMTNFDKNLPNEKVLPKHSLLYEYFTVYNELTKVKYVTEGMRKPAFLSGEQKKAIVDLLFKTNRKVTVKQLKEDYFKKIECFDSVEISGVEDRFNASLGTYHDLLKIIKDKDFLDNEENEDILEDIVLTLTLFEDREMIEERLKTYAHLFDDKVMKQLKRRRYTGWGRLSRKLINGIRDKQSGKTILDFLKSDGFANRNFMQLIHDDSLTFKEDIQKAQVSGQGDSLHEHIANLAGSPAIKKGILQTVKVVDELVKVMGRHKPENIVIEMARENQTTQKGQKNSRERMKRIEEGIKELGSQILKEHPVENTQLQNEKLYLYYLQNGRDMYVDQELDINRLSDYDVDHIVPQSFLKDDSIDNKVLTRSDKARGKSDNVPSEEVVKKMKNYWRQLLNAKLITQRKFDNLTKAERGGLSELDKAGFIKRQLVETRQITKHVAQILDSRMNTKYDENDKLIREVKVITLKSKLVSDFRKDFQFYKVREINNYHHAHDAYLNAVVGTALIKKYPKLESEFVYGDYKVYDVRKMIAKSEQEIGKATAKYFFYSNIMNFFKTEITLANGEIRKRPLIETNGETGEIVWDKGRDFATVRKVLSMPQVNIVKKTEVQTGGFSKESILPKRNSDKLIARKKDWDPKKYGGFDSPTVAYSVLVVAKVEKGKSKKLKSVKELLGITIMERSSFEKNPIDFLEAKGYKEVKKDLIIKLPKYSLFELENGRKRMLASAGELQKGNELALPSKYVNFLYLASHYEKLKGSPEDNEQKQLFVEQHKHYLDEIIEQISEFSKRVILADANLDKVLSAYNKHRDKPIREQAENIIHLFTLTNLGAPAAFKYFDTTIDRKRYTSTKEVLDATLIHQSITGLYETRIDLSQLGGDGGEAAAKGGGGGTLQLDDEYRLYSPLVKPDQNIQFWLEQFPQAWAETAGMGLAKQVPPQVIQLKASATPVSVRQYPLSKEAQEGIRPHVQRLIQQGILVPVQSPWNTPLLPVRKPGTNDYRPVQDLREVNKRVQDIHPTVPNPYNLLCALPPQRSWYTVLDLKDAFFCLRLHPTSQPLFAFEWRDPGTGRTGQLTWTRLPQGFKNSPTIFNEALHRDLANFRIQHPQVTLLQYVDDLLLAGATKQDCLEGTKALLLELSDLGYRASAKKAQICRREVTYLGYSLRDGQRWLTEARKKTVVQIPAPTTAKQVREFLGTAGFCRLWIPGFATLAAPLYPLTKPKGEFSWAPEHQKAFDAIKKALLSAPALALPDVTKPFTLYVDERKGVARGVLTQTLGPWRRPVAYLSKKLDPVASGWPVCLKAIAAVAILVKDADKLTLGQNITVIAPHALENIVRQPPDRWMTNARMTHYQSLLLTERVTFAPPAALNPATLLPEETDEPVTHDCHQLLIEETGVRKDLTDIPLTGEVLTWFTDGSSYVVEGKRMAGAAVVDGTRTIWASSLPEGTSAQKAELMALTQALRLAEGKSINIYTDSRYAFATAHVHGAIYKQRGWLTSAGREIKNKEEILSLLEALHLPKRLAIIHCPGHQKAKDPISRGNQMADRVAKQAAQGVNLLAGKRTADGSEFEKRTADGSEFESPKKKAKVE

SEQ ID NO: 21423 - protein, 2090 aa, synthetic construct
MPAAKRVKLDGGDKKYSIGLDIGTNSVGWAVITDEYKVPSKKFKVLGNTDRHSIKKNLIGALLFDSGETAEATRLKRTARRRYTRRKNRICYLQEIFSNEMAKVDDSFFHRLEESFLVEEDKKHERHPIFGNIVDEVAYHEKYPTIYHLRKKLVDSTDKADLRLIYLALAHMIKFRGHFLIEGDLNPDNSDVDKLFIQLVQTYNQLFEENPINASGVDAKAILSARLSKSRRLENLIAQLPGEKKNGLFGNLIALSLGLTPNFKSNFDLAEDAKLQLSKDTYDDDLDNLLAQIGDQYADLFLAAKNLSDAILLSDILRVNTEITKAPLSASMIKRYDEHHQDLTLLKALVRQQLPEKYKEIFFDQSKNGYAGYIDGGASQEEFYKFIKPILEKMDGTEELLVKLNREDLLRKQRTFDNGSIPHQIHLGELHAILRRQEDFYPFLKDNREKIEKILTFRIPYYVGPLARGNSRFAWMTRKSEETITPWNFEEVVDKGASAQSFIERMTNFDKNLPNEKVLPKHSLLYEYFTVYNELTKVKYVTEGMRKPAFLSGEQKKAIVDLLFKTNRKVTVKQLKEDYFKKIECFDSVEISGVEDRFNASLGTYHDLLKIIKDKDFLDNEENEDILEDIVLTLTLFEDREMIEERLKTYAHLFDDKVMKQLKRRRYTGWGRLSRKLINGIRDKQSGKTILDFLKSDGFANRNFMQLIHDDSLTFKEDIQKAQVSGQGDSLHEHIANLAGSPAIKKGILQTVKVVDELVKVMGRHKPENIVIEMARENQTTQKGQKNSRERMKRIEEGIKELGSQILKEHPVENTQLQNEKLYLYYLQNGRDMYVDQELDINRLSDYDVDHIVPQSFLKDDSIDNKVLTRSDKARGKSDNVPSEEVVKKMKNYWRQLLNAKLITQRKFDNLTKAERGGLSELDKAGFIKRQLVETRQITKHVAQILDSRMNTKYDENDKLIREVKVITLKSKLVSDFRKDFQFYKVREINNYHHAHDAYLNAVVGTALIKKYPKLESEFVYGDYKVYDVRKMIAKSEQEIGKATAKYFFYSNIMNFFKTEITLANGEIRKRPLIETNGETGEIVWDKGRDFATVRKVLSMPQVNIVKKTEVQTGGFSKESILPKRNSDKLIARKKDWDPKKYGGFDSPTVAYSVLVVAKVEKGKSKKLKSVKELLGITIMERSSFEKNPIDFLEAKGYKEVKKDLIIKLPKYSLFELENGRKRMLASAGELQKGNELALPSKYVNFLYLASHYEKLKGSPEDNEQKQLFVEQHKHYLDEIIEQISEFSKRVILADANLDKVLSAYNKHRDKPIREQAENIIHLFTLTNLGAPAAFKYFDTTIDRKRYTSTKEVLDATLIHQSITGLYETRIDLSQLGGDGGPAPGGGEAAAKGGTLQLDDEYRLYSPLVKPDQNIQFWLEQFPQAWAETAGMGLAKQVPPQVIQLKASATPVSVRQYPLSKEAQEGIRPHVQRLIQQGILVPVQSPWNTPLLPVRKPGTNDYRPVQDLREVNKRVQDIHPTVPNPYNLLCALPPQRSWYTVLDLKDAFFCLRLHPTSQPLFAFEWRDPGTGRTGQLTWTRLPQGFKNSPTIFNEALHRDLANFRIQHPQVTLLQYVDDLLLAGATKQDCLEGTKALLLELSDLGYRASAKKAQICRREVTYLGYSLRDGQRWLTEARKKTVVQIPAPTTAKQVREFLGTAGFCRLWIPGFATLAAPLYPLTKPKGEFSWAPEHQKAFDAIKKALLSAPALALPDVTKPFTLYVDERKGVARGVLTQTLGPWRRPVAYLSKKLDPVASGWPVCLKAIAAVAILVKDADKLTLGQNITVIAPHALENIVRQPPDRWMTNARMTHYQSLLLTERVTFAPPAALNPATLLPEETDEPVTHDCHQLLIEETGVRKDLTDIPLTGEVLTWFTDGSSYVVEGKRMAGAAVVDGTRTIWASSLPEGTSAQKAELMALTQALRLAEGKSINIYTDSRYAFATAHVHGAIYKQRGWLTSAGREIKNKEEILSLLEALHLPKRLAIIHCPGHQKAKDPISRGNQMADRVAKQAAQGVNLLAGKRTADGSEFEKRTADGSEFESPKKKAKVE

SEQ ID NO: 21424 - protein, 2087 aa, synthetic construct
MPAAKRVKLDGGDKKYSIGLDIGTNSVGWAVITDEYKVPSKKFKVLGNTDRHSIKKNLIGALLFDSGETAEATRLKRTARRRYTRRKNRICYLQEIFSNEMAKVDDSFFHRLEESFLVEEDKKHERHPIFGNIVDEVAYHEKYPTIYHLRKKLVDSTDKADLRLIYLALAHMIKFRGHFLIEGDLNPDNSDVDKLFIQLVQTYNQLFEENPINASGVDAKAILSARLSKSRRLENLIAQLPGEKKNGLFGNLIALSLGLTPNFKSNFDLAEDAKLQLSKDTYDDDLDNLLAQIGDQYADLFLAAKNLSDAILLSDILRVNTEITKAPLSASMIKRYDEHHQDLTLLKALVRQQLPEKYKEIFFDQSKNGYAGYIDGGASQEEFYKFIKPILEKMDGTEELLVKLNREDLLRKQRTFDNGSIPHQIHLGELHAILRRQEDFYPFLKDNREKIEKILTFRIPYYVGPLARGNSRFAWMTRKSEETITPWNFEEVVDKGASAQSFIERMTNFDKNLPNEKVLPKHSLLYEYFTVYNELTKVKYVTEGMRKPAFLSGEQKKAIVDLLFKTNRKVTVKQLKEDYFKKIECFDSVEISGVEDRFNASLGTYHDLLKIIKDKDFLDNEENEDILEDIVLTLTLFEDREMIEERLKTYAHLFDDKVMKQLKRRRYTGWGRLSRKLINGIRDKQSGKTILDFLKSDGFANRNFMQLIHDDSLTFKEDIQKAQVSGQGDSLHEHIANLAGSPAIKKGILQTVKVVDELVKVMGRHKPENIVIEMARENQTTQKGQKNSRERMKRIEEGIKELGSQILKEHPVENTQLQNEKLYLYYLQNGRDMYVDQELDINRLSDYDVDHIVPQSFLKDDSIDNKVLTRSDKARGKSDNVPSEEVVKKMKNYWRQLLNAKLITQRKFDNLTKAERGGLSELDKAGFIKRQLVETRQITKHVAQILDSRMNTKYDENDKLIREVKVITLKSKLVSDFRKDFQFYKVREINNYHHAHDAYLNAVVGTALIKKYPKLESEFVYGDYKVYDVRKMIAKSEQEIGKATAKYFFYSNIMNFFKTEITLANGEIRKRPLIETNGETGEIVWDKGRDFATVRKVLSMPQVNIVKKTEVQTGGFSKESILPKRNSDKLIARKKDWDPKKYGGFDSPTVAYSVLVVAKVEKGKSKKLKSVKELLGITIMERSSFEKNPIDFLEAKGYKEVKKDLIIKLPKYSLFELENGRKRMLASAGELQKGNELALPSKYVNFLYLASHYEKLKGSPEDNEQKQLFVEQHKHYLDEIIEQISEFSKRVILADANLDKVLSAYNKHRDKPIREQAENIIHLFTLTNLGAPAAFKYFDTTIDRKRYTSTKEVLDATLIHQSITGLYETRIDLSQLGGDGGGSSEAAAKGGTLQLDDEYRLYSPLVKPDQNIQFWLEQFPQAWAETAGMGLAKQVPPQVIQLKASATPVSVRQYPLSKEAQEGIRPHVQRLIQQGILVPVQSPWNTPLLPVRKPGTNDYRPVQDLREVNKRVQDIHPTVPNPYNLLCALPPQRSWYTVLDLKDAFFCLRLHPTSQPLFAFEWRDPGTGRTGQLTWTRLPQGFKNSPTIFNEALHRDLANFRIQHPQVTLLQYVDDLLLAGATKQDCLEGTKALLLELSDLGYRASAKKAQICRREVTYLGYSLRDGQRWLTEARKKTVVQIPAPTTAKQVREFLGTAGFCRLWIPGFATLAAPLYPLTKPKGEFSWAPEHQKAFDAIKKALLSAPALALPDVTKPFTLYVDERKGVARGVLTQTLGPWRRPVAYLSKKLDPVASGWPVCLKAIAAVAILVKDADKLTLGQNITVIAPHALENIVRQPPDRWMTNARMTHYQSLLLTERVTFAPPAALNPATLLPEETDEPVTHDCHQLLIEETGVRKDLTDIPLTGEVLTWFTDGSSYVVEGKRMAGAAVVDGTRTIWASSLPEGTSAQKAELMALTQALRLAEGKSINIYTDSRYAFATAHVHGAIYKQRGWLTSAGREIKNKEEILSLLEALHLPKRLAIIHCPGHQKAKDPISRGNQMADRVAKQAAQGVNLLAGKRTADGSEFEKRTADGSEFESPKKKAKVE

SEQ ID NO: 21425 - protein, 2088 aa, synthetic construct; identical to SEQ ID NO: 400

SEQ ID NO: 21426 - protein, 2088 aa, synthetic construct; identical to SEQ ID NO: 403

SEQ ID NO: 21427 - protein, 2090 aa, synthetic construct
MPAAKRVKLDGGDKKYSIGLDIGTNSVGWAVITDEYKVPSKKFKVLGNTDRHSIKKNLIGALLFDSGETAEATRLKRTARRRYTRRKNRICYLQEIFSNEMAKVDDSFFHRLEESFLVEEDKKHERHPIFGNIVDEVAYHEKYPTIYHLRKKLVDSTDKADLRLIYLALAHMIKFRGHFLIEGDLNPDNSDVDKLFIQLVQTYNQLFEENPINASGVDAKAILSARLSKSRRLENLIAQLPGEKKNGLFGNLIALSLGLTPNFKSNFDLAEDAKLQLSKDTYDDDLDNLLAQIGDQYADLFLAAKNLSDAILLSDILRVNTEITKAPLSASMIKRYDEHHQDLTLLKALVRQQLPEKYKEIFFDQSKNGYAGYIDGGASQEEFYKFIKPILEKMDGTEELLVKLNREDLLRKQRTFDNGSIPHQIHLGELHAILRRQEDFYPFLKDNREKIEKILTFRIPYYVGPLARGNSRFAWMTRKSEETITPWNFEEVVDKGASAQSFIERMTNFDKNLPNEKVLPKHSLLYEYFTVYNELTKVKYVTEGMRKPAFLSGEQKKAIVDLLFKTNRKVTVKQLKEDYFKKIECFDSVEISGVEDRFNASLGTYHDLLKIIKDKDFLDNEENEDILEDIVLTLTLFEDREMIEERLKTYAHLFDDKVMKQLKRRRYTGWGRLSRKLINGIRDKQSGKTILDFLKSDGFANRNFMQLIHDDSLTFKEDIQKAQVSGQGDSLHEHIANLAGSPAIKKGILQTVKVVDELVKVMGRHKPENIVIEMARENQTTQKGQKNSRERMKRIEEGIKELGSQILKEHPVENTQLQNEKLYLYYLQNGRDMYVDQELDINRLSDYDVDHIVPQSFLKDDSIDNKVLTRSDKARGKSDNVPSEEVVKKMKNYWRQLLNAKLITQRKFDNLTKAERGGLSELDKAGFIKRQLVETRQITKHVAQILDSRMNTKYDENDKLIREVKVITLKSKLVSDFRKDFQFYKVREINNYHHAHDAYLNAVVGTALIKKYPKLESEFVYGDYKVYDVRKMIAKSEQEIGKATAKYFFYSNIMNFFKTEITLANGEIRKRPLIETNGETGEIVWDKGRDFATVRKVLSMPQVNIVKKTEVQTGGFSKESILPKRNSDKLIARKKDWDPKKYGGFDSPTVAYSVLVVAKVEKGKSKKLKSVKELLGITIMERSSFEKNPIDFLEAKGYKEVKKDLIIKLPKYSLFELENGRKRMLASAGELQKGNELALPSKYVNFLYLASHYEKLKGSPEDNEQKQLFVEQHKHYLDEIIEQISEFSKRVILADANLDKVLSAYNKHRDKPIREQAENIIHLFTLTNLGAPAAFKYFDTTIDRKRYTSTKEVLDATLIHQSITGLYETRIDLSQLGGDGGPAPEAAAKGSSGGTLQLDDEYRLYSPLVKPDQNIQFWLEQFPQAWAETAGMGLAKQVPPQVIQLKASATPVSVRQYPLSKEAQEGIRPHVQRLIQQGILVPVQSPWNTPLLPVRKPGTNDYRPVQDLREVNKRVQDIHPTVPNPYNLLCALPPQRSWYTVLDLKDAFFCLRLHPTSQPLFAFEWRDPGTGRTGQLTWTRLPQGFKNSPTIFNEALHRDLANFRIQHPQVTLLQYVDDLLLAGATKQDCLEGTKALLLELSDLGYRASAKKAQICRREVTYLGYSLRDGQRWLTEARKKTVVQIPAPTTAKQVREFLGTAGFCRLWIPGFATLAAPLYPLTKPKGEFSWAPEHQKAFDAIKKALLSAPALALPDVTKPFTLYVDERKGVARGVLTQTLGPWRRPVAYLSKKLDPVASGWPVCLKAIAAVAILVKDADKLTLGQNITVIAPHALENIVRQPPDRWMTNARMTHYQSLLLTERVTFAPPAALNPATLLPEETDEPVTHDCHQLLIEETGVRKDLTDIPLTGEVLTWFTDGSSYVVEGKRMAGAAVVDGTRTIWASSLPEGTSAQKAELMALTQALRLAEGKSINIYTDSRYAFATAHVHGAIYKQRGWLTSAGREIKNKEEILSLLEALHLPKRLAIIHCPGHQKAKDPISRGNQMADRVAKQAAQGVNLLAGKRTADGSEFEKRTADGSEFESPKKKAKVE

SEQ ID NO: 21428 - protein, 2090 aa, synthetic construct; identical to SEQ ID NO: 365

SEQ ID NO: 21429 - protein, 2088 aa, synthetic construct; identical to SEQ ID NO: 388

SEQ ID NO: 21430 - protein, 2088 aa, synthetic construct
MPAAKRVKLDGGDKKYSIGLDIGTNSVGWAVITDEYKVPSKKFKVLGNTDRHSIKKNLIGALLFDSGETAEATRLKRTARRRYTRRKNRICYLQEIFSNEMAKVDDSFFHRLEESFLVEEDKKHERHPIFGNIVDEVAYHEKYPTIYHLRKKLVDSTDKADLRLIYLALAHMIKFRGHFLIEGDLNPDNSDVDKLFIQLVQTYNQLFEENPINASGVDAKAILSARLSKSRRLENLIAQLPGEKKNGLFGNLIALSLGLTPNFKSNFDLAEDAKLQLSKDTYDDDLDNLLAQIGDQYADLFLAAKNLSDAILLSDILRVNTEITKAPLSASMIKRYDEHHQDLTLLKALVRQQLPEKYKEIFFDQSKNGYAGYIDGGASQEEFYKFIKPILEKMDGTEELLVKLNREDLLRKQRTFDNGSIPHQIHLGELHAILRRQEDFYPFLKDNREKIEKILTFRIPYYVGPLARGNSRFAWMTRKSEETITPWNFEEVVDKGASAQSFIERMTNFDKNLPNEKVLPKHSLLYEYFTVYNELTKVKYVTEGMRKPAFLSGEQKKAIVDLLFKTNRKVTVKQLKEDYFKKIECFDSVEISGVEDRFNASLGTYHDLLKIIKDKDFLDNEENEDILEDIVLTLTLFEDREMIEERLKTYAHLFDDKVMKQLKRRRYTGWGRLSRKLINGIRDKQSGKTILDFLKSDGFANRNFMQLIHDDSLTFKEDIQKAQVSGQGDSLHEHIANLAGSPAIKKGILQTVKVVDELVKVMGRHKPENIVIEMARENQTTQKGQKNSRERMKRIEEGIKELGSQILKEHPVENTQLQNEKLYLYYLQNGRDMYVDQELDINRLSDYDVDHIVPQSFLKDDSIDNKVLTRSDKARGKSDNVPSEEVVKKMKNYWRQLLNAKLITQRKFDNLTKAERGGLSELDKAGFIKRQLVETRQITKHVAQILDSRMNTKYDENDKLIREVKVITLKSKLVSDFRKDFQFYKVREINNYHHAHDAYLNAVVGTALIKKYPKLESEFVYGDYKVYDVRKMIAKSEQEIGKATAKYFFYSNIMNFFKTEITLANGEIRKRPLIETNGETGEIVWDKGRDFATVRKVLSMPQVNIVKKTEVQTGGFSKESILPKRNSDKLIARKKDWDPKKYGGFDSPTVAYSVLVVAKVEKGKSKKLKSVKELLGITIMERSSFEKNPIDFLEAKGYKEVKKDLIIKLPKYSLFELENGRKRMLASAGELQKGNELALPSKYVNFLYLASHYEKLKGSPEDNEQKQLFVEQHKHYLDEIIEQISEFSKRVILADANLDKVLSAYNKHRDKPIREQAENIIHLFTLTNLGAPAAFKYFDTTIDRKRYTSTKEVLDATLIHQSITGLYETRIDLSQLGGDGGPAPGGSGSSGGTLQLDDEYRLYSPLVKPDQNIQFWLEQFPQAWAETAGMGLAKQVPPQVIQLKASATPVSVRQYPLSKEAQEGIRPHVQRLIQQGILVPVQSPWNTPLLPVRKPGTNDYRPVQDLREVNKRVQDIHPTVPNPYNLLCALPPQRSWYTVLDLKDAFFCLRLHPTSQPLFAFEWRDPGTGRTGQLTWTRLPQGFKNSPTIFNEALHRDLANFRIQHPQVTLLQYVDDLLLAGATKQDCLEGTKALLLELSDLGYRASAKKAQICRREVTYLGYSLRDGQRWLTEARKKTVVQIPAPTTAKQVREFLGTAGFCRLWIPGFATLAAPLYPLTKPKGEFSWAPEHQKAFDAIKKALLSAPALALPDVTKPFTLYVDERKGVARGVLTQTLGPWRRPVAYLSKKLDPVASGWPVCLKAIAAVAILVKDADKLTLGQNITVIAPHALENIVRQPPDRWMTNARMTHYQSLLLTERVTFAPPAALNPATLLPEETDEPVTHDCHQLLIEETGVRKDLTDIPLTGEVLTWFTDGSSYVVEGKRMAGAAVVDGTRTIWASSLPEGTSAQKAELMALTQALRLAEGKSINIYTDSRYAFATAHVHGAIYKQRGWLTSAGREIKNKEEILSLLEALHLPKRLAIIHCPGHQKAKDPISRGNQMADRVAKQAAQGVNLLAGKRTADGSEFEKRTADGSEFESPKKKAKVE

SEQ ID NO: 21431 - protein, 2090 aa, synthetic construct; identical to SEQ ID NO: 349

SEQ ID NO: 21432 - protein, 2099 aa, synthetic construct; identical to SEQ ID NO: 351

SEQ ID NO: 21433 - protein, 2090 aa, synthetic construct
MPAAKRVKLDGGDKKYSIGLDIGTNSVGWAVITDEYKVPSKKFKVLGNTDRHSIKKNLIGALLFDSGETAEATRLKRTARRRYTRRKNRICYLQEIFSNEMAKVDDSFFHRLEESFLVEEDKKHERHPIFGNIVDEVAYHEKYPTIYHLRKKLVDSTDKADLRLIYLALAHMIKFRGHFLIEGDLNPDNSDVDKLFIQLVQTYNQLFEENPINASGVDAKAILSARLSKSRRLENLIAQLPGEKKNGLFGNLIALSLGLTPNFKSNFDLAEDAKLQLSKDTYDDDLDNLLAQIGDQYADLFLAAKNLSDAILLSDILRVNTEITKAPLSASMIKRYDEHHQDLTLLKALVRQQLPEKYKEIFFDQSKNGYAGYIDGGASQEEFYKFIKPILEKMDGTEELLVKLNREDLLRKQRTFDNGSIPHQIHLGELHAILRRQEDFYPFLKDNREKIEKILTFRIPYYVGPLARGNSRFAWMTRKSEETITPWNFEEVVDKGASAQSFIERMTNFDKNLPNEKVLPKHSLLYEYFTVYNELTKVKYVTEGMRKPAFLSGEQKKAIVDLLFKTNRKVTVKQLKEDYFKKIECFDSVEISGVEDRFNASLGTYHDLLKIIKDKDFLDNEENEDILEDIVLTLTLFEDREMIEERLKTYAHLFDDKVMKQLKRRRYTGWGRLSRKLINGIRDKQSGKTILDFLKSDGFANRNFMQLIHDDSLTFKEDIQKAQVSGQGDSLHEHIANLAGSPAIKKGILQTVKVVDELVKVMGRHKPENIVIEMARENQTTQKGQKNSRERMKRIEEGIKELGSQILKEHPVENTQLQNEKLYLYYLQNGRDMYVDQELDINRLSDYDVDHIVPQSFLKDDSIDNKVLTRSDKARGKSDNVPSEEVVKKMKNYWRQLLNAKLITQRKFDNLTKAERGGLSELDKAGFIKRQLVETRQITKHVAQILDSRMNTKYDENDKLIREVKVITLKSKLVSDFRKDFQFYKVREINNYHHAHDAYLNAVVGTALIKKYPKLESEFVYGDYKVYDVRKMIAKSEQEIGKATAKYFFYSNIMNFFKTEITLANGEIRKRPLIETNGETGEIVWDKGRDFATVRKVLSMPQVNIVKKTEVQTGGFSKESILPKRNSDKLIARKKDWDPKKYGGFDSPTVAYSVLVVAKVEKGKSKKLKSVKELLGITIMERSSFEKNPIDFLEAKGYKEVKKDLIIKLPKYSLFELENGRKRMLASAGELQKGNELALPSKYVNFLYLASHYEKLKGSPEDNEQKQLFVEQHKHYLDEIIEQISEFSKRVILADANLDKVLSAYNKHRDKPIREQAENIIHLFTLTNLGAPAAFKYFDTTIDRKRYTSTKEVLDATLIHQSITGLYETRIDLSQLGGDGGPAPGGSEAAAKGGTLQLDDEYRLYSPLVKPDQNIQFWLEQFPQAWAETAGMGLAKQVPPQVIQLKASATPVSVRQYPLSKEAQEGIRPHVQRLIQQGILVPVQSPWNTPLLPVRKPGTNDYRPVQDLREVNKRVQDIHPTVPNPYNLLCALPPQRSWYTVLDLKDAFFCLRLHPTSQPLFAFEWRDPGTGRTGQLTWTRLPQGFKNSPTIFNEALHRDLANFRIQHPQVTLLQYVDDLLLAGATKQDCLEGTKALLLELSDLGYRASAKKAQICRREVTYLGYSLRDGQRWLTEARKKTVVQIPAPTTAKQVREFLGTAGFCRLWIPGFATLAAPLYPLTKPKGEFSWAPEHQKAFDAIKKALLSAPALALPDVTKPFTLYVDERKGVARGVLTQTLGPWRRPVAYLSKKLDPVASGWPVCLKAIAAVAILVKDADKLTLGQNITVIAPHALENIVRQPPDRWMTNARMTHYQSLLLTERVTFAPPAALNPATLLPEETDEPVTHDCHQLLIEETGVRKDLTDIPLTGEVLTWFTDGSSYVVEGKRMAGAAVVDGTRTIWASSLPEGTSAQKAELMALTQALRLAEGKSINIYTDSRYAFATAHVHGAIYKQRGWLTSAGREIKNKEEILSLLEALHLPKRLAIIHCPGHQKAKDPISRGNQMADRVAKQAAQGVNLLAGKRTADGSEFEKRTADGSEFESPKKKAKVE

SEQ ID NO: 21434 - protein, 2090 aa, synthetic construct; identical to SEQ ID NO: 363

SEQ ID NO: 21435 - protein, 2112 aa, synthetic construct
MPAAKRVKLDGGDKKYSIGLDIGTNSVGWAVITDEYKVPSKKFKVLGNTDRHSIKKNLIGALLFDSGETAEATRLKRTARRRYTRRKNRICYLQEIFSNEMAKVDDSFFHRLEESFLVEEDKKHERHPIFGNIVDEVAYHEKYPTIYHLRKKLVDSTDKADLRLIYLALAHMIKFRGHFLIEGDLNPDNSDVDKLFIQLVQTYNQLFEENPINASGVDAKAILSARLSKSRRLENLIAQLPGEKKNGLFGNLIALSLGLTPNFKSNFDLAEDAKLQLSKDTYDDDLDNLLAQIGDQYADLFLAAKNLSDAILLSDILRVNTEITKAPLSASMIKRYDEHHQDLTLLKALVRQQLPEKYKEIFFDQSKNGYAGYIDGGASQEEFYKFIKPILEKMDGTEELLVKLNREDLLRKQRTFDNGSIPHQIHLGELHAILRRQEDFYPFLKDNREKIEKILTFRIPYYVGPLARGNSRFAWMTRKSEETITPWNFEEVVDKGASAQSFIERMTNFDKNLPNEKVLPKHSLLYEYFTVYNELTKVKYVTEGMRKPAFLSGEQKKAIVDLLFKTNRKVTVKQLKEDYFKKIECFDSVEISGVEDRFNASLGTYHDLLKIIKDKDFLDNEENEDILEDIVLTLTLFEDREMIEERLKTYAHLFDDKVMKQLKRRRYTGWGRLSRKLINGIRDKQSGKTILDFLKSDGFANRNFMQLIHDDSLTFKEDIQKAQVSGQGDSLHEHIANLAGSPAIKKGILQTVKVVDELVKVMGRHKPENIVIEMARENQTTQKGQKNSRERMKRIEEGIKELGSQILKEHPVENTQLQNEKLYLYYLQNGRDMYVDQELDINRLSDYDVDHIVPQSFLKDDSIDNKVLTRSDKARGKSDNVPSEEVVKKMKNYWRQLLNAKLITQRKFDNLTKAERGGLSELDKAGFIKRQLVETRQITKHVAQILDSRMNTKYDENDKLIREVKVITLKSKLVSDFRKDFQFYKVREINNYHHAHDAYLNAVVGTALIKKYPKLESEFVYGDYKVYDVRKMIAKSEQEIGKATAKYFFYSNIMNFFKTEITLANGEIRKRPLIETNGETGEIVWDKGRDFATVRKVLSMPQVNIVKKTEVQTGGFSKESILPKRNSDKLIARKKDWDPKKYGGFDSPTVAYSVLVVAKVEKGKSKKLKSVKELLGITIMERSSFEKNPIDFLEAKGYKEVKKDLIIKLPKYSLFELENGRKRMLASAGELQKGNELALPSKYVNFLYLASHYEKLKGSPEDNEQKQLFVEQHKHYLDEIIEQISEFSKRVILADANLDKVLSAYNKHRDKPIREQAENIIHLFTLTNLGAPAAFKYFDTTIDRKRYTSTKEVLDATLIHQSITGLYETRIDLSQLGGDGGSGGSSGGSSGSETPGTSESATPESSGGSSGGSSGGTLQLDDEYRLYSPLVKPDQNIQFWLEQFPQAWAETAGMGLAKQVPPQVIQLKASATPVSVRQYPLSKEAQEGIRPHVQRLIQQGILVPVQSPWNTPLLPVRKPGTNDYRPVQDLREVNKRVQDIHPTVPNPYNLLCALPPQRSWYTVLDLKDAFFCLRLHPTSQPLFAFEWRDPGTGRTGQLTWTRLPQGFKNSPTIFNEALHRDLANFRIQHPQVTLLQYVDDLLLAGATKQDCLEGTKALLLELSDLGYRASAKKAQICRREVTYLGYSLRDGQRWLTEARKKTVVQIPAPTTAKQVREFLGTAGFCRLWIPGFATLAAPLYPLTKPKGEFSWAPEHQKAFDAIKKALLSAPALALPDVTKPFTLYVDERKGVARGVLTQTLGPWRRPVAYLSKKLDPVASGWPVCLKAIAAVAILVKDADKLTLGQNITVIAPHALENIVRQPPDRWMTNARMTHYQSLLLTERVTFAPPAALNPATLLPEETDEPVTHDCHQLLIEETGVRKDLTDIPLTGEVLTWFTDGSSYVVEGKRMAGAAVVDGTRTIWASSLPEGTSAQKAELMALTQALRLAEGKSINIYTDSRYAFATAHVHGAIYKQRGWLTSAGREIKNKEEILSLLEALHLPKRLAIIHCPGHQKAKDPISRGNQMADRVAKQAAQGVNLLAGKRTADGSEFEKRTADGSEFESPKKKAKVE

SEQ ID NO: 21436 - protein, 2090 aa, synthetic construct
MPAAKRVKLDGGDKKYSIGLDIGTNSVGWAVITDEYKVPSKKFKVLGNTDRHSIKKNLIGALLFDSGETAEATRLKRTARRRYTRRKNRICYLQEIFSNEMAKVDDSFFHRLEESFLVEEDKKHERHPIFGNIVDEVAYHEKYPTIYHLRKKLVDSTDKADLRLIYLALAHMIKFRGHFLIEGDLNPDNSDVDKLFIQLVQTYNQLFEENPINASGVDAKAILSARLSKSRRLENLIAQLPGEKKNGLFGNLIALSLGLTPNFKSNFDLAEDAKLQLSKDTYDDDLDNLLAQIGDQYADLFLAAKNLSDAILLSDILRVNTEITKAPLSASMIKRYDEHHQDLTLLKALVRQQLPEKYKEIFFDQSKNGYAGYIDGGASQEEFYKFIKPILEKMDGTEELLVKLNREDLLRKQRTFDNGSIPHQIHLGELHAILRRQEDFYPFLKDNREKIEKILTFRIPYYVGPLARGNSRFAWMTRKSEETITPWNFEEVVDKGASAQSFIERMTNFDKNLPNEKVLPKHSLLYEYFTVYNELTKVKYVTEGMRKPAFLSGEQKKAIVDLLFKTNRKVTVKQLKEDYFKKIECFDSVEISGVEDRFNASLGTYHDLLKIIKDKDFLDNEENEDILEDIVLTLTLFEDREMIEERLKTYAHLFDDKVMKQLKRRRYTGWGRLSRKLINGIRDKQSGKTILDFLKSDGFANRNFMQLIHDDSLTFKEDIQKAQVSGQGDSLHEHIANLAGSPAIKKGILQTVKVVDELVKVMGRHKPENIVIEMARENQTTQKGQKNSRERMKRIEEGIKELGSQILKEHPVENTQLQNEKLYLYYLQNGRDMYVDQELDINRLSDYDVDHIVPQSFLKDDSIDNKVLTRSDKARGKSDNVPSEEVVKKMKNYWRQLLNAKLITQRKFDNLTKAERGGLSELDKAGFIKRQLVETRQITKHVAQILDSRMNTKYDENDKLIREVKVITLKSKLVSDFRKDFQFYKVREINNYHHAHDAYLNAVVGTALIKKYPKLESEFVYGDYKVYDVRKMIAKSEQEIGKATAKYFFYSNIMNFFKTEITLANGEIRKRPLIETNGETGEIVWDKGRDFATVRKVLSMPQVNIVKKTEVQTGGFSKESILPKRNSDKLIARKKDWDPKKYGGFDSPTVAYSVLVVAKVEKGKSKKLKSVKELLGITIMERSSFEKNPIDFLEAKGYKEVKKDLIIKLPKYSLFELENGRKRMLASAGELQKGNELALPSKYVNFLYLASHYEKLKGSPEDNEQKQLFVEQHKHYLDEIIEQISEFSKRVILADANLDKVLSAYNKHRDKPIREQAENIIHLFTLTNLGAPAAFKYFDTTIDRKRYTSTKEVLDATLIHQSITGLYETRIDLSQLGGDGGEAAAKGGSPAPGGTLQLDDEYRLYSPLVKPDQNIQFWLEQFPQAWAETAGMGLAKQVPPQVIQLKASATPVSVRQYPLSKEAQEGIRPHVQRLIQQGILVPVQSPWNTPLLPVRKPGTNDYRPVQDLREVNKRVQDIHPTVPNPYNLLCALPPQRSWYTVLDLKDAFFCLRLHPTSQPLFAFEWRDPGTGRTGQLTWTRLPQGFKNSPTIFNEALHRDLANFRIQHPQVTLLQYVDDLLLAGATKQDCLEGTKALLLELSDLGYRASAKKAQICRREVTYLGYSLRDGQRWLTEARKKTVVQIPAPTTAKQVREFLGTAGFCRLWIPGFATLAAPLYPLTKPKGEFSWAPEHQKAFDAIKKALLSAPALALPDVTKPFTLYVDERKGVARGVLTQTLGPWRRPVAYLSKKLDPVASGWPVCLKAIAAVAILVKDADKLTLGQNITVIAPHALENIVRQPPDRWMTNARMTHYQSLLLTERVTFAPPAALNPATLLPEETDEPVTHDCHQLLIEETGVRKDLTDIPLTGEVLTWFTDGSSYVVEGKRMAGAAVVDGTRTIWASSLPEGTSAQKAELMALTQALRLAEGKSINIYTDSRYAFATAHVHGAIYKQRGWLTSAGREIKNKEEILSLLEALHLPKRLAIIHCPGHQKAKDPISRGNQMADRVAKQAAQGVNLLAGKRTADGSEFEKRTADGSEFESPKKKAKVE

SEQ ID NO: 21437 - protein, 2097 aa, synthetic construct
MPAAKRVKLDGGDKKYSIGLDIGTNSVGWAVITDEYKVPSKKFKVLGNTDRHSIKKNLIGALLFDSGETAEATRLKRTARRRYTRRKNRICYLQEIFSNEMAKVDDSFFHRLEESFLVEEDKKHERHPIFGNIVDEVAYHEKYPTIYHLRKKLVDSTDKADLRLIYLALAHMIKFRGHFLIEGDLNPDNSDVDKLFIQLVQTYNQLFEENPINASGVDAKAILSARLSKSRRLENLIAQLPGEKKNGLFGNLIALSLGLTPNFKSNFDLAEDAKLQLSKDTYDDDLDNLLAQIGDQYADLFLAAKNLSDAILLSDILRVNTEITKAPLSASMIKRYDEHHQDLTLLKALVRQQLPEKYKEIFFDQSKNGYAGYIDGGASQEEFYKFIKPILEKMDGTEELLVKLNREDLLRKQRTFDNGSIPHQIHLGELHAILRRQEDFYPFLKDNREKIEKILTFRIPYYVGPLARGNSRFAWMTRKSEETITPWNFEEVVDKGASAQSFIERMTNFDKNLPNEKVLPKHSLLYEYFTVYNELTKVKYVTEGMRKPAFLSGEQKKAIVDLLFKTNRKVTVKQLKEDYFKKIECFDSVEISGVEDRFNASLGTYHDLLKIIKDKDFLDNEENEDILEDIVLTLTLFEDREMIEERLKTYAHLFDDKVMKQLKRRRYTGWGRLSRKLINGIRDKQSGKTILDFLKSDGFANRNFMQLIHDDSLTFKEDIQKAQVSGQGDSLHEHIANLAGSPAIKKGILQTVKVVDELVKVMGRHKPENIVIEMARENQTTQKGQKNSRERMKRIEEGIKELGSQILKEHPVENTQLQNEKLYLYYLQNGRDMYVDQELDINRLSDYDVDHIVPQSFLKDDSIDNKVLTRSDKARGKSDNVPSEEVVKKMKNYWRQLLNAKLITQRKFDNLTKAERGGLSELDKAGFIKRQLVETRQITKHVAQILDSRMNTKYDENDKLIREVKVITLKSKLVSDFRKDFQFYKVREINNYHHAHDAYLNAVVGTALIKKYPKLESEFVYGDYKVYDVRKMIAKSEQEIGKATAKYFFYSNIMNFFKTEITLANGEIRKRPLIETNGETGEIVWDKGRDFATVRKVLSMPQVNIVKKTEVQTGGFSKESILPKRNSDKLIARKKDWDPKKYGGFDSPTVAYSVLVVAKVEKGKSKKLKSVKELLGITIMERSSFEKNPIDFLEAKGYKEVKKDLIIKLPKYSLFELENGRKRMLASAGELQKGNELALPSKYVNFLYLASHYEKLKGSPEDNEQKQLFVEQHKHYLDEIIEQISEFSKRVILADANLDKVLSAYNKHRDKPIREQAENIIHLFTLTNLGAPAAFKYFDTTIDRKRYTSTKEVLDATLIHQSITGLYETRIDLSQLGGDGGGGSGGSGGSGGSGGSGGSGGTLQLDDEYRLYSPLVKPDQNIQFWLEQFPQAWAETAGMGLAKQVPPQVIQLKASATPVSVRQYPLSKEAQEGIRPHVQRLIQQGILVPVQSPWNTPLLPVRKPGTNDYRPVQDLREVNKRVQDIHPTVPNPYNLLCALPPQRSWYTVLDLKDAFFCLRLHPTSQPLFAFEWRDPGTGRTGQLTWTRLPQGFKNSPTIFNEALHRDLANFRIQHPQVTLLQYVDDLLLAGATKQDCLEGTKALLLELSDLGYRASAKKAQICRREVTYLGYSLRDGQRWLTEARKKTVVQIPAPTTAKQVREFLGTAGFCRLWIPGFATLAAPLYPLTKPKGEFSWAPEHQKAFDAIKKALLSAPALALPDVTKPFTLYVDERKGVARGVLTQTLGPWRRPVAYLSKKLDPVASGWPVCLKAIAAVAILVKDADKLTLGQNITVIAPHALENIVRQPPDRWMTNARMTHYQSLLLTERVTFAPPAALNPATLLPEETDEPVTHDCHQLLIEETGVRKDLTDIPLTGEVLTWFTDGSSYVVEGKRMAGAAVVDGTRTIWASSLPEGTSAQKAELMALTQALRLAEGKSINIYTDSRYAFATAHVHGAIYKQRGWLTSAGREIKNKEEILSLLEALHLPKRLAIIHCPGHQKAKDPISRGNQMADRVAKQAAQGVNLLAGKRTADGSEFEKRTADGSEFESPKKKAKVE

SEQ ID NO: 21438 - protein, 2085 aa, synthetic construct
MPAAKRVKLDGGDKKYSIGLDIGTNSVGWAVITDEYKVPSKKFKVLGNTDRHSIKKNLIGALLFDSGETAEATRLKRTARRRYTRRKNRICYLQEIFSNEMAKVDDSFFHRLEESFLVEEDKKHERHPIFGNIVDEVAYHEKYPTIYHLRKKLVDSTDKADLRLIYLALAHMIKFRGHFLIEGDLNPDNSDVDKLFIQLVQTYNQLFEENPINASGVDAKAILSARLSKSRRLENLIAQLPGEKKNGLFGNLIALSLGLTPNFKSNFDLAEDAKLQLSKDTYDDDLDNLLAQIGDQYADLFLAAKNLSDAILLSDILRVNTEITKAPLSASMIKRYDEHHQDLTLLKALVRQQLPEKYKEIFFDQSKNGYAGYIDGGASQEEFYKFIKPILEKMDGTEELLVKLNREDLLRKQRTFDNGSIPHQIHLGELHAILRRQEDFYPFLKDNREKIEKILTFRIPYYVGPLARGNSRFAWMTRKSEETITPWNFEEVVDKGASAQSFIERMTNFDKNLPNEKVLPKHSLLYEYFTVYNELTKVKYVTEGMRKPAFLSGEQKKAIVDLLFKTNRKVTVKQLKEDYFKKIECFDSVEISGVEDRFNASLGTYHDLLKIIKDKDFLDNEENEDILEDIVLTLTLFEDREMIEERLKTYAHLFDDKVMKQLKRRRYTGWGRLSRKLINGIRDKQSGKTILDFLKSDGFANRNFMQLIHDDSLTFKEDIQKAQVSGQGDSLHEHIANLAGSPAIKKGILQTVKVVDELVKVMGRHKPENIVIEMARENQTTQKGQKNSRERMKRIEEGIKELGSQILKEHPVENTQLQNEKLYLYYLQNGRDMYVDQELDINRLSDYDVDHIVPQSFLKDDSIDNKVLTRSDKARGKSDNVPSEEVVKKMKNYWRQLLNAKLITQRKFDNLTKAERGGLSELDKAGFIKRQLVETRQITKHVAQILDSRMNTKYDENDKLIREVKVITLKSKLVSDFRKDFQFYKVREINNYHHAHDAYLNAVVGTALIKKYPKLESEFVYGDYKVYDVRKMIAKSEQEIGKATAKYFFYSNIMNFFKTEITLANGEIRKRPLIETNGETGEIVWDKGRDFATVRKVLSMPQVNIVKKTEVQTGGFSKESILPKRNSDKLIARKKDWDPKKYGGFDSPTVAYSVLVVAKVEKGKSKKLKSVKELLGITIMERSSFEKNPIDFLEAKGYKEVKKDLIIKLPKYSLFELENGRKRMLASAGELQKGNELALPSKYVNFLYLASHYEKLKGSPEDNEQKQLFVEQHKHYLDEIIEQISEFSKRVILADANLDKVLSAYNKHRDKPIREQAENIIHLFTLTNLGAPAAFKYFDTTIDRKRYTSTKEVLDATLIHQSITGLYETRIDLSQLGGDGGGGGPAPGGTLQLDDEYRLYSPLVKPDQNIQFWLEQFPQAWAETAGMGLAKQVPPQVIQLKASATPVSVRQYPLSKEAQEGIRPHVQRLIQQGILVPVQSPWNTPLLPVRKPGTNDYRPVQDLREVNKRVQDIHPTVPNPYNLLCALPPQRSWYTVLDLKDAFFCLRLHPTSQPLFAFEWRDPGTGRTGQLTWTRLPQGFKNSPTIFNEALHRDLANFRIQHPQVTLLQYVDDLLLAGATKQDCLEGTKALLLELSDLGYRASAKKAQICRREVTYLGYSLRDGQRWLTEARKKTVVQIPAPTTAKQVREFLGTAGFCRLWIPGFATLAAPLYPLTKPKGEFSWAPEHQKAFDAIKKALLSAPALALPDVTKPFTLYVDERKGVARGVLTQTLGPWRRPVAYLSKKLDPVASGWPVCLKAIAAVAILVKDADKLTLGQNITVIAPHALENIVRQPPDRWMTNARMTHYQSLLLTERVTFAPPAALNPATLLPEETDEPVTHDCHQLLIEETGVRKDLTDIPLTGEVLTWFTDGSSYVVEGKRMAGAAVVDGTRTIWASSLPEGTSAQKAELMALTQALRLAEGKSINIYTDSRYAFATAHVHGAIYKQRGWLTSAGREIKNKEEILSLLEALHLPKRLAIIHCPGHQKAKDPISRGNQMADRVAKQAAQGVNLLAGKRTADGSEFEKRTADGSEFESPKKKAKVE

SEQ ID NO: 21439 - protein, 2088 aa, synthetic construct; identical to SEQ ID NO: 384

SEQ ID NO: 21440 - protein, 2091 aa, synthetic construct; identical to SEQ ID NO: 377

SEQ ID NO: 21441 - protein, 2090 aa, synthetic construct
MPAAKRVKLDGGDKKYSIGLDIGTNSVGWAVITDEYKVPSKKFKVLGNTDRHSIKKNLIGALLFDSGETAEATRLKRTARRRYTRRKNRICYLQEIFSNEMAKVDDSFFHRLEESFLVEEDKKHERHPIFGNIVDEVAYHEKYPTIYHLRKKLVDSTDKADLRLIYLALAHMIKFRGHFLIEGDLNPDNSDVDKLFIQLVQTYNQLFEENPINASGVDAKAILSARLSKSRRLENLIAQLPGEKKNGLFGNLIALSLGLTPNFKSNFDLAEDAKLQLSKDTYDDDLDNLLAQIGDQYADLFLAAKNLSDAILLSDILRVNTEITKAPLSASMIKRYDEHHQDLTLLKALVRQQLPEKYKEIFFDQSKNGYAGYIDGGASQEEFYKFIKPILEKMDGTEELLVKLNREDLLRKQRTFDNGSIPHQIHLGELHAILRRQEDFYPFLKDNREKIEKILTFRIPYYVGPLARGNSRFAWMTRKSEETITPWNFEEVVDKGASAQSFIERMTNFDKNLPNEKVLPKHSLLYEYFTVYNELTKVKYVTEGMRKPAFLSGEQKKAIVDLLFKTNRKVTVKQLKEDYFKKIECFDSVEISGVEDRFNASLGTYHDLLKIIKDKDFLDNEENEDILEDIVLTLTLFEDREMIEERLKTYAHLFDDKVMKQLKRRRYTGWGRLSRKLINGIRDKQSGKTILDFLKSDGFANRNFMQLIHDDSLTFKEDIQKAQVSGQGDSLHEHIANLAGSPAIKKGILQTVKVVDELVKVMGRHKPENIVIEMARENQTTQKGQKNSRERMKRIEEGIKELGSQILKEHPVENTQLQNEKLYLYYLQNGRDMYVDQELDINRLSDYDVDHIVPQSFLKDDSIDNKVLTRSDKARGKSDNVPSEEVVKKMKNYWRQLLNAKLITQRKFDNLTKAERGGLSELDKAGFIKRQLVETRQITKHVAQILDSRMNTKYDENDKLIREVKVITLKSKLVSDFRKDFQFYKVREINNYHHAHDAYLNAVVGTALIKKYPKLESEFVYGDYKVYDVRKMIAKSEQEIGKATAKYFFYSNIMNFFKTEITLANGEIRKRPLIETNGETGEIVWDKGRDFATVRKVLSMPQVNIVKKTEVQTGGFSKESILPKRNSDKLIARKKDWDPKKYGGFDSPTVAYSVLVVAKVEKGKSKKLKSVKELLGITIMERSSFEKNPIDFLEAKGYKEVKKDLIIKLPKYSLFELENGRKRMLASAGELQKGNELALPSKYVNFLYLASHYEKLKGSPEDNEQKQLFVEQHKHYLDEIIEQISEFSKRVILADANLDKVLSAYNKHRDKPIREQAENIIHLFTLTNLGAPAAFKYFDTTIDRKRYTSTKEVLDATLIHQSITGLYETRIDLSQLGGDGGEAAAKGGGGSSGGTLQLDDEYRLYSPLVKPDQNIQFWLEQFPQAWAETAGMGLAKQVPPQVIQLKASATPVSVRQYPLSKEAQEGIRPHVQRLIQQGILVPVQSPWNTPLLPVRKPGTNDYRPVQDLREVNKRVQDIHPTVPNPYNLLCALPPQRSWYTVLDLKDAFFCLRLHPTSQPLFAFEWRDPGTGRTGQLTWTRLPQGFKNSPTIFNEALHRDLANFRIQHPQVTLLQYVDDLLLAGATKQDCLEGTKALLLELSDLGYRASAKKAQICRREVTYLGYSLRDGQRWLTEARKKTVVQIPAPTTAKQVREFLGTAGFCRLWIPGFATLAAPLYPLTKPKGEFSWAPEHQKAFDAIKKALLSAPALALPDVTKPFTLYVDERKGVARGVLTQTLGPWRRPVAYLSKKLDPVASGWPVCLKAIAAVAILVKDADKLTLGQNITVIAPHALENIVRQPPDRWMTNARMTHYQSLLLTERVTFAPPAALNPATLLPEETDEPVTHDCHQLLIEETGVRKDLTDIPLTGEVLTWFTDGSSYVVEGKRMAGAAVVDGTRTIWASSLPEGTSAQKAELMALTQALRLAEGKSINIYTDSRYAFATAHVHGAIYKQRGWLTSAGREIKNKEEILSLLEALHLPKRLAIIHCPGHQKAKDPISRGNQMADRVAKQAAQGVNLLAGKRTADGSEFEKRTADGSEFESPKKKAKVE

SEQ ID NO: 21442 - protein, 2084 aa, synthetic construct; identical to SEQ ID NO: 392

SEQ ID NO: 21443 - protein, 2085 aa, synthetic construct
MPAAKRVKLDGGDKKYSIGLDIGTNSVGWAVITDEYKVPSKKFKVLGNTDRHSIKKNLIGALLFDSGETAEATRLKRTARRRYTRRKNRICYLQEIFSNEMAKVDDSFFHRLEESFLVEEDKKHERHPIFGNIVDEVAYHEKYPTIYHLRKKLVDSTDKADLRLIYLALAHMIKFRGHFLIEGDLNPDNSDVDKLFIQLVQTYNQLFEENPINASGVDAKAILSARLSKSRRLENLIAQLPGEKKNGLFGNLIALSLGLTPNFKSNFDLAEDAKLQLSKDTYDDDLDNLLAQIGDQYADLFLAAKNLSDAILLSDILRVNTEITKAPLSASMIKRYDEHHQDLTLLKALVRQQLPEKYKEIFFDQSKNGYAGYIDGGASQEEFYKFIKPILEKMDGTEELLVKLNREDLLRKQRTFDNGSIPHQIHLGELHAILRRQEDFYPFLKDNREKIEKILTFRIPYYVGPLARGNSRFAWMTRKSEETITPWNFEEVVDKGASAQSFIERMTNFDKNLPNEKVLPKHSLLYEYFTVYNELTKVKYVTEGMRKPAFLSGEQKKAIVDLLFKTNRKVTVKQLKEDYFKKIECFDSVEISGVEDRFNASLGTYHDLLKIIKDKDFLDNEENEDILEDIVLTLTLFEDREMIEERLKTYAHLFDDKVMKQLKRRRYTGWGRLSRKLINGIRDKQSGKTILDFLKSDGFANRNFMQLIHDDSLTFKEDIQKAQVSGQGDSLHEHIANLAGSPAIKKGILQTVKVVDELVKVMGRHKPENIVIEMARENQTTQKGQKNSRERMKRIEEGIKELGSQILKEHPVENTQLQNEKLYLYYLQNGRDMYVDQELDINRLSDYDVDHIVPQSFLKDDSIDNKVLTRSDKARGKSDNVPSEEVVKKMKNYWRQLLNAKLITQRKFDNLTKAERGGLSELDKAGFIKRQLVETRQITKHVAQILDSRMNTKYDENDKLIREVKVITLKSKLVSDFRKDFQFYKVREINNYHHAHDAYLNAVVGTALIKKYPKLESEFVYGDYKVYDVRKMIAKSEQEIGKATAKYFFYSNIMNFFKTEITLANGEIRKRPLIETNGETGEIVWDKGRDFATVRKVLSMPQVNIVKKTEVQTGGFSKESILPKRNSDKLIARKKDWDPKKYGGFDSPTVAYSVLVVAKVEKGKSKKLKSVKELLGITIMERSSFEKNPIDFLEAKGYKEVKKDLIIKLPKYSLFELENGRKRMLASAGELQKGNELALPSKYVNFLYLASHYEKLKGSPEDNEQKQLFVEQHKHYLDEIIEQISEFSKRVILADANLDKVLSAYNKHRDKPIREQAENIIHLFTLTNLGAPAAFKYFDTTIDRKRYTSTKEVLDATLIHQSITGLYETRIDLSQLGGDGGGSSPAPGGTLQLDDEYRLYSPLVKPDQNIQFWLEQFPQAWAETAGMGLAKQVPPQVIQLKASATPVSVRQYPLSKEAQEGIRPHVQRLIQQGILVPVQSPWNTPLLPVRKPGTNDYRPVQDLREVNKRVQDIHPTVPNPYNLLCALPPQRSWYTVLDLKDAFFCLRLHPTSQPLFAFEWRDPGTGRTGQLTWTRLPQGFKNSPTIFNEALHRDLANFRIQHPQVTLLQYVDDLLLAGATKQDCLEGTKALLLELSDLGYRASAKKAQICRREVTYLGYSLRDGQRWLTEARKKTVVQIPAPTTAKQVREFLGTAGFCRLWIPGFATLAAPLYPLTKPKGEFSWAPEHQKAFDAIKKALLSAPALALPDVTKPFTLYVDERKGVARGVLTQTLGPWRRPVAYLSKKLDPVASGWPVCLKAIAAVAILVKDADKLTLGQNITVIAPHALENIVRQPPDRWMTNARMTHYQSLLLTERVTFAPPAALNPATLLPEETDEPVTHDCHQLLIEETGVRKDLTDIPLTGEVLTWFTDGSSYVVEGKRMAGAAVVDGTRTIWASSLPEGTSAQKAELMALTQALRLAEGKSINIYTDSRYAFATAHVHGAIYKQRGWLTSAGREIKNKEEILSLLEALHLPKRLAIIHCPGHQKAKDPISRGNQMADRVAKQAAQGVNLLAGKRTADGSEFEKRTADGSEFESPKKKAKVE

SEQ ID NO: 21444 - protein, 2083 aa, synthetic construct
MPAAKRVKLDGGDKKYSIGLDIGTNSVGWAVITDEYKVPSKKFKVLGNTDRHSIKKNLIGALLFDSGETAEATRLKRTARRRYTRRKNRICYLQEIFSNEMAKVDDSFFHRLEESFLVEEDKKHERHPIFGNIVDEVAYHEKYPTIYHLRKKLVDSTDKADLRLIYLALAHMIKFRGHFLIEGDLNPDNSDVDKLFIQLVQTYNQLFEENPINASGVDAKAILSARLSKSRRLENLIAQLPGEKKNGLFGNLIALSLGLTPNFKSNFDLAEDAKLQLSKDTYDDDLDNLLAQIGDQYADLFLAAKNLSDAILLSDILRVNTEITKAPLSASMIKRYDEHHQDLTLLKALVRQQLPEKYKEIFFDQSKNGYAGYIDGGASQEEFYKFIKPILEKMDGTEELLVKLNREDLLRKQRTFDNGSIPHQIHLGELHAILRRQEDFYPFLKDNREKIEKILTFRIPYYVGPLARGNSRFAWMTRKSEETITPWNFEEVVDKGASAQSFIERMTNFDKNLPNEKVLPKHSLLYEYFTVYNELTKVKYVTEGMRKPAFLSGEQKKAIVDLLFKTNRKVTVKQLKEDYFKKIECFDSVEISGVEDRFNASLGTYHDLLKIIKDKDFLDNEENEDILEDIVLTLTLFEDREMIEERLKTYAHLFDDKVMKQLKRRRYTGWGRLSRKLINGIRDKQSGKTILDFLKSDGFANRNFMQLIHDDSLTFKEDIQKAQVSGQGDSLHEHIANLAGSPAIKKGILQTVKVVDELVKVMGRHKPENIVIEMARENQTTQKGQKNSRERMKRIEEGIKELGSQILKEHPVENTQLQNEKLYLYYLQNGRDMYVDQELDINRLSDYDVDHIVPQSFLKDDSIDNKVLTRSDKARGKSDNVPSEEVVKKMKNYWRQLLNAKLITQRKFDNLTKAERGGLSELDKAGFIKRQLVETRQITKHVAQILDSRMNTKYDENDKLIREVKVITLKSKLVSDFRKDFQFYKVREINNYHHAHDAYLNAVVGTALIKKYPKLESEFVYGDYKVYDVRKMIAKSEQEIGKATAKYFFYSNIMNFFKTEITLANGEIRKRPLIETNGETGEIVWDKGRDFATVRKVLSMPQVNIVKKTEVQTGGFSKESILPKRNSDKLIARKKDWDPKKYGGFDSPTVAYSVLVVAKVEKGKSKKLKSVKELLGITIMERSSFEKNPIDFLEAKGYKEVKKDLIIKLPKYSLFELENGRKRMLASAGELQKGNELALPSKYVNFLYLASHYEKLKGSPEDNEQKQLFVEQHKHYLDEIIEQISEFSKRVILADANLDKVLSAYNKHRDKPIREQAENIIHLFTLTNLGAPAAFKYFDTTIDRKRYTSTKEVLDATLIHQSITGLYETRIDLSQLGGDGGGGGGGGTLQLDDEYRLYSPLVKPDQNIQFWLEQFPQAWAETAGMGLAKQVPPQVIQLKASATPVSVRQYPLSKEAQEGIRPHVQRLIQQGILVPVQSPWNTPLLPVRKPGTNDYRPVQDLREVNKRVQDIHPTVPNPYNLLCALPPQRSWYTVLDLKDAFFCLRLHPTSQPLFAFEWRDPGTGRTGQLTWTRLPQGFKNSPTIFNEALHRDLANFRIQHPQVTLLQYVDDLLLAGATKQDCLEGTKALLLELSDLGYRASAKKAQICRREVTYLGYSLRDGQRWLTEARKKTVVQIPAPTTAKQVREFLGTAGFCRLWIPGFATLAAPLYPLTKPKGEFSWAPEHQKAFDAIKKALLSAPALALPDVTKPFTLYVDERKGVARGVLTQTLGPWRRPVAYLSKKLDPVASGWPVCLKAIAAVAILVKDADKLTLGQNITVIAPHALENIVRQPPDRWMTNARMTHYQSLLLTERVTFAPPAALNPATLLPEETDEPVTHDCHQLLIEETGVRKDLTDIPLTGEVLTWFTDGSSYVVEGKRMAGAAVVDGTRTIWASSLPEGTSAQKAELMALTQALRLAEGKSINIYTDSRYAFATAHVHGAIYKQRGWLTSAGREIKNKEEILSLLEALHLPKRLAIIHCPGHQKAKDPISRGNQMADRVAKQAAQGVNLLAGKRTADGSEFEKRTADGSEFESPKKKAKVE

SEQ ID NO: 21445 - protein, 2104 aa, synthetic construct
MPAAKRVKLDGGDKKYSIGLDIGTNSVGWAVITDEYKVPSKKFKVLGNTDRHSIKKNLIGALLFDSGETAEATRLKRTARRRYTRRKNRICYLQEIFSNEMAKVDDSFFHRLEESFLVEEDKKHERHPIFGNIVDEVAYHEKYPTIYHLRKKLVDSTDKADLRLIYLALAHMIKFRGHFLIEGDLNPDNSDVDKLFIQLVQTYNQLFEENPINASGVDAKAILSARLSKSRRLENLIAQLPGEKKNGLFGNLIALSLGLTPNFKSNFDLAEDAKLQLSKDTYDDDLDNLLAQIGDQYADLFLAAKNLSDAILLSDILRVNTEITKAPLSASMIKRYDEHHQDLTLLKALVRQQLPEKYKEIFFDQSKNGYAGYIDGGASQEEFYKFIKPILEKMDGTEELLVKLNREDLLRKQRTFDNGSIPHQIHLGELHAILRRQEDFYPFLKDNREKIEKILTFRIPYYVGPLARGNSRFAWMTRKSEETITPWNFEEVVDKGASAQSFIERMTNFDKNLPNEKVLPKHSLLYEYFTVYNELTKVKYVTEGMRKPAFLSGEQKKAIVDLLFKTNRKVTVKQLKEDYFKKIECFDSVEISGVEDRFNASLGTYHDLLKIIKDKDFLDNEENEDILEDIVLTLTLFEDREMIEERLKTYAHLFDDKVMKQLKRRRYTGWGRLSRKLINGIRDKQSGKTILDFLKSDGFANRNFMQLIHDDSLTFKEDIQKAQVSGQGDSLHEHIANLAGSPAIKKGILQTVKVVDELVKVMGRHKPENIVIEMARENQTTQKGQKNSRERMKRIEEGIKELGSQILKEHPVENTQLQNEKLYLYYLQNGRDMYVDQELDINRLSDYDVDHIVPQSFLKDDSIDNKVLTRSDKARGKSDNVPSEEVVKKMKNYWRQLLNAKLITQRKFDNLTKAERGGLSELDKAGFIKRQLVETRQITKHVAQILDSRMNTKYDENDKLIREVKVITLKSKLVSDFRKDFQFYKVREINNYHHAHDAYLNAVVGTALIKKYPKLESEFVYGDYKVYDVRKMIAKSEQEIGKATAKYFFYSNIMNFFKTEITLANGEIRKRPLIETNGETGEIVWDKGRDFATVRKVLSMPQVNIVKKTEVQTGGFSKESILPKRNSDKLIARKKDWDPKKYGGFDSPTVAYSVLVVAKVEKGKSKKLKSVKELLGITIMERSSFEKNPIDFLEAKGYKEVKKDLIIKLPKYSLFELENGRKRMLASAGELQKGNELALPSKYVNFLYLASHYEKLKGSPEDNEQKQLFVEQHKHYLDEIIEQISEFSKRVILADANLDKVLSAYNKHRDKPIREQAENIIHLFTLTNLGAPAAFKYFDTTIDRKRYTSTKEVLDATLIHQSITGLYETRIDLSQLGGDGGEAAAKEAAAKEAAAKEAAAKEAAAKGGTLQLDDEYRLYSPLVKPDQNIQFWLEQFPQAWAETAGMGLAKQVPPQVIQLKASATPVSVRQYPLSKEAQEGIRPHVQRLIQQGILVPVQSPWNTPLLPVRKPGTNDYRPVQDLREVNKRVQDIHPTVPNPYNLLCALPPQRSWYTVLDLKDAFFCLRLHPTSQPLFAFEWRDPGTGRTGQLTWTRLPQGFKNSPTIFNEALHRDLANFRIQHPQVTLLQYVDDLLLAGATKQDCLEGTKALLLELSDLGYRASAKKAQICRREVTYLGYSLRDGQRWLTEARKKTVVQIPAPTTAKQVREFLGTAGFCRLWIPGFATLAAPLYPLTKPKGEFSWAPEHQKAFDAIKKALLSAPALALPDVTKPFTLYVDERKGVARGVLTQTLGPWRRPVAYLSKKLDPVASGWPVCLKAIAAVAILVKDADKLTLGQNITVIAPHALENIVRQPPDRWMTNARMTHYQSLLLTERVTFAPPAALNPATLLPEETDEPVTHDCHQLLIEETGVRKDLTDIPLTGEVLTWFTDGSSYVVEGKRMAGAAVVDGTRTIWASSLPEGTSAQKAELMALTQALRLAEGKSINIYTDSRYAFATAHVHGAIYKQRGWLTSAGREIKNKEEILSLLEALHLPKRLAIIHCPGHQKAKDPISRGNQMADRVAKQAAQGVNLLAGKRTADGSEFEKRTADGSEFESPKKKAKVE

SEQ ID NO: 21446 - protein, 2084 aa, synthetic construct
MPAAKRVKLDGGDKKYSIGLDIGTNSVGWAVITDEYKVPSKKFKVLGNTDRHSIKKNLIGALLFDSGETAEATRLKRTARRRYTRRKNRICYLQEIFSNEMAKVDDSFFHRLEESFLVEEDKKHERHPIFGNIVDEVAYHEKYPTIYHLRKKLVDSTDKADLRLIYLALAHMIKFRGHFLIEGDLNPDNSDVDKLFIQLVQTYNQLFEENPINASGVDAKAILSARLSKSRRLENLIAQLPGEKKNGLFGNLIALSLGLTPNFKSNFDLAEDAKLQLSKDTYDDDLDNLLAQIGDQYADLFLAAKNLSDAILLSDILRVNTEITKAPLSASMIKRYDEHHQDLTLLKALVRQQLPEKYKEIFFDQSKNGYAGYIDGGASQEEFYKFIKPILEKMDGTEELLVKLNREDLLRKQRTFDNGSIPHQIHLGELHAILRRQEDFYPFLKDNREKIEKILTFRIPYYVGPLARGNSRFAWMTRKSEETITPWNFEEVVDKGASAQSFIERMTNFDKNLPNEKVLPKHSLLYEYFTVYNELTKVKYVTEGMRKPAFLSGEQKKAIVDLLFKTNRKVTVKQLKEDYFKKIECFDSVEISGVEDRFNASLGTYHDLLKIIKDKDFLDNEENEDILEDIVLTLTLFEDREMIEERLKTYAHLFDDKVMKQLKRRRYTGWGRLSRKLINGIRDKQSGKTILDFLKSDGFANRNFMQLIHDDSLTFKEDIQKAQVSGQGDSLHEHIANLAGSPAIKKGILQTVKVVDELVKVMGRHKPENIVIEMARENQTTQKGQKNSRERMKRIEEGIKELGSQILKEHPVENTQLQNEKLYLYYLQNGRDMYVDQELDINRLSDYDVDHIVPQSFLKDDSIDNKVLTRSDKARGKSDNVPSEEVVKKMKNYWRQLLNAKLITQRKFDNLTKAERGGLSELDKAGFIKRQLVETRQITKHVAQILDSRMNTKYDENDKLIREVKVITLKSKLVSDFRKDFQFYKVREINNYHHAHDAYLNAVVGTALIKKYPKLESEFVYGDYKVYDVRKMIAKSEQEIGKATAKYFFYSNIMNFFKTEITLANGEIRKRPLIETNGETGEIVWDKGRDFATVRKVLSMPQVNIVKKTEVQTGGFSKESILPKRNSDKLIARKKDWDPKKYGGFDSPTVAYSVLVVAKVEKGKSKKLKSVKELLGITIMERSSFEKNPIDFLEAKGYKEVKKDLIIKLPKYSLFELENGRKRMLASAGELQKGNELALPSKYVNFLYLASHYEKLKGSPEDNEQKQLFVEQHKHYLDEIIEQISEFSKRVILADANLDKVLSAYNKHRDKPIREQAENIIHLFTLTNLGAPAAFKYFDTTIDRKRYTSTKEVLDATLIHQSITGLYETRIDLSQLGGDGGEAAAKGGTLQLDDEYRLYSPLVKPDQNIQFWLEQFPQAWAETAGMGLAKQVPPQVIQLKASATPVSVRQYPLSKEAQEGIRPHVQRLIQQGILVPVQSPWNTPLLPVRKPGTNDYRPVQDLREVNKRVQDIHPTVPNPYNLLCALPPQRSWYTVLDLKDAFFCLRLHPTSQPLFAFEWRDPGTGRTGQLTWTRLPQGFKNSPTIFNEALHRDLANFRIQHPQVTLLQYVDDLLLAGATKQDCLEGTKALLLELSDLGYRASAKKAQICRREVTYLGYSLRDGQRWLTEARKKTVVQIPAPTTAKQVREFLGTAGFCRLWIPGFATLAAPLYPLTKPKGEFSWAPEHQKAFDAIKKALLSAPALALPDVTKPFTLYVDERKGVARGVLTQTLGPWRRPVAYLSKKLDPVASGWPVCLKAIAAVAILVKDADKLTLGQNITVIAPHALENIVRQPPDRWMTNARMTHYQSLLLTERVTFAPPAALNPATLLPEETDEPVTHDCHQLLIEETGVRKDLTDIPLTGEVLTWFTDGSSYVVEGKRMAGAAVVDGTRTIWASSLPEGTSAQKAELMALTQALRLAEGKSINIYTDSRYAFATAHVHGAIYKQRGWLTSAGREIKNKEEILSLLEALHLPKRLAIIHCPGHQKAKDPISRGNQMADRVAKQAAQGVNLLAGKRTADGSEFEKRTADGSEFESPKKKAKVE

SEQ ID NO: 21447 - protein, 2086 aa, synthetic construct; identical to SEQ ID NO: 381

SEQ ID NO: 21448 - protein, 2091 aa, synthetic construct; identical to SEQ ID NO: 370

SEQ ID NO: 21449 - protein, 2090 aa, synthetic construct; identical to SEQ ID NO: 376

SEQ ID NO: 21450 - protein, 2088 aa, synthetic construct; identical to SEQ ID NO: 387

SEQ ID NO: 21451 - protein, 2125 aa, synthetic construct
MPAAKRVKLDGGDKKYSIGLDIGTNSVGWAVITDEYKVPSKKFKVLGNTDRHSIKKNLIGALLFDSGETAEATRLKRTARRRYTRRKNRICYLQEIFSNEMAKVDDSFFHRLEESFLVEEDKKHERHPIFGNIVDEVAYHEKYPTIYHLRKKLVDSTDKADLRLIYLALAHMIKFRGHFLIEGDLNPDNSDVDKLFIQLVQTYNQLFEENPINASGVDAKAILSARLSKSRRLENLIAQLPGEKKNGLFGNLIALSLGLTPNFKSNFDLAEDAKLQLSKDTYDDDLDNLLAQIGDQYADLFLAAKNLSDAILLSDILRVNTEITKAPLSASMIKRYDEHHQDLTLLKALVRQQLPEKYKEIFFDQSKNGYAGYIDGGASQEEFYKFIKPILEKMDGTEELLVKLNREDLLRKQRTFDNGSIPHQIHLGELHAILRRQEDFYPFLKDNREKIEKILTFRIPYYVGPLARGNSRFAWMTRKSEETITPWNFEEVVDKGASAQSFIERMTNFDKNLPNEKVLPKHSLLYEYFTVYNELTKVKYVTEGMRKPAFLSGEQKKAIVDLLFKTNRKVTVKQLKEDYFKKIECFDSVEISGVEDRFNASLGTYHDLLKIIKDKDFLDNEENEDILEDIVLTLTLFEDREMIEERLKTYAHLFDDKVMKQLKRRRYTGWGRLSRKLINGIRDKQSGKTILDFLKSDGFANRNFMQLIHDDSLTFKEDIQKAQVSGQGDSLHEHIANLAGSPAIKKGILQTVKVVDELVKVMGRHKPENIVIEMARENQTTQKGQKNSRERMKRIEEGIKELGSQILKEHPVENTQLQNEKLYLYYLQNGRDMYVDQELDINRLSDYDVDHIVPQSFLKDDSIDNKVLTRSDKARGKSDNVPSEEVVKKMKNYWRQLLNAKLITQRKFDNLTKAERGGLSELDKAGFIKRQLVETRQITKHVAQILDSRMNTKYDENDKLIREVKVITLKSKLVSDFRKDFQFYKVREINNYHHAHDAYLNAVVGTALIKKYPKLESEFVYGDYKVYDVRKMIAKSEQEIGKATAKYFFYSNIMNFFKTEITLANGEIRKRPLIETNGETGEIVWDKGRDFATVRKVLSMPQVNIVKKTEVQTGGFSKESILPKRNSDKLIARKKDWDPKKYGGFDSPTVAYSVLVVAKVEKGKSKKLKSVKELLGITIMERSSFEKNPIDFLEAKGYKEVKKDLIIKLPKYSLFELENGRKRMLASAGELQKGNELALPSKYVNFLYLASHYEKLKGSPEDNEQKQLFVEQHKHYLDEIIEQISEFSKRVILADANLDKVLSAYNKHRDKPIREQAENIIHLFTLTNLGAPAAFKYFDTTIDRKRYTSTKEVLDATLIHQSITGLYETRIDLSQLGGDGGAEAAAKEAAAKEAAAKEAAAKALEAEAAAKEAAAKEAAAKEAAAKAGGTLQLDDEYRLYSPLVKPDQNIQFWLEQFPQAWAETAGMGLAKQVPPQVIQLKASATPVSVRQYPLSKEAQEGIRPHVQRLIQQGILVPVQSPWNTPLLPVRKPGTNDYRPVQDLREVNKRVQDIHPTVPNPYNLLCALPPQRSWYTVLDLKDAFFCLRLHPTSQPLFAFEWRDPGTGRTGQLTWTRLPQGFKNSPTIFNEALHRDLANFRIQHPQVTLLQYVDDLLLAGATKQDCLEGTKALLLELSDLGYRASAKKAQICRREVTYLGYSLRDGQRWLTEARKKTVVQIPAPTTAKQVREFLGTAGFCRLWIPGFATLAAPLYPLTKPKGEFSWAPEHQKAFDAIKKALLSAPALALPDVTKPFTLYVDERKGVARGVLTQTLGPWRRPVAYLSKKLDPVASGWPVCLKAIAAVAILVKDADKLTLGQNITVIAPHALENIVRQPPDRWMTNARMTHYQSLLLTERVTFAPPAALNPATLLPEETDEPVTHDCHQLLIEETGVRKDLTDIPLTGEVLTWFTDGSSYVVEGKRMAGAAVVDGTRTIWASSLPEGTSAQKAELMALTQALRLAEGKSINIYTDSRYAFATAHVHGAIYKQRGWLTSAGREIKNKEEILSLLEALHLPKRLAIIHCPGHQKAKDPISRGNQMADRVAKQAAQGVNLLAGKRTADGSEFEKRTADGSEFESPKKKAKVE

SEQ ID NO: 21452 - protein, 2092 aa, synthetic construct
MPAAKRVKLDGGDKKYSIGLDIGTNSVGWAVITDEYKVPSKKFKVLGNTDRHSIKKNLIGALLFDSGETAEATRLKRTARRRYTRRKNRICYLQEIFSNEMAKVDDSFFHRLEESFLVEEDKKHERHPIFGNIVDEVAYHEKYPTIYHLRKKLVDSTDKADLRLIYLALAHMIKFRGHFLIEGDLNPDNSDVDKLFIQLVQTYNQLFEENPINASGVDAKAILSARLSKSRRLENLIAQLPGEKKNGLFGNLIALSLGLTPNFKSNFDLAEDAKLQLSKDTYDDDLDNLLAQIGDQYADLFLAAKNLSDAILLSDILRVNTEITKAPLSASMIKRYDEHHQDLTLLKALVRQQLPEKYKEIFFDQSKNGYAGYIDGGASQEEFYKFIKPILEKMDGTEELLVKLNREDLLRKQRTFDNGSIPHQIHLGELHAILRRQEDFYPFLKDNREKIEKILTFRIPYYVGPLARGNSRFAWMTRKSEETITPWNFEEVVDKGASAQSFIERMTNFDKNLPNEKVLPKHSLLYEYFTVYNELTKVKYVTEGMRKPAFLSGEQKKAIVDLLFKTNRKVTVKQLKEDYFKKIECFDSVEISGVEDRFNASLGTYHDLLKIIKDKDFLDNEENEDILEDIVLTLTLFEDREMIEERLKTYAHLFDDKVMKQLKRRRYTGWGRLSRKLINGIRDKQSGKTILDFLKSDGFANRNFMQLIHDDSLTFKEDIQKAQVSGQGDSLHEHIANLAGSPAIKKGILQTVKVVDELVKVMGRHKPENIVIEMARENQTTQKGQKNSRERMKRIEEGIKELGSQILKEHPVENTQLQNEKLYLYYLQNGRDMYVDQELDINRLSDYDVDHIVPQSFLKDDSIDNKVLTRSDKARGKSDNVPSEEVVKKMKNYWRQLLNAKLITQRKFDNLTKAERGGLSELDKAGFIKRQLVETRQITKHVAQILDSRMNTKYDENDKLIREVKVITLKSKLVSDFRKDFQFYKVREINNYHHAHDAYLNAVVGTALIKKYPKLESEFVYGDYKVYDVRKMIAKSEQEIGKATAKYFFYSNIMNFFKTEITLANGEIRKRPLIETNGETGEIVWDKGRDFATVRKVLSMPQVNIVKKTEVQTGGFSKESILPKRNSDKLIARKKDWDPKKYGGFDSPTVAYSVLVVAKVEKGKSKKLKSVKELLGITIMERSSFEKNPIDFLEAKGYKEVKKDLIIKLPKYSLFELENGRKRMLASAGELQKGNELALPSKYVNFLYLASHYEKLKGSPEDNEQKQLFVEQHKHYLDEIIEQISEFSKRVILADANLDKVLSAYNKHRDKPIREQAENIIHLFTLTNLGAPAAFKYFDTTIDRKRYTSTKEVLDATLIHQSITGLYETRIDLSQLGGDGGPAPAPAPAPAPAPGGTLQLDDEYRLYSPLVKPDQNIQFWLEQFPQAWAETAGMGLAKQVPPQVIQLKASATPVSVRQYPLSKEAQEGIRPHVQRLIQQGILVPVQSPWNTPLLPVRKPGTNDYRPVQDLREVNKRVQDIHPTVPNPYNLLCALPPQRSWYTVLDLKDAFFCLRLHPTSQPLFAFEWRDPGTGRTGQLTWTRLPQGFKNSPTIFNEALHRDLANFRIQHPQVTLLQYVDDLLLAGATKQDCLEGTKALLLELSDLGYRASAKKAQICRREVTYLGYSLRDGQRWLTEARKKTVVQIPAPTTAKQVREFLGTAGFCRLWIPGFATLAAPLYPLTKPKGEFSWAPEHQKAFDAIKKALLSAPALALPDVTKPFTLYVDERKGVARGVLTQTLGPWRRPVAYLSKKLDPVASGWPVCLKAIAAVAILVKDADKLTLGQNITVIAPHALENIVRQPPDRWMTNARMTHYQSLLLTERVTFAPPAALNPATLLPEETDEPVTHDCHQLLIEETGVRKDLTDIPLTGEVLTWFTDGSSYVVEGKRMAGAAVVDGTRTIWASSLPEGTSAQKAELMALTQALRLAEGKSINIYTDSRYAFATAHVHGAIYKQRGWLTSAGREIKNKEEILSLLEALHLPKRLAIIHCPGHQKAKDPISRGNQMADRVAKQAAQGVNLLAGKRTADGSEFEKRTADGSEFESPKKKAKVE

SEQ ID NO: 21453 - protein, 2087 aa, synthetic construct
MPAAKRVKLDGGDKKYSIGLDIGTNSVGWAVITDEYKVPSKKFKVLGNTDRHSIKKNLIGALLFDSGETAEATRLKRTARRRYTRRKNRICYLQEIFSNEMAKVDDSFFHRLEESFLVEEDKKHERHPIFGNIVDEVAYHEKYPTIYHLRKKLVDSTDKADLRLIYLALAHMIKFRGHFLIEGDLNPDNSDVDKLFIQLVQTYNQLFEENPINASGVDAKAILSARLSKSRRLENLIAQLPGEKKNGLFGNLIALSLGLTPNFKSNFDLAEDAKLQLSKDTYDDDLDNLLAQIGDQYADLFLAAKNLSDAILLSDILRVNTEITKAPLSASMIKRYDEHHQDLTLLKALVRQQLPEKYKEIFFDQSKNGYAGYIDGGASQEEFYKFIKPILEKMDGTEELLVKLNREDLLRKQRTFDNGSIPHQIHLGELHAILRRQEDFYPFLKDNREKIEKILTFRIPYYVGPLARGNSRFAWMTRKSEETITPWNFEEVVDKGASAQSFIERMTNFDKNLPNEKVLPKHSLLYEYFTVYNELTKVKYVTEGMRKPAFLSGEQKKAIVDLLFKTNRKVTVKQLKEDYFKKIECFDSVEISGVEDRFNASLGTYHDLLKIIKDKDFLDNEENEDILEDIVLTLTLFEDREMIEERLKTYAHLFDDKVMKQLKRRRYTGWGRLSRKLINGIRDKQSGKTILDFLKSDGFANRNFMQLIHDDSLTFKEDIQKAQVSGQGDSLHEHIANLAGSPAIKKGILQTVKVVDELVKVMGRHKPENIVIEMARENQTTQKGQKNSRERMKRIEEGIKELGSQILKEHPVENTQLQNEKLYLYYLQNGRDMYVDQELDINRLSDYDVDHIVPQSFLKDDSIDNKVLTRSDKARGKSDNVPSEEVVKKMKNYWRQLLNAKLITQRKFDNLTKAERGGLSELDKAGFIKRQLVETRQITKHVAQILDSRMNTKYDENDKLIREVKVITLKSKLVSDFRKDFQFYKVREINNYHHAHDAYLNAVVGTALIKKYPKLESEFVYGDYKVYDVRKMIAKSEQEIGKATAKYFFYSNIMNFFKTEITLANGEIRKRPLIETNGETGEIVWDKGRDFATVRKVLSMPQVNIVKKTEVQTGGFSKESILPKRNSDKLIARKKDWDPKKYGGFDSPTVAYSVLVVAKVEKGKSKKLKSVKELLGITIMERSSFEKNPIDFLEAKGYKEVKKDLIIKLPKYSLFELENGRKRMLASAGELQKGNELALPSKYVNFLYLASHYEKLKGSPEDNEQKQLFVEQHKHYLDEIIEQISEFSKRVILADANLDKVLSAYNKHRDKPIREQAENIIHLFTLTNLGAPAAFKYFDTTIDRKRYTSTKEVLDATLIHQSITGLYETRIDLSQLGGDGGEAAAKGGSGGTLQLDDEYRLYSPLVKPDQNIQFWLEQFPQAWAETAGMGLAKQVPPQVIQLKASATPVSVRQYPLSKEAQEGIRPHVQRLIQQGILVPVQSPWNTPLLPVRKPGTNDYRPVQDLREVNKRVQDIHPTVPNPYNLLCALPPQRSWYTVLDLKDAFFCLRLHPTSQPLFAFEWRDPGTGRTGQLTWTRLPQGFKNSPTIFNEALHRDLANFRIQHPQVTLLQYVDDLLLAGATKQDCLEGTKALLLELSDLGYRASAKKAQICRREVTYLGYSLRDGQRWLTEARKKTVVQIPAPTTAKQVREFLGTAGFCRLWIPGFATLAAPLYPLTKPKGEFSWAPEHQKAFDAIKKALLSAPALALPDVTKPFTLYVDERKGVARGVLTQTLGPWRRPVAYLSKKLDPVASGWPVCLKAIAAVAILVKDADKLTLGQNITVIAPHALENIVRQPPDRWMTNARMTHYQSLLLTERVTFAPPAALNPATLLPEETDEPVTHDCHQLLIEETGVRKDLTDIPLTGEVLTWFTDGSSYVVEGKRMAGAAVVDGTRTIWASSLPEGTSAQKAELMALTQALRLAEGKSINIYTDSRYAFATAHVHGAIYKQRGWLTSAGREIKNKEEILSLLEALHLPKRLAIIHCPGHQKAKDPISRGNQMADRVAKQAAQGVNLLAGKRTADGSEFEKRTADGSEFESPKKKAKVE

SEQ ID NO: 21454 - protein, 2094 aa, synthetic construct; identical to SEQ ID NO: 391

SEQ ID NO: 21455 - protein, 2090 aa, synthetic construct
MPAAKRVKLDGGDKKYSIGLDIGTNSVGWAVITDEYKVPSKKFKVLGNTDRHSIKKNLIGALLFDSGETAEATRLKRTARRRYTRRKNRICYLQEIFSNEMAKVDDSFFHRLEESFLVEEDKKHERHPIFGNIVDEVAYHEKYPTIYHLRKKLVDSTDKADLRLIYLALAHMIKFRGHFLIEGDLNPDNSDVDKLFIQLVQTYNQLFEENPINASGVDAKAILSARLSKSRRLENLIAQLPGEKKNGLFGNLIALSLGLTPNFKSNFDLAEDAKLQLSKDTYDDDLDNLLAQIGDQYADLFLAAKNLSDAILLSDILRVNTEITKAPLSASMIKRYDEHHQDLTLLKALVRQQLPEKYKEIFFDQSKNGYAGYIDGGASQEEFYKFIKPILEKMDGTEELLVKLNREDLLRKQRTFDNGSIPHQIHLGELHAILRRQEDFYPFLKDNREKIEKILTFRIPYYVGPLARGNSRFAWMTRKSEETITPWNFEEVVDKGASAQSFIERMTNFDKNLPNEKVLPKHSLLYEYFTVYNELTKVKYVTEGMRKPAFLSGEQKKAIVDLLFKTNRKVTVKQLKEDYFKKIECFDSVEISGVEDRFNASLGTYHDLLKIIKDKDFLDNEENEDILEDIVLTLTLFEDREMIEERLKTYAHLFDDKVMKQLKRRRYTGWGRLSRKLINGIRDKQSGKTILDFLKSDGFANRNFMQLIHDDSLTFKEDIQKAQVSGQGDSLHEHIANLAGSPAIKKGILQTVKVVDELVKVMGRHKPENIVIEMARENQTTQKGQKNSRERMKRIEEGIKELGSQILKEHPVENTQLQNEKLYLYYLQNGRDMYVDQELDINRLSDYDVDHIVPQSFLKDDSIDNKVLTRSDKARGKSDNVPSEEVVKKMKNYWRQLLNAKLITQRKFDNLTKAERGGLSELDKAGFIKRQLVETRQITKHVAQILDSRMNTKYDENDKLIREVKVITLKSKLVSDFRKDFQFYKVREINNYHHAHDAYLNAVVGTALIKKYPKLESEFVYGDYKVYDVRKMIAKSEQEIGKATAKYFFYSNIMNFFKTEITLANGEIRKRPLIETNGETGEIVWDKGRDFATVRKVLSMPQVNIVKKTEVQTGGFSKESILPKRNSDKLIARKKDWDPKKYGGFDSPTVAYSVLVVAKVEKGKSKKLKSVKELLGITIMERSSFEKNPIDFLEAKGYKEVKKDLIIKLPKYSLFELENGRKRMLASAGELQKGNELALPSKYVNFLYLASHYEKLKGSPEDNEQKQLFVEQHKHYLDEIIEQISEFSKRVILADANLDKVLSAYNKHRDKPIREQAENIIHLFTLTNLGAPAAFKYFDTTIDRKRYTSTKEVLDATLIHQSITGLYETRIDLSQLGGDGGEAAAKGSSGGGGGTLQLDDEYRLYSPLVKPDQNIQFWLEQFPQAWAETAGMGLAKQVPPQVIQLKASATPVSVRQYPLSKEAQEGIRPHVQRLIQQGILVPVQSPWNTPLLPVRKPGTNDYRPVQDLREVNKRVQDIHPTVPNPYNLLCALPPQRSWYTVLDLKDAFFCLRLHPTSQPLFAFEWRDPGTGRTGQLTWTRLPQGFKNSPTIFNEALHRDLANFRIQHPQVTLLQYVDDLLLAGATKQDCLEGTKALLLELSDLGYRASAKKAQICRREVTYLGYSLRDGQRWLTEARKKTVVQIPAPTTAKQVREFLGTAGFCRLWIPGFATLAAPLYPLTKPKGEFSWAPEHQKAFDAIKKALLSAPALALPDVTKPFTLYVDERKGVARGVLTQTLGPWRRPVAYLSKKLDPVASGWPVCLKAIAAVAILVKDADKLTLGQNITVIAPHALENIVRQPPDRWMTNARMTHYQSLLLTERVTFAPPAALNPATLLPEETDEPVTHDCHQLLIEETGVRKDLTDIPLTGEVLTWFTDGSSYVVEGKRMAGAAVVDGTRTIWASSLPEGTSAQKAELMALTQALRLAEGKSINIYTDSRYAFATAHVHGAIYKQRGWLTSAGREIKNKEEILSLLEALHLPKRLAIIHCPGHQKAKDPISRGNQMADRVAKQAAQGVNLLAGKRTADGSEFEKRTADGSEFESPKKKAKVE

SEQ ID NO: 21456 - protein, 2094 aa, synthetic construct; identical to SEQ ID NO: 404

SEQ ID NO: 21457 - protein, 2088 aa, synthetic construct
MPAAKRVKLDGGDKKYSIGLDIGTNSVGWAVITDEYKVPSKKFKVLGNTDRHSIKKNLIGALLFDSGETAEATRLKRTARRRYTRRKNRICYLQEIFSNEMAKVDDSFFHRLEESFLVEEDKKHERHPIFGNIVDEVAYHEKYPTIYHLRKKLVDSTDKADLRLIYLALAHMIKFRGHFLIEGDLNPDNSDVDKLFIQLVQTYNQLFEENPINASGVDAKAILSARLSKSRRLENLIAQLPGEKKNGLFGNLIALSLGLTPNFKSNFDLAEDAKLQLSKDTYDDDLDNLLAQIGDQYADLFLAAKNLSDAILLSDILRVNTEITKAPLSASMIKRYDEHHQDLTLLKALVRQQLPEKYKEIFFDQSKNGYAGYIDGGASQEEFYKFIKPILEKMDGTEELLVKLNREDLLRKQRTFDNGSIPHQIHLGELHAILRRQEDFYPFLKDNREKIEKILTFRIPYYVGPLARGNSRFAWMTRKSEETITPWNFEEVVDKGASAQSFIERMTNFDKNLPNEKVLPKHSLLYEYFTVYNELTKVKYVTEGMRKPAFLSGEQKKAIVDLLFKTNRKVTVKQLKEDYFKKIECFDSVEISGVEDRFNASLGTYHDLLKIIKDKDFLDNEENEDILEDIVLTLTLFEDREMIEERLKTYAHLFDDKVMKQLKRRRYTGWGRLSRKLINGIRDKQSGKTILDFLKSDGFANRNFMQLIHDDSLTFKEDIQKAQVSGQGDSLHEHIANLAGSPAIKKGILQTVKVVDELVKVMGRHKPENIVIEMARENQTTQKGQKNSRERMKRIEEGIKELGSQILKEHPVENTQLQNEKLYLYYLQNGRDMYVDQELDINRLSDYDVDHIVPQSFLKDDSIDNKVLTRSDKARGKSDNVPSEEVVKKMKNYWRQLLNAKLITQRKFDNLTKAERGGLSELDKAGFIKRQLVETRQITKHVAQILDSRMNTKYDENDKLIREVKVITLKSKLVSDFRKDFQFYKVREINNYHHAHDAYLNAVVGTALIKKYPKLESEFVYGDYKVYDVRKMIAKSEQEIGKATAKYFFYSNIMNFFKTEITLANGEIRKRPLIETNGETGEIVWDKGRDFATVRKVLSMPQVNIVKKTEVQTGGFSKESILPKRNSDKLIARKKDWDPKKYGGFDSPTVAYSVLVVAKVEKGKSKKLKSVKELLGITIMERSSFEKNPIDFLEAKGYKEVKKDLIIKLPKYSLFELENGRKRMLASAGELQKGNELALPSKYVNFLYLASHYEKLKGSPEDNEQKQLFVEQHKHYLDEIIEQISEFSKRVILADANLDKVLSAYNKHRDKPIREQAENIIHLFTLTNLGAPAAFKYFDTTIDRKRYTSTKEVLDATLIHQSITGLYETRIDLSQLGGDGGGSSGGGGGSGGTLQLDDEYRLYSPLVKPDQNIQFWLEQFPQAWAETAGMGLAKQVPPQVIQLKASATPVSVRQYPLSKEAQEGIRPHVQRLIQQGILVPVQSPWNTPLLPVRKPGTNDYRPVQDLREVNKRVQDIHPTVPNPYNLLCALPPQRSWYTVLDLKDAFFCLRLHPTSQPLFAFEWRDPGTGRTGQLTWTRLPQGFKNSPTIFNEALHRDLANFRIQHPQVTLLQYVDDLLLAGATKQDCLEGTKALLLELSDLGYRASAKKAQICRREVTYLGYSLRDGQRWLTEARKKTVVQIPAPTTAKQVREFLGTAGFCRLWIPGFATLAAPLYPLTKPKGEFSWAPEHQKAFDAIKKALLSAPALALPDVTKPFTLYVDERKGVARGVLTQTLGPWRRPVAYLSKKLDPVASGWPVCLKAIAAVAILVKDADKLTLGQNITVIAPHALENIVRQPPDRWMTNARMTHYQSLLLTERVTFAPPAALNPATLLPEETDEPVTHDCHQLLIEETGVRKDLTDIPLTGEVLTWFTDGSSYVVEGKRMAGAAVVDGTRTIWASSLPEGTSAQKAELMALTQALRLAEGKSINIYTDSRYAFATAHVHGAIYKQRGWLTSAGREIKNKEEILSLLEALHLPKRLAIIHCPGHQKAKDPISRGNQMADRVAKQAAQGVNLLAGKRTADGSEFEKRTADGSEFESPKKKAKVE

SEQ ID NO: 21458 - protein, 2084 aa, synthetic construct; identical to SEQ ID NO: 366

SEQ ID NO: 21459 - protein, 2090 aa, synthetic construct
MPAAKRVKLDGGDKKYSIGLDIGTNSVGWAVITDEYKVPSKKFKVLGNTDRHSIKKNLIGALLFDSGETAEATRLKRTARRRYTRRKNRICYLQEIFSNEMAKVDDSFFHRLEESFLVEEDKKHERHPIFGNIVDEVAYHEKYPTIYHLRKKLVDSTDKADLRLIYLALAHMIKFRGHFLIEGDLNPDNSDVDKLFIQLVQTYNQLFEENPINASGVDAKAILSARLSKSRRLENLIAQLPGEKKNGLFGNLIALSLGLTPNFKSNFDLAEDAKLQLSKDTYDDDLDNLLAQIGDQYADLFLAAKNLSDAILLSDILRVNTEITKAPLSASMIKRYDEHHQDLTLLKALVRQQLPEKYKEIFFDQSKNGYAGYIDGGASQEEFYKFIKPILEKMDGTEELLVKLNREDLLRKQRTFDNGSIPHQIHLGELHAILRRQEDFYPFLKDNREKIEKILTFRIPYYVGPLARGNSRFAWMTRKSEETITPWNFEEVVDKGASAQSFIERMTNFDKNLPNEKVLPKHSLLYEYFTVYNELTKVKYVTEGMRKPAFLSGEQKKAIVDLLFKTNRKVTVKQLKEDYFKKIECFDSVEISGVEDRFNASLGTYHDLLKIIKDKDFLDNEENEDILEDIVLTLTLFEDREMIEERLKTYAHLFDDKVMKQLKRRRYTGWGRLSRKLINGIRDKQSGKTILDFLKSDGFANRNFMQLIHDDSLTFKEDIQKAQVSGQGDSLHEHIANLAGSPAIKKGILQTVKVVDELVKVMGRHKPENIVIEMARENQTTQKGQKNSRERMKRIEEGIKELGSQILKEHPVENTQLQNEKLYLYYLQNGRDMYVDQELDINRLSDYDVDHIVPQSFLKDDSIDNKVLTRSDKARGKSDNVPSEEVVKKMKNYWRQLLNAKLITQRKFDNLTKAERGGLSELDKAGFIKRQLVETRQITKHVAQILDSRMNTKYDENDKLIREVKVITLKSKLVSDFRKDFQFYKVREINNYHHAHDAYLNAVVGTALIKKYPKLESEFVYGDYKVYDVRKMIAKSEQEIGKATAKYFFYSNIMNFFKTEITLANGEIRKRPLIETNGETGEIVWDKGRDFATVRKVLSMPQVNIVKKTEVQTGGFSKESILPKRNSDKLIARKKDWDPKKYGGFDSPTVAYSVLVVAKVEKGKSKKLKSVKELLGITIMERSSFEKNPIDFLEAKGYKEVKKDLIIKLPKYSLFELENGRKRMLASAGELQKGNELALPSKYVNFLYLASHYEKLKGSPEDNEQKQLFVEQHKHYLDEIIEQISEFSKRVILADANLDKVLSAYNKHRDKPIREQAENIIHLFTLTNLGAPAAFKYFDTTIDRKRYTSTKEVLDATLIHQSITGLYETRIDLSQLGGDGGGGSPAPEAAAKGGTLQLDDEYRLYSPLVKPDQNIQFWLEQFPQAWAETAGMGLAKQVPPQVIQLKASATPVSVRQYPLSKEAQEGIRPHVQRLIQQGILVPVQSPWNTPLLPVRKPGTNDYRPVQDLREVNKRVQDIHPTVPNPYNLLCALPPQRSWYTVLDLKDAFFCLRLHPTSQPLFAFEWRDPGTGRTGQLTWTRLPQGFKNSPTIFNEALHRDLANFRIQHPQVTLLQYVDDLLLAGATKQDCLEGTKALLLELSDLGYRASAKKAQICRREVTYLGYSLRDGQRWLTEARKKTVVQIPAPTTAKQVREFLGTAGFCRLWIPGFATLAAPLYPLTKPKGEFSWAPEHQKAFDAIKKALLSAPALALPDVTKPFTLYVDERKGVARGVLTQTLGPWRRPVAYLSKKLDPVASGWPVCLKAIAAVAILVKDADKLTLGQNITVIAPHALENIVRQPPDRWMTNARMTHYQSLLLTERVTFAPPAALNPATLLPEETDEPVTHDCHQLLIEETGVRKDLTDIPLTGEVLTWFTDGSSYVVEGKRMAGAAVVDGTRTIWASSLPEGTSAQKAELMALTQALRLAEGKSINIYTDSRYAFATAHVHGAIYKQRGWLTSAGREIKNKEEILSLLEALHLPKRLAIIHCPGHQKAKDPISRGNQMADRVAKQAAQGVNLLAGKRTADGSEFEKRTADGSEFESPKKKAKVE

SEQ ID NO: 21460 - protein, 2085 aa, synthetic construct; identical to SEQ ID NO: 369

SEQ ID NO: 21461 - protein, 2084 aa, synthetic construct; identical to SEQ ID NO: 367

SEQ ID NO: 21462 - protein, 2088 aa, synthetic construct
MPAAKRVKLDGGDKKYSIGLDIGTNSVGWAVITDEYKVPSKKFKVLGNTDRHSIKKNLIGALLFDSGETAEATRLKRTARRRYTRRKNRICYLQEIFSNEMAKVDDSFFHRLEESFLVEEDKKHERHPIFGNIVDEVAYHEKYPTIYHLRKKLVDSTDKADLRLIYLALAHMIKFRGHFLIEGDLNPDNSDVDKLFIQLVQTYNQLFEENPINASGVDAKAILSARLSKSRRLENLIAQLPGEKKNGLFGNLIALSLGLTPNFKSNFDLAEDAKLQLSKDTYDDDLDNLLAQIGDQYADLFLAAKNLSDAILLSDILRVNTEITKAPLSASMIKRYDEHHQDLTLLKALVRQQLPEKYKEIFFDQSKNGYAGYIDGGASQEEFYKFIKPILEKMDGTEELLVKLNREDLLRKQRTFDNGSIPHQIHLGELHAILRRQEDFYPFLKDNREKIEKILTFRIPYYVGPLARGNSRFAWMTRKSEETITPWNFEEVVDKGASAQSFIERMTNFDKNLPNEKVLPKHSLLYEYFTVYNELTKVKYVTEGMRKPAFLSGEQKKAIVDLLFKTNRKVTVKQLKEDYFKKIECFDSVEISGVEDRFNASLGTYHDLLKIIKDKDFLDNEENEDILEDIVLTLTLFEDREMIEERLKTYAHLFDDKVMKQLKRRRYTGWGRLSRKLINGIRDKQSGKTILDFLKSDGFANRNFMQLIHDDSLTFKEDIQKAQVSGQGDSLHEHIANLAGSPAIKKGILQTVKVVDELVKVMGRHKPENIVIEMARENQTTQKGQKNSRERMKRIEEGIKELGSQILKEHPVENTQLQNEKLYLYYLQNGRDMYVDQELDINRLSDYDVDHIVPQSFLKDDSIDNKVLTRSDKARGKSDNVPSEEVVKKMKNYWRQLLNAKLITQRKFDNLTKAERGGLSELDKAGFIKRQLVETRQITKHVAQILDSRMNTKYDENDKLIREVKVITLKSKLVSDFRKDFQFYKVREINNYHHAHDAYLNAVVGTALIKKYPKLESEFVYGDYKVYDVRKMIAKSEQEIGKATAKYFFYSNIMNFFKTEITLANGEIRKRPLIETNGETGEIVWDKGRDFATVRKVLSMPQVNIVKKTEVQTGGFSKESILPKRNSDKLIARKKDWDPKKYGGFDSPTVAYSVLVVAKVEKGKSKKLKSVKELLGITIMERSSFEKNPIDFLEAKGYKEVKKDLIIKLPKYSLFELENGRKRMLASAGELQKGNELALPSKYVNFLYLASHYEKLKGSPEDNEQKQLFVEQHKHYLDEIIEQISEFSKRVILADANLDKVLSAYNKHRDKPIREQAENIIHLFTLTNLGAPAAFKYFDTTIDRKRYTSTKEVLDATLIHQSITGLYETRIDLSQLGGDGGPAPGGSGGGGGTLQLDDEYRLYSPLVKPDQNIQFWLEQFPQAWAETAGMGLAKQVPPQVIQLKASATPVSVRQYPLSKEAQEGIRPHVQRLIQQGILVPVQSPWNTPLLPVRKPGTNDYRPVQDLREVNKRVQDIHPTVPNPYNLLCALPPQRSWYTVLDLKDAFFCLRLHPTSQPLFAFEWRDPGTGRTGQLTWTRLPQGFKNSPTIFNEALHRDLANFRIQHPQVTLLQYVDDLLLAGATKQDCLEGTKALLLELSDLGYRASAKKAQICRREVTYLGYSLRDGQRWLTEARKKTVVQIPAPTTAKQVREFLGTAGFCRLWIPGFATLAAPLYPLTKPKGEFSWAPEHQKAFDAIKKALLSAPALALPDVTKPFTLYVDERKGVARGVLTQTLGPWRRPVAYLSKKLDPVASGWPVCLKAIAAVAILVKDADKLTLGQNITVIAPHALENIVRQPPDRWMTNARMTHYQSLLLTERVTFAPPAALNPATLLPEETDEPVTHDCHQLLIEETGVRKDLTDIPLTGEVLTWFTDGSSYVVEGKRMAGAAVVDGTRTIWASSLPEGTSAQKAELMALTQALRLAEGKSINIYTDSRYAFATAHVHGAIYKQRGWLTSAGREIKNKEEILSLLEALHLPKRLAIIHCPGHQKAKDPISRGNQMADRVAKQAAQGVNLLAGKRTADGSEFEKRTADGSEFESPKKKAKVE

SEQ ID NO: 21463 - protein, 2090 aa, synthetic construct
MPAAKRVKLDGGDKKYSIGLDIGTNSVGWAVITDEYKVPSKKFKVLGNTDRHSIKKNLIGALLFDSGETAEATRLKRTARRRYTRRKNRICYLQEIFSNEMAKVDDSFFHRLEESFLVEEDKKHERHPIFGNIVDEVAYHEKYPTIYHLRKKLVDSTDKADLRLIYLALAHMIKFRGHFLIEGDLNPDNSDVDKLFIQLVQTYNQLFEENPINASGVDAKAILSARLSKSRRLENLIAQLPGEKKNGLFGNLIALSLGLTPNFKSNFDLAEDAKLQLSKDTYDDDLDNLLAQIGDQYADLFLAAKNLSDAILLSDILRVNTEITKAPLSASMIKRYDEHHQDLTLLKALVRQQLPEKYKEIFFDQSKNGYAGYIDGGASQEEFYKFIKPILEKMDGTEELLVKLNREDLLRKQRTFDNGSIPHQIHLGELHAILRRQEDFYPFLKDNREKIEKILTFRIPYYVGPLARGNSRFAWMTRKSEETITPWNFEEVVDKGASAQSFIERMTNFDKNLPNEKVLPKHSLLYEYFTVYNELTKVKYVTEGMRKPAFLSGEQKKAIVDLLFKTNRKVTVKQLKEDYFKKIECFDSVEISGVEDRFNASLGTYHDLLKIIKDKDFLDNEENEDILEDIVLTLTLFEDREMIEERLKTYAHLFDDKVMKQLKRRRYTGWGRLSRKLINGIRDKQSGKTILDFLKSDGFANRNFMQLIHDDSLTFKEDIQKAQVSGQGDSLHEHIANLAGSPAIKKGILQTVKVVDELVKVMGRHKPENIVIEMARENQTTQKGQKNSRERMKRIEEGIKELGSQILKEHPVENTQLQNEKLYLYYLQNGRDMYVDQELDINRLSDYDVDHIVPQSFLKDDSIDNKVLTRSDKARGKSDNVPSEEVVKKMKNYWRQLLNAKLITQRKFDNLTKAERGGLSELDKAGFIKRQLVETRQITKHVAQILDSRMNTKYDENDKLIREVKVITLKSKLVSDFRKDFQFYKVREINNYHHAHDAYLNAVVGTALIKKYPKLESEFVYGDYKVYDVRKMIAKSEQEIGKATAKYFFYSNIMNFFKTEITLANGEIRKRPLIETNGETGEIVWDKGRDFATVRKVLSMPQVNIVKKTEVQTGGFSKESILPKRNSDKLIARKKDWDPKKYGGFDSPTVAYSVLVVAKVEKGKSKKLKSVKELLGITIMERSSFEKNPIDFLEAKGYKEVKKDLIIKLPKYSLFELENGRKRMLASAGELQKGNELALPSKYVNFLYLASHYEKLKGSPEDNEQKQLFVEQHKHYLDEIIEQISEFSKRVILADANLDKVLSAYNKHRDKPIREQAENIIHLFTLTNLGAPAAFKYFDTTIDRKRYTSTKEVLDATLIHQSITGLYETRIDLSQLGGDGGEAAAKPAPGGSGGTLQLDDEYRLYSPLVKPDQNIQFWLEQFPQAWAETAGMGLAKQVPPQVIQLKASATPVSVRQYPLSKEAQEGIRPHVQRLIQQGILVPVQSPWNTPLLPVRKPGTNDYRPVQDLREVNKRVQDIHPTVPNPYNLLCALPPQRSWYTVLDLKDAFFCLRLHPTSQPLFAFEWRDPGTGRTGQLTWTRLPQGFKNSPTIFNEALHRDLANFRIQHPQVTLLQYVDDLLLAGATKQDCLEGTKALLLELSDLGYRASAKKAQICRREVTYLGYSLRDGQRWLTEARKKTVVQIPAPTTAKQVREFLGTAGFCRLWIPGFATLAAPLYPLTKPKGEFSWAPEHQKAFDAIKKALLSAPALALPDVTKPFTLYVDERKGVARGVLTQTLGPWRRPVAYLSKKLDPVASGWPVCLKAIAAVAILVKDADKLTLGQNITVIAPHALENIVRQPPDRWMTNARMTHYQSLLLTERVTFAPPAALNPATLLPEETDEPVTHDCHQLLIEETGVRKDLTDIPLTGEVLTWFTDGSSYVVEGKRMAGAAVVDGTRTIWASSLPEGTSAQKAELMALTQALRLAEGKSINIYTDSRYAFATAHVHGAIYKQRGWLTSAGREIKNKEEILSLLEALHLPKRLAIIHCPGHQKAKDPISRGNQMADRVAKQAAQGVNLLAGKRTADGSEFEKRTADGSEFESPKKKAKVE

SEQ ID NO: 21464 - protein, 2088 aa, synthetic construct
MPAAKRVKLDGGDKKYSIGLDIGTNSVGWAVITDEYKVPSKKFKVLGNTDRHSIKKNLIGALLFDSGETAEATRLKRTARRRYTRRKNRICYLQEIFSNEMAKVDDSFFHRLEESFLVEEDKKHERHPIFGNIVDEVAYHEKYPTIYHLRKKLVDSTDKADLRLIYLALAHMIKFRGHFLIEGDLNPDNSDVDKLFIQLVQTYNQLFEENPINASGVDAKAILSARLSKSRRLENLIAQLPGEKKNGLFGNLIALSLGLTPNFKSNFDLAEDAKLQLSKDTYDDDLDNLLAQIGDQYADLFLAAKNLSDAILLSDILRVNTEITKAPLSASMIKRYDEHHQDLTLLKALVRQQLPEKYKEIFFDQSKNGYAGYIDGGASQEEFYKFIKPILEKMDGTEELLVKLNREDLLRKQRTFDNGSIPHQIHLGELHAILRRQEDFYPFLKDNREKIEKILTFRIPYYVGPLARGNSRFAWMTRKSEETITPWNFEEVVDKGASAQSFIERMTNFDKNLPNEKVLPKHSLLYEYFTVYNELTKVKYVTEGMRKPAFLSGEQKKAIVDLLFKTNRKVTVKQLKEDYFKKIECFDSVEISGVEDRFNASLGTYHDLLKIIKDKDFLDNEENEDILEDIVLTLTLFEDREMIEERLKTYAHLFDDKVMKQLKRRRYTGWGRLSRKLINGIRDKQSGKTILDFLKSDGFANRNFMQLIHDDSLTFKEDIQKAQVSGQGDSLHEHIANLAGSPAIKKGILQTVKVVDELVKVMGRHKPENIVIEMARENQTTQKGQKNSRERMKRIEEGIKELGSQILKEHPVENTQLQNEKLYLYYLQNGRDMYVDQELDINRLSDYDVDHIVPQSFLKDDSIDNKVLTRSDKARGKSDNVPSEEVVKKMKNYWRQLLNAKLITQRKFDNLTKAERGGLSELDKAGFIKRQLVETRQITKHVAQILDSRMNTKYDENDKLIREVKVITLKSKLVSDFRKDFQFYKVREINNYHHAHDAYLNAVVGTALIKKYPKLESEFVYGDYKVYDVRKMIAKSEQEIGKATAKYFFYSNIMNFFKTEITLANGEIRKRPLIETNGETGEIVWDKGRDFATVRKVLSMPQVNIVKKTEVQTGGFSKESILPKRNSDKLIARKKDWDPKKYGGFDSPTVAYSVLVVAKVEKGKSKKLKSVKELLGITIMERSSFEKNPIDFLEAKGYKEVKKDLIIKLPKYSLFELENGRKRMLASAGELQKGNELALPSKYVNFLYLASHYEKLKGSPEDNEQKQLFVEQHKHYLDEIIEQISEFSKRVILADANLDKVLSAYNKHRDKPIREQAENIIHLFTLTNLGAPAAFKYFDTTIDRKRYTSTKEVLDATLIHQSITGLYETRIDLSQLGGDGGGGGPAPGGSGGTLQLDDEYRLYSPLVKPDQNIQFWLEQFPQAWAETAGMGLAKQVPPQVIQLKASATPVSVRQYPLSKEAQEGIRPHVQRLIQQGILVPVQSPWNTPLLPVRKPGTNDYRPVQDLREVNKRVQDIHPTVPNPYNLLCALPPQRSWYTVLDLKDAFFCLRLHPTSQPLFAFEWRDPGTGRTGQLTWTRLPQGFKNSPTIFNEALHRDLANFRIQHPQVTLLQYVDDLLLAGATKQDCLEGTKALLLELSDLGYRASAKKAQICRREVTYLGYSLRDGQRWLTEARKKTVVQIPAPTTAKQVREFLGTAGFCRLWIPGFATLAAPLYPLTKPKGEFSWAPEHQKAFDAIKKALLSAPALALPDVTKPFTLYVDERKGVARGVLTQTLGPWRRPVAYLSKKLDPVASGWPVCLKAIAAVAILVKDADKLTLGQNITVIAPHALENIVRQPPDRWMTNARMTHYQSLLLTERVTFAPPAALNPATLLPEETDEPVTHDCHQLLIEETGVRKDLTDIPLTGEVLTWFTDGSSYVVEGKRMAGAAVVDGTRTIWASSLPEGTSAQKAELMALTQALRLAEGKSINIYTDSRYAFATAHVHGAIYKQRGWLTSAGREIKNKEEILSLLEALHLPKRLAIIHCPGHQKAKDPISRGNQMADRVAKQAAQGVNLLAGKRTADGSEFEKRTADGSEFESPKKKAKVE

SEQ ID NO: 21465 - protein, 2090 aa, synthetic construct; identical to SEQ ID NO: 368

SEQ ID NO: 21466 - protein, 2088 aa, synthetic construct; identical to SEQ ID NO: 389

SEQ ID NO: 21467 - protein, 2090 aa, synthetic construct; identical to SEQ ID NO: 372

SEQ ID NO: 21468 - protein, 2088 aa, synthetic construct
MPAAKRVKLDGGDKKYSIGLDIGTNSVGWAVITDEYKVPSKKFKVLGNTDRHSIKKNLIGALLFDSGETAEATRLKRTARRRYTRRKNRICYLQEIFSNEMAKVDDSFFHRLEESFLVEEDKKHERHPIFGNIVDEVAYHEKYPTIYHLRKKLVDSTDKADLRLIYLALAHMIKFRGHFLIEGDLNPDNSDVDKLFIQLVQTYNQLFEENPINASGVDAKAILSARLSKSRRLENLIAQLPGEKKNGLFGNLIALSLGLTPNFKSNFDLAEDAKLQLSKDTYDDDLDNLLAQIGDQYADLFLAAKNLSDAILLSDILRVNTEITKAPLSASMIKRYDEHHQDLTLLKALVRQQLPEKYKEIFFDQSKNGYAGYIDGGASQEEFYKFIKPILEKMDGTEELLVKLNREDLLRKQRTFDNGSIPHQIHLGELHAILRRQEDFYPFLKDNREKIEKILTFRIPYYVGPLARGNSRFAWMTRKSEETITPWNFEEVVDKGASAQSFIERMTNFDKNLPNEKVLPKHSLLYEYFTVYNELTKVKYVTEGMRKPAFLSGEQKKAIVDLLFKTNRKVTVKQLKEDYFKKIECFDSVEISGVEDRFNASLGTYHDLLKIIKDKDFLDNEENEDILEDIVLTLTLFEDREMIEERLKTYAHLFDDKVMKQLKRRRYTGWGRLSRKLINGIRDKQSGKTILDFLKSDGFANRNFMQLIHDDSLTFKEDIQKAQVSGQGDSLHEHIANLAGSPAIKKGILQTVKVVDELVKVMGRHKPENIVIEMARENQTTQKGQKNSRERMKRIEEGIKELGSQILKEHPVENTQLQNEKLYLYYLQNGRDMYVDQELDINRLSDYDVDHIVPQSFLKDDSIDNKVLTRSDKARGKSDNVPSEEVVKKMKNYWRQLLNAKLITQRKFDNLTKAERGGLSELDKAGFIKRQLVETRQITKHVAQILDSRMNTKYDENDKLIREVKVITLKSKLVSDFRKDFQFYKVREINNYHHAHDAYLNAVVGTALIKKYPKLESEFVYGDYKVYDVRKMIAKSEQEIGKATAKYFFYSNIMNFFKTEITLANGEIRKRPLIETNGETGEIVWDKGRDFATVRKVLSMPQVNIVKKTEVQTGGFSKESILPKRNSDKLIARKKDWDPKKYGGFDSPTVAYSVLVVAKVEKGKSKKLKSVKELLGITIMERSSFEKNPIDFLEAKGYKEVKKDLIIKLPKYSLFELENGRKRMLASAGELQKGNELALPSKYVNFLYLASHYEKLKGSPEDNEQKQLFVEQHKHYLDEIIEQISEFSKRVILADANLDKVLSAYNKHRDKPIREQAENIIHLFTLTNLGAPAAFKYFDTTIDRKRYTSTKEVLDATLIHQSITGLYETRIDLSQLGGDGGPAPGGGGGSGGTLQLDDEYRLYSPLVKPDQNIQFWLEQFPQAWAETAGMGLAKQVPPQVIQLKASATPVSVRQYPLSKEAQEGIRPHVQRLIQQGILVPVQSPWNTPLLPVRKPGTNDYRPVQDLREVNKRVQDIHPTVPNPYNLLCALPPQRSWYTVLDLKDAFFCLRLHPTSQPLFAFEWRDPGTGRTGQLTWTRLPQGFKNSPTIFNEALHRDLANFRIQHPQVTLLQYVDDLLLAGATKQDCLEGTKALLLELSDLGYRASAKKAQICRREVTYLGYSLRDGQRWLTEARKKTVVQIPAPTTAKQVREFLGTAGFCRLWIPGFATLAAPLYPLTKPKGEFSWAPEHQKAFDAIKKALLSAPALALPDVTKPFTLYVDERKGVARGVLTQTLGPWRRPVAYLSKKLDPVASGWPVCLKAIAAVAILVKDADKLTLGQNITVIAPHALENIVRQPPDRWMTNARMTHYQSLLLTERVTFAPPAALNPATLLPEETDEPVTHDCHQLLIEETGVRKDLTDIPLTGEVLTWFTDGSSYVVEGKRMAGAAVVDGTRTIWASSLPEGTSAQKAELMALTQALRLAEGKSINIYTDSRYAFATAHVHGAIYKQRGWLTSAGREIKNKEEILSLLEALHLPKRLAIIHCPGHQKAKDPISRGNQMADRVAKQAAQGVNLLAGKRTADGSEFEKRTADGSEFESPKKKAKVE

SEQ ID NO: 21469 - protein, 2085 aa, synthetic construct; identical to SEQ ID NO: 393

SEQ ID NO: 21470 - protein, 2088 aa, synthetic construct; identical to SEQ ID NO: 359

SEQ ID NO: 21471 - protein, 2085 aa, synthetic construct
MPAAKRVKLDGGDKKYSIGLDIGTNSVGWAVITDEYKVPSKKFKVLGNTDRHSIKKNLIGALLFDSGETAEATRLKRTARRRYTRRKNRICYLQEIFSNEMAKVDDSFFHRLEESFLVEEDKKHERHPIFGNIVDEVAYHEKYPTIYHLRKKLVDSTDKADLRLIYLALAHMIKFRGHFLIEGDLNPDNSDVDKLFIQLVQTYNQLFEENPINASGVDAKAILSARLSKSRRLENLIAQLPGEKKNGLFGNLIALSLGLTPNFKSNFDLAEDAKLQLSKDTYDDDLDNLLAQIGDQYADLFLAAKNLSDAILLSDILRVNTEITKAPLSASMIKRYDEHHQDLTLLKALVRQQLPEKYKEIFFDQSKNGYAGYIDGGASQEEFYKFIKPILEKMDGTEELLVKLNREDLLRKQRTFDNGSIPHQIHLGELHAILRRQEDFYPFLKDNREKIEKILTFRIPYYVGPLARGNSRFAWMTRKSEETITPWNFEEVVDKGASAQSFIERMTNFDKNLPNEKVLPKHSLLYEYFTVYNELTKVKYVTEGMRKPAFLSGEQKKAIVDLLFKTNRKVTVKQLKEDYFKKIECFDSVEISGVEDRFNASLGTYHDLLKIIKDKDFLDNEENEDILEDIVLTLTLFEDREMIEERLKTYAHLFDDKVMKQLKRRRYTGWGRLSRKLINGIRDKQSGKTILDFLKSDGFANRNFMQLIHDDSLTFKEDIQKAQVSGQGDSLHEHIANLAGSPAIKKGILQTVKVVDELVKVMGRHKPENIVIEMARENQTTQKGQKNSRERMKRIEEGIKELGSQILKEHPVENTQLQNEKLYLYYLQNGRDMYVDQELDINRLSDYDVDHIVPQSFLKDDSIDNKVLTRSDKARGKSDNVPSEEVVKKMKNYWRQLLNAKLITQRKFDNLTKAERGGLSELDKAGFIKRQLVETRQITKHVAQILDSRMNTKYDENDKLIREVKVITLKSKLVSDFRKDFQFYKVREINNYHHAHDAYLNAVVGTALIKKYPKLESEFVYGDYKVYDVRKMIAKSEQEIGKATAKYFFYSNIMNFFKTEITLANGEIRKRPLIETNGETGEIVWDKGRDFATVRKVLSMPQVNIVKKTEVQTGGFSKESILPKRNSDKLIARKKDWDPKKYGGFDSPTVAYSVLVVAKVEKGKSKKLKSVKELLGITIMERSSFEKNPIDFLEAKGYKEVKKDLIIKLPKYSLFELENGRKRMLASAGELQKGNELALPSKYVNFLYLASHYEKLKGSPEDNEQKQLFVEQHKHYLDEIIEQISEFSKRVILADANLDKVLSAYNKHRDKPIREQAENIIHLFTLTNLGAPAAFKYFDTTIDRKRYTSTKEVLDATLIHQSITGLYETRIDLSQLGGDGGGGSGSSGGTLQLDDEYRLYSPLVKPDQNIQFWLEQFPQAWAETAGMGLAKQVPPQVIQLKASATPVSVRQYPLSKEAQEGIRPHVQRLIQQGILVPVQSPWNTPLLPVRKPGTNDYRPVQDLREVNKRVQDIHPTVPNPYNLLCALPPQRSWYTVLDLKDAFFCLRLHPTSQPLFAFEWRDPGTGRTGQLTWTRLPQGFKNSPTIFNEALHRDLANFRIQHPQVTLLQYVDDLLLAGATKQDCLEGTKALLLELSDLGYRASAKKAQICRREVTYLGYSLRDGQRWLTEARKKTVVQIPAPTTAKQVREFLGTAGFCRLWIPGFATLAAPLYPLTKPKGEFSWAPEHQKAFDAIKKALLSAPALALPDVTKPFTLYVDERKGVARGVLTQTLGPWRRPVAYLSKKLDPVASGWPVCLKAIAAVAILVKDADKLTLGQNITVIAPHALENIVRQPPDRWMTNARMTHYQSLLLTERVTFAPPAALNPATLLPEETDEPVTHDCHQLLIEETGVRKDLTDIPLTGEVLTWFTDGSSYVVEGKRMAGAAVVDGTRTIWASSLPEGTSAQKAELMALTQALRLAEGKSINIYTDSRYAFATAHVHGAIYKQRGWLTSAGREIKNKEEILSLLEALHLPKRLAIIHCPGHQKAKDPISRGNQMADRVAKQAAQGVNLLAGKRTADGSEFEKRTADGSEFESPKKKAKVE

SEQ ID NO: 21472 - protein, 2082 aa, synthetic construct
MPAAKRVKLDGGDKKYSIGLDIGTNSVGWAVITDEYKVPSKKFKVLGNTDRHSIKKNLIGALLFDSGETAEATRLKRTARRRYTRRKNRICYLQEIFSNEMAKVDDSFFHRLEESFLVEEDKKHERHPIFGNIVDEVAYHEKYPTIYHLRKKLVDSTDKADLRLIYLALAHMIKFRGHFLIEGDLNPDNSDVDKLFIQLVQTYNQLFEENPINASGVDAKAILSARLSKSRRLENLIAQLPGEKKNGLFGNLIALSLGLTPNFKSNFDLAEDAKLQLSKDTYDDDLDNLLAQIGDQYADLFLAAKNLSDAILLSDILRVNTEITKAPLSASMIKRYDEHHQDLTLLKALVRQQLPEKYKEIFFDQSKNGYAGYIDGGASQEEFYKFIKPILEKMDGTEELLVKLNREDLLRKQRTFDNGSIPHQIHLGELHAILRRQEDFYPFLKDNREKIEKILTFRIPYYVGPLARGNSRFAWMTRKSEETITPWNFEEVVDKGASAQSFIERMTNFDKNLPNEKVLPKHSLLYEYFTVYNELTKVKYVTEGMRKPAFLSGEQKKAIVDLLFKTNRKVTVKQLKEDYFKKIECFDSVEISGVEDRFNASLGTYHDLLKIIKDKDFLDNEENEDILEDIVLTLTLFEDREMIEERLKTYAHLFDDKVMKQLKRRRYTGWGRLSRKLINGIRDKQSGKTILDFLKSDGFANRNFMQLIHDDSLTFKEDIQKAQVSGQGDSLHEHIANLAGSPAIKKGILQTVKVVDELVKVMGRHKPENIVIEMARENQTTQKGQKNSRERMKRIEEGIKELGSQILKEHPVENTQLQNEKLYLYYLQNGRDMYVDQELDINRLSDYDVDHIVPQSFLKDDSIDNKVLTRSDKARGKSDNVPSEEVVKKMKNYWRQLLNAKLITQRKFDNLTKAERGGLSELDKAGFIKRQLVETRQITKHVAQILDSRMNTKYDENDKLIREVKVITLKSKLVSDFRKDFQFYKVREINNYHHAHDAYLNAVVGTALIKKYPKLESEFVYGDYKVYDVRKMIAKSEQEIGKATAKYFFYSNIMNFFKTEITLANGEIRKRPLIETNGETGEIVWDKGRDFATVRKVLSMPQVNIVKKTEVQTGGFSKESILPKRNSDKLIARKKDWDPKKYGGFDSPTVAYSVLVVAKVEKGKSKKLKSVKELLGITIMERSSFEKNPIDFLEAKGYKEVKKDLIIKLPKYSLFELENGRKRMLASAGELQKGNELALPSKYVNFLYLASHYEKLKGSPEDNEQKQLFVEQHKHYLDEIIEQISEFSKRVILADANLDKVLSAYNKHRDKPIREQAENIIHLFTLTNLGAPAAFKYFDTTIDRKRYTSTKEVLDATLIHQSITGLYETRIDLSQLGGDGGPAPGGTLQLDDEYRLYSPLVKPDQNIQFWLEQFPQAWAETAGMGLAKQVPPQVIQLKASATPVSVRQYPLSKEAQEGIRPHVQRLIQQGILVPVQSPWNTPLLPVRKPGTNDYRPVQDLREVNKRVQDIHPTVPNPYNLLCALPPQRSWYTVLDLKDAFFCLRLHPTSQPLFAFEWRDPGTGRTGQLTWTRLPQGFKNSPTIFNEALHRDLANFRIQHPQVTLLQYVDDLLLAGATKQDCLEGTKALLLELSDLGYRASAKKAQICRREVTYLGYSLRDGQRWLTEARKKTVVQIPAPTTAKQVREFLGTAGFCRLWIPGFATLAAPLYPLTKPKGEFSWAPEHQKAFDAIKKALLSAPALALPDVTKPFTLYVDERKGVARGVLTQTLGPWRRPVAYLSKKLDPVASGWPVCLKAIAAVAILVKDADKLTLGQNITVIAPHALENIVRQPPDRWMTNARMTHYQSLLLTERVTFAPPAALNPATLLPEETDEPVTHDCHQLLIEETGVRKDLTDIPLTGEVLTWFTDGSSYVVEGKRMAGAAVVDGTRTIWASSLPEGTSAQKAELMALTQALRLAEGKSINIYTDSRYAFATAHVHGAIYKQRGWLTSAGREIKNKEEILSLLEALHLPKRLAIIHCPGHQKAKDPISRGNQMADRVAKQAAQGVNLLAGKRTADGSEFEKRTADGSEFESPKKKAKVE

SEQ ID NO: 21473 - protein, 2085 aa, synthetic construct; identical to SEQ ID NO: 383

SEQ ID NO: 21474 - protein, 2085 aa, synthetic construct
MPAAKRVKLDGGDKKYSIGLDIGTNSVGWAVITDEYKVPSKKFKVLGNTDRHSIKKNLIGALLFDSGETAEATRLKRTARRRYTRRKNRICYLQEIFSNEMAKVDDSFFHRLEESFLVEEDKKHERHPIFGNIVDEVAYHEKYPTIYHLRKKLVDSTDKADLRLIYLALAHMIKFRGHFLIEGDLNPDNSDVDKLFIQLVQTYNQLFEENPINASGVDAKAILSARLSKSRRLENLIAQLPGEKKNGLFGNLIALSLGLTPNFKSNFDLAEDAKLQLSKDTYDDDLDNLLAQIGDQYADLFLAAKNLSDAILLSDILRVNTEITKAPLSASMIKRYDEHHQDLTLLKALVRQQLPEKYKEIFFDQSKNGYAGYIDGGASQEEFYKFIKPILEKMDGTEELLVKLNREDLLRKQRTFDNGSIPHQIHLGELHAILRRQEDFYPFLKDNREKIEKILTFRIPYYVGPLARGNSRFAWMTRKSEETITPWNFEEVVDKGASAQSFIERMTNFDKNLPNEKVLPKHSLLYEYFTVYNELTKVKYVTEGMRKPAFLSGEQKKAIVDLLFKTNRKVTVKQLKEDYFKKIECFDSVEISGVEDRFNASLGTYHDLLKIIKDKDFLDNEENEDILEDIVLTLTLFEDREMIEERLKTYAHLFDDKVMKQLKRRRYTGWGRLSRKLINGIRDKQSGKTILDFLKSDGFANRNFMQLIHDDSLTFKEDIQKAQVSGQGDSLHEHIANLAGSPAIKKGILQTVKVVDELVKVMGRHKPENIVIEMARENQTTQKGQKNSRERMKRIEEGIKELGSQILKEHPVENTQLQNEKLYLYYLQNGRDMYVDQELDINRLSDYDVDHIVPQSFLKDDSIDNKVLTRSDKARGKSDNVPSEEVVKKMKNYWRQLLNAKLITQRKFDNLTKAERGGLSELDKAGFIKRQLVETRQITKHVAQILDSRMNTKYDENDKLIREVKVITLKSKLVSDFRKDFQFYKVREINNYHHAHDAYLNAVVGTALIKKYPKLESEFVYGDYKVYDVRKMIAKSEQEIGKATAKYFFYSNIMNFFKTEITLANGEIRKRPLIETNGETGEIVWDKGRDFATVRKVLSMPQVNIVKKTEVQTGGFSKESILPKRNSDKLIARKKDWDPKKYGGFDSPTVAYSVLVVAKVEKGKSKKLKSVKELLGITIMERSSFEKNPIDFLEAKGYKEVKKDLIIKLPKYSLFELENGRKRMLASAGELQKGNELALPSKYVNFLYLASHYEKLKGSPEDNEQKQLFVEQHKHYLDEIIEQISEFSKRVILADANLDKVLSAYNKHRDKPIREQAENIIHLFTLTNLGAPAAFKYFDTTIDRKRYTSTKEVLDATLIHQSITGLYETRIDLSQLGGDGGGGGGGSGGTLQLDDEYRLYSPLVKPDQNIQFWLEQFPQAWAETAGMGLAKQVPPQVIQLKASATPVSVRQYPLSKEAQEGIRPHVQRLIQQGILVPVQSPWNTPLLPVRKPGTNDYRPVQDLREVNKRVQDIHPTVPNPYNLLCALPPQRSWYTVLDLKDAFFCLRLHPTSQPLFAFEWRDPGTGRTGQLTWTRLPQGFKNSPTIFNEALHRDLANFRIQHPQVTLLQYVDDLLLAGATKQDCLEGTKALLLELSDLGYRASAKKAQICRREVTYLGYSLRDGQRWLTEARKKTVVQIPAPTTAKQVREFLGTAGFCRLWIPGFATLAAPLYPLTKPKGEFSWAPEHQKAFDAIKKALLSAPALALPDVTKPFTLYVDERKGVARGVLTQTLGPWRRPVAYLSKKLDPVASGWPVCLKAIAAVAILVKDADKLTLGQNITVIAPHALENIVRQPPDRWMTNARMTHYQSLLLTERVTFAPPAALNPATLLPEETDEPVTHDCHQLLIEETGVRKDLTDIPLTGEVLTWFTDGSSYVVEGKRMAGAAVVDGTRTIWASSLPEGTSAQKAELMALTQALRLAEGKSINIYTDSRYAFATAHVHGAIYKQRGWLTSAGREIKNKEEILSLLEALHLPKRLAIIHCPGHQKAKDPISRGNQMADRVAKQAAQGVNLLAGKRTADGSEFEKRTADGSEFESPKKKAKVE

SEQ ID NO: 21475 - protein, 2088 aa, synthetic construct; identical to SEQ ID NO: 395

SEQ ID NO: 21476 - protein, 2088 aa, synthetic construct; identical to SEQ ID NO: 364

SEQ ID NO: 21477 - protein, 2088 aa, synthetic construct; identical to SEQ ID NO: 406

SEQ ID NO: 21478 - protein, 2085 aa, synthetic construct; identical to SEQ ID NO: 353

SEQ ID NO: 21479 - protein, 2085 aa, synthetic construct; identical to SEQ ID NO: 397

SEQ ID NO: 21480 - protein, 2087 aa, synthetic construct; identical to SEQ ID NO: 380

SEQ ID NO: 21481 - protein, 2085 aa, synthetic construct
MPAAKRVKLDGGDKKYSIGLDIGTNSVGWAVITDEYKVPSKKFKVLGNTDRHSIKKNLIGALLFDSGETAEATRLKRTARRRYTRRKNRICYLQEIFSNEMAKVDDSFFHRLEESFLVEEDKKHERHPIFGNIVDEVAYHEKYPTIYHLRKKLVDSTDKADLRLIYLALAHMIKFRGHFLIEGDLNPDNSDVDKLFIQLVQTYNQLFEENPINASGVDAKAILSARLSKSRRLENLIAQLPGEKKNGLFGNLIALSLGLTPNFKSNFDLAEDAKLQLSKDTYDDDLDNLLAQIGDQYADLFLAAKNLSDAILLSDILRVNTEITKAPLSASMIKRYDEHHQDLTLLKALVRQQLPEKYKEIFFDQSKNGYAGYIDGGASQEEFYKFIKPILEKMDGTEELLVKLNREDLLRKQRTFDNGSIPHQIHLGELHAILRRQEDFYPFLKDNREKIEKILTFRIPYYVGPLARGNSRFAWMTRKSEETITPWNFEEVVDKGASAQSFIERMTNFDKNLPNEKVLPKHSLLYEYFTVYNELTKVKYVTEGMRKPAFLSGEQKKAIVDLLFKTNRKVTVKQLKEDYFKKIECFDSVEISGVEDRFNASLGTYHDLLKIIKDKDFLDNEENEDILEDIVLTLTLFEDREMIEERLKTYAHLFDDKVMKQLKRRRYTGWGRLSRKLINGIRDKQSGKTILDFLKSDGFANRNFMQLIHDDSLTFKEDIQKAQVSGQGDSLHEHIANLAGSPAIKKGILQTVKVVDELVKVMGRHKPENIVIEMARENQTTQKGQKNSRERMKRIEEGIKELGSQILKEHPVENTQLQNEKLYLYYLQNGRDMYVDQELDINRLSDYDVDHIVPQSFLKDDSIDNKVLTRSDKARGKSDNVPSEEVVKKMKNYWRQLLNAKLITQRKFDNLTKAERGGLSELDKAGFIKRQLVETRQITKHVAQILDSRMNTKYDENDKLIREVKVITLKSKLVSDFRKDFQFYKVREINNYHHAHDAYLNAVVGTALIKKYPKLESEFVYGDYKVYDVRKMIAKSEQEIGKATAKYFFYSNIMNFFKTEITLANGEIRKRPLIETNGETGEIVWDKGRDFATVRKVLSMPQVNIVKKTEVQTGGFSKESILPKRNSDKLIARKKDWDPKKYGGFDSPTVAYSVLVVAKVEKGKSKKLKSVKELLGITIMERSSFEKNPIDFLEAKGYKEVKKDLIIKLPKYSLFELENGRKRMLASAGELQKGNELALPSKYVNFLYLASHYEKLKGSPEDNEQKQLFVEQHKHYLDEIIEQISEFSKRVILADANLDKVLSAYNKHRDKPIREQAENIIHLFTLTNLGAPAAFKYFDTTIDRKRYTSTKEVLDATLIHQSITGLYETRIDLSQLGGDGGGGSGGSGGTLQLDDEYRLYSPLVKPDQNIQFWLEQFPQAWAETAGMGLAKQVPPQVIQLKASATPVSVRQYPLSKEAQEGIRPHVQRLIQQGILVPVQSPWNTPLLPVRKPGTNDYRPVQDLREVNKRVQDIHPTVPNPYNLLCALPPQRSWYTVLDLKDAFFCLRLHPTSQPLFAFEWRDPGTGRTGQLTWTRLPQGFKNSPTIFNEALHRDLANFRIQHPQVTLLQYVDDLLLAGATKQDCLEGTKALLLELSDLGYRASAKKAQICRREVTYLGYSLRDGQRWLTEARKKTVVQIPAPTTAKQVREFLGTAGFCRLWIPGFATLAAPLYPLTKPKGEFSWAPEHQKAFDAIKKALLSAPALALPDVTKPFTLYVDERKGVARGVLTQTLGPWRRPVAYLSKKLDPVASGWPVCLKAIAAVAILVKDADKLTLGQNITVIAPHALENIVRQPPDRWMTNARMTHYQSLLLTERVTFAPPAALNPATLLPEETDEPVTHDCHQLLIEETGVRKDLTDIPLTGEVLTWFTDGSSYVVEGKRMAGAAVVDGTRTIWASSLPEGTSAQKAELMALTQALRLAEGKSINIYTDSRYAFATAHVHGAIYKQRGWLTSAGREIKNKEEILSLLEALHLPKRLAIIHCPGHQKAKDPISRGNQMADRVAKQAAQGVNLLAGKRTADGSEFEKRTADGSEFESPKKKAKVE

SEQ ID NO: 21482 - protein, 1999 aa, synthetic construct
MPAAKRVKLDGGDKKYSIGLDIGTNSVGWAVITDEYKVPSKKFKVLGNTDRHSIKKNLIGALLFDSGETAEATRLKRTARRRYTRRKNRICYLQEIFSNEMAKVDDSFFHRLEESFLVEEDKKHERHPIFGNIVDEVAYHEKYPTIYHLRKKLVDSTDKADLRLIYLALAHMIKFRGHFLIEGDLNPDNSDVDKLFIQLVQTYNQLFEENPINASGVDAKAILSARLSKSRRLENLIAQLPGEKKNGLFGNLIALSLGLTPNFKSNFDLAEDAKLQLSKDTYDDDLDNLLAQIGDQYADLFLAAKNLSDAILLSDILRVNTEITKAPLSASMIKRYDEHHQDLTLLKALVRQQLPEKYKEIFFDQSKNGYAGYIDGGASQEEFYKFIKPILEKMDGTEELLVKLNREDLLRKQRTFDNGSIPHQIHLGELHAILRRQEDFYPFLKDNREKIEKILTFRIPYYVGPLARGNSRFAWMTRKSEETITPWNFEEVVDKGASAQSFIERMTNFDKNLPNEKVLPKHSLLYEYFTVYNELTKVKYVTEGMRKPAFLSGEQKKAIVDLLFKTNRKVTVKQLKEDYFKKIECFDSVEISGVEDRFNASLGTYHDLLKIIKDKDFLDNEENEDILEDIVLTLTLFEDREMIEERLKTYAHLFDDKVMKQLKRRRYTGWGRLSRKLINGIRDKQSGKTILDFLKSDGFANRNFMQLIHDDSLTFKEDIQKAQVSGQGDSLHEHIANLAGSPAIKKGILQTVKVVDELVKVMGRHKPENIVIEMARENQTTQKGQKNSRERMKRIEEGIKELGSQILKEHPVENTQLQNEKLYLYYLQNGRDMYVDQELDINRLSDYDVDHIVPQSFLKDDSIDNKVLTRSDKARGKSDNVPSEEVVKKMKNYWRQLLNAKLITQRKFDNLTKAERGGLSELDKAGFIKRQLVETRQITKHVAQILDSRMNTKYDENDKLIREVKVITLKSKLVSDFRKDFQFYKVREINNYHHAHDAYLNAVVGTALIKKYPKLESEFVYGDYKVYDVRKMIAKSEQEIGKATAKYFFYSNIMNFFKTEITLANGEIRKRPLIETNGETGEIVWDKGRDFATVRKVLSMPQVNIVKKTEVQTGGFSKESILPKRNSDKLIARKKDWDPKKYGGFDSPTVAYSVLVVAKVEKGKSKKLKSVKELLGITIMERSSFEKNPIDFLEAKGYKEVKKDLIIKLPKYSLFELENGRKRMLASAGELQKGNELALPSKYVNFLYLASHYEKLKGSPEDNEQKQLFVEQHKHYLDEIIEQISEFSKRVILADANLDKVLSAYNKHRDKPIREQAENIIHLFTLTNLGAPAAFKYFDTTIDRKRYTSTKEVLDATLIHQSITGLYETRIDLSQLGGDGGGGSGGGGSSGGGVLDTPPSHIGLEHLPPPPEVPQFPLNLERLQALQDLVHRSLEAGYISPWDGPGNNPVFPVRKPNGAWRFVHDLRATNALTKPIPALSPGPPDLTAIPTHPPHIICLDLKDAFFQIPVEDRFRFYLSFTLPSPGGLQPHRRFAWRVLPQGFINSPALFNRALQEPLRQVSAAFSQSLLVSYMDDILYASPTEEQRSQCYQALAARLRDLGFQVASEKTSQTPSPVPFLGQMVHEQIVTYQSLPTLQISSPISLHQLQAVLGDLQWVSRGTPTTRRPLQLLYSSLKRHHDPRAIIQLSPEQLQGIAELRQALSHNARSRYNEQEPLLAYVHLTRAGSTLVLFQKGAQFPLAYFQTPLTDNQASPWGLLLLLGCQYLQTQALSSYAKPILKYYHNLPKTSLDNWIQSSEDPRVQELLQLWPQISSQGIQPPGPWKTLITRAEVFLTPQFSPDPIPAALCLFSDGATGRGAYCLWKDHLLDFQAVPAPESAQKGELAGLLAGLAAAPPEPVNIWVDSKYLYSLLRTWVLGAWLQPDPVPSYALLYKSLLRHPAIVVGHVRSHSSASHPIASLNNYVDQLAGKRTADGSEFEKRTADGSEFESPKKKAKVE

SEQ ID NO: 21483 - protein, 2015 aa, synthetic construct
MPAAKRVKLDGGDKKYSIGLDIGTNSVGWAVITDEYKVPSKKFKVLGNTDRHSIKKNLIGALLFDSGETAEATRLKRTARRRYTRRKNRICYLQEIFSNEMAKVDDSFFHRLEESFLVEEDKKHERHPIFGNIVDEVAYHEKYPTIYHLRKKLVDSTDKADLRLIYLALAHMIKFRGHFLIEGDLNPDNSDVDKLFIQLVQTYNQLFEENPINASGVDAKAILSARLSKSRRLENLIAQLPGEKKNGLFGNLIALSLGLTPNFKSNFDLAEDAKLQLSKDTYDDDLDNLLAQIGDQYADLFLAAKNLSDAILLSDILRVNTEITKAPLSASMIKRYDEHHQDLTLLKALVRQQLPEKYKEIFFDQSKNGYAGYIDGGASQEEFYKFIKPILEKMDGTEELLVKLNREDLLRKQRTFDNGSIPHQIHLGELHAILRRQEDFYPFLKDNREKIEKILTFRIPYYVGPLARGNSRFAWMTRKSEETITPWNFEEVVDKGASAQSFIERMTNFDKNLPNEKVLPKHSLLYEYFTVYNELTKVKYVTEGMRKPAFLSGEQKKAIVDLLFKTNRKVTVKQLKEDYFKKIECFDSVEISGVEDRFNASLGTYHDLLKIIKDKDFLDNEENEDILEDIVLTLTLFEDREMIEERLKTYAHLFDDKVMKQLKRRRYTGWGRLSRKLINGIRDKQSGKTILDFLKSDGFANRNFMQLIHDDSLTFKEDIQKAQVSGQGDSLHEHIANLAGSPAIKKGILQTVKVVDELVKVMGRHKPENIVIEMARENQTTQKGQKNSRERMKRIEEGIKELGSQILKEHPVENTQLQNEKLYLYYLQNGRDMYVDQELDINRLSDYDVDHIVPQSFLKDDSIDNKVLTRSDKARGKSDNVPSEEVVKKMKNYWRQLLNAKLITQRKFDNLTKAERGGLSELDKAGFIKRQLVETRQITKHVAQILDSRMNTKYDENDKLIREVKVITLKSKLVSDFRKDFQFYKVREINNYHHAHDAYLNAVVGTALIKKYPKLESEFVYGDYKVYDVRKMIAKSEQEIGKATAKYFFYSNIMNFFKTEITLANGEIRKRPLIETNGETGEIVWDKGRDFATVRKVLSMPQVNIVKKTEVQTGGFSKESILPKRNSDKLIARKKDWDPKKYGGFDSPTVAYSVLVVAKVEKGKSKKLKSVKELLGITIMERSSFEKNPIDFLEAKGYKEVKKDLIIKLPKYSLFELENGRKRMLASAGELQKGNELALPSKYVNFLYLASHYEKLKGSPEDNEQKQLFVEQHKHYLDEIIEQISEFSKRVILADANLDKVLSAYNKHRDKPIREQAENIIHLFTLTNLGAPAAFKYFDTTIDRKRYTSTKEVLDATLIHQSITGLYETRIDLSQLGGDGGGGGGSGGGGSGGGGSGGGGSGGGGSGGGVLDTPPSHIGLEHLPPPPEVPQFPLNLERLQALQDLVHRSLEAGYISPWDGPGNNPVFPVRKPNGAWRFVHDLRATNALTKPIPALSPGPPDLTAIPTHPPHIICLDLKDAFFQIPVEDRFRFYLSFTLPSPGGLQPHRRFAWRVLPQGFINSPALFNRALQEPLRQVSAAFSQSLLVSYMDDILYASPTEEQRSQCYQALAARLRDLGFQVASEKTSQTPSPVPFLGQMVHEQIVTYQSLPTLQISSPISLHQLQAVLGDLQWVSRGTPTTRRPLQLLYSSLKRHHDPRAIIQLSPEQLQGIAELRQALSHNARSRYNEQEPLLAYVHLTRAGSTLVLFQKGAQFPLAYFQTPLTDNQASPWGLLLLLGCQYLQTQALSSYAKPILKYYHNLPKTSLDNWIQSSEDPRVQELLQLWPQISSQGIQPPGPWKTLITRAEVFLTPQFSPDPIPAALCLFSDGATGRGAYCLWKDHLLDFQAVPAPESAQKGELAGLLAGLAAAPPEPVNIWVDSKYLYSLLRTWVLGAWLQPDPVPSYALLYKSLLRHPAIVVGHVRSHSSASHPIASLNNYVDQLAGKRTADGSEFEKRTADGSEFESPKKKAKVE

SEQ ID NO: 21484 - protein, 1996 aa, synthetic construct
MPAAKRVKLDGGDKKYSIGLDIGTNSVGWAVITDEYKVPSKKFKVLGNTDRHSIKKNLIGALLFDSGETAEATRLKRTARRRYTRRKNRICYLQEIFSNEMAKVDDSFFHRLEESFLVEEDKKHERHPIFGNIVDEVAYHEKYPTIYHLRKKLVDSTDKADLRLIYLALAHMIKFRGHFLIEGDLNPDNSDVDKLFIQLVQTYNQLFEENPINASGVDAKAILSARLSKSRRLENLIAQLPGEKKNGLFGNLIALSLGLTPNFKSNFDLAEDAKLQLSKDTYDDDLDNLLAQIGDQYADLFLAAKNLSDAILLSDILRVNTEITKAPLSASMIKRYDEHHQDLTLLKALVRQQLPEKYKEIFFDQSKNGYAGYIDGGASQEEFYKFIKPILEKMDGTEELLVKLNREDLLRKQRTFDNGSIPHQIHLGELHAILRRQEDFYPFLKDNREKIEKILTFRIPYYVGPLARGNSRFAWMTRKSEETITPWNFEEVVDKGASAQSFIERMTNFDKNLPNEKVLPKHSLLYEYFTVYNELTKVKYVTEGMRKPAFLSGEQKKAIVDLLFKTNRKVTVKQLKEDYFKKIECFDSVEISGVEDRFNASLGTYHDLLKIIKDKDFLDNEENEDILEDIVLTLTLFEDREMIEERLKTYAHLFDDKVMKQLKRRRYTGWGRLSRKLINGIRDKQSGKTILDFLKSDGFANRNFMQLIHDDSLTFKEDIQKAQVSGQGDSLHEHIANLAGSPAIKKGILQTVKVVDELVKVMGRHKPENIVIEMARENQTTQKGQKNSRERMKRIEEGIKELGSQILKEHPVENTQLQNEKLYLYYLQNGRDMYVDQELDINRLSDYDVDHIVPQSFLKDDSIDNKVLTRSDKARGKSDNVPSEEVVKKMKNYWRQLLNAKLITQRKFDNLTKAERGGLSELDKAGFIKRQLVETRQITKHVAQILDSRMNTKYDENDKLIREVKVITLKSKLVSDFRKDFQFYKVREINNYHHAHDAYLNAVVGTALIKKYPKLESEFVYGDYKVYDVRKMIAKSEQEIGKATAKYFFYSNIMNFFKTEITLANGEIRKRPLIETNGETGEIVWDKGRDFATVRKVLSMPQVNIVKKTEVQTGGFSKESILPKRNSDKLIARKKDWDPKKYGGFDSPTVAYSVLVVAKVEKGKSKKLKSVKELLGITIMERSSFEKNPIDFLEAKGYKEVKKDLIIKLPKYSLFELENGRKRMLASAGELQKGNELALPSKYVNFLYLASHYEKLKGSPEDNEQKQLFVEQHKHYLDEIIEQISEFSKRVILADANLDKVLSAYNKHRDKPIREQAENIIHLFTLTNLGAPAAFKYFDTTIDRKRYTSTKEVLDATLIHQSITGLYETRIDLSQLGGDGGGGGGSSGGGVLDTPPSHIGLEHLPPPPEVPQFPLNLERLQALQDLVHRSLEAGYISPWDGPGNNPVFPVRKPNGAWRFVHDLRATNALTKPIPALSPGPPDLTAIPTHPPHIICLDLKDAFFQIPVEDRFRFYLSFTLPSPGGLQPHRRFAWRVLPQGFINSPALFNRALQEPLRQVSAAFSQSLLVSYMDDILYASPTEEQRSQCYQALAARLRDLGFQVASEKTSQTPSPVPFLGQMVHEQIVTYQSLPTLQISSPISLHQLQAVLGDLQWVSRGTPTTRRPLQLLYSSLKRHHDPRAIIQLSPEQLQGIAELRQALSHNARSRYNEQEPLLAYVHLTRAGSTLVLFQKGAQFPLAYFQTPLTDNQASPWGLLLLLGCQYLQTQALSSYAKPILKYYHNLPKTSLDNWIQSSEDPRVQELLQLWPQISSQGIQPPGPWKTLITRAEVFLTPQFSPDPIPAALCLFSDGATGRGAYCLWKDHLLDFQAVPAPESAQKGELAGLLAGLAAAPPEPVNIWVDSKYLYSLLRTWVLGAWLQPDPVPSYALLYKSLLRHPAIVVGHVRSHSSASHPIASLNNYVDQLAGKRTADGSEFEKRTADGSEFESPKKKAKVE

SEQ ID NO: 21485 - protein, 2123 aa, synthetic construct; identical to SEQ ID NO: 21399

SEQ ID NO: 21486 - protein, 2095 aa, synthetic construct
MPAAKRVKLDGGDKKYSIGLDIGTNSVGWAVITDEYKVPSKKFKVLGNTDRHSIKKNLIGALLFDSGETAEATRLKRTARRRYTRRKNRICYLQEIFSNEMAKVDDSFFHRLEESFLVEEDKKHERHPIFGNIVDEVAYHEKYPTIYHLRKKLVDSTDKADLRLIYLALAHMIKFRGHFLIEGDLNPDNSDVDKLFIQLVQTYNQLFEENPINASGVDAKAILSARLSKSRRLENLIAQLPGEKKNGLFGNLIALSLGLTPNFKSNFDLAEDAKLQLSKDTYDDDLDNLLAQIGDQYADLFLAAKNLSDAILLSDILRVNTEITKAPLSASMIKRYDEHHQDLTLLKALVRQQLPEKYKEIFFDQSKNGYAGYIDGGASQEEFYKFIKPILEKMDGTEELLVKLNREDLLRKQRTFDNGSIPHQIHLGELHAILRRQEDFYPFLKDNREKIEKILTFRIPYYVGPLARGNSRFAWMTRKSEETITPWNFEEVVDKGASAQSFIERMTNFDKNLPNEKVLPKHSLLYEYFTVYNELTKVKYVTEGMRKPAFLSGEQKKAIVDLLFKTNRKVTVKQLKEDYFKKIECFDSVEISGVEDRFNASLGTYHDLLKIIKDKDFLDNEENEDILEDIVLTLTLFEDREMIEERLKTYAHLFDDKVMKQLKRRRYTGWGRLSRKLINGIRDKQSGKTILDFLKSDGFANRNFMQLIHDDSLTFKEDIQKAQVSGQGDSLHEHIANLAGSPAIKKGILQTVKVVDELVKVMGRHKPENIVIEMARENQTTQKGQKNSRERMKRIEEGIKELGSQILKEHPVENTQLQNEKLYLYYLQNGRDMYVDQELDINRLSDYDVDHIVPQSFLKDDSIDNKVLTRSDKARGKSDNVPSEEVVKKMKNYWRQLLNAKLITQRKFDNLTKAERGGLSELDKAGFIKRQLVETRQITKHVAQILDSRMNTKYDENDKLIREVKVITLKSKLVSDFRKDFQFYKVREINNYHHAHDAYLNAVVGTALIKKYPKLESEFVYGDYKVYDVRKMIAKSEQEIGKATAKYFFYSNIMNFFKTEITLANGEIRKRPLIETNGETGEIVWDKGRDFATVRKVLSMPQVNIVKKTEVQTGGFSKESILPKRNSDKLIARKKDWDPKKYGGFDSPTVAYSVLVVAKVEKGKSKKLKSVKELLGITIMERSSFEKNPIDFLEAKGYKEVKKDLIIKLPKYSLFELENGRKRMLASAGELQKGNELALPSKYVNFLYLASHYEKLKGSPEDNEQKQLFVEQHKHYLDEIIEQISEFSKRVILADANLDKVLSAYNKHRDKPIREQAENIIHLFTLTNLGAPAAFKYFDTTIDRKRYTSTKEVLDATLIHQSITGLYETRIDLSQLGGDGGGGSGGSGGSGGSGGSGGSGGLDDEYRLYSPLVKPDQNIQFWLEQFPQAWAETAGMGLAKQVPPQVIQLKASATPVSVRQYPLSKEAQEGIRPHVQRLIQQGILVPVQSPWNTPLLPVRKPGTNDYRPVQDLREVNKRVQDIHPTVPNPYNLLCALPPQRSWYTVLDLKDAFFCLRLHPTSQPLFAFEWRDPGTGRTGQLTWTRLPQGFKNSPTIFNEALHRDLANFRIQHPQVTLLQYVDDLLLAGATKQDCLEGTKALLLELSDLGYRASAKKAQICRREVTYLGYSLRDGQRWLTEARKKTVVQIPAPTTAKQVREFLGKAGFCRLFIPGFATLAAPLYPLTKPKGEFSWAPEHQKAFDAIKKALLSAPALALPDVTKPFTLYVDERKGVARGVLTQTLGPWRRPVAYLSKKLDPVASGWPVCLKAIAAVAILVKDADKLTLGQNITVIAPHALENIVRQPPDRWMTNARMTHYQSLLLTERVTFAPPAALNPATLLPEETDEPVTHDCHQLLIEETGVRKDLTDIPLTGEVLTWFTDGSSYVVEGKRMAGAAVVDGTRTIWASSLPEGTSAQKAELMALTQALRLAEGKSINIYTDSRYAFATAHVHGAIYKQRGWLTSAGREIKNKEEILSLLEALHLPKRLAIIHCPGHQKAKDPISRGNQMADRVAKQAAQGVNLLPAGKRTADGSEFEKRTADGSEFESPKKKAKVE

SEQ ID NO: 21487 - protein, 2088 aa, synthetic construct
MPAAKRVKLDGGDKKYSIGLDIGTNSVGWAVITDEYKVPSKKFKVLGNTDRHSIKKNLIGALLFDSGETAEATRLKRTARRRYTRRKNRICYLQEIFSNEMAKVDDSFFHRLEESFLVEEDKKHERHPIFGNIVDEVAYHEKYPTIYHLRKKLVDSTDKADLRLIYLALAHMIKFRGHFLIEGDLNPDNSDVDKLFIQLVQTYNQLFEENPINASGVDAKAILSARLSKSRRLENLIAQLPGEKKNGLFGNLIALSLGLTPNFKSNFDLAEDAKLQLSKDTYDDDLDNLLAQIGDQYADLFLAAKNLSDAILLSDILRVNTEITKAPLSASMIKRYDEHHQDLTLLKALVRQQLPEKYKEIFFDQSKNGYAGYIDGGASQEEFYKFIKPILEKMDGTEELLVKLNREDLLRKQRTFDNGSIPHQIHLGELHAILRRQEDFYPFLKDNREKIEKILTFRIPYYVGPLARGNSRFAWMTRKSEETITPWNFEEVVDKGASAQSFIERMTNFDKNLPNEKVLPKHSLLYEYFTVYNELTKVKYVTEGMRKPAFLSGEQKKAIVDLLFKTNRKVTVKQLKEDYFKKIECFDSVEISGVEDRFNASLGTYHDLLKIIKDKDFLDNEENEDILEDIVLTLTLFEDREMIEERLKTYAHLFDDKVMKQLKRRRYTGWGRLSRKLINGIRDKQSGKTILDFLKSDGFANRNFMQLIHDDSLTFKEDIQKAQVSGQGDSLHEHIANLAGSPAIKKGILQTVKVVDELVKVMGRHKPENIVIEMARENQTTQKGQKNSRERMKRIEEGIKELGSQILKEHPVENTQLQNEKLYLYYLQNGRDMYVDQELDINRLSDYDVDHIVPQSFLKDDSIDNKVLTRSDKARGKSDNVPSEEVVKKMKNYWRQLLNAKLITQRKFDNLTKAERGGLSELDKAGFIKRQLVETRQITKHVAQILDSRMNTKYDENDKLIREVKVITLKSKLVSDFRKDFQFYKVREINNYHHAHDAYLNAVVGTALIKKYPKLESEFVYGDYKVYDVRKMIAKSEQEIGKATAKYFFYSNIMNFFKTEITLANGEIRKRPLIETNGETGEIVWDKGRDFATVRKVLSMPQVNIVKKTEVQTGGFSKESILPKRNSDKLIARKKDWDPKKYGGFDSPTVAYSVLVVAKVEKGKSKKLKSVKELLGITIMERSSFEKNPIDFLEAKGYKEVKKDLIIKLPKYSLFELENGRKRMLASAGELQKGNELALPSKYVNFLYLASHYEKLKGSPEDNEQKQLFVEQHKHYLDEIIEQISEFSKRVILADANLDKVLSAYNKHRDKPIREQAENIIHLFTLTNLGAPAAFKYFDTTIDRKRYTSTKEVLDATLIHQSITGLYETRIDLSQLGGDGGPAPEAAAKGGGGGLDDEYRLYSPLVKPDQNIQFWLEQFPQAWAETAGMGLAKQVPPQVIQLKASATPVSVRQYPLSKEAQEGIRPHVQRLIQQGILVPVQSPWNTPLLPVRKPGTNDYRPVQDLREVNKRVQDIHPTVPNPYNLLCALPPQRSWYTVLDLKDAFFCLRLHPTSQPLFAFEWRDPGTGRTGQLTWTRLPQGFKNSPTIFNEALHRDLANFRIQHPQVTLLQYVDDLLLAGATKQDCLEGTKALLLELSDLGYRASAKKAQICRREVTYLGYSLRDGQRWLTEARKKTVVQIPAPTTAKQVREFLGKAGFCRLFIPGFATLAAPLYPLTKPKGEFSWAPEHQKAFDAIKKALLSAPALALPDVTKPFTLYVDERKGVARGVLTQTLGPWRRPVAYLSKKLDPVASGWPVCLKAIAAVAILVKDADKLTLGQNITVIAPHALENIVRQPPDRWMTNARMTHYQSLLLTERVTFAPPAALNPATLLPEETDEPVTHDCHQLLIEETGVRKDLTDIPLTGEVLTWFTDGSSYVVEGKRMAGAAVVDGTRTIWASSLPEGTSAQKAELMALTQALRLAEGKSINIYTDSRYAFATAHVHGAIYKQRGWLTSAGREIKNKEEILSLLEALHLPKRLAIIHCPGHQKAKDPISRGNQMADRVAKQAAQGVNLLPAGKRTADGSEFEKRTADGSEFESPKKKAKVE

SEQ ID NO: 21488 - protein, 2107 aa, synthetic construct
MPAAKRVKLDGGDKKYSIGLDIGTNSVGWAVITDEYKVPSKKFKVLGNTDRHSIKKNLIGALLFDSGETAEATRLKRTARRRYTRRKNRICYLQEIFSNEMAKVDDSFFHRLEESFLVEEDKKHERHPIFGNIVDEVAYHEKYPTIYHLRKKLVDSTDKADLRLIYLALAHMIKFRGHFLIEGDLNPDNSDVDKLFIQLVQTYNQLFEENPINASGVDAKAILSARLSKSRRLENLIAQLPGEKKNGLFGNLIALSLGLTPNFKSNFDLAEDAKLQLSKDTYDDDLDNLLAQIGDQYADLFLAAKNLSDAILLSDILRVNTEITKAPLSASMIKRYDEHHQDLTLLKALVRQQLPEKYKEIFFDQSKNGYAGYIDGGASQEEFYKFIKPILEKMDGTEELLVKLNREDLLRKQRTFDNGSIPHQIHLGELHAILRRQEDFYPFLKDNREKIEKILTFRIPYYVGPLARGNSRFAWMTRKSEETITPWNFEEVVDKGASAQSFIERMTNFDKNLPNEKVLPKHSLLYEYFTVYNELTKVKYVTEGMRKPAFLSGEQKKAIVDLLFKTNRKVTVKQLKEDYFKKIECFDSVEISGVEDRFNASLGTYHDLLKIIKDKDFLDNEENEDILEDIVLTLTLFEDREMIEERLKTYAHLFDDKVMKQLKRRRYTGWGRLSRKLINGIRDKQSGKTILDFLKSDGFANRNFMQLIHDDSLTFKEDIQKAQVSGQGDSLHEHIANLAGSPAIKKGILQTVKVVDELVKVMGRHKPENIVIEMARENQTTQKGQKNSRERMKRIEEGIKELGSQILKEHPVENTQLQNEKLYLYYLQNGRDMYVDQELDINRLSDYDVDHIVPQSFLKDDSIDNKVLTRSDKARGKSDNVPSEEVVKKMKNYWRQLLNAKLITQRKFDNLTKAERGGLSELDKAGFIKRQLVETRQITKHVAQILDSRMNTKYDENDKLIREVKVITLKSKLVSDFRKDFQFYKVREINNYHHAHDAYLNAVVGTALIKKYPKLESEFVYGDYKVYDVRKMIAKSEQEIGKATAKYFFYSNIMNFFKTEITLANGEIRKRPLIETNGETGEIVWDKGRDFATVRKVLSMPQVNIVKKTEVQTGGFSKESILPKRNSDKLIARKKDWDPKKYGGFDSPTVAYSVLVVAKVEKGKSKKLKSVKELLGITIMERSSFEKNPIDFLEAKGYKEVKKDLIIKLPKYSLFELENGRKRMLASAGELQKGNELALPSKYVNFLYLASHYEKLKGSPEDNEQKQLFVEQHKHYLDEIIEQISEFSKRVILADANLDKVLSAYNKHRDKPIREQAENIIHLFTLTNLGAPAAFKYFDTTIDRKRYTSTKEVLDATLIHQSITGLYETRIDLSQLGGDGGEAAAKEAAAKEAAAKEAAAKEAAAKEAAAKGGLDDEYRLYSPLVKPDQNIQFWLEQFPQAWAETAGMGLAKQVPPQVIQLKASATPVSVRQYPLSKEAQEGIRPHVQRLIQQGILVPVQSPWNTPLLPVRKPGTNDYRPVQDLREVNKRVQDIHPTVPNPYNLLCALPPQRSWYTVLDLKDAFFCLRLHPTSQPLFAFEWRDPGTGRTGQLTWTRLPQGFKNSPTIFNEALHRDLANFRIQHPQVTLLQYVDDLLLAGATKQDCLEGTKALLLELSDLGYRASAKKAQICRREVTYLGYSLRDGQRWLTEARKKTVVQIPAPTTAKQVREFLGKAGFCRLFIPGFATLAAPLYPLTKPKGEFSWAPEHQKAFDAIKKALLSAPALALPDVTKPFTLYVDERKGVARGVLTQTLGPWRRPVAYLSKKLDPVASGWPVCLKAIAAVAILVKDADKLTLGQNITVIAPHALENIVRQPPDRWMTNARMTHYQSLLLTERVTFAPPAALNPATLLPEETDEPVTHDCHQLLIEETGVRKDLTDIPLTGEVLTWFTDGSSYVVEGKRMAGAAVVDGTRTIWASSLPEGTSAQKAELMALTQALRLAEGKSINIYTDSRYAFATAHVHGAIYKQRGWLTSAGREIKNKEEILSLLEALHLPKRLAIIHCPGHQKAKDPISRGNQMADRVAKQAAQGVNLLPAGKRTADGSEFEKRTADGSEFESPKKKAKVE

SEQ ID NO: 21489 - protein, 2090 aa, synthetic construct; identical to SEQ ID NO: 54

SEQ ID NO: 21490 - protein, 2088 aa, synthetic construct; identical to SEQ ID NO: 21398

SEQ ID NO: 21491 - protein, 2093 aa, synthetic construct; identical to SEQ ID NO: 90

SEQ ID NO: 21492 - protein, 2086 aa, synthetic construct
MPAAKRVKLDGGDKKYSIGLDIGTNSVGWAVITDEYKVPSKKFKVLGNTDRHSIKKNLIGALLFDSGETAEATRLKRTARRRYTRRKNRICYLQEIFSNEMAKVDDSFFHRLEESFLVEEDKKHERHPIFGNIVDEVAYHEKYPTIYHLRKKLVDSTDKADLRLIYLALAHMIKFRGHFLIEGDLNPDNSDVDKLFIQLVQTYNQLFEENPINASGVDAKAILSARLSKSRRLENLIAQLPGEKKNGLFGNLIALSLGLTPNFKSNFDLAEDAKLQLSKDTYDDDLDNLLAQIGDQYADLFLAAKNLSDAILLSDILRVNTEITKAPLSASMIKRYDEHHQDLTLLKALVRQQLPEKYKEIFFDQSKNGYAGYIDGGASQEEFYKFIKPILEKMDGTEELLVKLNREDLLRKQRTFDNGSIPHQIHLGELHAILRRQEDFYPFLKDNREKIEKILTFRIPYYVGPLARGNSRFAWMTRKSEETITPWNFEEVVDKGASAQSFIERMTNFDKNLPNEKVLPKHSLLYEYFTVYNELTKVKYVTEGMRKPAFLSGEQKKAIVDLLFKTNRKVTVKQLKEDYFKKIECFDSVEISGVEDRFNASLGTYHDLLKIIKDKDFLDNEENEDILEDIVLTLTLFEDREMIEERLKTYAHLFDDKVMKQLKRRRYTGWGRLSRKLINGIRDKQSGKTILDFLKSDGFANRNFMQLIHDDSLTFKEDIQKAQVSGQGDSLHEHIANLAGSPAIKKGILQTVKVVDELVKVMGRHKPENIVIEMARENQTTQKGQKNSRERMKRIEEGIKELGSQILKEHPVENTQLQNEKLYLYYLQNGRDMYVDQELDINRLSDYDVDHIVPQSFLKDDSIDNKVLTRSDKARGKSDNVPSEEVVKKMKNYWRQLLNAKLITQRKFDNLTKAERGGLSELDKAGFIKRQLVETRQITKHVAQILDSRMNTKYDENDKLIREVKVITLKSKLVSDFRKDFQFYKVREINNYHHAHDAYLNAVVGTALIKKYPKLESEFVYGDYKVYDVRKMIAKSEQEIGKATAKYFFYSNIMNFFKTEITLANGEIRKRPLIETNGETGEIVWDKGRDFATVRKVLSMPQVNIVKKTEVQTGGFSKESILPKRNSDKLIARKKDWDPKKYGGFDSPTVAYSVLVVAKVEKGKSKKLKSVKELLGITIMERSSFEKNPIDFLEAKGYKEVKKDLIIKLPKYSLFELENGRKRMLASAGELQKGNELALPSKYVNFLYLASHYEKLKGSPEDNEQKQLFVEQHKHYLDEIIEQISEFSKRVILADANLDKVLSAYNKHRDKPIREQAENIIHLFTLTNLGAPAAFKYFDTTIDRKRYTSTKEVLDATLIHQSITGLYETRIDLSQLGGDGGGGGGGSPAPGGLDDEYRLYSPLVKPDQNIQFWLEQFPQAWAETAGMGLAKQVPPQVIQLKASATPVSVRQYPLSKEAQEGIRPHVQRLIQQGILVPVQSPWNTPLLPVRKPGTNDYRPVQDLREVNKRVQDIHPTVPNPYNLLCALPPQRSWYTVLDLKDAFFCLRLHPTSQPLFAFEWRDPGTGRTGQLTWTRLPQGFKNSPTIFNEALHRDLANFRIQHPQVTLLQYVDDLLLAGATKQDCLEGTKALLLELSDLGYRASAKKAQICRREVTYLGYSLRDGQRWLTEARKKTVVQIPAPTTAKQVREFLGKAGFCRLFIPGFATLAAPLYPLTKPKGEFSWAPEHQKAFDAIKKALLSAPALALPDVTKPFTLYVDERKGVARGVLTQTLGPWRRPVAYLSKKLDPVASGWPVCLKAIAAVAILVKDADKLTLGQNITVIAPHALENIVRQPPDRWMTNARMTHYQSLLLTERVTFAPPAALNPATLLPEETDEPVTHDCHQLLIEETGVRKDLTDIPLTGEVLTWFTDGSSYVVEGKRMAGAAVVDGTRTIWASSLPEGTSAQKAELMALTQALRLAEGKSINIYTDSRYAFATAHVHGAIYKQRGWLTSAGREIKNKEEILSLLEALHLPKRLAIIHCPGHQKAKDPISRGNQMADRVAKQAAQGVNLLPAGKRTADGSEFEKRTADGSEFESPKKKAKVE

SEQ ID NO: 21493 - protein, 2086 aa, synthetic construct; identical to SEQ ID NO: 58

SEQ ID NO: 21494 - protein, 2088 aa, synthetic construct; identical to SEQ ID NO: 40

SEQ ID NO: 21495 - protein, 2088 aa, synthetic construct; identical to SEQ ID NO: 63

SEQ ID NO: 21496 - protein, 2089 aa, synthetic construct; identical to SEQ ID NO: 74

SEQ ID NO: 21497 - protein, 2092 aa, synthetic construct
MPAAKRVKLDGGDKKYSIGLDIGTNSVGWAVITDEYKVPSKKFKVLGNTDRHSIKKNLIGALLFDSGETAEATRLKRTARRRYTRRKNRICYLQEIFSNEMAKVDDSFFHRLEESFLVEEDKKHERHPIFGNIVDEVAYHEKYPTIYHLRKKLVDSTDKADLRLIYLALAHMIKFRGHFLIEGDLNPDNSDVDKLFIQLVQTYNQLFEENPINASGVDAKAILSARLSKSRRLENLIAQLPGEKKNGLFGNLIALSLGLTPNFKSNFDLAEDAKLQLSKDTYDDDLDNLLAQIGDQYADLFLAAKNLSDAILLSDILRVNTEITKAPLSASMIKRYDEHHQDLTLLKALVRQQLPEKYKEIFFDQSKNGYAGYIDGGASQEEFYKFIKPILEKMDGTEELLVKLNREDLLRKQRTFDNGSIPHQIHLGELHAILRRQEDFYPFLKDNREKIEKILTFRIPYYVGPLARGNSRFAWMTRKSEETITPWNFEEVVDKGASAQSFIERMTNFDKNLPNEKVLPKHSLLYEYFTVYNELTKVKYVTEGMRKPAFLSGEQKKAIVDLLFKTNRKVTVKQLKEDYFKKIECFDSVEISGVEDRFNASLGTYHDLLKIIKDKDFLDNEENEDILEDIVLTLTLFEDREMIEERLKTYAHLFDDKVMKQLKRRRYTGWGRLSRKLINGIRDKQSGKTILDFLKSDGFANRNFMQLIHDDSLTFKEDIQKAQVSGQGDSLHEHIANLAGSPAIKKGILQTVKVVDELVKVMGRHKPENIVIEMARENQTTQKGQKNSRERMKRIEEGIKELGSQILKEHPVENTQLQNEKLYLYYLQNGRDMYVDQELDINRLSDYDVDHIVPQSFLKDDSIDNKVLTRSDKARGKSDNVPSEEVVKKMKNYWRQLLNAKLITQRKFDNLTKAERGGLSELDKAGFIKRQLVETRQITKHVAQILDSRMNTKYDENDKLIREVKVITLKSKLVSDFRKDFQFYKVREINNYHHAHDAYLNAVVGTALIKKYPKLESEFVYGDYKVYDVRKMIAKSEQEIGKATAKYFFYSNIMNFFKTEITLANGEIRKRPLIETNGETGEIVWDKGRDFATVRKVLSMPQVNIVKKTEVQTGGFSKESILPKRNSDKLIARKKDWDPKKYGGFDSPTVAYSVLVVAKVEKGKSKKLKSVKELLGITIMERSSFEKNPIDFLEAKGYKEVKKDLIIKLPKYSLFELENGRKRMLASAGELQKGNELALPSKYVNFLYLASHYEKLKGSPEDNEQKQLFVEQHKHYLDEIIEQISEFSKRVILADANLDKVLSAYNKHRDKPIREQAENIIHLFTLTNLGAPAAFKYFDTTIDRKRYTSTKEVLDATLIHQSITGLYETRIDLSQLGGDGGGSSGSSGSSGSSGSSGGLDDEYRLYSPLVKPDQNIQFWLEQFPQAWAETAGMGLAKQVPPQVIQLKASATPVSVRQYPLSKEAQEGIRPHVQRLIQQGILVPVQSPWNTPLLPVRKPGTNDYRPVQDLREVNKRVQDIHPTVPNPYNLLCALPPQRSWYTVLDLKDAFFCLRLHPTSQPLFAFEWRDPGTGRTGQLTWTRLPQGFKNSPTIFNEALHRDLANFRIQHPQVTLLQYVDDLLLAGATKQDCLEGTKALLLELSDLGYRASAKKAQICRREVTYLGYSLRDGQRWLTEARKKTVVQIPAPTTAKQVREFLGKAGFCRLFIPGFATLAAPLYPLTKPKGEFSWAPEHQKAFDAIKKALLSAPALALPDVTKPFTLYVDERKGVARGVLTQTLGPWRRPVAYLSKKLDPVASGWPVCLKAIAAVAILVKDADKLTLGQNITVIAPHALENIVRQPPDRWMTNARMTHYQSLLLTERVTFAPPAALNPATLLPEETDEPVTHDCHQLLIEETGVRKDLTDIPLTGEVLTWFTDGSSYVVEGKRMAGAAVVDGTRTIWASSLPEGTSAQKAELMALTQALRLAEGKSINIYTDSRYAFATAHVHGAIYKQRGWLTSAGREIKNKEEILSLLEALHLPKRLAIIHCPGHQKAKDPISRGNQMADRVAKQAAQGVNLLPAGKRTADGSEFEKRTADGSEFESPKKKAKVE

SEQ ID NO: 21498 - protein, 2083 aa, synthetic construct; identical to SEQ ID NO: 76

SEQ ID NO: 21499 - protein, 2088 aa, synthetic construct; identical to SEQ ID NO: 71

SEQ ID NO: 21500 - protein, 2086 aa, synthetic construct; identical to SEQ ID NO: 73

SEQ ID NO: 21501 - protein, 2085 aa, synthetic construct; identical to SEQ ID NO: 57

SEQ ID NO: 21502 - protein, 2086 aa, synthetic construct; identical to SEQ ID NO: 43

SEQ ID NO: 21503 - protein, 2086 aa, synthetic construct
MPAAKRVKLDGGDKKYSIGLDIGTNSVGWAVITDEYKVPSKKFKVLGNTDRHSIKKNLIGALLFDSGETAEATRLKRTARRRYTRRKNRICYLQEIFSNEMAKVDDSFFHRLEESFLVEEDKKHERHPIFGNIVDEVAYHEKYPTIYHLRKKLVDSTDKADLRLIYLALAHMIKFRGHFLIEGDLNPDNSDVDKLFIQLVQTYNQLFEENPINASGVDAKAILSARLSKSRRLENLIAQLPGEKKNGLFGNLIALSLGLTPNFKSNFDLAEDAKLQLSKDTYDDDLDNLLAQIGDQYADLFLAAKNLSDAILLSDILRVNTEITKAPLSASMIKRYDEHHQDLTLLKALVRQQLPEKYKEIFFDQSKNGYAGYIDGGASQEEFYKFIKPILEKMDGTEELLVKLNREDLLRKQRTFDNGSIPHQIHLGELHAILRRQEDFYPFLKDNREKIEKILTFRIPYYVGPLARGNSRFAWMTRKSEETITPWNFEEVVDKGASAQSFIERMTNFDKNLPNEKVLPKHSLLYEYFTVYNELTKVKYVTEGMRKPAFLSGEQKKAIVDLLFKTNRKVTVKQLKEDYFKKIECFDSVEISGVEDRFNASLGTYHDLLKIIKDKDFLDNEENEDILEDIVLTLTLFEDREMIEERLKTYAHLFDDKVMKQLKRRRYTGWGRLSRKLINGIRDKQSGKTILDFLKSDGFANRNFMQLIHDDSLTFKEDIQKAQVSGQGDSLHEHIANLAGSPAIKKGILQTVKVVDELVKVMGRHKPENIVIEMARENQTTQKGQKNSRERMKRIEEGIKELGSQILKEHPVENTQLQNEKLYLYYLQNGRDMYVDQELDINRLSDYDVDHIVPQSFLKDDSIDNKVLTRSDKARGKSDNVPSEEVVKKMKNYWRQLLNAKLITQRKFDNLTKAERGGLSELDKAGFIKRQLVETRQITKHVAQILDSRMNTKYDENDKLIREVKVITLKSKLVSDFRKDFQFYKVREINNYHHAHDAYLNAVVGTALIKKYPKLESEFVYGDYKVYDVRKMIAKSEQEIGKATAKYFFYSNIMNFFKTEITLANGEIRKRPLIETNGETGEIVWDKGRDFATVRKVLSMPQVNIVKKTEVQTGGFSKESILPKRNSDKLIARKKDWDPKKYGGFDSPTVAYSVLVVAKVEKGKSKKLKSVKELLGITIMERSSFEKNPIDFLEAKGYKEVKKDLIIKLPKYSLFELENGRKRMLASAGELQKGNELALPSKYVNFLYLASHYEKLKGSPEDNEQKQLFVEQHKHYLDEIIEQISEFSKRVILADANLDKVLSAYNKHRDKPIREQAENIIHLFTLTNLGAPAAFKYFDTTIDRKRYTSTKEVLDATLIHQSITGLYETRIDLSQLGGDGGGSSGSSGSSGGLDDEYRLYSPLVKPDQNIQFWLEQFPQAWAETAGMGLAKQVPPQVIQLKASATPVSVRQYPLSKEAQEGIRPHVQRLIQQGILVPVQSPWNTPLLPVRKPGTNDYRPVQDLREVNKRVQDIHPTVPNPYNLLCALPPQRSWYTVLDLKDAFFCLRLHPTSQPLFAFEWRDPGTGRTGQLTWTRLPQGFKNSPTIFNEALHRDLANFRIQHPQVTLLQYVDDLLLAGATKQDCLEGTKALLLELSDLGYRASAKKAQICRREVTYLGYSLRDGQRWLTEARKKTVVQIPAPTTAKQVREFLGKAGFCRLFIPGFATLAAPLYPLTKPKGEFSWAPEHQKAFDAIKKALLSAPALALPDVTKPFTLYVDERKGVARGVLTQTLGPWRRPVAYLSKKLDPVASGWPVCLKAIAAVAILVKDADKLTLGQNITVIAPHALENIVRQPPDRWMTNARMTHYQSLLLTERVTFAPPAALNPATLLPEETDEPVTHDCHQLLIEETGVRKDLTDIPLTGEVLTWFTDGSSYVVEGKRMAGAAVVDGTRTIWASSLPEGTSAQKAELMALTQALRLAEGKSINIYTDSRYAFATAHVHGAIYKQRGWLTSAGREIKNKEEILSLLEALHLPKRLAIIHCPGHQKAKDPISRGNQMADRVAKQAAQGVNLLPAGKRTADGSEFEKRTADGSEFESPKKKAKVE

SEQ ID NO: 21504 - protein, 2088 aa, synthetic construct
MPAAKRVKLDGGDKKYSIGLDIGTNSVGWAVITDEYKVPSKKFKVLGNTDRHSIKKNLIGALLFDSGETAEATRLKRTARRRYTRRKNRICYLQEIFSNEMAKVDDSFFHRLEESFLVEEDKKHERHPIFGNIVDEVAYHEKYPTIYHLRKKLVDSTDKADLRLIYLALAHMIKFRGHFLIEGDLNPDNSDVDKLFIQLVQTYNQLFEENPINASGVDAKAILSARLSKSRRLENLIAQLPGEKKNGLFGNLIALSLGLTPNFKSNFDLAEDAKLQLSKDTYDDDLDNLLAQIGDQYADLFLAAKNLSDAILLSDILRVNTEITKAPLSASMIKRYDEHHQDLTLLKALVRQQLPEKYKEIFFDQSKNGYAGYIDGGASQEEFYKFIKPILEKMDGTEELLVKLNREDLLRKQRTFDNGSIPHQIHLGELHAILRRQEDFYPFLKDNREKIEKILTFRIPYYVGPLARGNSRFAWMTRKSEETITPWNFEEVVDKGASAQSFIERMTNFDKNLPNEKVLPKHSLLYEYFTVYNELTKVKYVTEGMRKPAFLSGEQKKAIVDLLFKTNRKVTVKQLKEDYFKKIECFDSVEISGVEDRFNASLGTYHDLLKIIKDKDFLDNEENEDILEDIVLTLTLFEDREMIEERLKTYAHLFDDKVMKQLKRRRYTGWGRLSRKLINGIRDKQSGKTILDFLKSDGFANRNFMQLIHDDSLTFKEDIQKAQVSGQGDSLHEHIANLAGSPAIKKGILQTVKVVDELVKVMGRHKPENIVIEMARENQTTQKGQKNSRERMKRIEEGIKELGSQILKEHPVENTQLQNEKLYLYYLQNGRDMYVDQELDINRLSDYDVDHIVPQSFLKDDSIDNKVLTRSDKARGKSDNVPSEEVVKKMKNYWRQLLNAKLITQRKFDNLTKAERGGLSELDKAGFIKRQLVETRQITKHVAQILDSRMNTKYDENDKLIREVKVITLKSKLVSDFRKDFQFYKVREINNYHHAHDAYLNAVVGTALIKKYPKLESEFVYGDYKVYDVRKMIAKSEQEIGKATAKYFFYSNIMNFFKTEITLANGEIRKRPLIETNGETGEIVWDKGRDFATVRKVLSMPQVNIVKKTEVQTGGFSKESILPKRNSDKLIARKKDWDPKKYGGFDSPTVAYSVLVVAKVEKGKSKKLKSVKELLGITIMERSSFEKNPIDFLEAKGYKEVKKDLIIKLPKYSLFELENGRKRMLASAGELQKGNELALPSKYVNFLYLASHYEKLKGSPEDNEQKQLFVEQHKHYLDEIIEQISEFSKRVILADANLDKVLSAYNKHRDKPIREQAENIIHLFTLTNLGAPAAFKYFDTTIDRKRYTSTKEVLDATLIHQSITGLYETRIDLSQLGGDGGGSSEAAAKPAPGGLDDEYRLYSPLVKPDQNIQFWLEQFPQAWAETAGMGLAKQVPPQVIQLKASATPVSVRQYPLSKEAQEGIRPHVQRLIQQGILVPVQSPWNTPLLPVRKPGTNDYRPVQDLREVNKRVQDIHPTVPNPYNLLCALPPQRSWYTVLDLKDAFFCLRLHPTSQPLFAFEWRDPGTGRTGQLTWTRLPQGFKNSPTIFNEALHRDLANFRIQHPQVTLLQYVDDLLLAGATKQDCLEGTKALLLELSDLGYRASAKKAQICRREVTYLGYSLRDGQRWLTEARKKTVVQIPAPTTAKQVREFLGKAGFCRLFIPGFATLAAPLYPLTKPKGEFSWAPEHQKAFDAIKKALLSAPALALPDVTKPFTLYVDERKGVARGVLTQTLGPWRRPVAYLSKKLDPVASGWPVCLKAIAAVAILVKDADKLTLGQNITVIAPHALENIVRQPPDRWMTNARMTHYQSLLLTERVTFAPPAALNPATLLPEETDEPVTHDCHQLLIEETGVRKDLTDIPLTGEVLTWFTDGSSYVVEGKRMAGAAVVDGTRTIWASSLPEGTSAQKAELMALTQALRLAEGKSINIYTDSRYAFATAHVHGAIYKQRGWLTSAGREIKNKEEILSLLEALHLPKRLAIIHCPGHQKAKDPISRGNQMADRVAKQAAQGVNLLPAGKRTADGSEFEKRTADGSEFESPKKKAKVE

SEQ ID NO: 21505 - protein, 2086 aa, synthetic construct; identical to SEQ ID NO: 89

SEQ ID NO: 21506 - protein, 2088 aa, synthetic construct; identical to SEQ ID NO: 42

SEQ ID NO: 21507 - protein, 2083 aa, synthetic construct
MPAAKRVKLDGGDKKYSIGLDIGTNSVGWAVITDEYKVPSKKFKVLGNTDRHSIKKNLIGALLFDSGETAEATRLKRTARRRYTRRKNRICYLQEIFSNEMAKVDDSFFHRLEESFLVEEDKKHERHPIFGNIVDEVAYHEKYPTIYHLRKKLVDSTDKADLRLIYLALAHMIKFRGHFLIEGDLNPDNSDVDKLFIQLVQTYNQLFEENPINASGVDAKAILSARLSKSRRLENLIAQLPGEKKNGLFGNLIALSLGLTPNFKSNFDLAEDAKLQLSKDTYDDDLDNLLAQIGDQYADLFLAAKNLSDAILLSDILRVNTEITKAPLSASMIKRYDEHHQDLTLLKALVRQQLPEKYKEIFFDQSKNGYAGYIDGGASQEEFYKFIKPILEKMDGTEELLVKLNREDLLRKQRTFDNGSIPHQIHLGELHAILRRQEDFYPFLKDNREKIEKILTFRIPYYVGPLARGNSRFAWMTRKSEETITPWNFEEVVDKGASAQSFIERMTNFDKNLPNEKVLPKHSLLYEYFTVYNELTKVKYVTEGMRKPAFLSGEQKKAIVDLLFKTNRKVTVKQLKEDYFKKIECFDSVEISGVEDRFNASLGTYHDLLKIIKDKDFLDNEENEDILEDIVLTLTLFEDREMIEERLKTYAHLFDDKVMKQLKRRRYTGWGRLSRKLINGIRDKQSGKTILDFLKSDGFANRNFMQLIHDDSLTFKEDIQKAQVSGQGDSLHEHIANLAGSPAIKKGILQTVKVVDELVKVMGRHKPENIVIEMARENQTTQKGQKNSRERMKRIEEGIKELGSQILKEHPVENTQLQNEKLYLYYLQNGRDMYVDQELDINRLSDYDVDHIVPQSFLKDDSIDNKVLTRSDKARGKSDNVPSEEVVKKMKNYWRQLLNAKLITQRKFDNLTKAERGGLSELDKAGFIKRQLVETRQITKHVAQILDSRMNTKYDENDKLIREVKVITLKSKLVSDFRKDFQFYKVREINNYHHAHDAYLNAVVGTALIKKYPKLESEFVYGDYKVYDVRKMIAKSEQEIGKATAKYFFYSNIMNFFKTEITLANGEIRKRPLIETNGETGEIVWDKGRDFATVRKVLSMPQVNIVKKTEVQTGGFSKESILPKRNSDKLIARKKDWDPKKYGGFDSPTVAYSVLVVAKVEKGKSKKLKSVKELLGITIMERSSFEKNPIDFLEAKGYKEVKKDLIIKLPKYSLFELENGRKRMLASAGELQKGNELALPSKYVNFLYLASHYEKLKGSPEDNEQKQLFVEQHKHYLDEIIEQISEFSKRVILADANLDKVLSAYNKHRDKPIREQAENIIHLFTLTNLGAPAAFKYFDTTIDRKRYTSTKEVLDATLIHQSITGLYETRIDLSQLGGDGGGGSGSSGGLDDEYRLYSPLVKPDQNIQFWLEQFPQAWAETAGMGLAKQVPPQVIQLKASATPVSVRQYPLSKEAQEGIRPHVQRLIQQGILVPVQSPWNTPLLPVRKPGTNDYRPVQDLREVNKRVQDIHPTVPNPYNLLCALPPQRSWYTVLDLKDAFFCLRLHPTSQPLFAFEWRDPGTGRTGQLTWTRLPQGFKNSPTIFNEALHRDLANFRIQHPQVTLLQYVDDLLLAGATKQDCLEGTKALLLELSDLGYRASAKKAQICRREVTYLGYSLRDGQRWLTEARKKTVVQIPAPTTAKQVREFLGKAGFCRLFIPGFATLAAPLYPLTKPKGEFSWAPEHQKAFDAIKKALLSAPALALPDVTKPFTLYVDERKGVARGVLTQTLGPWRRPVAYLSKKLDPVASGWPVCLKAIAAVAILVKDADKLTLGQNITVIAPHALENIVRQPPDRWMTNARMTHYQSLLLTERVTFAPPAALNPATLLPEETDEPVTHDCHQLLIEETGVRKDLTDIPLTGEVLTWFTDGSSYVVEGKRMAGAAVVDGTRTIWASSLPEGTSAQKAELMALTQALRLAEGKSINIYTDSRYAFATAHVHGAIYKQRGWLTSAGREIKNKEEILSLLEALHLPKRLAIIHCPGHQKAKDPISRGNQMADRVAKQAAQGVNLLPAGKRTADGSEFEKRTADGSEFESPKKKAKVE

SEQ ID NO: 21508 - protein, 2086 aa, synthetic construct
MPAAKRVKLDGGDKKYSIGLDIGTNSVGWAVITDEYKVPSKKFKVLGNTDRHSIKKNLIGALLFDSGETAEATRLKRTARRRYTRRKNRICYLQEIFSNEMAKVDDSFFHRLEESFLVEEDKKHERHPIFGNIVDEVAYHEKYPTIYHLRKKLVDSTDKADLRLIYLALAHMIKFRGHFLIEGDLNPDNSDVDKLFIQLVQTYNQLFEENPINASGVDAKAILSARLSKSRRLENLIAQLPGEKKNGLFGNLIALSLGLTPNFKSNFDLAEDAKLQLSKDTYDDDLDNLLAQIGDQYADLFLAAKNLSDAILLSDILRVNTEITKAPLSASMIKRYDEHHQDLTLLKALVRQQLPEKYKEIFFDQSKNGYAGYIDGGASQEEFYKFIKPILEKMDGTEELLVKLNREDLLRKQRTFDNGSIPHQIHLGELHAILRRQEDFYPFLKDNREKIEKILTFRIPYYVGPLARGNSRFAWMTRKSEETITPWNFEEVVDKGASAQSFIERMTNFDKNLPNEKVLPKHSLLYEYFTVYNELTKVKYVTEGMRKPAFLSGEQKKAIVDLLFKTNRKVTVKQLKEDYFKKIECFDSVEISGVEDRFNASLGTYHDLLKIIKDKDFLDNEENEDILEDIVLTLTLFEDREMIEERLKTYAHLFDDKVMKQLKRRRYTGWGRLSRKLINGIRDKQSGKTILDFLKSDGFANRNFMQLIHDDSLTFKEDIQKAQVSGQGDSLHEHIANLAGSPAIKKGILQTVKVVDELVKVMGRHKPENIVIEMARENQTTQKGQKNSRERMKRIEEGIKELGSQILKEHPVENTQLQNEKLYLYYLQNGRDMYVDQELDINRLSDYDVDHIVPQSFLKDDSIDNKVLTRSDKARGKSDNVPSEEVVKKMKNYWRQLLNAKLITQRKFDNLTKAERGGLSELDKAGFIKRQLVETRQITKHVAQILDSRMNTKYDENDKLIREVKVITLKSKLVSDFRKDFQFYKVREINNYHHAHDAYLNAVVGTALIKKYPKLESEFVYGDYKVYDVRKMIAKSEQEIGKATAKYFFYSNIMNFFKTEITLANGEIRKRPLIETNGETGEIVWDKGRDFATVRKVLSMPQVNIVKKTEVQTGGFSKESILPKRNSDKLIARKKDWDPKKYGGFDSPTVAYSVLVVAKVEKGKSKKLKSVKELLGITIMERSSFEKNPIDFLEAKGYKEVKKDLIIKLPKYSLFELENGRKRMLASAGELQKGNELALPSKYVNFLYLASHYEKLKGSPEDNEQKQLFVEQHKHYLDEIIEQISEFSKRVILADANLDKVLSAYNKHRDKPIREQAENIIHLFTLTNLGAPAAFKYFDTTIDRKRYTSTKEVLDATLIHQSITGLYETRIDLSQLGGDGGGGSGGGPAPGGLDDEYRLYSPLVKPDQNIQFWLEQFPQAWAETAGMGLAKQVPPQVIQLKASATPVSVRQYPLSKEAQEGIRPHVQRLIQQGILVPVQSPWNTPLLPVRKPGTNDYRPVQDLREVNKRVQDIHPTVPNPYNLLCALPPQRSWYTVLDLKDAFFCLRLHPTSQPLFAFEWRDPGTGRTGQLTWTRLPQGFKNSPTIFNEALHRDLANFRIQHPQVTLLQYVDDLLLAGATKQDCLEGTKALLLELSDLGYRASAKKAQICRREVTYLGYSLRDGQRWLTEARKKTVVQIPAPTTAKQVREFLGKAGFCRLFIPGFATLAAPLYPLTKPKGEFSWAPEHQKAFDAIKKALLSAPALALPDVTKPFTLYVDERKGVARGVLTQTLGPWRRPVAYLSKKLDPVASGWPVCLKAIAAVAILVKDADKLTLGQNITVIAPHALENIVRQPPDRWMTNARMTHYQSLLLTERVTFAPPAALNPATLLPEETDEPVTHDCHQLLIEETGVRKDLTDIPLTGEVLTWFTDGSSYVVEGKRMAGAAVVDGTRTIWASSLPEGTSAQKAELMALTQALRLAEGKSINIYTDSRYAFATAHVHGAIYKQRGWLTSAGREIKNKEEILSLLEALHLPKRLAIIHCPGHQKAKDPISRGNQMADRVAKQAAQGVNLLPAGKRTADGSEFEKRTADGSEFESPKKKAKVE

SEQ ID NO: 21509 - protein, 2095 aa, synthetic construct
MPAAKRVKLDGGDKKYSIGLDIGTNSVGWAVITDEYKVPSKKFKVLGNTDRHSIKKNLIGALLFDSGETAEATRLKRTARRRYTRRKNRICYLQEIFSNEMAKVDDSFFHRLEESFLVEEDKKHERHPIFGNIVDEVAYHEKYPTIYHLRKKLVDSTDKADLRLIYLALAHMIKFRGHFLIEGDLNPDNSDVDKLFIQLVQTYNQLFEENPINASGVDAKAILSARLSKSRRLENLIAQLPGEKKNGLFGNLIALSLGLTPNFKSNFDLAEDAKLQLSKDTYDDDLDNLLAQIGDQYADLFLAAKNLSDAILLSDILRVNTEITKAPLSASMIKRYDEHHQDLTLLKALVRQQLPEKYKEIFFDQSKNGYAGYIDGGASQEEFYKFIKPILEKMDGTEELLVKLNREDLLRKQRTFDNGSIPHQIHLGELHAILRRQEDFYPFLKDNREKIEKILTFRIPYYVGPLARGNSRFAWMTRKSEETITPWNFEEVVDKGASAQSFIERMTNFDKNLPNEKVLPKHSLLYEYFTVYNELTKVKYVTEGMRKPAFLSGEQKKAIVDLLFKTNRKVTVKQLKEDYFKKIECFDSVEISGVEDRFNASLGTYHDLLKIIKDKDFLDNEENEDILEDIVLTLTLFEDREMIEERLKTYAHLFDDKVMKQLKRRRYTGWGRLSRKLINGIRDKQSGKTILDFLKSDGFANRNFMQLIHDDSLTFKEDIQKAQVSGQGDSLHEHIANLAGSPAIKKGILQTVKVVDELVKVMGRHKPENIVIEMARENQTTQKGQKNSRERMKRIEEGIKELGSQILKEHPVENTQLQNEKLYLYYLQNGRDMYVDQELDINRLSDYDVDHIVPQSFLKDDSIDNKVLTRSDKARGKSDNVPSEEVVKKMKNYWRQLLNAKLITQRKFDNLTKAERGGLSELDKAGFIKRQLVETRQITKHVAQILDSRMNTKYDENDKLIREVKVITLKSKLVSDFRKDFQFYKVREINNYHHAHDAYLNAVVGTALIKKYPKLESEFVYGDYKVYDVRKMIAKSEQEIGKATAKYFFYSNIMNFFKTEITLANGEIRKRPLIETNGETGEIVWDKGRDFATVRKVLSMPQVNIVKKTEVQTGGFSKESILPKRNSDKLIARKKDWDPKKYGGFDSPTVAYSVLVVAKVEKGKSKKLKSVKELLGITIMERSSFEKNPIDFLEAKGYKEVKKDLIIKLPKYSLFELENGRKRMLASAGELQKGNELALPSKYVNFLYLASHYEKLKGSPEDNEQKQLFVEQHKHYLDEIIEQISEFSKRVILADANLDKVLSAYNKHRDKPIREQAENIIHLFTLTNLGAPAAFKYFDTTIDRKRYTSTKEVLDATLIHQSITGLYETRIDLSQLGGDGGGSSGSSGSSGSSGSSGSSGGLDDEYRLYSPLVKPDQNIQFWLEQFPQAWAETAGMGLAKQVPPQVIQLKASATPVSVRQYPLSKEAQEGIRPHVQRLIQQGILVPVQSPWNTPLLPVRKPGTNDYRPVQDLREVNKRVQDIHPTVPNPYNLLCALPPQRSWYTVLDLKDAFFCLRLHPTSQPLFAFEWRDPGTGRTGQLTWTRLPQGFKNSPTIFNEALHRDLANFRIQHPQVTLLQYVDDLLLAGATKQDCLEGTKALLLELSDLGYRASAKKAQICRREVTYLGYSLRDGQRWLTEARKKTVVQIPAPTTAKQVREFLGKAGFCRLFIPGFATLAAPLYPLTKPKGEFSWAPEHQKAFDAIKKALLSAPALALPDVTKPFTLYVDERKGVARGVLTQTLGPWRRPVAYLSKKLDPVASGWPVCLKAIAAVAILVKDADKLTLGQNITVIAPHALENIVRQPPDRWMTNARMTHYQSLLLTERVTFAPPAALNPATLLPEETDEPVTHDCHQLLIEETGVRKDLTDIPLTGEVLTWFTDGSSYVVEGKRMAGAAVVDGTRTIWASSLPEGTSAQKAELMALTQALRLAEGKSINIYTDSRYAFATAHVHGAIYKQRGWLTSAGREIKNKEEILSLLEALHLPKRLAIIHCPGHQKAKDPISRGNQMADRVAKQAAQGVNLLPAGKRTADGSEFEKRTADGSEFESPKKKAKVE

SEQ ID NO: 21510 - protein, 2097 aa, synthetic construct; identical to SEQ ID NO: 46

SEQ ID NO: 21511 - protein, 2092 aa, synthetic construct; identical to SEQ ID NO: 51

SEQ ID NO: 21512 - protein, 2088 aa, synthetic construct
MPAAKRVKLDGGDKKYSIGLDIGTNSVGWAVITDEYKVPSKKFKVLGNTDRHSIKKNLIGALLFDSGETAEATRLKRTARRRYTRRKNRICYLQEIFSNEMAKVDDSFFHRLEESFLVEEDKKHERHPIFGNIVDEVAYHEKYPTIYHLRKKLVDSTDKADLRLIYLALAHMIKFRGHFLIEGDLNPDNSDVDKLFIQLVQTYNQLFEENPINASGVDAKAILSARLSKSRRLENLIAQLPGEKKNGLFGNLIALSLGLTPNFKSNFDLAEDAKLQLSKDTYDDDLDNLLAQIGDQYADLFLAAKNLSDAILLSDILRVNTEITKAPLSASMIKRYDEHHQDLTLLKALVRQQLPEKYKEIFFDQSKNGYAGYIDGGASQEEFYKFIKPILEKMDGTEELLVKLNREDLLRKQRTFDNGSIPHQIHLGELHAILRRQEDFYPFLKDNREKIEKILTFRIPYYVGPLARGNSRFAWMTRKSEETITPWNFEEVVDKGASAQSFIERMTNFDKNLPNEKVLPKHSLLYEYFTVYNELTKVKYVTEGMRKPAFLSGEQKKAIVDLLFKTNRKVTVKQLKEDYFKKIECFDSVEISGVEDRFNASLGTYHDLLKIIKDKDFLDNEENEDILEDIVLTLTLFEDREMIEERLKTYAHLFDDKVMKQLKRRRYTGWGRLSRKLINGIRDKQSGKTILDFLKSDGFANRNFMQLIHDDSLTFKEDIQKAQVSGQGDSLHEHIANLAGSPAIKKGILQTVKVVDELVKVMGRHKPENIVIEMARENQTTQKGQKNSRERMKRIEEGIKELGSQILKEHPVENTQLQNEKLYLYYLQNGRDMYVDQELDINRLSDYDVDHIVPQSFLKDDSIDNKVLTRSDKARGKSDNVPSEEVVKKMKNYWRQLLNAKLITQRKFDNLTKAERGGLSELDKAGFIKRQLVETRQITKHVAQILDSRMNTKYDENDKLIREVKVITLKSKLVSDFRKDFQFYKVREINNYHHAHDAYLNAVVGTALIKKYPKLESEFVYGDYKVYDVRKMIAKSEQEIGKATAKYFFYSNIMNFFKTEITLANGEIRKRPLIETNGETGEIVWDKGRDFATVRKVLSMPQVNIVKKTEVQTGGFSKESILPKRNSDKLIARKKDWDPKKYGGFDSPTVAYSVLVVAKVEKGKSKKLKSVKELLGITIMERSSFEKNPIDFLEAKGYKEVKKDLIIKLPKYSLFELENGRKRMLASAGELQKGNELALPSKYVNFLYLASHYEKLKGSPEDNEQKQLFVEQHKHYLDEIIEQISEFSKRVILADANLDKVLSAYNKHRDKPIREQAENIIHLFTLTNLGAPAAFKYFDTTIDRKRYTSTKEVLDATLIHQSITGLYETRIDLSQLGGDGGPAPGGSEAAAKGGLDDEYRLYSPLVKPDQNIQFWLEQFPQAWAETAGMGLAKQVPPQVIQLKASATPVSVRQYPLSKEAQEGIRPHVQRLIQQGILVPVQSPWNTPLLPVRKPGTNDYRPVQDLREVNKRVQDIHPTVPNPYNLLCALPPQRSWYTVLDLKDAFFCLRLHPTSQPLFAFEWRDPGTGRTGQLTWTRLPQGFKNSPTIFNEALHRDLANFRIQHPQVTLLQYVDDLLLAGATKQDCLEGTKALLLELSDLGYRASAKKAQICRREVTYLGYSLRDGQRWLTEARKKTVVQIPAPTTAKQVREFLGKAGFCRLFIPGFATLAAPLYPLTKPKGEFSWAPEHQKAFDAIKKALLSAPALALPDVTKPFTLYVDERKGVARGVLTQTLGPWRRPVAYLSKKLDPVASGWPVCLKAIAAVAILVKDADKLTLGQNITVIAPHALENIVRQPPDRWMTNARMTHYQSLLLTERVTFAPPAALNPATLLPEETDEPVTHDCHQLLIEETGVRKDLTDIPLTGEVLTWFTDGSSYVVEGKRMAGAAVVDGTRTIWASSLPEGTSAQKAELMALTQALRLAEGKSINIYTDSRYAFATAHVHGAIYKQRGWLTSAGREIKNKEEILSLLEALHLPKRLAIIHCPGHQKAKDPISRGNQMADRVAKQAAQGVNLLPAGKRTADGSEFEKRTADGSEFESPKKKAKVE

SEQ ID NO: 21513 - protein, 2082 aa, synthetic construct; identical to SEQ ID NO: 70

SEQ ID NO: 21514 - protein, 2085 aa, synthetic construct; identical to SEQ ID NO: 48

SEQ ID NO: 21515 - protein, 2086 aa, synthetic construct
MPAAKRVKLDGGDKKYSIGLDIGTNSVGWAVITDEYKVPSKKFKVLGNTDRHSIKKNLIGALLFDSGETAEATRLKRTARRRYTRRKNRICYLQEIFSNEMAKVDDSFFHRLEESFLVEEDKKHERHPIFGNIVDEVAYHEKYPTIYHLRKKLVDSTDKADLRLIYLALAHMIKFRGHFLIEGDLNPDNSDVDKLFIQLVQTYNQLFEENPINASGVDAKAILSARLSKSRRLENLIAQLPGEKKNGLFGNLIALSLGLTPNFKSNFDLAEDAKLQLSKDTYDDDLDNLLAQIGDQYADLFLAAKNLSDAILLSDILRVNTEITKAPLSASMIKRYDEHHQDLTLLKALVRQQLPEKYKEIFFDQSKNGYAGYIDGGASQEEFYKFIKPILEKMDGTEELLVKLNREDLLRKQRTFDNGSIPHQIHLGELHAILRRQEDFYPFLKDNREKIEKILTFRIPYYVGPLARGNSRFAWMTRKSEETITPWNFEEVVDKGASAQSFIERMTNFDKNLPNEKVLPKHSLLYEYFTVYNELTKVKYVTEGMRKPAFLSGEQKKAIVDLLFKTNRKVTVKQLKEDYFKKIECFDSVEISGVEDRFNASLGTYHDLLKIIKDKDFLDNEENEDILEDIVLTLTLFEDREMIEERLKTYAHLFDDKVMKQLKRRRYTGWGRLSRKLINGIRDKQSGKTILDFLKSDGFANRNFMQLIHDDSLTFKEDIQKAQVSGQGDSLHEHIANLAGSPAIKKGILQTVKVVDELVKVMGRHKPENIVIEMARENQTTQKGQKNSRERMKRIEEGIKELGSQILKEHPVENTQLQNEKLYLYYLQNGRDMYVDQELDINRLSDYDVDHIVPQSFLKDDSIDNKVLTRSDKARGKSDNVPSEEVVKKMKNYWRQLLNAKLITQRKFDNLTKAERGGLSELDKAGFIKRQLVETRQITKHVAQILDSRMNTKYDENDKLIREVKVITLKSKLVSDFRKDFQFYKVREINNYHHAHDAYLNAVVGTALIKKYPKLESEFVYGDYKVYDVRKMIAKSEQEIGKATAKYFFYSNIMNFFKTEITLANGEIRKRPLIETNGETGEIVWDKGRDFATVRKVLSMPQVNIVKKTEVQTGGFSKESILPKRNSDKLIARKKDWDPKKYGGFDSPTVAYSVLVVAKVEKGKSKKLKSVKELLGITIMERSSFEKNPIDFLEAKGYKEVKKDLIIKLPKYSLFELENGRKRMLASAGELQKGNELALPSKYVNFLYLASHYEKLKGSPEDNEQKQLFVEQHKHYLDEIIEQISEFSKRVILADANLDKVLSAYNKHRDKPIREQAENIIHLFTLTNLGAPAAFKYFDTTIDRKRYTSTKEVLDATLIHQSITGLYETRIDLSQLGGDGGGGGPAPGSSGGLDDEYRLYSPLVKPDQNIQFWLEQFPQAWAETAGMGLAKQVPPQVIQLKASATPVSVRQYPLSKEAQEGIRPHVQRLIQQGILVPVQSPWNTPLLPVRKPGTNDYRPVQDLREVNKRVQDIHPTVPNPYNLLCALPPQRSWYTVLDLKDAFFCLRLHPTSQPLFAFEWRDPGTGRTGQLTWTRLPQGFKNSPTIFNEALHRDLANFRIQHPQVTLLQYVDDLLLAGATKQDCLEGTKALLLELSDLGYRASAKKAQICRREVTYLGYSLRDGQRWLTEARKKTVVQIPAPTTAKQVREFLGKAGFCRLFIPGFATLAAPLYPLTKPKGEFSWAPEHQKAFDAIKKALLSAPALALPDVTKPFTLYVDERKGVARGVLTQTLGPWRRPVAYLSKKLDPVASGWPVCLKAIAAVAILVKDADKLTLGQNITVIAPHALENIVRQPPDRWMTNARMTHYQSLLLTERVTFAPPAALNPATLLPEETDEPVTHDCHQLLIEETGVRKDLTDIPLTGEVLTWFTDGSSYVVEGKRMAGAAVVDGTRTIWASSLPEGTSAQKAELMALTQALRLAEGKSINIYTDSRYAFATAHVHGAIYKQRGWLTSAGREIKNKEEILSLLEALHLPKRLAIIHCPGHQKAKDPISRGNQMADRVAKQAAQGVNLLPAGKRTADGSEFEKRTADGSEFESPKKKAKVE

SEQ ID NO: 21516 - protein, 2085 aa, synthetic construct
MPAAKRVKLDGGDKKYSIGLDIGTNSVGWAVITDEYKVPSKKFKVLGNTDRHSIKKNLIGALLFDSGETAEATRLKRTARRRYTRRKNRICYLQEIFSNEMAKVDDSFFHRLEESFLVEEDKKHERHPIFGNIVDEVAYHEKYPTIYHLRKKLVDSTDKADLRLIYLALAHMIKFRGHFLIEGDLNPDNSDVDKLFIQLVQTYNQLFEENPINASGVDAKAILSARLSKSRRLENLIAQLPGEKKNGLFGNLIALSLGLTPNFKSNFDLAEDAKLQLSKDTYDDDLDNLLAQIGDQYADLFLAAKNLSDAILLSDILRVNTEITKAPLSASMIKRYDEHHQDLTLLKALVRQQLPEKYKEIFFDQSKNGYAGYIDGGASQEEFYKFIKPILEKMDGTEELLVKLNREDLLRKQRTFDNGSIPHQIHLGELHAILRRQEDFYPFLKDNREKIEKILTFRIPYYVGPLARGNSRFAWMTRKSEETITPWNFEEVVDKGASAQSFIERMTNFDKNLPNEKVLPKHSLLYEYFTVYNELTKVKYVTEGMRKPAFLSGEQKKAIVDLLFKTNRKVTVKQLKEDYFKKIECFDSVEISGVEDRFNASLGTYHDLLKIIKDKDFLDNEENEDILEDIVLTLTLFEDREMIEERLKTYAHLFDDKVMKQLKRRRYTGWGRLSRKLINGIRDKQSGKTILDFLKSDGFANRNFMQLIHDDSLTFKEDIQKAQVSGQGDSLHEHIANLAGSPAIKKGILQTVKVVDELVKVMGRHKPENIVIEMARENQTTQKGQKNSRERMKRIEEGIKELGSQILKEHPVENTQLQNEKLYLYYLQNGRDMYVDQELDINRLSDYDVDHIVPQSFLKDDSIDNKVLTRSDKARGKSDNVPSEEVVKKMKNYWRQLLNAKLITQRKFDNLTKAERGGLSELDKAGFIKRQLVETRQITKHVAQILDSRMNTKYDENDKLIREVKVITLKSKLVSDFRKDFQFYKVREINNYHHAHDAYLNAVVGTALIKKYPKLESEFVYGDYKVYDVRKMIAKSEQEIGKATAKYFFYSNIMNFFKTEITLANGEIRKRPLIETNGETGEIVWDKGRDFATVRKVLSMPQVNIVKKTEVQTGGFSKESILPKRNSDKLIARKKDWDPKKYGGFDSPTVAYSVLVVAKVEKGKSKKLKSVKELLGITIMERSSFEKNPIDFLEAKGYKEVKKDLIIKLPKYSLFELENGRKRMLASAGELQKGNELALPSKYVNFLYLASHYEKLKGSPEDNEQKQLFVEQHKHYLDEIIEQISEFSKRVILADANLDKVLSAYNKHRDKPIREQAENIIHLFTLTNLGAPAAFKYFDTTIDRKRYTSTKEVLDATLIHQSITGLYETRIDLSQLGGDGGEAAAKGGSGGLDDEYRLYSPLVKPDQNIQFWLEQFPQAWAETAGMGLAKQVPPQVIQLKASATPVSVRQYPLSKEAQEGIRPHVQRLIQQGILVPVQSPWNTPLLPVRKPGTNDYRPVQDLREVNKRVQDIHPTVPNPYNLLCALPPQRSWYTVLDLKDAFFCLRLHPTSQPLFAFEWRDPGTGRTGQLTWTRLPQGFKNSPTIFNEALHRDLANFRIQHPQVTLLQYVDDLLLAGATKQDCLEGTKALLLELSDLGYRASAKKAQICRREVTYLGYSLRDGQRWLTEARKKTVVQIPAPTTAKQVREFLGKAGFCRLFIPGFATLAAPLYPLTKPKGEFSWAPEHQKAFDAIKKALLSAPALALPDVTKPFTLYVDERKGVARGVLTQTLGPWRRPVAYLSKKLDPVASGWPVCLKAIAAVAILVKDADKLTLGQNITVIAPHALENIVRQPPDRWMTNARMTHYQSLLLTERVTFAPPAALNPATLLPEETDEPVTHDCHQLLIEETGVRKDLTDIPLTGEVLTWFTDGSSYVVEGKRMAGAAVVDGTRTIWASSLPEGTSAQKAELMALTQALRLAEGKSINIYTDSRYAFATAHVHGAIYKQRGWLTSAGREIKNKEEILSLLEALHLPKRLAIIHCPGHQKAKDPISRGNQMADRVAKQAAQGVNLLPAGKRTADGSEFEKRTADGSEFESPKKKAKVE

SEQ ID NO: 21517 - protein, 2083 aa, synthetic construct
MPAAKRVKLDGGDKKYSIGLDIGTNSVGWAVITDEYKVPSKKFKVLGNTDRHSIKKNLIGALLFDSGETAEATRLKRTARRRYTRRKNRICYLQEIFSNEMAKVDDSFFHRLEESFLVEEDKKHERHPIFGNIVDEVAYHEKYPTIYHLRKKLVDSTDKADLRLIYLALAHMIKFRGHFLIEGDLNPDNSDVDKLFIQLVQTYNQLFEENPINASGVDAKAILSARLSKSRRLENLIAQLPGEKKNGLFGNLIALSLGLTPNFKSNFDLAEDAKLQLSKDTYDDDLDNLLAQIGDQYADLFLAAKNLSDAILLSDILRVNTEITKAPLSASMIKRYDEHHQDLTLLKALVRQQLPEKYKEIFFDQSKNGYAGYIDGGASQEEFYKFIKPILEKMDGTEELLVKLNREDLLRKQRTFDNGSIPHQIHLGELHAILRRQEDFYPFLKDNREKIEKILTFRIPYYVGPLARGNSRFAWMTRKSEETITPWNFEEVVDKGASAQSFIERMTNFDKNLPNEKVLPKHSLLYEYFTVYNELTKVKYVTEGMRKPAFLSGEQKKAIVDLLFKTNRKVTVKQLKEDYFKKIECFDSVEISGVEDRFNASLGTYHDLLKIIKDKDFLDNEENEDILEDIVLTLTLFEDREMIEERLKTYAHLFDDKVMKQLKRRRYTGWGRLSRKLINGIRDKQSGKTILDFLKSDGFANRNFMQLIHDDSLTFKEDIQKAQVSGQGDSLHEHIANLAGSPAIKKGILQTVKVVDELVKVMGRHKPENIVIEMARENQTTQKGQKNSRERMKRIEEGIKELGSQILKEHPVENTQLQNEKLYLYYLQNGRDMYVDQELDINRLSDYDVDHIVPQSFLKDDSIDNKVLTRSDKARGKSDNVPSEEVVKKMKNYWRQLLNAKLITQRKFDNLTKAERGGLSELDKAGFIKRQLVETRQITKHVAQILDSRMNTKYDENDKLIREVKVITLKSKLVSDFRKDFQFYKVREINNYHHAHDAYLNAVVGTALIKKYPKLESEFVYGDYKVYDVRKMIAKSEQEIGKATAKYFFYSNIMNFFKTEITLANGEIRKRPLIETNGETGEIVWDKGRDFATVRKVLSMPQVNIVKKTEVQTGGFSKESILPKRNSDKLIARKKDWDPKKYGGFDSPTVAYSVLVVAKVEKGKSKKLKSVKELLGITIMERSSFEKNPIDFLEAKGYKEVKKDLIIKLPKYSLFELENGRKRMLASAGELQKGNELALPSKYVNFLYLASHYEKLKGSPEDNEQKQLFVEQHKHYLDEIIEQISEFSKRVILADANLDKVLSAYNKHRDKPIREQAENIIHLFTLTNLGAPAAFKYFDTTIDRKRYTSTKEVLDATLIHQSITGLYETRIDLSQLGGDGGGGSGGGGGLDDEYRLYSPLVKPDQNIQFWLEQFPQAWAETAGMGLAKQVPPQVIQLKASATPVSVRQYPLSKEAQEGIRPHVQRLIQQGILVPVQSPWNTPLLPVRKPGTNDYRPVQDLREVNKRVQDIHPTVPNPYNLLCALPPQRSWYTVLDLKDAFFCLRLHPTSQPLFAFEWRDPGTGRTGQLTWTRLPQGFKNSPTIFNEALHRDLANFRIQHPQVTLLQYVDDLLLAGATKQDCLEGTKALLLELSDLGYRASAKKAQICRREVTYLGYSLRDGQRWLTEARKKTVVQIPAPTTAKQVREFLGKAGFCRLFIPGFATLAAPLYPLTKPKGEFSWAPEHQKAFDAIKKALLSAPALALPDVTKPFTLYVDERKGVARGVLTQTLGPWRRPVAYLSKKLDPVASGWPVCLKAIAAVAILVKDADKLTLGQNITVIAPHALENIVRQPPDRWMTNARMTHYQSLLLTERVTFAPPAALNPATLLPEETDEPVTHDCHQLLIEETGVRKDLTDIPLTGEVLTWFTDGSSYVVEGKRMAGAAVVDGTRTIWASSLPEGTSAQKAELMALTQALRLAEGKSINIYTDSRYAFATAHVHGAIYKQRGWLTSAGREIKNKEEILSLLEALHLPKRLAIIHCPGHQKAKDPISRGNQMADRVAKQAAQGVNLLPAGKRTADGSEFEKRTADGSEFESPKKKAKVE

SEQ ID NO: 21518 - protein, 2083 aa, synthetic construct; identical to SEQ ID NO: 47

SEQ ID NO: 21519 - protein, 2088 aa, synthetic construct
MPAAKRVKLDGGDKKYSIGLDIGTNSVGWAVITDEYKVPSKKFKVLGNTDRHSIKKNLIGALLFDSGETAEATRLKRTARRRYTRRKNRICYLQEIFSNEMAKVDDSFFHRLEESFLVEEDKKHERHPIFGNIVDEVAYHEKYPTIYHLRKKLVDSTDKADLRLIYLALAHMIKFRGHFLIEGDLNPDNSDVDKLFIQLVQTYNQLFEENPINASGVDAKAILSARLSKSRRLENLIAQLPGEKKNGLFGNLIALSLGLTPNFKSNFDLAEDAKLQLSKDTYDDDLDNLLAQIGDQYADLFLAAKNLSDAILLSDILRVNTEITKAPLSASMIKRYDEHHQDLTLLKALVRQQLPEKYKEIFFDQSKNGYAGYIDGGASQEEFYKFIKPILEKMDGTEELLVKLNREDLLRKQRTFDNGSIPHQIHLGELHAILRRQEDFYPFLKDNREKIEKILTFRIPYYVGPLARGNSRFAWMTRKSEETITPWNFEEVVDKGASAQSFIERMTNFDKNLPNEKVLPKHSLLYEYFTVYNELTKVKYVTEGMRKPAFLSGEQKKAIVDLLFKTNRKVTVKQLKEDYFKKIECFDSVEISGVEDRFNASLGTYHDLLKIIKDKDFLDNEENEDILEDIVLTLTLFEDREMIEERLKTYAHLFDDKVMKQLKRRRYTGWGRLSRKLINGIRDKQSGKTILDFLKSDGFANRNFMQLIHDDSLTFKEDIQKAQVSGQGDSLHEHIANLAGSPAIKKGILQTVKVVDELVKVMGRHKPENIVIEMARENQTTQKGQKNSRERMKRIEEGIKELGSQILKEHPVENTQLQNEKLYLYYLQNGRDMYVDQELDINRLSDYDVDHIVPQSFLKDDSIDNKVLTRSDKARGKSDNVPSEEVVKKMKNYWRQLLNAKLITQRKFDNLTKAERGGLSELDKAGFIKRQLVETRQITKHVAQILDSRMNTKYDENDKLIREVKVITLKSKLVSDFRKDFQFYKVREINNYHHAHDAYLNAVVGTALIKKYPKLESEFVYGDYKVYDVRKMIAKSEQEIGKATAKYFFYSNIMNFFKTEITLANGEIRKRPLIETNGETGEIVWDKGRDFATVRKVLSMPQVNIVKKTEVQTGGFSKESILPKRNSDKLIARKKDWDPKKYGGFDSPTVAYSVLVVAKVEKGKSKKLKSVKELLGITIMERSSFEKNPIDFLEAKGYKEVKKDLIIKLPKYSLFELENGRKRMLASAGELQKGNELALPSKYVNFLYLASHYEKLKGSPEDNEQKQLFVEQHKHYLDEIIEQISEFSKRVILADANLDKVLSAYNKHRDKPIREQAENIIHLFTLTNLGAPAAFKYFDTTIDRKRYTSTKEVLDATLIHQSITGLYETRIDLSQLGGDGGEAAAKPAPGSSGGLDDEYRLYSPLVKPDQNIQFWLEQFPQAWAETAGMGLAKQVPPQVIQLKASATPVSVRQYPLSKEAQEGIRPHVQRLIQQGILVPVQSPWNTPLLPVRKPGTNDYRPVQDLREVNKRVQDIHPTVPNPYNLLCALPPQRSWYTVLDLKDAFFCLRLHPTSQPLFAFEWRDPGTGRTGQLTWTRLPQGFKNSPTIFNEALHRDLANFRIQHPQVTLLQYVDDLLLAGATKQDCLEGTKALLLELSDLGYRASAKKAQICRREVTYLGYSLRDGQRWLTEARKKTVVQIPAPTTAKQVREFLGKAGFCRLFIPGFATLAAPLYPLTKPKGEFSWAPEHQKAFDAIKKALLSAPALALPDVTKPFTLYVDERKGVARGVLTQTLGPWRRPVAYLSKKLDPVASGWPVCLKAIAAVAILVKDADKLTLGQNITVIAPHALENIVRQPPDRWMTNARMTHYQSLLLTERVTFAPPAALNPATLLPEETDEPVTHDCHQLLIEETGVRKDLTDIPLTGEVLTWFTDGSSYVVEGKRMAGAAVVDGTRTIWASSLPEGTSAQKAELMALTQALRLAEGKSINIYTDSRYAFATAHVHGAIYKQRGWLTSAGREIKNKEEILSLLEALHLPKRLAIIHCPGHQKAKDPISRGNQMADRVAKQAAQGVNLLPAGKRTADGSEFEKRTADGSEFESPKKKAKVE

SEQ ID NO: 21520 - protein, 2088 aa, synthetic construct
MPAAKRVKLDGGDKKYSIGLDIGTNSVGWAVITDEYKVPSKKFKVLGNTDRHSIKKNLIGALLFDSGETAEATRLKRTARRRYTRRKNRICYLQEIFSNEMAKVDDSFFHRLEESFLVEEDKKHERHPIFGNIVDEVAYHEKYPTIYHLRKKLVDSTDKADLRLIYLALAHMIKFRGHFLIEGDLNPDNSDVDKLFIQLVQTYNQLFEENPINASGVDAKAILSARLSKSRRLENLIAQLPGEKKNGLFGNLIALSLGLTPNFKSNFDLAEDAKLQLSKDTYDDDLDNLLAQIGDQYADLFLAAKNLSDAILLSDILRVNTEITKAPLSASMIKRYDEHHQDLTLLKALVRQQLPEKYKEIFFDQSKNGYAGYIDGGASQEEFYKFIKPILEKMDGTEELLVKLNREDLLRKQRTFDNGSIPHQIHLGELHAILRRQEDFYPFLKDNREKIEKILTFRIPYYVGPLARGNSRFAWMTRKSEETITPWNFEEVVDKGASAQSFIERMTNFDKNLPNEKVLPKHSLLYEYFTVYNELTKVKYVTEGMRKPAFLSGEQKKAIVDLLFKTNRKVTVKQLKEDYFKKIECFDSVEISGVEDRFNASLGTYHDLLKIIKDKDFLDNEENEDILEDIVLTLTLFEDREMIEERLKTYAHLFDDKVMKQLKRRRYTGWGRLSRKLINGIRDKQSGKTILDFLKSDGFANRNFMQLIHDDSLTFKEDIQKAQVSGQGDSLHEHIANLAGSPAIKKGILQTVKVVDELVKVMGRHKPENIVIEMARENQTTQKGQKNSRERMKRIEEGIKELGSQILKEHPVENTQLQNEKLYLYYLQNGRDMYVDQELDINRLSDYDVDHIVPQSFLKDDSIDNKVLTRSDKARGKSDNVPSEEVVKKMKNYWRQLLNAKLITQRKFDNLTKAERGGLSELDKAGFIKRQLVETRQITKHVAQILDSRMNTKYDENDKLIREVKVITLKSKLVSDFRKDFQFYKVREINNYHHAHDAYLNAVVGTALIKKYPKLESEFVYGDYKVYDVRKMIAKSEQEIGKATAKYFFYSNIMNFFKTEITLANGEIRKRPLIETNGETGEIVWDKGRDFATVRKVLSMPQVNIVKKTEVQTGGFSKESILPKRNSDKLIARKKDWDPKKYGGFDSPTVAYSVLVVAKVEKGKSKKLKSVKELLGITIMERSSFEKNPIDFLEAKGYKEVKKDLIIKLPKYSLFELENGRKRMLASAGELQKGNELALPSKYVNFLYLASHYEKLKGSPEDNEQKQLFVEQHKHYLDEIIEQISEFSKRVILADANLDKVLSAYNKHRDKPIREQAENIIHLFTLTNLGAPAAFKYFDTTIDRKRYTSTKEVLDATLIHQSITGLYETRIDLSQLGGDGGPAPGSSEAAAKGGLDDEYRLYSPLVKPDQNIQFWLEQFPQAWAETAGMGLAKQVPPQVIQLKASATPVSVRQYPLSKEAQEGIRPHVQRLIQQGILVPVQSPWNTPLLPVRKPGTNDYRPVQDLREVNKRVQDIHPTVPNPYNLLCALPPQRSWYTVLDLKDAFFCLRLHPTSQPLFAFEWRDPGTGRTGQLTWTRLPQGFKNSPTIFNEALHRDLANFRIQHPQVTLLQYVDDLLLAGATKQDCLEGTKALLLELSDLGYRASAKKAQICRREVTYLGYSLRDGQRWLTEARKKTVVQIPAPTTAKQVREFLGKAGFCRLFIPGFATLAAPLYPLTKPKGEFSWAPEHQKAFDAIKKALLSAPALALPDVTKPFTLYVDERKGVARGVLTQTLGPWRRPVAYLSKKLDPVASGWPVCLKAIAAVAILVKDADKLTLGQNITVIAPHALENIVRQPPDRWMTNARMTHYQSLLLTERVTFAPPAALNPATLLPEETDEPVTHDCHQLLIEETGVRKDLTDIPLTGEVLTWFTDGSSYVVEGKRMAGAAVVDGTRTIWASSLPEGTSAQKAELMALTQALRLAEGKSINIYTDSRYAFATAHVHGAIYKQRGWLTSAGREIKNKEEILSLLEALHLPKRLAIIHCPGHQKAKDPISRGNQMADRVAKQAAQGVNLLPAGKRTADGSEFEKRTADGSEFESPKKKAKVE

SEQ ID NO: 21521 - protein, 2086 aa, synthetic construct
MPAAKRVKLDGGDKKYSIGLDIGTNSVGWAVITDEYKVPSKKFKVLGNTDRHSIKKNLIGALLFDSGETAEATRLKRTARRRYTRRKNRICYLQEIFSNEMAKVDDSFFHRLEESFLVEEDKKHERHPIFGNIVDEVAYHEKYPTIYHLRKKLVDSTDKADLRLIYLALAHMIKFRGHFLIEGDLNPDNSDVDKLFIQLVQTYNQLFEENPINASGVDAKAILSARLSKSRRLENLIAQLPGEKKNGLFGNLIALSLGLTPNFKSNFDLAEDAKLQLSKDTYDDDLDNLLAQIGDQYADLFLAAKNLSDAILLSDILRVNTEITKAPLSASMIKRYDEHHQDLTLLKALVRQQLPEKYKEIFFDQSKNGYAGYIDGGASQEEFYKFIKPILEKMDGTEELLVKLNREDLLRKQRTFDNGSIPHQIHLGELHAILRRQEDFYPFLKDNREKIEKILTFRIPYYVGPLARGNSRFAWMTRKSEETITPWNFEEVVDKGASAQSFIERMTNFDKNLPNEKVLPKHSLLYEYFTVYNELTKVKYVTEGMRKPAFLSGEQKKAIVDLLFKTNRKVTVKQLKEDYFKKIECFDSVEISGVEDRFNASLGTYHDLLKIIKDKDFLDNEENEDILEDIVLTLTLFEDREMIEERLKTYAHLFDDKVMKQLKRRRYTGWGRLSRKLINGIRDKQSGKTILDFLKSDGFANRNFMQLIHDDSLTFKEDIQKAQVSGQGDSLHEHIANLAGSPAIKKGILQTVKVVDELVKVMGRHKPENIVIEMARENQTTQKGQKNSRERMKRIEEGIKELGSQILKEHPVENTQLQNEKLYLYYLQNGRDMYVDQELDINRLSDYDVDHIVPQSFLKDDSIDNKVLTRSDKARGKSDNVPSEEVVKKMKNYWRQLLNAKLITQRKFDNLTKAERGGLSELDKAGFIKRQLVETRQITKHVAQILDSRMNTKYDENDKLIREVKVITLKSKLVSDFRKDFQFYKVREINNYHHAHDAYLNAVVGTALIKKYPKLESEFVYGDYKVYDVRKMIAKSEQEIGKATAKYFFYSNIMNFFKTEITLANGEIRKRPLIETNGETGEIVWDKGRDFATVRKVLSMPQVNIVKKTEVQTGGFSKESILPKRNSDKLIARKKDWDPKKYGGFDSPTVAYSVLVVAKVEKGKSKKLKSVKELLGITIMERSSFEKNPIDFLEAKGYKEVKKDLIIKLPKYSLFELENGRKRMLASAGELQKGNELALPSKYVNFLYLASHYEKLKGSPEDNEQKQLFVEQHKHYLDEIIEQISEFSKRVILADANLDKVLSAYNKHRDKPIREQAENIIHLFTLTNLGAPAAFKYFDTTIDRKRYTSTKEVLDATLIHQSITGLYETRIDLSQLGGDGGGGSGGSGGSGGLDDEYRLYSPLVKPDQNIQFWLEQFPQAWAETAGMGLAKQVPPQVIQLKASATPVSVRQYPLSKEAQEGIRPHVQRLIQQGILVPVQSPWNTPLLPVRKPGTNDYRPVQDLREVNKRVQDIHPTVPNPYNLLCALPPQRSWYTVLDLKDAFFCLRLHPTSQPLFAFEWRDPGTGRTGQLTWTRLPQGFKNSPTIFNEALHRDLANFRIQHPQVTLLQYVDDLLLAGATKQDCLEGTKALLLELSDLGYRASAKKAQICRREVTYLGYSLRDGQRWLTEARKKTVVQIPAPTTAKQVREFLGKAGFCRLFIPGFATLAAPLYPLTKPKGEFSWAPEHQKAFDAIKKALLSAPALALPDVTKPFTLYVDERKGVARGVLTQTLGPWRRPVAYLSKKLDPVASGWPVCLKAIAAVAILVKDADKLTLGQNITVIAPHALENIVRQPPDRWMTNARMTHYQSLLLTERVTFAPPAALNPATLLPEETDEPVTHDCHQLLIEETGVRKDLTDIPLTGEVLTWFTDGSSYVVEGKRMAGAAVVDGTRTIWASSLPEGTSAQKAELMALTQALRLAEGKSINIYTDSRYAFATAHVHGAIYKQRGWLTSAGREIKNKEEILSLLEALHLPKRLAIIHCPGHQKAKDPISRGNQMADRVAKQAAQGVNLLPAGKRTADGSEFEKRTADGSEFESPKKKAKVE

SEQ ID NO: 21522 - protein, 2083 aa, synthetic construct; identical to SEQ ID NO: 78

SEQ ID NO: 21523 - protein, 2089 aa, synthetic construct; identical to SEQ ID NO: 41

SEQ ID NO: 21524 - protein, 2088 aa, synthetic construct; identical to SEQ ID NO: 65

SEQ ID NO: 21525 - protein, 2088 aa, synthetic construct; identical to SEQ ID NO: 80

SEQ ID NO: 21526 - protein, 2088 aa, synthetic construct
MPAAKRVKLDGGDKKYSIGLDIGTNSVGWAVITDEYKVPSKKFKVLGNTDRHSIKKNLIGALLFDSGETAEATRLKRTARRRYTRRKNRICYLQEIFSNEMAKVDDSFFHRLEESFLVEEDKKHERHPIFGNIVDEVAYHEKYPTIYHLRKKLVDSTDKADLRLIYLALAHMIKFRGHFLIEGDLNPDNSDVDKLFIQLVQTYNQLFEENPINASGVDAKAILSARLSKSRRLENLIAQLPGEKKNGLFGNLIALSLGLTPNFKSNFDLAEDAKLQLSKDTYDDDLDNLLAQIGDQYADLFLAAKNLSDAILLSDILRVNTEITKAPLSASMIKRYDEHHQDLTLLKALVRQQLPEKYKEIFFDQSKNGYAGYIDGGASQEEFYKFIKPILEKMDGTEELLVKLNREDLLRKQRTFDNGSIPHQIHLGELHAILRRQEDFYPFLKDNREKIEKILTFRIPYYVGPLARGNSRFAWMTRKSEETITPWNFEEVVDKGASAQSFIERMTNFDKNLPNEKVLPKHSLLYEYFTVYNELTKVKYVTEGMRKPAFLSGEQKKAIVDLLFKTNRKVTVKQLKEDYFKKIECFDSVEISGVEDRFNASLGTYHDLLKIIKDKDFLDNEENEDILEDIVLTLTLFEDREMIEERLKTYAHLFDDKVMKQLKRRRYTGWGRLSRKLINGIRDKQSGKTILDFLKSDGFANRNFMQLIHDDSLTFKEDIQKAQVSGQGDSLHEHIANLAGSPAIKKGILQTVKVVDELVKVMGRHKPENIVIEMARENQTTQKGQKNSRERMKRIEEGIKELGSQILKEHPVENTQLQNEKLYLYYLQNGRDMYVDQELDINRLSDYDVDHIVPQSFLKDDSIDNKVLTRSDKARGKSDNVPSEEVVKKMKNYWRQLLNAKLITQRKFDNLTKAERGGLSELDKAGFIKRQLVETRQITKHVAQILDSRMNTKYDENDKLIREVKVITLKSKLVSDFRKDFQFYKVREINNYHHAHDAYLNAVVGTALIKKYPKLESEFVYGDYKVYDVRKMIAKSEQEIGKATAKYFFYSNIMNFFKTEITLANGEIRKRPLIETNGETGEIVWDKGRDFATVRKVLSMPQVNIVKKTEVQTGGFSKESILPKRNSDKLIARKKDWDPKKYGGFDSPTVAYSVLVVAKVEKGKSKKLKSVKELLGITIMERSSFEKNPIDFLEAKGYKEVKKDLIIKLPKYSLFELENGRKRMLASAGELQKGNELALPSKYVNFLYLASHYEKLKGSPEDNEQKQLFVEQHKHYLDEIIEQISEFSKRVILADANLDKVLSAYNKHRDKPIREQAENIIHLFTLTNLGAPAAFKYFDTTIDRKRYTSTKEVLDATLIHQSITGLYETRIDLSQLGGDGGEAAAKGGGGGSGGLDDEYRLYSPLVKPDQNIQFWLEQFPQAWAETAGMGLAKQVPPQVIQLKASATPVSVRQYPLSKEAQEGIRPHVQRLIQQGILVPVQSPWNTPLLPVRKPGTNDYRPVQDLREVNKRVQDIHPTVPNPYNLLCALPPQRSWYTVLDLKDAFFCLRLHPTSQPLFAFEWRDPGTGRTGQLTWTRLPQGFKNSPTIFNEALHRDLANFRIQHPQVTLLQYVDDLLLAGATKQDCLEGTKALLLELSDLGYRASAKKAQICRREVTYLGYSLRDGQRWLTEARKKTVVQIPAPTTAKQVREFLGKAGFCRLFIPGFATLAAPLYPLTKPKGEFSWAPEHQKAFDAIKKALLSAPALALPDVTKPFTLYVDERKGVARGVLTQTLGPWRRPVAYLSKKLDPVASGWPVCLKAIAAVAILVKDADKLTLGQNITVIAPHALENIVRQPPDRWMTNARMTHYQSLLLTERVTFAPPAALNPATLLPEETDEPVTHDCHQLLIEETGVRKDLTDIPLTGEVLTWFTDGSSYVVEGKRMAGAAVVDGTRTIWASSLPEGTSAQKAELMALTQALRLAEGKSINIYTDSRYAFATAHVHGAIYKQRGWLTSAGREIKNKEEILSLLEALHLPKRLAIIHCPGHQKAKDPISRGNQMADRVAKQAAQGVNLLPAGKRTADGSEFEKRTADGSEFESPKKKAKVE

SEQ ID NO: 21527 - protein, 2102 aa, synthetic construct; identical to SEQ ID NO: 39

SEQ ID NO: 21528 - protein, 2085 aa, synthetic construct
MPAAKRVKLDGGDKKYSIGLDIGTNSVGWAVITDEYKVPSKKFKVLGNTDRHSIKKNLIGALLFDSGETAEATRLKRTARRRYTRRKNRICYLQEIFSNEMAKVDDSFFHRLEESFLVEEDKKHERHPIFGNIVDEVAYHEKYPTIYHLRKKLVDSTDKADLRLIYLALAHMIKFRGHFLIEGDLNPDNSDVDKLFIQLVQTYNQLFEENPINASGVDAKAILSARLSKSRRLENLIAQLPGEKKNGLFGNLIALSLGLTPNFKSNFDLAEDAKLQLSKDTYDDDLDNLLAQIGDQYADLFLAAKNLSDAILLSDILRVNTEITKAPLSASMIKRYDEHHQDLTLLKALVRQQLPEKYKEIFFDQSKNGYAGYIDGGASQEEFYKFIKPILEKMDGTEELLVKLNREDLLRKQRTFDNGSIPHQIHLGELHAILRRQEDFYPFLKDNREKIEKILTFRIPYYVGPLARGNSRFAWMTRKSEETITPWNFEEVVDKGASAQSFIERMTNFDKNLPNEKVLPKHSLLYEYFTVYNELTKVKYVTEGMRKPAFLSGEQKKAIVDLLFKTNRKVTVKQLKEDYFKKIECFDSVEISGVEDRFNASLGTYHDLLKIIKDKDFLDNEENEDILEDIVLTLTLFEDREMIEERLKTYAHLFDDKVMKQLKRRRYTGWGRLSRKLINGIRDKQSGKTILDFLKSDGFANRNFMQLIHDDSLTFKEDIQKAQVSGQGDSLHEHIANLAGSPAIKKGILQTVKVVDELVKVMGRHKPENIVIEMARENQTTQKGQKNSRERMKRIEEGIKELGSQILKEHPVENTQLQNEKLYLYYLQNGRDMYVDQELDINRLSDYDVDHIVPQSFLKDDSIDNKVLTRSDKARGKSDNVPSEEVVKKMKNYWRQLLNAKLITQRKFDNLTKAERGGLSELDKAGFIKRQLVETRQITKHVAQILDSRMNTKYDENDKLIREVKVITLKSKLVSDFRKDFQFYKVREINNYHHAHDAYLNAVVGTALIKKYPKLESEFVYGDYKVYDVRKMIAKSEQEIGKATAKYFFYSNIMNFFKTEITLANGEIRKRPLIETNGETGEIVWDKGRDFATVRKVLSMPQVNIVKKTEVQTGGFSKESILPKRNSDKLIARKKDWDPKKYGGFDSPTVAYSVLVVAKVEKGKSKKLKSVKELLGITIMERSSFEKNPIDFLEAKGYKEVKKDLIIKLPKYSLFELENGRKRMLASAGELQKGNELALPSKYVNFLYLASHYEKLKGSPEDNEQKQLFVEQHKHYLDEIIEQISEFSKRVILADANLDKVLSAYNKHRDKPIREQAENIIHLFTLTNLGAPAAFKYFDTTIDRKRYTSTKEVLDATLIHQSITGLYETRIDLSQLGGDGGEAAAKPAPGGLDDEYRLYSPLVKPDQNIQFWLEQFPQAWAETAGMGLAKQVPPQVIQLKASATPVSVRQYPLSKEAQEGIRPHVQRLIQQGILVPVQSPWNTPLLPVRKPGTNDYRPVQDLREVNKRVQDIHPTVPNPYNLLCALPPQRSWYTVLDLKDAFFCLRLHPTSQPLFAFEWRDPGTGRTGQLTWTRLPQGFKNSPTIFNEALHRDLANFRIQHPQVTLLQYVDDLLLAGATKQDCLEGTKALLLELSDLGYRASAKKAQICRREVTYLGYSLRDGQRWLTEARKKTVVQIPAPTTAKQVREFLGKAGFCRLFIPGFATLAAPLYPLTKPKGEFSWAPEHQKAFDAIKKALLSAPALALPDVTKPFTLYVDERKGVARGVLTQTLGPWRRPVAYLSKKLDPVASGWPVCLKAIAAVAILVKDADKLTLGQNITVIAPHALENIVRQPPDRWMTNARMTHYQSLLLTERVTFAPPAALNPATLLPEETDEPVTHDCHQLLIEETGVRKDLTDIPLTGEVLTWFTDGSSYVVEGKRMAGAAVVDGTRTIWASSLPEGTSAQKAELMALTQALRLAEGKSINIYTDSRYAFATAHVHGAIYKQRGWLTSAGREIKNKEEILSLLEALHLPKRLAIIHCPGHQKAKDPISRGNQMADRVAKQAAQGVNLLPAGKRTADGSEFEKRTADGSEFESPKKKAKVE

SEQ ID NO: 21529 - protein, 2092 aa, synthetic construct; identical to SEQ ID NO: 56

SEQ ID NO: 21530 - protein, 2083 aa, synthetic construct
MPAAKRVKLDGGDKKYSIGLDIGTNSVGWAVITDEYKVPSKKFKVLGNTDRHSIKKNLIGALLFDSGETAEATRLKRTARRRYTRRKNRICYLQEIFSNEMAKVDDSFFHRLEESFLVEEDKKHERHPIFGNIVDEVAYHEKYPTIYHLRKKLVDSTDKADLRLIYLALAHMIKFRGHFLIEGDLNPDNSDVDKLFIQLVQTYNQLFEENPINASGVDAKAILSARLSKSRRLENLIAQLPGEKKNGLFGNLIALSLGLTPNFKSNFDLAEDAKLQLSKDTYDDDLDNLLAQIGDQYADLFLAAKNLSDAILLSDILRVNTEITKAPLSASMIKRYDEHHQDLTLLKALVRQQLPEKYKEIFFDQSKNGYAGYIDGGASQEEFYKFIKPILEKMDGTEELLVKLNREDLLRKQRTFDNGSIPHQIHLGELHAILRRQEDFYPFLKDNREKIEKILTFRIPYYVGPLARGNSRFAWMTRKSEETITPWNFEEVVDKGASAQSFIERMTNFDKNLPNEKVLPKHSLLYEYFTVYNELTKVKYVTEGMRKPAFLSGEQKKAIVDLLFKTNRKVTVKQLKEDYFKKIECFDSVEISGVEDRFNASLGTYHDLLKIIKDKDFLDNEENEDILEDIVLTLTLFEDREMIEERLKTYAHLFDDKVMKQLKRRRYTGWGRLSRKLINGIRDKQSGKTILDFLKSDGFANRNFMQLIHDDSLTFKEDIQKAQVSGQGDSLHEHIANLAGSPAIKKGILQTVKVVDELVKVMGRHKPENIVIEMARENQTTQKGQKNSRERMKRIEEGIKELGSQILKEHPVENTQLQNEKLYLYYLQNGRDMYVDQELDINRLSDYDVDHIVPQSFLKDDSIDNKVLTRSDKARGKSDNVPSEEVVKKMKNYWRQLLNAKLITQRKFDNLTKAERGGLSELDKAGFIKRQLVETRQITKHVAQILDSRMNTKYDENDKLIREVKVITLKSKLVSDFRKDFQFYKVREINNYHHAHDAYLNAVVGTALIKKYPKLESEFVYGDYKVYDVRKMIAKSEQEIGKATAKYFFYSNIMNFFKTEITLANGEIRKRPLIETNGETGEIVWDKGRDFATVRKVLSMPQVNIVKKTEVQTGGFSKESILPKRNSDKLIARKKDWDPKKYGGFDSPTVAYSVLVVAKVEKGKSKKLKSVKELLGITIMERSSFEKNPIDFLEAKGYKEVKKDLIIKLPKYSLFELENGRKRMLASAGELQKGNELALPSKYVNFLYLASHYEKLKGSPEDNEQKQLFVEQHKHYLDEIIEQISEFSKRVILADANLDKVLSAYNKHRDKPIREQAENIIHLFTLTNLGAPAAFKYFDTTIDRKRYTSTKEVLDATLIHQSITGLYETRIDLSQLGGDGGGSSGSSGGLDDEYRLYSPLVKPDQNIQFWLEQFPQAWAETAGMGLAKQVPPQVIQLKASATPVSVRQYPLSKEAQEGIRPHVQRLIQQGILVPVQSPWNTPLLPVRKPGTNDYRPVQDLREVNKRVQDIHPTVPNPYNLLCALPPQRSWYTVLDLKDAFFCLRLHPTSQPLFAFEWRDPGTGRTGQLTWTRLPQGFKNSPTIFNEALHRDLANFRIQHPQVTLLQYVDDLLLAGATKQDCLEGTKALLLELSDLGYRASAKKAQICRREVTYLGYSLRDGQRWLTEARKKTVVQIPAPTTAKQVREFLGKAGFCRLFIPGFATLAAPLYPLTKPKGEFSWAPEHQKAFDAIKKALLSAPALALPDVTKPFTLYVDERKGVARGVLTQTLGPWRRPVAYLSKKLDPVASGWPVCLKAIAAVAILVKDADKLTLGQNITVIAPHALENIVRQPPDRWMTNARMTHYQSLLLTERVTFAPPAALNPATLLPEETDEPVTHDCHQLLIEETGVRKDLTDIPLTGEVLTWFTDGSSYVVEGKRMAGAAVVDGTRTIWASSLPEGTSAQKAELMALTQALRLAEGKSINIYTDSRYAFATAHVHGAIYKQRGWLTSAGREIKNKEEILSLLEALHLPKRLAIIHCPGHQKAKDPISRGNQMADRVAKQAAQGVNLLPAGKRTADGSEFEKRTADGSEFESPKKKAKVE

SEQ ID NO: 21531 - protein, 2089 aa, synthetic construct; identical to SEQ ID NO: 67

SEQ ID NO: 21532 - protein, 2085 aa, synthetic construct
MPAAKRVKLDGGDKKYSIGLDIGTNSVGWAVITDEYKVPSKKFKVLGNTDRHSIKKNLIGALLFDSGETAEATRLKRTARRRYTRRKNRICYLQEIFSNEMAKVDDSFFHRLEESFLVEEDKKHERHPIFGNIVDEVAYHEKYPTIYHLRKKLVDSTDKADLRLIYLALAHMIKFRGHFLIEGDLNPDNSDVDKLFIQLVQTYNQLFEENPINASGVDAKAILSARLSKSRRLENLIAQLPGEKKNGLFGNLIALSLGLTPNFKSNFDLAEDAKLQLSKDTYDDDLDNLLAQIGDQYADLFLAAKNLSDAILLSDILRVNTEITKAPLSASMIKRYDEHHQDLTLLKALVRQQLPEKYKEIFFDQSKNGYAGYIDGGASQEEFYKFIKPILEKMDGTEELLVKLNREDLLRKQRTFDNGSIPHQIHLGELHAILRRQEDFYPFLKDNREKIEKILTFRIPYYVGPLARGNSRFAWMTRKSEETITPWNFEEVVDKGASAQSFIERMTNFDKNLPNEKVLPKHSLLYEYFTVYNELTKVKYVTEGMRKPAFLSGEQKKAIVDLLFKTNRKVTVKQLKEDYFKKIECFDSVEISGVEDRFNASLGTYHDLLKIIKDKDFLDNEENEDILEDIVLTLTLFEDREMIEERLKTYAHLFDDKVMKQLKRRRYTGWGRLSRKLINGIRDKQSGKTILDFLKSDGFANRNFMQLIHDDSLTFKEDIQKAQVSGQGDSLHEHIANLAGSPAIKKGILQTVKVVDELVKVMGRHKPENIVIEMARENQTTQKGQKNSRERMKRIEEGIKELGSQILKEHPVENTQLQNEKLYLYYLQNGRDMYVDQELDINRLSDYDVDHIVPQSFLKDDSIDNKVLTRSDKARGKSDNVPSEEVVKKMKNYWRQLLNAKLITQRKFDNLTKAERGGLSELDKAGFIKRQLVETRQITKHVAQILDSRMNTKYDENDKLIREVKVITLKSKLVSDFRKDFQFYKVREINNYHHAHDAYLNAVVGTALIKKYPKLESEFVYGDYKVYDVRKMIAKSEQEIGKATAKYFFYSNIMNFFKTEITLANGEIRKRPLIETNGETGEIVWDKGRDFATVRKVLSMPQVNIVKKTEVQTGGFSKESILPKRNSDKLIARKKDWDPKKYGGFDSPTVAYSVLVVAKVEKGKSKKLKSVKELLGITIMERSSFEKNPIDFLEAKGYKEVKKDLIIKLPKYSLFELENGRKRMLASAGELQKGNELALPSKYVNFLYLASHYEKLKGSPEDNEQKQLFVEQHKHYLDEIIEQISEFSKRVILADANLDKVLSAYNKHRDKPIREQAENIIHLFTLTNLGAPAAFKYFDTTIDRKRYTSTKEVLDATLIHQSITGLYETRIDLSQLGGDGGGSSEAAAKGGLDDEYRLYSPLVKPDQNIQFWLEQFPQAWAETAGMGLAKQVPPQVIQLKASATPVSVRQYPLSKEAQEGIRPHVQRLIQQGILVPVQSPWNTPLLPVRKPGTNDYRPVQDLREVNKRVQDIHPTVPNPYNLLCALPPQRSWYTVLDLKDAFFCLRLHPTSQPLFAFEWRDPGTGRTGQLTWTRLPQGFKNSPTIFNEALHRDLANFRIQHPQVTLLQYVDDLLLAGATKQDCLEGTKALLLELSDLGYRASAKKAQICRREVTYLGYSLRDGQRWLTEARKKTVVQIPAPTTAKQVREFLGKAGFCRLFIPGFATLAAPLYPLTKPKGEFSWAPEHQKAFDAIKKALLSAPALALPDVTKPFTLYVDERKGVARGVLTQTLGPWRRPVAYLSKKLDPVASGWPVCLKAIAAVAILVKDADKLTLGQNITVIAPHALENIVRQPPDRWMTNARMTHYQSLLLTERVTFAPPAALNPATLLPEETDEPVTHDCHQLLIEETGVRKDLTDIPLTGEVLTWFTDGSSYVVEGKRMAGAAVVDGTRTIWASSLPEGTSAQKAELMALTQALRLAEGKSINIYTDSRYAFATAHVHGAIYKQRGWLTSAGREIKNKEEILSLLEALHLPKRLAIIHCPGHQKAKDPISRGNQMADRVAKQAAQGVNLLPAGKRTADGSEFEKRTADGSEFESPKKKAKVE

SEQ ID NO: 21533 - protein, 2092 aa, synthetic construct; identical to SEQ ID NO: 52

SEQ ID NO: 21534 - protein, 2088 aa, synthetic construct; identical to SEQ ID NO: 49

SEQ ID NO: 21535 - protein, 2088 aa, synthetic construct
MPAAKRVKLDGGDKKYSIGLDIGTNSVGWAVITDEYKVPSKKFKVLGNTDRHSIKKNLIGALLFDSGETAEATRLKRTARRRYTRRKNRICYLQEIFSNEMAKVDDSFFHRLEESFLVEEDKKHERHPIFGNIVDEVAYHEKYPTIYHLRKKLVDSTDKADLRLIYLALAHMIKFRGHFLIEGDLNPDNSDVDKLFIQLVQTYNQLFEENPINASGVDAKAILSARLSKSRRLENLIAQLPGEKKNGLFGNLIALSLGLTPNFKSNFDLAEDAKLQLSKDTYDDDLDNLLAQIGDQYADLFLAAKNLSDAILLSDILRVNTEITKAPLSASMIKRYDEHHQDLTLLKALVRQQLPEKYKEIFFDQSKNGYAGYIDGGASQEEFYKFIKPILEKMDGTEELLVKLNREDLLRKQRTFDNGSIPHQIHLGELHAILRRQEDFYPFLKDNREKIEKILTFRIPYYVGPLARGNSRFAWMTRKSEETITPWNFEEVVDKGASAQSFIERMTNFDKNLPNEKVLPKHSLLYEYFTVYNELTKVKYVTEGMRKPAFLSGEQKKAIVDLLFKTNRKVTVKQLKEDYFKKIECFDSVEISGVEDRFNASLGTYHDLLKIIKDKDFLDNEENEDILEDIVLTLTLFEDREMIEERLKTYAHLFDDKVMKQLKRRRYTGWGRLSRKLINGIRDKQSGKTILDFLKSDGFANRNFMQLIHDDSLTFKEDIQKAQVSGQGDSLHEHIANLAGSPAIKKGILQTVKVVDELVKVMGRHKPENIVIEMARENQTTQKGQKNSRERMKRIEEGIKELGSQILKEHPVENTQLQNEKLYLYYLQNGRDMYVDQELDINRLSDYDVDHIVPQSFLKDDSIDNKVLTRSDKARGKSDNVPSEEVVKKMKNYWRQLLNAKLITQRKFDNLTKAERGGLSELDKAGFIKRQLVETRQITKHVAQILDSRMNTKYDENDKLIREVKVITLKSKLVSDFRKDFQFYKVREINNYHHAHDAYLNAVVGTALIKKYPKLESEFVYGDYKVYDVRKMIAKSEQEIGKATAKYFFYSNIMNFFKTEITLANGEIRKRPLIETNGETGEIVWDKGRDFATVRKVLSMPQVNIVKKTEVQTGGFSKESILPKRNSDKLIARKKDWDPKKYGGFDSPTVAYSVLVVAKVEKGKSKKLKSVKELLGITIMERSSFEKNPIDFLEAKGYKEVKKDLIIKLPKYSLFELENGRKRMLASAGELQKGNELALPSKYVNFLYLASHYEKLKGSPEDNEQKQLFVEQHKHYLDEIIEQISEFSKRVILADANLDKVLSAYNKHRDKPIREQAENIIHLFTLTNLGAPAAFKYFDTTIDRKRYTSTKEVLDATLIHQSITGLYETRIDLSQLGGDGGGGGEAAAKGSSGGLDDEYRLYSPLVKPDQNIQFWLEQFPQAWAETAGMGLAKQVPPQVIQLKASATPVSVRQYPLSKEAQEGIRPHVQRLIQQGILVPVQSPWNTPLLPVRKPGTNDYRPVQDLREVNKRVQDIHPTVPNPYNLLCALPPQRSWYTVLDLKDAFFCLRLHPTSQPLFAFEWRDPGTGRTGQLTWTRLPQGFKNSPTIFNEALHRDLANFRIQHPQVTLLQYVDDLLLAGATKQDCLEGTKALLLELSDLGYRASAKKAQICRREVTYLGYSLRDGQRWLTEARKKTVVQIPAPTTAKQVREFLGKAGFCRLFIPGFATLAAPLYPLTKPKGEFSWAPEHQKAFDAIKKALLSAPALALPDVTKPFTLYVDERKGVARGVLTQTLGPWRRPVAYLSKKLDPVASGWPVCLKAIAAVAILVKDADKLTLGQNITVIAPHALENIVRQPPDRWMTNARMTHYQSLLLTERVTFAPPAALNPATLLPEETDEPVTHDCHQLLIEETGVRKDLTDIPLTGEVLTWFTDGSSYVVEGKRMAGAAVVDGTRTIWASSLPEGTSAQKAELMALTQALRLAEGKSINIYTDSRYAFATAHVHGAIYKQRGWLTSAGREIKNKEEILSLLEALHLPKRLAIIHCPGHQKAKDPISRGNQMADRVAKQAAQGVNLLPAGKRTADGSEFEKRTADGSEFESPKKKAKVE

SEQ ID NO: 21536 - protein, 2086 aa, synthetic construct
MPAAKRVKLDGGDKKYSIGLDIGTNSVGWAVITDEYKVPSKKFKVLGNTDRHSIKKNLIGALLFDSGETAEATRLKRTARRRYTRRKNRICYLQEIFSNEMAKVDDSFFHRLEESFLVEEDKKHERHPIFGNIVDEVAYHEKYPTIYHLRKKLVDSTDKADLRLIYLALAHMIKFRGHFLIEGDLNPDNSDVDKLFIQLVQTYNQLFEENPINASGVDAKAILSARLSKSRRLENLIAQLPGEKKNGLFGNLIALSLGLTPNFKSNFDLAEDAKLQLSKDTYDDDLDNLLAQIGDQYADLFLAAKNLSDAILLSDILRVNTEITKAPLSASMIKRYDEHHQDLTLLKALVRQQLPEKYKEIFFDQSKNGYAGYIDGGASQEEFYKFIKPILEKMDGTEELLVKLNREDLLRKQRTFDNGSIPHQIHLGELHAILRRQEDFYPFLKDNREKIEKILTFRIPYYVGPLARGNSRFAWMTRKSEETITPWNFEEVVDKGASAQSFIERMTNFDKNLPNEKVLPKHSLLYEYFTVYNELTKVKYVTEGMRKPAFLSGEQKKAIVDLLFKTNRKVTVKQLKEDYFKKIECFDSVEISGVEDRFNASLGTYHDLLKIIKDKDFLDNEENEDILEDIVLTLTLFEDREMIEERLKTYAHLFDDKVMKQLKRRRYTGWGRLSRKLINGIRDKQSGKTILDFLKSDGFANRNFMQLIHDDSLTFKEDIQKAQVSGQGDSLHEHIANLAGSPAIKKGILQTVKVVDELVKVMGRHKPENIVIEMARENQTTQKGQKNSRERMKRIEEGIKELGSQILKEHPVENTQLQNEKLYLYYLQNGRDMYVDQELDINRLSDYDVDHIVPQSFLKDDSIDNKVLTRSDKARGKSDNVPSEEVVKKMKNYWRQLLNAKLITQRKFDNLTKAERGGLSELDKAGFIKRQLVETRQITKHVAQILDSRMNTKYDENDKLIREVKVITLKSKLVSDFRKDFQFYKVREINNYHHAHDAYLNAVVGTALIKKYPKLESEFVYGDYKVYDVRKMIAKSEQEIGKATAKYFFYSNIMNFFKTEITLANGEIRKRPLIETNGETGEIVWDKGRDFATVRKVLSMPQVNIVKKTEVQTGGFSKESILPKRNSDKLIARKKDWDPKKYGGFDSPTVAYSVLVVAKVEKGKSKKLKSVKELLGITIMERSSFEKNPIDFLEAKGYKEVKKDLIIKLPKYSLFELENGRKRMLASAGELQKGNELALPSKYVNFLYLASHYEKLKGSPEDNEQKQLFVEQHKHYLDEIIEQISEFSKRVILADANLDKVLSAYNKHRDKPIREQAENIIHLFTLTNLGAPAAFKYFDTTIDRKRYTSTKEVLDATLIHQSITGLYETRIDLSQLGGDGGGGSGSSGGGGGLDDEYRLYSPLVKPDQNIQFWLEQFPQAWAETAGMGLAKQVPPQVIQLKASATPVSVRQYPLSKEAQEGIRPHVQRLIQQGILVPVQSPWNTPLLPVRKPGTNDYRPVQDLREVNKRVQDIHPTVPNPYNLLCALPPQRSWYTVLDLKDAFFCLRLHPTSQPLFAFEWRDPGTGRTGQLTWTRLPQGFKNSPTIFNEALHRDLANFRIQHPQVTLLQYVDDLLLAGATKQDCLEGTKALLLELSDLGYRASAKKAQICRREVTYLGYSLRDGQRWLTEARKKTVVQIPAPTTAKQVREFLGKAGFCRLFIPGFATLAAPLYPLTKPKGEFSWAPEHQKAFDAIKKALLSAPALALPDVTKPFTLYVDERKGVARGVLTQTLGPWRRPVAYLSKKLDPVASGWPVCLKAIAAVAILVKDADKLTLGQNITVIAPHALENIVRQPPDRWMTNARMTHYQSLLLTERVTFAPPAALNPATLLPEETDEPVTHDCHQLLIEETGVRKDLTDIPLTGEVLTWFTDGSSYVVEGKRMAGAAVVDGTRTIWASSLPEGTSAQKAELMALTQALRLAEGKSINIYTDSRYAFATAHVHGAIYKQRGWLTSAGREIKNKEEILSLLEALHLPKRLAIIHCPGHQKAKDPISRGNQMADRVAKQAAQGVNLLPAGKRTADGSEFEKRTADGSEFESPKKKAKVE
